United States Patent Application Publication US 2018/0126003 A1 - sequence listing, part 94

SEQ ID NO: 170682 - DNA, 6084 bp, Artificial Sequence
  derived and/or modified sequence
atgttgaagtttaagtacggcgcccgaaatcctctggacgccggcgccgctgagcctattgcaagccgagctagcaggctgaatttattttttcaagggaagccaccattcatgacacaacagcagatgtctcccttgagccgggaaggtatcctggatgcactgtttgtgctgtttgaggagtgcagccagcctgctctgatgaaaattaaacatgtgtcaaatttcgtgagaaagtattccgacactattgctgagctccaggagcttcagccaagcgctaaagactttgaggtgcgttccctcgtgggatgcggccattttgctgaggtgcaggtagtgcgagagaaggcaactggggatatatacgccatgaaggtgatgaagaagaaggcattacttgcccaggagcaggtgtctttctttgaagaagagagaaacattctatcccgatcaactagcccgtggatccctcaactccaatacgcctttcaggacaagaatcatttgtaccttgtaatggagtaccagccaggtggtgacttgctttcgttactgaaccgttatgaggatcaattggatgagaatctaattcagttctatctggccgaactgatcctggccgtgcactctgtgcatctcatgggttatgtacacagggacatcaaacctgaaaatattctggtcgaccgcaccgggcatatcaagctcgtcgacttcggtagtgctgccaaaatgaactctaacaagatggttaatgccaaattacccatcggcactccggactacatggcgccggaagtgttgacagttatgaacggcgatggaaaggggacttatggtctggattgcgactggtggagtgttggggtcatagcctacgaaatgatttatgggagatcaccattcgccgaggggactagcgcccgaactttcaacaacatcatgaactttcagaggtttctcaaattccccgatgatccgaaggtgtcctccgactttctggacctgatacagagtctcctatgtggacagaaagagcgtctcaaattcgagggcctgtgttgtcatccctttttttccaaaattgactggaataatatcagaaactccccaccccctttcgtgcctacacttaagtcagatgacgacacatctaactttgatgaacccgagaagaattcctgggtcagttcatctccctgccagttatctccatccggatttagtggcgaggagctgccttttgtgggtttttcctacagcaaggcactggggatccttggtaggtctgaatctgtggtgagcggtctggacagccccgccaaaaccagttctatggaaaagaaacttcttatcaaatcaaaggaactgcaggactcccaggataagtgccacaagatggagcaggaaatgacgcgacttcacagaagagtctccgaggtggaagccgtcctcagccagaaggaagtcgagctcaaagctagtgaaacccagagatctctcttggagcaggaccttgccacctacattaccgagtgtagctctctgaaacgaagcctggagcaagccagaatggaggtgtcccaggaggatgataaggctctacagctgcttcatgatatacgcgagcaatccagaaaattgcaagaaatcaaggaacaggagtatcaggcccaagtggaggagatgaggctgatgatgaatcagctggaggaggacttggtctctgcaaggcggcgctctgacctgtacgaatctgagctccgggagagccgacttgctgccgaggagtttaaaaggaaggccacagagtgccaacacaaattacttaaagcgaaggatcaaggaaaaccagaagtgggggagtatgctaaactggaaaaaatcaatgccgagcaacagttgaaaatccaagaactccaggagaagctggagaaggccgtgaaagcttccactgaggctacagagcttttgcaaaatatccgccaggccaaggagagagcagaacgcgagctcgaaaagttgcagaatcgcgaggattcctcagaggggattcggaaaaaattagtcgaggcagaggagctggaggaaaagcatcgcgaggcccaggtgagcgctcagcatttagaggtgcacctgaaacagaaggagcaacactacgaagagaagataaaagtgctagacaaccagattaaaaaagatctcgctgacaaagaaacactggagaacatgatgcaacgccacgaggaagaggcccatgagaagggaaagatcttgtccgaacagaaggccatgattaacgctatggattctaagatcagatctctcgagcaacgcattgtggagttgagcgaggcgaacaaactcgctgcaaacagcagtttattcactcagcggaatatgaaggcacaggaagaaatgatcagtgagctgcgccagcaaaagttctacctggaaacgcaggcagggaagctggaggcccaaaacagaaagctggaggaacagttagagaagattagtcaccaggaccactccgataaaaaccgcttactcgaactagagacgaggctgcgggaggtttccctggagcacgaagagcagaagctagagctaaagcgacagctcacagagttgcagctctcactgcaggagagagagagccagctgacagcactccaggccgctagagctgcgttggagagccagctgcggcaggcgaaaacagagctggaggaaactacagccgaagctgaagaggaaatccaggcacttacagcccacagagacgaaatccagcgtaaatttgatgccctccgaaacagttgtactgttatcaccgatctggaagaacagcttaaccagttgacagaggacaacgcagaactcaataaccagaatttttacctctccaagcaattagacgaagcaagcggggcaaacgatgagattgtgcagcttaggtctgaagtggatcatctgcgccgggagattacggaaagggaaatgcagcttaccagccagaagcagactatggaggcactgaagactacctgcacaatgctcgaggaacaagtgatggatttggaagccctgaacgatgagttgctcgaaaaagaacggcagtgggaagcatggcgatccgtgttgggcgacgaaaagagtcagtttgagtgtagggtgcgcgaactccaacgtatgctggacactgagaagcagtcgagagcccgggcagaccagcgtataacagaatcacggcaagtggtagagctggccgtgaaggagcataaggcagaaatcttagcactgcaacaggcgctgaaggagcagaagttaaaagccgagtccctaagcgataagctgaatgacctagaaaagaagcatgccatgctggaaatgaatgcccgctcacttcagcagaaattggaaactgagcgtgagttgaaacagaggctgctggaagaacaggcaaaactccagcaacagatggatcttcagaaaaaccacatctttaggttaacacaaggactgcaggaggctctggatcgcgcagatctccttaaaaccgaacggagcgatttggagtaccagctggagaatatccaagtcctctactcccatgagaaggtgaagatggaggggaccatcagccagcagactaaattgattgattttcttcaggcgaaaatggaccagccggcgaaaaaaaagaaaggcctcttctcgcgtaggaaggaggatccggcactgcctacccaggtgccattgcagtacaacgagctaaagttagctctagagaaggagaaagccaggtgtgccgaattagaagaggctctccagaagacacggattgaactccgaagcgcccgggaggaggctgcacacaggaaagcaacagaccatccgcacccatcaactcccgccacagcaaggcagcagatcgccatgagcgctatcgttcggtcacccgagcatcagccatcggctatgtcccttcttgcaccaccctcgtcaaggagaaaggaatccagtactcccgaagagttctcccgaagactgaaagaacgaatgcatcacaatataccccacagatttaatgtgggattgaacatgagggcaacgaaatgtgccgtctgtcttgatacagtgcactttgggcgccaggcgagcaagtgccttgaatgccaggtcatgtgtcaccctaagtgcagcacatgtctgccagctacttgtggactccctgccgaatacgcaacgcactttacggaggcattttgcagagacaagatgaatagcccaggcctgcaaaccaaggaaccctcctcatcattacatttggagggatggatgaaggtgccacgaaacaataagcgcggccagcaggggtgggaccggaaatatatcgtcctggagggcagcaaggtgttgatctatgacaacgaggcccgggaggccggacagcgtccagttgaagaattcgaactgtgccttccggacggcgacgtttcgattcatggggccgtgggggcttccgagctggctaacactgctaaggccgatgttccatacattctcaaaatggagtcacaccctcacaccacgtgctggccggggagaaccttataccttctcgctccctcttttccagataaacagcgatgggtaactgctctggagagtgttgttgccggcgggagggtgtctagagaaaaagccgaggccgatgccaaactgctcggtaatagtctgctcaaactggaaggcgatgaccggctggacatgaattgtactcttccattcagtgaccaagtagtgctggtggggaccgaagagggcctgtacgccttaaatgtgctaaaaaactctcttactcatgtgcctgggatcggggcagtgtttcagatctacatcatcaaggatctcgaaaaactgctgatgatcgccggggaggaacgagcactgtgcttggttgacgtcaagaaagtaaagcagagtctggcccaatcccacctgcccgctcaaccggatattagtcccaacatatttgaggctgttaaggggtgtcatctgtttggtgcaggcaaaatcgaaaatggtctctgtatttgcgccgctatgcccagcaaagtggtgatcctgaggtacaacgagaatctatcaaagtactgtattagaaaagagattgagacatcggaaccctgttcctgcatccactttacaaactactccatccttattgggaccaataagttctacgaaattgatatgaagcagtacaccctggaggagtttctggataagaatgatcactcactggcccctgctgtctttgctgcctcttccaactcttttcccgtcagcatagtgcaggtcaactccgccgggcaaagggaggaatatcttctgtgttttcatgaattcggagtgtttgttgatagctacggcagaagaagccgtactgacgatctaaagtggtcaaggcttcctctggccttcgcttaccgggagccgtacctgttcgtaacccattttaattcactcgaggtgatagagattcaagcacggagttctgctggaacacccgctcgcgcctacctggatattccgaatcctcgctatctgggacctgccatatcttcaggagctatctacctagcctcgagctaccaagacaaattgcgcgtaatttgttgtaaggggaatcttgtaaaagagagtgggacagaacatcacagaggacccagcactagtaggtcatcccccaataagcgggggccaccaacctataatgagcacataacaaagcgcgtcgcaagctcacccgctcctcctgagggaccctcgcatcctagggaaccctccacccctcaccgttatcgtgaagggcggaccgagctcaggcgggacaaatcaccagggcgccccctggaacgcgagaaaagcccgggcaggatgctctcaactcgccgggagcgtagtcccgggcgcctgtttgaagactcttcgcgtggtcgcctccctgctggggcagtcagaacacctctgtcccaggtgaataaagtgtgggatcagagttccgtgtag

SEQ ID NO: 170683 - DNA, 6084 bp, Artificial Sequence
  derived and/or modified sequence
atgctgaagttcaagtacggggccaggaaccccctggatgctggagctgctgagcccatcgccagccgggccagccggctgaacctcttcttccagggcaagccacccttcatgacccagcagcagatgagccccctgagccgggagggcatcctggatgccctgtttgtgctgtttgaagaatgttcccagcctgccctgatgaagatcaagcacgtgagcaactttgtgaggaagtacagcgacaccatcgccgagctgcaggagctgcagcccagcgccaaggactttgaggtgcgcagcctggtgggctgcggccactttgctgaggtgcaggtggtgcgggagaaggccactggagacatctatgccatgaaggtgatgaagaagaaggccctgctggcccaggagcaggtgtccttctttgaggaggagaggaacatcctgagccgcagcaccagcccctggatcccccagctgcagtatgccttccaggacaagaaccacctgtacctggtgatggagtaccagcccggcggggacctgctgagcctgctgaacagatatgaggaccagctggatgaaaatctcatccagttctacctggccgagctgatcctggccgtgcacagcgtgcacctgatgggctacgtgcaccgggacatcaagccagagaacatcctggtggacagaacaggccacatcaagctggtggactttggcagcgctgccaagatgaacagcaacaagatggtgaatgccaagctgcccatcggcaccccagactacatggcccctgaggtgctgactgtgatgaatggagatggcaagggcacctacggcctggactgtgactggtggagcgtgggcgtcatcgcctatgagatgatctacggccgcagcccctttgctgagggcaccagcgcccggaccttcaacaacatcatgaacttccagcgcttcctgaagttcccagatgaccccaaggtgtccagtgacttcctggacctgatccagagcctgctgtgtggccagaaggagcggctgaagtttgagggcctgtgctgccaccccttcttcagcaagattgactggaacaacatccggaacagccccccaccatttgtgcccaccctgaagagtgatgatgacaccagcaactttgatgagcctgagaagaacagctgggtgagcagcagcccctgccagctgagccccagcggcttcagcggggaggagctgccctttgtgggcttctcctacagcaaggccctgggcatcctgggccgctctgagagcgtggtgtctggcctggacagccctgccaagaccagctccatggagaagaagctgctgatcaagagcaaggagctgcaggacagccaggacaagtgccacaagatggagcaggagatgacccggctgcacagaagagtgtctgaggtggaggccgtgctgagccagaaggaggtggagctgaaggccagcgagacccagaggagcctgctggagcaggacctggccacctacatcacagaatgtagcagcctgaagaggagcctggagcaggccaggatggaggtgtcccaggaggatgacaaggccctgcagctgctgcatgacatccgggagcagagcaggaagctgcaggagatcaaggagcaggagtaccaggcccaggtggaggagatgaggctgatgatgaaccagctggaggaggacctggtgtctgcccggcggcggagtgacctgtatgaaagtgagctgcgggagagccggctggccgctgaggagttcaagaggaaggccacagagtgccagcacaagctgctgaaggccaaggaccagggcaagccagaggtgggggagtatgccaagctggagaagatcaatgctgagcagcagctgaagatccaggagctgcaggagaagctggagaaggctgtgaaggccagcacagaggccacagagctgctgcagaacatccggcaggccaaggagagagctgagcgggagctggagaagctgcagaaccgggaggacagcagcgagggcatcaggaagaagctggtggaggccgaggagctggaggagaagcaccgggaggcccaggtgtctgcccagcacctggaggtgcacctgaagcagaaggagcagcactatgaggagaagatcaaggtgctggacaaccagatcaagaaggacctggccgacaaggagaccctggagaacatgatgcagagacatgaggaggaggcccacgagaagggcaagatcctgtctgagcagaaggccatgatcaatgccatggacagcaagatccgcagcctggagcagagaattgtggagctgtctgaggccaacaagctggccgccaacagcagcctcttcacccagaggaacatgaaggcccaggaggagatgatcagcgagctgcggcagcagaagttctacctggagacccaggccggcaagctggaggcccagaacaggaagctggaggagcagctggagaagatcagccaccaggaccacagcgacaagaaccggctgctggagctggagacccggctgcgggaggtgtccctggagcacgaggagcagaagctggagctgaagaggcagctgacagagctgcagctgagcctgcaggagcgggagagccagctgacagccctgcaggccgcccgggccgccctggagagccagctgcggcaggccaagacagagctggaggagaccacagctgaggccgaggaggagatccaggccctgacagcccacagagatgagatccagaggaagtttgatgccctgaggaacagctgcaccgtcatcacagacctggaggagcagctgaaccagctgacagaggacaatgctgagctgaacaaccagaacttctacctgagcaagcagctggatgaggccagcggggccaatgatgagatcgtgcagctgcggtctgaggtggaccacctgcggcgggagatcacagagcgggagatgcagctgaccagccagaagcagaccatggaggccctgaagaccacctgcaccatgctggaggagcaggtgatggacctggaggccctgaatgatgagctgctggagaaggagcggcagtgggaggcctggaggtctgtgctgggagatgagaagagccagtttgagtgccgggtgcgggagctgcagaggatgctggacacagagaagcagagccgggcccgggctgaccagaggatcacagagagccggcaggtggtggagctggccgtgaaggagcacaaggccgagatcctggccctgcagcaggccctgaaggagcagaagctgaaggccgagagcctgagtgacaagctgaatgacctggagaagaagcacgccatgctggagatgaatgcccggagcctgcagcagaagctggagacagagcgggagctgaagcagaggctgctggaggagcaggccaagctgcagcagcagatggacctgcagaagaaccacatcttccggctgacccagggcctgcaggaggccctggacagagctgacctgctgaagacagagaggagtgacctggagtaccagctggagaacatccaggtgctgtacagccatgagaaggtgaagatggagggcaccatcagccagcagaccaagctgattgacttcctgcaggccaagatggaccagcctgccaagaagaagaagggcctcttcagcaggaggaaggaggaccctgccctgcccacccaggtgcccctgcagtacaatgagctgaagctggccctggagaaggagaaggcccgctgtgccgagctggaggaggccctgcagaagacccgcatcgagctgcggagcgcccgggaggaggccgcccacaggaaggccacagaccacccccaccccagcaccccagccacagcccggcagcagatcgccatgtctgccatcgtgcgcagccctgagcaccagcccagcgccatgagcctgctggccccacccagcagcaggaggaaggagagcagcaccccagaggagttcagccggcggctgaaggagaggatgcaccacaacatcccccaccgcttcaacgtgggcctgaacatgagggccaccaagtgtgctgtgtgcctggacacagtgcacttcggccggcaggccagcaagtgcctggagtgccaggtgatgtgccaccccaagtgcagcacctgcctgcctgccacctgtggcctgcctgcagaatatgccacccacttcacagaggccttctgccgggacaagatgaacagccctggcctgcagaccaaggagcccagcagcagcctgcacctggagggctggatgaaggtgcccaggaacaacaagaggggccagcagggctgggacaggaagtacatcgtgctggagggcagcaaggtgctgatctatgacaatgaggcccgggaggccggccagaggcctgtggaggagtttgagctgtgcctgcctgatggagatgtgtccatccatggagctgtgggcgccagcgagctggccaacacagccaaggcagatgtgccctacatcctgaagatggagagccacccccacaccacctgctggccaggccgcaccctgtacctgctggcccccagcttcccagacaagcagcgctgggtgacagccctggagagcgtggtggccggcggccgggtgtcccgggagaaggccgaggctgatgccaagctgctgggcaacagcctgctgaagctggagggagatgaccggctggacatgaactgcaccctgcccttcagtgaccaggtggtgctggtgggcacagaggagggcctgtatgccctgaatgtgctgaagaacagcctgacccacgtgcccggcattggagctgtgttccagatctacatcatcaaggacctggagaagctgctgatgattgctggggaggagcgggccctgtgcctggtggatgtgaagaaggtgaagcagagcctggcccagagccacctgcctgcccagcctgacatcagccccaacatctttgaggccgtgaagggctgccacctgtttggagctgggaagattgaaaatggcctgtgcatctgtgccgccatgcccagcaaggtggtgatcctgcgctacaatgaaaacctgagcaagtactgcatcaggaaggagattgagaccagcgagccctgcagctgcatccacttcaccaactacagcatcctgattggcaccaacaagttctatgaaattgacatgaagcagtacaccctggaggagttcctggacaagaatgaccacagcctggccccagctgtgtttgctgccagcagcaacagcttccctgtgtccatcgtgcaggtgaacagcgctggccagcgggaggagtacctgctgtgcttccatgaatttggagtgtttgtggacagctatggccgccgcagcaggacagatgacctgaagtggagccggctgcccctggcctttgcctaccgggagccctacctgtttgtgacccacttcaacagcctggaggtgattgagatccaggcccggagcagcgctggcaccccagcccgggcctacctggacatccccaacccccgctacctgggccctgccatcagcagcggggccatctacctggccagcagctaccaggacaagctgcgggtcatctgctgcaagggcaacctggtgaaggagagcggcacagagcaccaccggggccccagcaccagccgcagcagccccaacaagaggggcccccccacctacaatgagcacatcaccaagagggtggccagcagccctgcccctcctgagggccccagccacccccgggagcccagcaccccccaccgctaccgggagggccgcacagagctgcggcgggacaagagccctggccggcccctggagcgggagaagagccctggccgcatgctgagcacccggcgggagaggagccctggccgcctgtttgaggacagcagccggggccgcctgcctgctggagctgtgaggacccccctgagccaggtgaacaaggtgtgggaccagagctctgtgtag

SEQ ID NO: 170684 - DNA, 6084 bp, Artificial Sequence
  derived and/or modified sequence
atgctgaagttcaagtacggcgcccggaaccccctggacgccggcgcggccgagccaatcgcgtctcgggcctccagactgaatctcttctttcagggcaagccacctttcatgacacaacagcagatgtctcctttatccagagagggtatcctggatgctctgttcgtcctgttcgaggagtgcagccagcccgcactcatgaagataaaacatgtttcaaatttcgtgagaaagtattcagacaccatagctgagcttcaggaattacagccatctgccaaagattttgaggtaaggagcttggtggggtgcggccatttcgccgaagtgcaggtagtgcgcgagaaggccaccggggatatttatgcaatgaaggtgatgaaaaagaaagctctcttggcccaggagcaggtgtcatttttcgaagaagagaggaacattttaagtcgcagtacaagtccctggataccccagctgcaatacgccttccaggataagaatcacctctacctcgtgatggagtatcagcccggaggggatttgctctcactcctgaataggtatgaagaccagctggatgaaaatctaatacagttttacttggcagaattgatactggcggtacacagcgtgcatcttatggggtacgtacatcgcgatattaaaccagagaacattttagtggaccggacgggccacatcaagctggtcgacttcggcagcgccgccaaaatgaatagtaacaaaatggtgaacgcaaagttgccaatcgggacccccgactacatggcgcccgaagtcctcactgtgatgaacggtgatggaaaagggacttacgggcttgactgcgactggtggagtgtgggcgttatcgcctacgagatgatctacggccgaagcccttttgccgaggggactagtgcacgaactttcaacaatattatgaacttccagagatttttgaagttccccgatgaccccaaggtgtcatctgacttcctagacttgatccagagcctgctgtgcgggcaaaaggaacggttgaaattcgagggcctgtgttgccacccattcttctcaaagatagactggaataacatccgcaacagtcctccaccgttcgtcccgaccttgaagtcagacgatgacactagcaacttcgacgagccagaaaagaacagctgggtcagctcgtcgccttgtcagttgagcccttctggcttctctggcgaggagctgcctttcgtcggcttcagctactctaaggctctcggtatccttggccggagcgaaagcgtggtgtcgggcctggactctccagctaagacaagtagtatggaaaagaaactgctgattaagagtaaagaactgcaggacagccaagataagtgccataagatggagcaggagatgacacgcctacacagaagggtgtcagaggtggaggccgtactatcacaaaaagaagttgagcttaaggcaagtgagacgcagcgtagcctcctagagcaggacctagccacatacatcactgagtgtagctcgctgaagaggagtctggaacaggcgcggatggaagtctcacaggaggatgacaaggcactccagctacttcacgacataagagaacagtctaggaagctgcaggaaattaaggaacaggagtatcaggcccaggtggaggagatgcggctgatgatgaatcagctggaggaggatctggtttctgcccgacgacgttctgatctttatgagagcgagctgcgtgagtcccggcttgcagcagaggagtttaagcggaaagcgactgaatgccagcacaagcttctgaaagcgaaagatcaagggaaacctgaggtcggtgagtacgctaaattggaaaaaattaacgctgagcagcaactcaagatccaagaactccaggaaaaactggagaaggccgtgaaggccagtactgaggccacagagctactgcagaatatcagacaggcgaaggaaagagccgaaagggagctggagaaactgcagaacagagaggactcttctgagggcatccgcaaaaaactggtagaggctgaggagttggaagagaagcaccgggaggctcaggtgagcgctcagcacctcgaagttcatctgaagcagaaggagcaacattacgaggaaaaaattaaggtgctggataatcagatcaaaaaagacttagcagacaaggagactctggagaatatgatgcagagacatgaggaggaagcccacgaaaaagggaagatcctgtccgaacagaaggcaatgattaacgcaatggattctaagatcagatctctagaacagagaatcgtcgaactttccgaggcgaataagctggctgctaactcttctctcttcacccagagaaatatgaaagcccaggaggaaatgatttccgagcttcggcagcaaaagttctatctagaaacccaggctggcaaactcgaagcccagaaccgcaagctagaggagcagttagagaagattagccaccaagaccacagtgataagaataggcttctagagttagagacacgcttgagggaggtgtcactggagcacgaggagcagaagttagagctaaaacggcagctgacggagcttcagctgtctctccaggaaagggagagccagttgaccgctctgcaggccgctcgcgcagctctggaaagccaattgcgacaagccaagacagaactggaggaaaccactgccgaggccgaggaggagattcaggccctgacagcccacagagatgagatacagcgaaagtttgatgctcttcggaactcatgcaccgtaataacagatctggaagagcaactcaaccagctgacagaggataacgcagagttgaacaaccagaatttctatctatccaagcaactggatgaagcctcgggtgcgaacgacgagatcgtccagcttaggtccgaggtggatcatctcagacgggaaattacggagagggagatgcagttgacctctcagaagcagacaatggaggctctgaagacgacctgcacgatgctggaggagcaggtgatggacttggaagcactgaacgatgaactgctggaaaaggaaaggcagtgggaagcatggcgcagtgtactgggcgacgaaaaatcccagttcgagtgccgggttcgagagcttcagaggatgctggatacagagaaacagagcagggcaagagctgaccaacgtataacggagagccgtcaggtagtcgagctcgctgtcaaggaacataaagcggaaatactcgcactgcaacaggccctgaaggagcaaaaactgaaagctgagtccttgagcgataaattgaatgacctggagaaaaaacacgcaatgctggaaatgaatgctagatccctgcagcaaaagctcgagactgaaagagagctaaaacagcggctgctggaggaacaagctaaactgcagcagcagatggacctgcagaaaaatcacatttttaggttgacacaggggcttcaggaagcgctggatagagccgatctgttgaaaaccgaacggagtgacctggaatatcagctcgaaaatattcaggtgctgtatagccatgagaaagtcaaaatggagggtacaatatcccagcagactaagctgattgattttctccaagctaaaatggaccaaccagcgaagaaaaaaaaggggcttttctcgaggcgaaaggaagatccagcgttgccgacccaggttccgctgcagtataacgagctgaaacttgctctcgaaaaggagaaagccagatgcgccgaactggaagaagcgttgcagaagacacgcatagaactgcgttcggcgagggaagaggctgcccatcggaaagcgacggatcatcctcacccgagcaccccagcaactgccaggcagcaaatagccatgagcgcaattgtgcggagtcctgaacatcagccgtctgccatgtctctactggctccaccatcaagccgtagaaaagagtcaagtacgcctgaagagttttcacgccgtctcaaagagcgaatgcaccacaacatcccccatagatttaatgtgggcctcaatatgagggcaacaaagtgcgccgtctgcctggacacagtccactttggacgtcaggcgagcaagtgcctggaatgccaggtgatgtgccatcccaaatgtagcacctgcctgcccgctacttgcgggcttccggcagagtacgcgactcatttcaccgaggcattttgcagagacaagatgaatagccctggattgcagaccaaagaaccttcttcgtctttacacttagagggctggatgaaggttccacgcaacaataaacgcggacagcaggggtgggatagaaagtacattgtgttggaggggtctaaagtgctaatctatgataatgaagcgcgcgaggcgggacaacgacctgtggaagaatttgagctgtgcctgccagacggcgatgtgtccatacacggcgccgtgggagcttctgagctagccaacacagctaaggctgatgtgccctatattcttaagatggagtctcatcctcacacaacctgctggccaggcaggaccctctatttactggctccctcctttccagataaacagagatgggttacagcccttgagtccgtcgtcgccggtgggcgggtttctcgtgaaaaagctgaggctgatgctaaactactaggcaacagtttgctgaaattagagggggacgatcgcctcgacatgaattgcactctgcctttcagcgaccaagtcgtactcgtgggcaccgaagaggggttgtacgcactgaacgtcctgaagaatagtctcacccacgtgcccggtattggcgccgtgttccagatttatatcatcaaagacctcgagaaattgctcatgatcgccggagaggaacgagcactgtgcctggtagatgtgaagaaagtaaaacagtccctcgctcagtctcacctacccgcccagccagatataagccctaatatcttcgaggcagtaaagggctgtcacctgttcggtgccggaaaaatcgaaaatggcctctgcatctgcgccgccatgccctcgaaagttgtgatcctccgctataacgagaacctgtccaaatactgcattaggaaggaaatcgagacatctgagccatgttcttgcatacacttcaccaattattctatactgattggcacaaacaagttctatgagatcgacatgaaacaatacacgctggaggagtttttggataagaatgatcattctctggctcccgcagttttcgccgcaagcagcaacagtttccctgtgtcaattgtccaagtgaacagcgctgggcagcgagaagagtatcttctgtgtttccacgagttcggggtctttgtcgacagttacgggcgccggtccaggacggacgatctaaaatggagccgtctacccctcgccttcgcataccgcgagccgtatttatttgttacccattttaactccttagaagtgatcgagatccaggctcggtcatcagctggtacacccgccagagcttaccttgatatcccaaatccaagatatctagggccagctatttcgagtggagcaatttaccttgctagctcctaccaggataagctccgggttatttgctgtaagggtaacctcgtcaaggagtctggtacagaacaccatcgcggtccctccacaagtaggtcctccccaaataaaagaggccctccaacgtataatgagcacatcacgaagcgagtggcttcctcacccgccccaccagaaggcccttctcacccccgtgagccctccaccccacaccggtaccgcgagggtcgcacggaactgcgccgggacaaaagccccggacggcccttggaacgggaaaaaagccccggtcgtatgctctctacaaggcgggaaagaagccccggaagactattcgaagacagcagtcgaggcagactgccagcaggcgccgtaagaacgcctttgtcccaagtgaataaagtttgggatcagtcctcagtttag

SEQ ID NO: 170685 - DNA, 6084 bp, Artificial Sequence
  derived and/or modified sequence
atgctgaaattcaagtacggagctcggaatccactggatgcaggtgcagcagaaccgattgccagtagggcatctcgcctgaatctgttttttcaggggaagcccccatttatgacccagcagcagatgtcgccactgtctagggagggaatactcgatgctctgtttgtactattcgaggagtgcagccagcccgctctgatgaagattaaacacgttagtaatttcgtgcgaaagtactccgatacaattgccgagctccaggaactgcaaccgtctgcgaaagactttgaagtgagatctctggtaggatgtgggcattttgcagaagtccaggttgtaagggaaaaggctaccggtgacatctacgcgatgaaggtgatgaaaaaaaaagcgctgctcgcacaggaacaggtcagtttcttcgaggaggagagaaacattctgagccggtctacttccccttggatcccccagctacagtatgctttccaggacaagaaccatctatacctagtgatggagtatcagcctggtggggatctcctgtcgctgttaaacaggtacgaggatcagctagacgaaaacctgattcagttctacttggcagagttaattctggccgtgcattcagtccatctgatgggttatgtacatcgagatataaagcctgaaaacattcttgtggatcgcacaggtcacataaaactggtggatttcgggtcagcagccaaaatgaattctaacaaaatggtgaacgcgaagcttcctatcggcacccctgattatatggcacccgaggtcctgactgttatgaacggagacggcaaggggacgtatggtctcgactgtgactggtggtcggtgggagtaatcgcctacgagatgatctacgggagatctcccttcgctgaggggacttccgcacgcaccttcaataacatcatgaattttcagcggttcttgaaattccccgatgaccccaaggtttcctctgatttcctggacctcattcagtccctgctgtgcgggcagaaagaaaggctcaagttcgaaggcttatgttgccacccgtttttctctaaaatcgactggaacaacattcgaaactctccccctccattcgtgcctacactaaaatctgacgatgatacttctaacttcgatgagccggaaaaaaactcttgggtctcctccagcccctgccagctttccccttccgggttctccggggaggagctgccttttgttgggttctcttatagtaaagccctggggattcttgggaggtccgaatctgtggtatccggattggactctccagcaaagaccagttccatggagaaaaaactgctgatcaaatctaaagagctgcaggactctcaggacaagtgccataagatggaacaggaaatgacgcggctgcaccggagagttagcgaagtcgaagccgtgctgtcacagaaggaggtcgagctgaaggctagcgaaacacagaggagcctgcttgagcaggacctggctacatacattacagagtgctcatcacttaaacggtcactggagcaggcgagaatggaggtttcgcaagaggatgataaggccctgcagttattgcacgacattcgagagcagtctcgcaagttacaggaaattaaagaacaggagtatcaggcacaggtggaggagatgagacttatgatgaaccagctggaagaggatcttgtgtctgcacgtaggcggagtgatctctatgaatccgagcttagagagagcaggctggccgcagaggagtttaagcgcaaggcaacagaatgccagcacaaacttctcaaagcaaaagatcagggcaagcctgaagtaggagagtatgcaaagctggagaagatcaatgctgagcagcagctcaaaatccaggagttgcaagagaaattggagaaagcagttaaggcctccacggaggcaacagaactcttgcagaatataaggcaggctaaggagcgggctgagcgcgagctggagaagttgcaaaatcgtgaggattcgtcagaagggataagaaagaagctagtcgaagcagaggagttggaagagaaacaccgggaggcccaggttagcgctcagcatcttgaggtgcacctcaaacagaaagagcagcactacgaagagaaaatcaaagtgctggataaccagattaagaaggacctggccgataaggaaacgctggagaacatgatgcagcggcacgaagaagaggctcacgagaagggaaagattctgagtgaacagaaggcgatgattaatgcaatggattccaaaattagatccctggagcagcgcatcgtggagttgtcagaagcaaataagctcgcagctaatagcagcctgttcacccagcgtaatatgaaggcccaggaagagatgatttctgaactcagacagcagaaattttatctggaaacccaagcaggtaaactggaggctcaaaatcgaaaattggaggaacaactagagaagattagccaccaagatcactcagataaaaacagactgctcgaactggaaacacgtttacgcgaagtgtcactcgaacacgaagagcagaaactggagcttaaaagacagctgacggagctgcagctgagtctccaggagagggaatcacagcttaccgctcttcaggccgcacgcgctgctctggaatctcagctgagacaggcgaaaaccgaacttgaagagactacagccgaggctgaggaggagatccaggccctcaccgcgcacagggatgaaatccaacggaagtttgacgccctcaggaattcctgtactgtgatcacagacctcgaggaacaacttaatcaactgactgaagacaatgcagagcttaataatcaaaatttctacctttctaagcagcttgatgaggcctccggtgccaatgatgagatcgtacagcttcgatctgaggtggaccatttgaggagagaaatcaccgagagggagatgcagctgacctctcagaaacagacaatggaggctctgaaaacgacatgtacaatgcttgaagaacaggtgatggacctcgaagcactgaacgacgagctgctagagaaagagcgtcagtgggaagcctggcgatcagtcttaggagacgaaaaatcccagttcgaatgccgtgtcagagaattgcagcgcatgttagatactgagaagcagtcccgagcccgagccgatcagcgaattactgagtcacggcaagtcgtcgaactggccgtaaaggaacataaagccgagattttagccctacagcaggccctgaaagagcagaaactgaaggcagaatctctgtctgataaactgaatgacctggaaaagaagcatgccatgctagagatgaacgcaagaagcctgcaacagaaactggagaccgagagagagctgaagcagagactgttggaagagcaggcaaagttgcagcagcagatggacctccagaaaaatcacatcttccgactgactcagggcctgcaggaagccctcgatcgggcagatctgctgaagacagagcggtccgatctggagtaccagctcgaaaatatacaagttctgtactcccacgaaaaggttaaaatggagggaacaatcagtcagcaaaccaaactgatcgattttctgcaggcaaaaatggaccaacctgccaaaaagaagaagggcctgttttctaggcgcaaggaagacccggcattaccaacccaggtgccactgcagtataatgaactgaagctggccctggaaaaagagaaggcccgatgtgctgagctagaggaagcgctccagaagactcgaatcgagctacgctccgcccgtgaagaggctgcccatagaaaggcgactgatcacccacacccatcgacacctgccactgccaggcaacaaattgcaatgagcgctatcgtgcggtcgcccgagcaccagccctcagccatgtccctcctggctcccccttcatccaggcggaaggaatcctctacccctgaggagttcagcaggcgactcaaggaacgcatgcaccacaatatccctcaccgtttcaatgtgggtctgaatatgagagccactaagtgcgccgtttgcctcgacaccgttcatttcgggagacaggcctctaaatgccttgagtgccaggtgatgtgtcatcccaaatgctctacatgtctgcccgcaacctgcggactgcccgcagagtatgctactcattttaccgaggcgttctgtagagataaaatgaactcccctggcctgcagacaaaagagccatcttcttcactacacttagagggatggatgaaagtcccgaggaataacaaaagaggccagcaagggtgggatagaaaatatattgtcttggagggtagtaaagtattgatctacgacaatgaggcccgagaggccggacaacggccagtggaggaatttgagctctgtctgccagacggtgatgtatcaatccacggggctgtaggcgcaagcgaactcgccaataccgcaaaagccgatgtgccctacatactgaaaatggaaagtcatcctcacaccacatgctggccaggtcggacactctatcttctggcaccctcattcccagataaacagaggtgggtgaccgctctagagtcggtggtggccggaggaagagtgtcgagggaaaaagcagaggccgatgctaagcttttggggaattcactcctgaagctggagggtgacgataggctggatatgaactgtactctaccattcagtgaccaggtggtactggtgggtacggaagaaggcctatacgctctgaatgttctgaaaaatagtcttacacatgtccccggtataggtgcggtgttccagatctacatcatcaaagatttagaaaaattgcttatgatcgctggcgaggagagggccctctgtctggtggacgttaaaaaggtgaaacagtccctggcacaatcacatctgcctgcccagccagatatctctccgaacatcttcgaagctgtgaagggctgtcacctgtttggcgcagggaaaattgagaacggcctgtgtatctgcgcagccatgccaagcaaagtggtaatcctcaggtataacgagaacctgtccaaatattgcatccgaaaggaaatcgaaacgtctgagccctgttcttgtattcacttcaccaattacagcattttgattggcacgaataaattctatgagatcgacatgaagcagtacaccttagaggagttcctcgacaaaaatgaccactctcttgccccagcagtgttcgccgcaagcagtaatagcttccctgtttccattgtacaagttaacagcgctggccagcgtgaagaatacctactctgtttccacgagttcggagtctttgtggattcctatggtcgcaggtcccgtactgacgaccttaaatggagcaggctgcctctagctttcgcttacagggagccttacctttttgtaacacattttaattctctcgaggtgattgaaatccaggccaggtcaagtgcgggtacgcctgcccgagcatacctggatatcccaaaccctagatacctcggcccagctatcagctcaggagctatctacctcgcatccagctatcaagacaaactccgcgtgatttgttgcaagggcaatttggtaaaagaaagtggaaccgaacaccacaggggaccttccacatcgaggagttcccctaataaacggggtcccccaacatacaacgagcatatcacaaaacgcgtcgctagcagtcctgccccaccagagggtccaagccatcccagagaaccgagcactcctcacaggtatagggagggccgaacagaactgcgcagagacaagagtccaggtcggccactggagcgcgaaaagagccctggcaggatgctgagtaccagacgagagagaagtccaggacggctgtttgaagactcctcacggggacgcctgcctgcaggtgctgtccggaccccacttagtcaagtcaacaaagtgtgggaccagtccagtgtttaa

SEQ ID NO: 170686 - DNA, 8578 bp, Artificial Sequence
  derived and/or modified sequence
gcggggcggaacagatcgcagacctgggggttcgcagagccgccagtggggagatgttgaagttcaaatatggagcgcggaatcctttggatgctggtgctgctgaacccattgccagccgggcctccaggctgaatctgttcttccaggggaaaccaccctttatgactcaacagcagatgtctcctctttcccgagaagggatattagatgccctctttgttctctttgaagaatgcagtcagcctgctctgatgaagattaagcacgtgagcaactttgtccggaagtattccgacaccatagctgagttacaggagctccagccttcggcaaaggacttcgaagtcagaagtcttgtaggttgtggtcactttgctgaagtgcaggtggtaagagagaaagcaaccggggacatctatgctatgaaagtgatgaagaagaaggctttattggcccaggagcaggtttcattttttgaggaagagcggaacatattatctcgaagcacaagcccgtggatcccccaattacagtatgcctttcaggacaaaaatcacctttatctggtcatggaatatcagcctggaggggacttgctgtcacttttgaatagatatgaggaccagttagatgaaaacctgatacagttttacctagctgagctgattttggctgttcacagcgttcatctgatgggatacgtgcatcgagacatcaagcctgagaacattctcgttgaccgcacaggacacatcaagctggtggattttggatctgccgcgaaaatgaattcaaacaagatggtgaatgccaaactcccgattgggaccccagattacatggctcctgaagtgctgactgtgatgaacggggatggaaaaggcacctacggcctggactgtgactggtggtcagtgggcgtgattgcctatgagatgatttatgggagatcccccttcgcagagggaacctctgccagaaccttcaataacattatgaatttccagcggtttttgaaatttccagatgaccccaaagtgagcagtgactttcttgatctgattcaaagcttgttgtgcggccagaaagagagactgaagtttgaaggtctttgctgccatcctttcttctctaaaattgactggaacaacattcgtaactctcctccccccttcgttcccaccctcaagtctgacgatgacacctccaattttgatgaaccagagaagaattcgtgggtttcatcctctccgtgccagctgagcccctcaggcttctcgggtgaagaactgccgtttgtggggttttcgtacagcaaggcactggggattcttggtagatctgagtctgttgtgtcgggtctggactcccctgccaagactagctccatggaaaagaaacttctcatcaaaagcaaagagctacaagactctcaggacaagtgtcacaagatggagcaggaaatgacccggttacatcggagagtgtcagaggtggaggctgtgcttagtcagaaggaggtggagctgaaggcctctgagactcagagatccctcctggagcaggaccttgctacctacatcacagaatgcagtagcttaaagcgaagtttggagcaagcacggatggaggtgtcccaggaggatgacaaagcactgcagcttctccatgatatcagagagcagagccggaagctccaagaaatcaaagagcaggagtaccaggctcaagtggaagaaatgaggttgatgatgaatcagttggaagaggatcttgtctcagcaagaagacggagtgatctctacgaatctgagctgagagagtctcggcttgctgctgaagaattcaagcggaaagcgacagaatgtcagcataaactgttgaaggctaaggatcaagggaagcctgaagtgggagaatatgcgaaactggagaagatcaatgctgagcagcagctcaaaattcaggagctccaagagaaactggagaaggctgtaaaagccagcacggaggccaccgagctgctgcagaatatccgccaggcaaaggagcgagccgagagggagctggagaagctgcagaaccgagaggattcttctgaaggcatcagaaagaagctggtggaagctgaggagctcgaagagaaacatcgggaggcccaagtctcagcccagcacctagaagtgcacctgaaacagaaagagcagcactatgaggaaaagattaaagtgttggacaatcagataaagaaagacctggctgacaaggagacactggagaacatgatgcagagacacgaggaggaggcccatgagaagggcaaaattctcagcgaacagaaggcgatgatcaatgctatggattccaagatcagatccctggaacagaggattgtggaactgtctgaagccaataaacttgcagcaaatagcagtctttttacccaaaggaacatgaaggcccaagaagagatgatttctgaactcaggcaacagaaattttacctggagacacaggctgggaagttggaggcccagaaccgaaaactggaggagcagctggagaagatcagccaccaagaccacagtgacaagaatcggctgctggaactggagacaagattgcgggaggtcagtctagagcacgaggagcagaaactggagctcaagcgccagctcacagagctacagctctccctgcaggagcgcgagtcacagttgacagccctgcaggctgcacgggcggccctggagagccagcttcgccaggcgaagacagagctggaagagaccacagcagaagctgaagaggagatccaggcactcacggcacatagagatgaaatccagcgcaaatttgatgctcttcgtaacagctgtactgtaatcacagacctggaggagcagctaaaccagctgaccgaggacaacgctgaactcaacaaccaaaacttctacttgtccaaacaactcgatgaggcttctggcgccaacgacgagattgtacaactgcgaagtgaagtggaccatctccgccgggagatcacggaacgagagatgcagcttaccagccagaagcaaacgatggaggctctgaagaccacgtgcaccatgctggaggaacaggtcatggatttggaggccctaaacgatgagctgctagaaaaagagcggcagtgggaggcctggaggagcgtcctgggtgatgagaaatcccagtttgagtgtcgggttcgagagctgcagagaatgctggacaccgagaaacagagcagggcgagagccgatcagcggatcaccgagtctcgccaggtggtggagctggcagtgaaggagcacaaggctgagattctcgctctgcagcaggctctcaaagagcagaagctgaaggccgagagcctctctgacaagctcaatgacctggagaagaagcatgctatgcttgaaatgaatgcccgaagcttacagcagaagctggagactgaacgagagctcaaacagaggcttctggaagagcaagccaaattacagcagcagatggacctgcagaaaaatcacattttccgtctgactcaaggactgcaagaagctctagatcgggctgatctactgaagacagaaagaagtgacttggagtatcagctggaaaacattcaggttctctattctcatgaaaaggtgaaaatggaaggcactatttctcaacaaaccaaactcattgattttctgcaagccaaaatggaccaacctgctaaaaagaaaaagggtttatttagtcgacggaaagaggaccctgctttacccacacaggttcctctgcagtacaatgagctgaagctggccctggagaaggagaaagctcgctgtgcagagctagaggaagcccttcagaagacccgcatcgagctccggtccgcccgggaggaagctgcccaccgcaaagcaacggaccacccacacccatccacgccagccaccgcgaggcagcagatcgccatgtccgccatcgtgcggtcgccagagcaccagcccagtgccatgagcctgctggccccgccatccagccgcagaaaggagtcttcaactccagaggaatttagtcggcgtcttaaggaacgcatgcaccacaatattcctcaccgattcaacgtaggactgaacatgcgagccacaaagtgtgctgtgtgtctggataccgtgcactttggacgccaggcatccaaatgtctcgaatgtcaggtgatgtgtcaccccaagtgctccacgtgcttgccagccacctgcggcttgcctgctgaatatgccacacacttcaccgaggccttctgccgtgacaaaatgaactccccaggtctccagaccaaggagcccagcagcagcttgcacctggaagggtggatgaaggtgcccaggaataacaaacgaggacagcaaggctgggacaggaagtacattgtcctggagggatcaaaagtcctcatttatgacaatgaagccagagaagctggacagaggccggtggaagaatttgagctgtgccttcccgacggggatgtatctattcatggtgccgttggtgcttccgaactcgcaaatacagccaaagcagatgtcccatacatactgaagatggaatctcacccgcacaccacctgctggcccgggagaaccctctacttgctagctcccagcttccctgacaaacagcgctgggtcaccgccttagaatcagttgtcgcaggtgggagagtttctagggaaaaagcagaagctgatgctaaactgcttggaaactccctgctgaaactggaaggtgatgaccgtctagacatgaactgcacgctgcccttcagtgaccaggtggtgttggtgggcaccgaggaagggctctacgccctgaatgtcttgaaaaactccctaacccatgtcccaggaattggagcagtcttccaaatttatattatcaaggacctggagaagctactcatgatagcaggagaagagcgggcactgtgtcttgtggacgtgaagaaagtgaaacagtccctggcccagtcccacctgcctgcccagcccgacatctcacccaacatttttgaagctgtcaagggctgccacttgtttggggcaggcaagattgagaacgggctctgcatctgtgcagccatgcccagcaaagtcgtcattctccgctacaacgaaaacctcagcaaatactgcatccggaaagagatagagacctcagagccctgcagctgtatccacttcaccaattacagtatcctcattggaaccaataaattctacgaaatcgacatgaagcagtacacgctcgaggaattcctggataagaatgaccattccttggcacctgctgtgtttgccgcctcttccaacagcttccctgtctcaatcgtgcaggtgaacagcgcagggcagcgagaggagtacttgctgtgtttccacgaatttggagtgttcgtggattcttacggaagacgtagccgcacagacgatctcaagtggagtcgcttacctttggcctttgcctacagagaaccctatctgtttgtgacccacttcaactcactcgaagtaattgagatccaggcacgctcctcagcagggacccctgcccgagcgtacctggacatcccgaacccgcgctacctgggccctgccatttcctcaggagcgatttacttggcgtcctcataccaggataaattaagggtcatttgctgcaagggaaacctcgtgaaggagtccggcactgaacaccaccggggcccgtccacctcccgcagcagccccaacaagcgaggcccacccacgtacaacgagcacatcaccaagcgcgtggcctccagcccagcgccgcccgaaggccccagccacccgcgagagccaagcacaccccaccgctaccgcgaggggcggaccgagctgcgcagggacaagtctcctggccgccccctggagcgagagaagtcccccggccggatgctcagcacgcggagagagcggtcccccgggaggctgtttgaagacagcagcaggggccggctgcctgcgggagccgtgaggaccccgctgtcccaggtgaacaaggtctgggaccagtcttcagtataaatctcagccagaaaaaccaactcctcatcttgatctgcaggaaaacaccaaacacactatggaactctgctgatggggacccaagcgcccacgtgctcagccaccctctggctcagcggggcccagacccacctcggcacggacacccctgtctccaggaggggcaggtggctgaggctcttcggagctgtcagcgcccggtgcctgccctgggcacctccctgcagtcatctctttgcactttgttactctttcaaagcattcacaaacttttgtacctagctctagcctgtaccagttagttcatcaaaggaaaccaaccgggatgctaactacaacatggttagaatcctaattagctactttaagatcctaggattggttggtttttcttttttttttctctttgtttctttcctttttttttttttttttttaagacaacagaattcttaatagatttgaatagcgacgtatttcctgttgtagtcatttttagctcgaccacatcatcaggtctttgccaccgaggcatagtgtagaacagtcccggtcagttggccaacctcccgcagccaagtaggttcatccttgttcctgttcattctcatagatggccctgctttccccagggtgacatcgtagccaaatgtttactgttttcattgccttttatggccttgacgacttcccctcccaccagctgagaatgtatggaggtcatcggggcctcagctcggaggcagtgacttggggccaagggacctcgagacgctttccttccccaccccccagcgtcatctccccagcctgctgttcccgctttccatatagctttggccaggaaagcatgcaatagacttgctcggagcccagcactcctgggtctcggggtcggggaggggacgggggcacccacttccttgtctgtgacggcgtgttgttccccactctgggatggggaagaggcccgtcgggagttctgcatggcagttcactgcatgtgctgcccccttgggttgctctgccaatgtattaataccatcccatagctcctgccaaatcgagaccctctgacgacttgccgactaactggccaccacaagctgcagtctgtagcactgaacaaacaaaaaacaaaacgctcaagccttacgaccagagaaggatttcagcaaaccaccacctcccactcagtgtcccctccaaacttcacacttccctgcctgcagaggatgactctgttcacacccaatccagcgcggttctaccccacgaaactgtgactttccaaatgagcctttccctagggctagacctaagaccaggaagtttgagaaagcagccgcagctcaactcttccagctccgccagggttgggaagtccttaggtgcagtgcggctcccactgggtctgcggaccctcctattagagtacgaaattcctggcaactggtacagaaccaacctagaggctttgcagttggcaagctaactcgcggccttatttctgcctttaatctcccacaaggcatctgttgctttgggtcctccacgactcttaggcccgcctcaacaacccaggcacctcctaggtaggctcaaaggtagacccgtttccaccgcagcaggtgaacatgaccgtgttttcaactgtgtccacagttcagatccctttccagattgcaacctggcctgcatcccagctccttcctgctcgtgtcttaacctaagtgctttcttgtttgaaacgcctacaaacctccatgtggtagctcctttggcaaatgtcctgctgtggcgttttatgtgttgcttggagtctgtggggtcgtactccctcccctcccgtccccagggcagatttgattgaatgtttgctgaagttttgtctcttggtccacagtatttggaaaggtcactgaaaatgggtctttcagtcttggcatttcatttaggatctccatgagaaatgggcttcttgagccctgaaaatgtatattgtgtgtctcatctgtgaactgctttctgctatatagaactagctcaaaagactgtacatatttacaagaaactttatattcgtaaaaaaaaaaagaggaaattgaattggtttctacttttttattgtaaaaggtgcatttttcaacacttacttttggtttcaatggtggtagttgtggacagccatcttcactggagggtggggagctccgtgtgaccaccaagatgccagcaggatataccgtaacacgaaattgctgtcaaaagcttattagcatcaatcaagattctaggtctccaaaagtacaggctttttcttcattaccttttttattcagaacgaggaagagaacacaaggaatgattcaagatccaccttgagaggaatgaactttgttgttgaacaattagtgaaataaagcaatgatctaaactaa

SEQ ID NO: 170687 - DNA, 6084 bp, Artificial Sequence
  derived and/or modified sequence
atgctgaagttcaagtacggcgccagaaaccccctggacgccggcgccgccgagcccatcgccagcagagccagcagactgaacctgttcttccagggcaagccccccttcatgacccagcagcagatgagccccctgagcagagagggcatcctggacgccctgttcgtgctgttcgaggagtgcagccagcccgccctgatgaagatcaagcacgtgagcaacttcgtgagaaagtacagcgacaccatcgccgagctgcaggagctgcagcccagcgccaaggacttcgaggtgagaagcctggtgggctgcggccacttcgccgaggtgcaggtggtgagagagaaggccaccggcgacatctacgccatgaaggtgatgaagaagaaggccctgctggcccaggagcaggtgagcttcttcgaggaggagagaaacatcctgagcagaagcaccagcccctggatcccccagctgcagtacgccttccaggacaagaaccacctgtacctggtgatggagtaccagcccggcggcgacctgctgagcctgctgaacagatacgaggaccagctggacgagaacctgatccagttctacctggccgagctgatcctggccgtgcacagcgtgcacctgatgggctacgtgcacagagacatcaagcccgagaacatcctggtggacagaaccggccacatcaagctggtggacttcggcagcgccgccaagatgaacagcaacaagatggtgaacgccaagctgcccatcggcacccccgactacatggcccccgaggtgctgaccgtgatgaacggcgacggcaagggcacctacggcctggactgcgactggtggagcgtgggcgtgatcgcctacgagatgatctacggcagaagccccttcgccgagggcaccagcgccagaaccttcaacaacatcatgaacttccagagattcctgaagttccccgacgaccccaaggtgagcagcgacttcctggacctgatccagagcctgctgtgcggccagaaggagagactgaagttcgagggcctgtgctgccaccccttcttcagcaagatcgactggaacaacatcagaaacagccccccccccttcgtgcccaccctgaagagcgacgacgacaccagcaacttcgacgagcccgagaagaacagctgggtgagcagcagcccctgccagctgagccccagcggcttcagcggcgaggagctgcccttcgtgggcttcagctacagcaaggccctgggcatcctgggcagaagcgagagcgtggtgagcggcctggacagccccgccaagaccagcagcatggagaagaagctgctgatcaagagcaaggagctgcaggacagccaggacaagtgccacaagatggagcaggagatgaccagactgcacagaagagtgagcgaggtggaggccgtgctgagccagaaggaggtggagctgaaggccagcgagacccagagaagcctgctggagcaggacctggccacctacatcaccgagtgcagcagcctgaagagaagcctggagcaggccagaatggaggtgagccaggaggacgacaaggccctgcagctgctgcacgacatcagagagcagagcagaaagctgcaggagatcaaggagcaggagtaccaggcccaggtggaggagatgagactgatgatgaaccagctggaggaggacctggtgagcgccagaagaagaagcgacctgtacgagagcgagctgagagagagcagactggccgccgaggagttcaagagaaaggccaccgagtgccagcacaagctgctgaaggccaaggaccagggcaagcccgaggtgggcgagtacgccaagctggagaagatcaacgccgagcagcagctgaagatccaggagctgcaggagaagctggagaaggccgtgaaggccagcaccgaggccaccgagctgctgcagaacatcagacaggccaaggagagagccgagagagagctggagaagctgcagaacagagaggacagcagcgagggcatcagaaagaagctggtggaggccgaggagctggaggagaagcacagagaggcccaggtgagcgcccagcacctggaggtgcacctgaagcagaaggagcagcactacgaggagaagatcaaggtgctggacaaccagatcaagaaggacctggccgacaaggagaccctggagaacatgatgcagagacacgaggaggaggcccacgagaagggcaagatcctgagcgagcagaaggccatgatcaacgccatggacagcaagatcagaagcctggagcagagaatcgtggagctgagcgaggccaacaagctggccgccaacagcagcctgttcacccagagaaacatgaaggcccaggaggagatgatcagcgagctgagacagcagaagttctacctggagacccaggccggcaagctggaggcccagaacagaaagctggaggagcagctggagaagatcagccaccaggaccacagcgacaagaacagactgctggagctggagaccagactgagagaggtgagcctggagcacgaggagcagaagctggagctgaagagacagctgaccgagctgcagctgagcctgcaggagagagagagccagctgaccgccctgcaggccgccagagccgccctggagagccagctgagacaggccaagaccgagctggaggagaccaccgccgaggccgaggaggagatccaggccctgaccgcccacagagacgagatccagagaaagttcgacgccctgagaaacagctgcaccgtgatcaccgacctggaggagcagctgaaccagctgaccgaggacaacgccgagctgaacaaccagaacttctacctgagcaagcagctggacgaggccagcggcgccaacgacgagatcgtgcagctgagaagcgaggtggaccacctgagaagagagatcaccgagagagagatgcagctgaccagccagaagcagaccatggaggccctgaagaccacctgcaccatgctggaggagcaggtgatggacctggaggccctgaacgacgagctgctggagaaggagagacagtgggaggcctggagaagcgtgctgggcgacgagaagagccagttcgagtgcagagtgagagagctgcagagaatgctggacaccgagaagcagagcagagccagagccgaccagagaatcaccgagagcagacaggtggtggagctggccgtgaaggagcacaaggccgagatcctggccctgcagcaggccctgaaggagcagaagctgaaggccgagagcctgagcgacaagctgaacgacctggagaagaagcacgccatgctggagatgaacgccagaagcctgcagcagaagctggagaccgagagagagctgaagcagagactgctggaggagcaggccaagctgcagcagcagatggacctgcagaagaaccacatcttcagactgacccagggcctgcaggaggccctggacagagccgacctgctgaagaccgagagaagcgacctggagtaccagctggagaacatccaggtgctgtacagccacgagaaggtgaagatggagggcaccatcagccagcagaccaagctgatcgacttcctgcaggccaagatggaccagcccgccaagaagaagaagggcctgttcagcagaagaaaggaggaccccgccctgcccacccaggtgcccctgcagtacaacgagctgaagctggccctggagaaggagaaggccagatgcgccgagctggaggaggccctgcagaagaccagaatcgagctgagaagcgccagagaggaggccgcccacagaaaggccaccgaccacccccaccccagcacccccgccaccgccagacagcagatcgccatgagcgccatcgtgagaagccccgagcaccagcccagcgccatgagcctgctggccccccccagcagcagaagaaaggagagcagcacccccgaggagttcagcagaagactgaaggagagaatgcaccacaacatcccccacagattcaacgtgggcctgaacatgagagccaccaagtgcgccgtgtgcctggacaccgtgcacttcggcagacaggccagcaagtgcctggagtgccaggtgatgtgccaccccaagtgcagcacctgcctgcccgccacctgcggcctgcccgccgagtacgccacccacttcaccgaggccttctgcagagacaagatgaacagccccggcctgcagaccaaggagcccagcagcagcctgcacctggagggctggatgaaggtgcccagaaacaacaagagaggccagcagggctgggacagaaagtacatcgtgctggagggcagcaaggtgctgatctacgacaacgaggccagagaggccggccagagacccgtggaggagttcgagctgtgcctgcccgacggcgacgtgagcatccacggcgccgtgggcgccagcgagctggccaacaccgccaaggccgacgtgccctacatcctgaagatggagagccacccccacaccacctgctggcccggcagaaccctgtacctgctggcccccagcttccccgacaagcagagatgggtgaccgccctggagagcgtggtggccggcggcagagtgagcagagagaaggccgaggccgacgccaagctgctgggcaacagcctgctgaagctggagggcgacgacagactggacatgaactgcaccctgcccttcagcgaccaggtggtgctggtgggcaccgaggagggcctgtacgccctgaacgtgctgaagaacagcctgacccacgtgcccggcatcggcgccgtgttccagatctacatcatcaaggacctggagaagctgctgatgatcgccggcgaggagagagccctgtgcctggtggacgtgaagaaggtgaagcagagcctggcccagagccacctgcccgcccagcccgacatcagccccaacatcttcgaggccgtgaagggctgccacctgttcggcgccggcaagatcgagaacggcctgtgcatctgcgccgccatgcccagcaaggtggtgatcctgagatacaacgagaacctgagcaagtactgcatcagaaaggagatcgagaccagcgagccctgcagctgcatccacttcaccaactacagcatcctgatcggcaccaacaagttctacgagatcgacatgaagcagtacaccctggaggagttcctggacaagaacgaccacagcctggcccccgccgtgttcgccgccagcagcaacagcttccccgtgagcatcgtgcaggtgaacagcgccggccagagagaggagtacctgctgtgcttccacgagttcggcgtgttcgtggacagctacggcagaagaagcagaaccgacgacctgaagtggagcagactgcccctggccttcgcctacagagagccctacctgttcgtgacccacttcaacagcctggaggtgatcgagatccaggccagaagcagcgccggcacccccgccagagcctacctggacatccccaaccccagatacctgggccccgccatcagcagcggcgccatctacctggccagcagctaccaggacaagctgagagtgatctgctgcaagggcaacctggtgaaggagagcggcaccgagcaccacagaggccccagcaccagcagaagcagccccaacaagagaggcccccccacctacaacgagcacatcaccaagagagtggccagcagccccgccccccccgagggccccagccaccccagagagcccagcaccccccacagatacagagagggcagaaccgagctgagaagagacaagagccccggcagacccctggagagagagaagagccccggcagaatgctgagcaccagaagagagagaagccccggcagactgttcgaggacagcagcagaggcagactgcccgccggcgccgtgagaacccccctgagccaggtgaacaaggtgtgggaccagagcagcgtgtag

SEQ ID NO: 170688 - protein, 339 aa, Artificial Sequence
  derived and/or modified sequence
MAQLGAVVAVASSFFCASLFSAVHKIEEGHIGVYYRGGALLTSTSGPGFHLMLPFITSYKSVQTTLQTDEVKNVPCGTSGGVMIYFDRIEVVNFLVPNAVYDIVKNYTADYDKALIFNKIHHELNQFCSVHTLQEVYIELFDQIDENLKLALQQDLTSMAPGLVIQAVRVTKPNIPEAIRRNYELMESEKTKLLIAAQKQKVVEKEAETERKKALIEAEKVAQVAEITYGQKVMEKETEKKISEIEDAAFLAREKAKADAECYTAMKIAEANKLKLTPEYLQLMKYKAIASNSKIYFGKDIPNMFMDSAGSVSKQFEGLADKLSFGLEDEPLETATKEN

SEQ ID NO: 170689 - protein, 206 aa, Artificial Sequence
  derived and/or modified sequence
MAQLGAVVAVASSFFCASLFSAVHKIEEGHIGVYYRGGALLTSTSGPGFHLMLPFITSYKSVQTTLQTDEVKNVPCGTSGGVMIYFDRIEVVNFLVPNAVYDIVKNYTADYDKALIFNKIHHELNQFCSVHTLQEVYIELFGKKVSPEHAVLKQGSWNPASLHCLKPGCLQGVMVTYGQEMLKNLVLRSWSQRSSWRMLIAMQQDP

SEQ ID NO: 170690 - DNA, 1020 bp, Artificial Sequence
  derived and/or modified sequence
atggcgcagctcggcgctgtggtggccgtggcttcctctttcttttgtgcgtcactttttagtgccgtccataaaatcgaggagggtcatatcggtgtctactatcgcggcggagcactactgacttccaccagtggccctggttttcatctgatgcttccttttattacgagctataagagcgttcaaactacactgcagacagacgaggtaaagaacgtaccgtgcggcaccagtgggggggttatgatttattttgatcggattgaggtcgttaatttcttggttcctaatgcagtgtatgacatcgtgaagaattatactgctgattatgataaggccctgatttttaacaaaatccaccatgagttgaatcagttctgctcagtccatactctgcaggaggtttacattgagttatttgaccaaatcgacgagaacctaaaattagcactgcagcaggacctgacctcaatggcaccagggcttgttattcaggcagtgagagttaccaaacccaacatcccggaggccatcaggagaaactacgagctcatggaatccgaaaaaacgaagctcttgattgccgcgcagaaacagaaggtggtagagaaggaggcggagacggagaggaagaaggccctgattgaggccgaaaaagtggctcaggtcgctgagataacctatggccagaaagtcatggaaaaagaaactgagaagaagatttctgaaatcgaagatgcggcctttctggcacgggaaaaggcaaaagccgatgcagaatgttacacggccatgaaaattgccgaagccaacaaactgaagctcacgcccgagtatttgcagctcatgaaatacaaggcaattgcgtccaatagcaaaatctattttggcaaggacattccaaatatgtttatggactcagcaggctccgttagtaaacagtttgagggcctagcggataaactttcatttggcctggaggatgagcccttggaaactgccactaaagaaaattag

SEQ ID NO: 170691 - DNA, 1020 bp, Artificial Sequence
  derived and/or modified sequence
atggcacagctcggcgccgtggtggccgtggcttcttcttttttttgcgcaagtttgttctccgcggtacataagatagaggagggacatatcggggtctattacaggggcggggctcttctgaccagtacgagcggtccaggattccaccttatgctcccttttatcacctcttataaatccgtgcagaccactctgcaaacagacgaggtaaaaaacgtgccctgtggcaccagcggtggtgtgatgatctacttcgatagaatcgaagtcgtgaactttctcgtaccaaatgcagtgtatgatattgtcaaaaactacaccgcagattatgataaagcgctaatattcaataaaatacatcacgaattgaatcaattctgttctgtgcataccctccaagaggtttacattgagctcttcgatcagattgatgaaaacctgaagctagccctgcagcaggatctgacttccatggcacctggcctagtgatccaggcagtgagggttaccaaaccgaacatcccagaagctatacgccggaattacgaactgatggaatccgagaaaacaaagctgttgattgctgcacagaagcagaaagtagtagagaaagaggcagagaccgagagaaaaaaggccctaattgaagctgaaaaggtggcccaggtggccgagatcacttacgggcagaaggtcatggaaaaggaaacagaaaagaagatttccgagattgaagatgcagcctttctggcaagggaaaaggccaaagctgatgccgagtgttacacagccatgaaaatcgcggaggccaataaattaaagctcacacctgagtaccttcagctcatgaaatacaaagctatcgcttctaattctaagatatacttcggaaaggacattcccaacatgttcatggactctgctgggtcagtgtcaaaacaatttgagggcctggcagacaagctgagttttggactggaagacgaaccactggaaaccgcgactaaggagaactag

SEQ ID NO: 170692 - DNA, 1020 bp, Artificial Sequence
  derived and/or modified sequence
atggcccagctgggcgctgtggtggccgtggccagcagcttcttctgtgccagcctcttctctgctgtgcacaagattgaggagggccacatcggcgtgtactacagaggaggagccctgctgaccagcaccagcggccctggcttccacctgatgctgcccttcatcaccagctacaagtctgtgcagaccaccctgcagacagatgaggtgaagaatgtgccctgtggcaccagcggaggagtgatgatctactttgacagaattgaggtggtgaacttcctggtgcccaatgctgtgtatgacatcgtgaagaactacacagctgactatgacaaggccctgatcttcaacaagatccaccacgagctgaaccagttctgcagcgtgcacaccctgcaggaggtgtacatcgagctgtttgaccagattgatgagaacctgaagctggccctgcagcaggacctgacctccatggcccctggcctggtgatccaggccgtgcgggtgaccaagcccaacatccctgaggccatcagaagaaattatgagctgatggagagcgagaagaccaagctgctgattgctgcccagaagcagaaggtggtggagaaggaggccgagacagagaggaagaaggccctgattgaggccgagaaggtggcccaggtggccgagatcacctacggccagaaggtgatggagaaggagacagagaagaagatcagcgagattgaagatgctgccttcctggcccgggagaaggccaaggcagatgctgagtgctacacagccatgaagattgctgaggccaacaagctgaagctgaccccagagtacctgcagctgatgaagtacaaggccatcgccagcaacagcaagatctactttgggaaggacatccccaacatgttcatggacagcgctggctctgtgtccaagcagtttgagggcctggccgacaagctgagctttggcctggaggatgagcccctggagacagccaccaaggagaactag

SEQ ID NO: 170693 - DNA, 1020 bp, Artificial Sequence
  derived and/or modified sequence
atggcccagctgggcgccgtggtggccgtggccagcagcttcttctgtgcatccttattttctgctgtgcacaaaatcgaggaaggtcacatcggagtttattatagaggcggagctttgctgacaagtacctcagggccagggtttcacctaatgctaccattcattactagctacaagagcgtgcagaccactctgcaaaccgacgaagtgaagaacgtgccatgcgggacaagtggcggagtaatgatttattttgataggatcgaggtggtgaatttcctcgtgccgaatgccgtgtacgatattgtaaaaaattacaccgccgactacgacaaagctctgatatttaataaaattcaccacgagcttaatcaattttgctccgtccacaccttacaggaggtgtacatcgaattgttcgaccagatcgacgagaatcttaaattagcccttcaacaagacctcacctcaatggcccccgggctggtaatacaggcagtcagagtgactaaacccaacattccagaggcaataaggcgcaattatgagctgatggaaagcgaaaagacaaaattgctgatcgcagcccagaagcagaaagtagttgaaaaggaagcggagactgaaagaaaaaaagctctgatagaggcagaaaaagtcgctcaagtggcagaaatcacttacggccagaaagtgatggagaaggagaccgaaaaaaagatatccgagatagaagacgctgccttcttggcaagggagaaggctaaggccgatgccgagtgctacaccgccatgaagatcgcagaggcaaacaagcttaagcttactcccgagtacttgcagctcatgaagtataaggccattgcctctaactccaagatctactttggaaaagacatccccaatatgtttatggacagtgcaggttctgtgtctaaacagtttgaagggctggctgataagctatctttcggactagaggacgagccattagagacagcaacaaaggagaattag

SEQ ID NO: 170694 - DNA, 1020 bp, Artificial Sequence
  derived and/or modified sequence
atggcccagctgggcgccgtggtggccgtggccagcagcttcttctgtgcctcactgtttagcgctgtgcacaagattgaggagggccacatcggtgtgtactaccgcggcggtgcattattaaccagtactagcggcccagggttccaccttatgctgccctttattacctcttacaagagtgttcaaacaacgcttcagactgacgaggttaaaaacgtgccatgcggaacttctggaggcgtgatgatttattttgaccgaatcgaagttgtcaactttctcgtgcccaacgctgtctacgatatagtgaagaactatactgctgactacgacaaggccctgatcttcaataaaatccatcacgagctgaatcagttctgtagcgttcatacactgcaggaggtgtatatcgagttatttgaccagattgatgagaatttgaagctggctttacaacaggatctgacctcaatggcccccggcttagtgatacaggctgtgcgtgtgaccaaacccaatatcccggaagccattaggcggaattacgaattgatggagtctgaaaaaaccaaactactcatcgctgcccagaagcagaaggtggtagagaaagaggccgaaaccgagagaaaaaaggcactcatcgaagccgagaaggtggctcaggtggctgagattacttacggtcagaaggtcatggagaaagaaaccgaaaagaagatctccgaaatagaagatgcagcattcctcgccagggaaaaggctaaagctgacgcagagtgttataccgccatgaagatagccgaggcgaacaaattgaagttgaccccggaatatctccagctaatgaagtacaaggcaattgccagcaactcaaagatttactttggtaaggacataccgaacatgtttatggatagtgctggctcagtatcaaagcaattcgaaggcctagccgacaaactgtctttcggccttgaggatgaacccctcgaaaccgcaaccaaagaaaactag

SEQ ID NO: 170695 - DNA, 1020 bp, Artificial Sequence
  derived and/or modified sequence
atggctcaactgggtgctgtagtcgctgttgccagctcgtttttttgcgcctccctctttagtgcagtgcacaaaatcgaagaaggacatattggtgtttactatagggggggagcactgctgacatcgaccagcggcccaggctttcaccttatgttgccgtttatcacgagttacaaatctgtgcaaacaaccctccagaccgacgaggtgaaaaatgtgccttgtggcacatccggcggagtaatgatctattttgataggatcgaagtcgtcaattttctcgtgccaaatgccgtgtacgatatagttaagaactataccgcagactatgataaagctttgatcttcaacaagatacaccacgaacttaatcagttctgttccgttcacaccctccaagaagtctatatcgagctcttcgaccagatagatgaaaatctcaaactggcgttacagcaggacctgaccagcatggccccaggactggtgatacaggcagtgcgagtgacaaaacctaacatccctgaggccatccgccgaaactacgagctcatggaatctgaaaagactaaattactcatcgcagctcagaaacagaaggtggtggagaaagaagctgaaacagagagaaagaaagcacttattgaggcggagaaggtggcacaagtggccgaaataacatatggacaaaaagtgatggagaaggagaccgaaaaaaaaatcagtgaaatcgaggacgctgcatttctggctagagagaaggcaaaagccgatgctgaatgttataccgctatgaagatcgcagaggctaataaactgaaactgactcccgagtaccttcagttgatgaaatacaaggctatcgcctcgaatagtaagatctacttcggaaaggatatccctaacatgttcatggatagcgctggttcagtttctaaacagtttgagggcctggcagataagctctctttcgggcttgaagatgaacccctggagaccgctaccaaggagaattag

SEQ ID NO: 170696 - DNA, 1020 bp, Artificial Sequence
  derived and/or modified sequence
atggcccagctgggcgctgtcgtcgcggtcgctagctctttcttctgtgcctccctattctctgccgttcataaaatcgaagaagggcacattggagtatattaccgcggtggggctctcctgaccagcacgagtggccctggtttccatcttatgttgcctttcatcacaagctacaaaagcgtacagacaaccctccagacagacgaagtgaaaaatgttccatgtggaacgagtggtggtgtgatgatctactttgacagaatagaagttgtcaattttctcgttccgaacgctgtgtacgatattgttaagaattatactgccgattacgataaggctcttattttcaacaaaattcaccacgaactgaatcagttttgctcagtccatacgctccaagaggtctacatagagctgtttgatcagattgatgaaaatttgaaacttgccctccagcaagacctcacaagcatggctccaggtctggtgatccaggccgtccgcgttaccaaacctaacatccccgaggcaatcaggcggaactacgaacttatggaaagtgagaagaccaaactccttattgcggcacagaagcaaaaggtggtggagaaagaagctgagacggagcgcaaaaaggctcttattgaggcagagaaggtcgcccaggtggcagagatcacttacggtcagaaagttatggagaaggagactgagaagaagatctcagagattgaggacgccgctttcttggccagggagaaggctaaggcagacgctgagtgttatacagcaatgaagatagcagaagccaacaagcttaagcttacgccagagtacctgcagctgatgaaatataaggccatcgccagtaattcaaaaatctatttcggaaaagacataccaaacatgtttatggattccgctgggtccgtctctaagcagttcgaggggttggcagacaagctgagttttggcttggaggacgagccgctcgagacggcaaccaaggaaaactag

SEQ ID NO: 170697 - DNA, 1020 bp, Artificial Sequence
  derived and/or modified sequence
atggcccagctgggcgccgtggtggccgtggccagcagcttcttctgcgccagcctgttcagcgccgtgcacaagatcgaggagggccacatcggcgtgtactacagaggcggcgccctgctgaccagcaccagcggccccggcttccacctgatgctgcccttcatcaccagctacaagagcgtgcagaccaccctgcagaccgacgaggtgaagaacgtgccctgcggcaccagcggcggcgtgatgatctacttcgacagaatcgaggtggtgaacttcctggtgcccaacgccgtgtacgacatcgtgaagaactacaccgccgactacgacaaggccctgatcttcaacaagatccaccacgagctgaaccagttctgcagcgtgcacaccctgcaggaggtgtacatcgagctgttcgaccagatcgacgagaacctgaagctggccctgcagcaggacctgaccagcatggcccccggcctggtgatccaggccgtgagagtgaccaagcccaacatccccgaggccatcagaagaaactacgagctgatggagagcgagaagaccaagctgctgatcgccgcccagaagcagaaggtggtggagaaggaggccgagaccgagagaaagaaggccctgatcgaggccgagaaggtggcccaggtggccgagatcacctacggccagaaggtgatggagaaggagaccgagaagaagatcagcgagatcgaggacgccgccttcctggccagagagaaggccaaggccgacgccgagtgctacaccgccatgaagatcgccgaggccaacaagctgaagctgacccccgagtacctgcagctgatgaagtacaaggccatcgccagcaacagcaagatctacttcggcaaggacatccccaacatgttcatggacagcgccggcagcgtgagcaagcagttcgagggcctggccgacaagctgagcttcggcctggaggacgagcccctggagaccgccaccaaggagaactag

SEQ ID NO: 170698 - DNA, 6073 bp, Artificial Sequence
  derived and/or modified sequence
ttttcttgctcgtgggctcggacgagtacggagcgcctgcagggacagcctggataaaggctcactgatggctcagttgggagcagttgtggctgtggcttccagtttcttttgtgcatctctcttctcagctgtgcacaagatagaagagggacatattggggtatattacagaggcggtgccctgctgacttcgaccagcggccctggtttccatctcatgctccctttcatcacatcatataagtctgtgcagaccacactccagacagatgaggtgaagaatgtaccttgtgggactagtggtggtgtgatgatctactttgacagaattgaagtggtgaacttcctggtcccgaacgcagtgtatgatatagtgaagaactatactgctgactatgacaaggccctcatcttcaacaagatccaccacgaactgaaccagttctgcagtgtgcacacgcttcaagaggtctacattgagctgtttgatcagattgatgaaaatctcaaactggctttgcaacaggacctgacctccatggcccctgggctggtcattcaagctgtgcgggtaacaaagcccaacataccagaggcaatccgcagaaactacgagttgatggaaagtgagaagacaaagcttctcattgccgcccagaaacagaaggtggtggaaaaggaagcagagacagagcggaagaaggcgctcattgaggcagaaaaagtggcccaggtggctgagatcacctacgggcagaaggtgatggagaaggagactgagaagaagatttcagaaattgaagatgctgcatttctggcccgggagaaggcaaaggcagatgctgagtgctacactgctatgaaaatagccgaagccaataagctgaagctaacccctgaatatctgcagctgatgaagtacaaggccattgcttccaacagcaagatttactttggcaaagacattcctaacatgttcatggactctgcgggcagtgtgagcaagcagtttgaggggctagctgacaagctaagctttggcttagaagatgaacccttggagacggccactaaggagaattgaaaaaaacttgatatgactgcaaatgatacttaagcagatctttattttttaagatgaatcagaatgttcctccctccccgactaccttctctgactgtcttccagttactgtggtgaaaaagaagaaatgaacttaaatccactccctttctagggaaaggagggtggggactgatgatggggggttttatttcaggtaagcagtttatatgacttccaataagatttgtaaatcatgggcttgacctttgacctctagacactaattttatcctttgaggctggcttaattagggatgctgtcattaaggagagggagaaatgtagagtgttacctccaactcatttgatttcccttacttgggaaaatgcagtccagtgttctcacctctgcctccaaggtaggagatgtctgtgggtgaggctcagcaactgagcaaatatgtgcctgtgagtttgccagtagagctgtgaagaaacagctgcagagaacatttgaccttcctggcattcttgtctgcatgtgtgtgagttattttagaggtgtgctttcttgagccctcataaggaagtactggtgctaggttttgcaagattttgtatacactttgctccttgccctagggctcagagtggtggtttctgactacatttctagagtcagagcttgatcaccacaactcaattatttcggcatcttttcacctatgctgtgatttgttttttttttttcttctcaaaaattctgttcattggttccactcagcatcaagaagacagggacaaacaactcaagtgtcttaacagctgctggagtgggatccttgttatctcttagccactgcaggacctgcctgacaggttatgtgtgcacctcgagatgaagtgtctttctattattgtagagattctgtagtgaagaggtctgacaccatgtgtggaggaggaggaacgatcagtcaagagatgtcctggtcttaatgcctgtggcttgtgctgggagtgggtctgacttagtgataaaaggactctattcactaagtagcctgtgtttttaaatccagggctgcaggcagcaacgcaagtcaggctgaacattcagtctccagagacagctgtgtggagcaaatcagagttcatgcccaagtccccaggttggaatggctgtgccaaaatccattcaaagggttttctttttcattactaggtcagaacattttgagtcaccttgggagattcaggatggggagagcaaatttgaacaaaaggtttttcttatatcctgagattgaggggtagggggtgtccaacctgtatagcccatgggttgtgtctagaattaagtggagggcagctatctggagttaacttgcaagcatattggtgccctccatgaccacctctggcttaggacttggccctgttatgagctgacccccaccccccaccccccaccccccccccccgccaactcctatacccatcttccctaggtgaatctgtgaatggtcctttctggcagcaatccctgccttctttttgggcccatgcccagacttctggtttaaggaatggtcccagagcttgggccagcttgctcagaagttttgggagcattgagcctgcctagaaagatacagtgttagctccccttacttcaaagttgcccttctctgttctgactcctgggacttctggtcctgggcacactttttgcaggcaacaaaatgtgcctgggagtgatggattttaatgtgctccagagtcctttcagaaggtggtcatttcccttggccgggcgcggtggctcacacctgtaatcccagcactttgggaggccaaggcaggcggatcacctgaggttaggagttcgagaccaccctggccaacatgcgaaaccccatctctacgaaaaatagaaatattagccgggcatggtgtcaggcacctgtaatcccagctacttgggaggctgaggcaggagaattgcttgaactcgggaggcagaggttgcagtgagccaagatcatgccatcccactctagcttgggcaatagagcaaggctccgtctcaagaaaagaaggtcatttcccaagactagcatagggagtatccatttaaaatacattcatcttcctcccatttccgtgctattaatcacttgttagagcaacatgacatgcccagcatcccacttcccgaaaatgtctactccttctactctgagctcttgttgcctagacctcagaaaacaccaattcaccacagtagaaccgggagcagggatagctcagcttctctgaatagcacactttgctcaggtcttaacttgagggcctctccggtactaacatcctgcgatagcttgtcccatgagcacagaagagcctcagtagagtcaagtcctgctgcagctgccccaccccaagtttctatcatttcctctttaaacaaaaaatatgttatcctacacattagtgtcaatccaatggttgtctcttatctgtctaaatagcaaaatcatgaaaatcagctgttttatttgcataggacaactaacctgtctgtgtaactttgtttttattttaactcttactagaaaatctaatcttaaaacatttgaattctaaacatgtaaaatgtgacagcctgcaattttgtagacagtgaagtaatggctgctatttataaatggaacatctatcaaaataagtaactgtttataaaattcagtttttgtagggttttccaaggaaaaatcaccttggttgaatgtttctcactcattaaactttgcagaagtgattcatattcagtactgtttttaatcactttttaaaatataaggaccgaatgcaaggaaaccaaagtttattaataatttttatataactaaaataaaatagatgtggagggatctgtgatcatataaaaagggagggttactgaaagaattttagcaatatattgattcaggaaaaggagctgttttataaatgatcattcactgttcctatggttctatgtatctttcaaaccgatacctttactatttaaagagcgtaaatagtgaaagtaagatggtcatacttactgactttatctatttaagtttgatggagataaactatatcttggctagtggctactgtgtctgtgaatgtaaccagtacttctttaagctctattcagtagggttccagccactgcttttttgttgtttctagccactgttttttttttcttgtttccttataaaacaggtaataaccaatcattttgtgtttgtatttccattcctttttatttctgcctttgtgtagactgatgattaagtaggcaaactacttctactttcaaagagccccaagggcttaatgaccccatttgtaactgagaaatgattcttgttttagtaatcattctataaatgatactgctggattgattgccgtgggttgatagctggaggaattgttttggacaatactaacatgtgaatttatgtcttagttttatttgcagtcttgctaagtaaaatgagtctttgtatctacttttttattaaagtgaaatttagcaatagttaatattaggtgacataaataaaacatcccagactagtgagttaagtacaagatctctctaaaaataaacagatgaaaatctatccccattatcgatacagaatttgtgaacgtggcataattcttggtaggtgctatagagatttatcattttaaacagttcacacaccactgcaattctgctccaaaggacaaagatattttcaagtgaaccaaaattcattttgatatcagttcagtggacgaactcccagtctttactctggaaagctgcccagcttagggttgccagataaaacataagatacctagttaaatatgaatttcaacaatgtacaatttttagtctaagtactatgtgtcctaaacactgcatgagacatactcataccaaagtatttgttgcttatgtgtaattcatatttaactgggtatcctgtatttttacttgttaagtccggcaaccctagcccaggctttctcaggttttttttaacagggatcccaagctttttctattggtttgagagcctgctacacaaataatatgatcttaacaattgaatagttatgttaagagtgtagttactgcagttagactgccaaagttcaaatcactgctctactacttcttaggtgtgtggtcttgaataagttttttgacctctctaagcctcagtttcttcattaataaaatgagttgcatggcttatatgaaataatgcatacgaagggctttcacactgtaccttgcatgtatgtattcaaaaacttcaatctggagaaacgggctaaaaaacatacagctattaaatgggagccactaagtagaaagccaaacacgtgaaaaaaaatggaataagattacaaatgggatagcacatagaagaagggaatgacattgcaatgcagcaaacacagtattgaggatacatacctctacaaaaatgttgtgtagaaaataacctggtttaaagaaagaaaagaaaagaaaagaagccaggcacggtggttcacacctgtaatcctagcactttgggaggctgaggtgggtggatcacctgaggtcgggagttcaagaccagcctgaccaacatagagaaaccccatctcgactaaaaatagaaaattaaccgggcatggtggtgcatgcctgaaatcccagctacttgggaggctaaggcaggagaatcacttgaacctgggaggtagaggatgcagtgagccaaaatcacgccactgcactccagcctgggcaacaagagcaaaactctatctccaaaaaaaagaaaagaatctgatttggccctgttgagaggaactgtccagttctggtctccaattttaaaaatgaaaaaaatttgaagaagctagaaagaaaatgttaaaaccaaaaag

SEQ ID NO: 170699 - DNA, 1718 bp, Artificial Sequence
  derived and/or modified sequence
tactggtaggaaaggttcagtgacagcacattcgtgttcacaggaagacaaggctgtgttctgaaccctacccagctggcacgggttctcccttgagcaacggctgtatccggagccagtgcttcctcagtgcggtgggggctctaattttacagttaaagaaaggggaacgttgactgagaacgaggaggaagcgagttgtagatctagccttgtgttcacacgacaccaggctggatatgagtcactcgcagggagctcagcttggtgaggtcctctcgctgttgtggccttttctcctgcacgttggaccacacacattttcccgtgtcttttccctaggataaaggctcactgatggctcagttgggagcagttgtggctgtggcttccagtttcttttgtgcatctctcttctcagctgtgcacaagatagaagagggacatattggggtatattacagaggcggtgccctgctgacttcgaccagcggccctggtttccatctcatgctccctttcatcacatcatataagtctgtgcagaccacactccagacagatgaggtgaagaatgtaccttgtgggactagtggtggtgtgatgatctactttgacagaattgaagtggtgaacttcctggtcccgaacgcagtgtatgatatagtgaagaactatactgctgactatgacaaggccctcatcttcaacaagatccaccacgaactgaaccagttctgcagtgtgcacacgcttcaagaggtctacattgagctgtttgatcagattgatgaaaatctcaaactggctttgcaacaggacctgacctccatggcccctgggctggtcattcaagctgtgcgggtaacaaagcccaacataccagaggcaatccgcagaaactacgagttgatggaaagtgagaagacaaagcttctcattgccgcccagaaacagaaggtggtggaaaaggaagcagagacagagcggaagaaggcgctcattgaggcagaaaaagtggcccaggtggctgagatcacctacgggcagaaggtgatggagaaggagactgagaagaagatttcagaaattgaagatgctgcatttctggcccgggagaaggcaaaggcagatgctgagtgctacactgctatgaaaatagccgaagccaataagctgaagctaacccctgaatatctgcagctgatgaagtacaaggccattgcttccaacagcaagatttactttggcaaagacattcctaacatgttcatggactctgcgggcagtgtgagcaagcagtttgaggggctagctgacaagctaagctttggcttagaagatgaacccttggagacggccactaaggagaattgaaaaaaacttgatatgactgcaaatgatacttaagcagatctttattttttaagatgaatcagaatgttcctccctccccgactaccttctctgactgtcttccagttactgtggtgaaaaagaagaaatgaacttaaatccactccctttctagggaaaggagggtggggactgatgatggggggttttatttcaggtaagcagtttatatgacttccaataagatttgtaaatcatgggcttgacctttgacctctagacactaattttatcctttgaggctggcttaattagggatgctgtcattaaggagagggagaaatgtagagtgttacctccaa

SEQ ID NO: 170700 - protein, 140 aa, Artificial Sequence
  derived and/or modified sequence
MSRFLNVLRSWLVMVSIIAMGNTLQSFRDHTFLYEKLYTGKPNLVNGLQARTFGIWTLLSSVIRCLCAIDIHNKTLYHITLWTFLLALGHFLSELFVYGTAAPTIGVLAPLMVASFSILGMLVGLRYLEVEPVSRQKKRN

SEQ ID NO: 170701 - DNA, 423 bp, Artificial Sequence
  derived and/or modified sequence
atgtcccggtttttaaacgtgctaagaagctggttagttatggtctccatcatcgccatgggcaacactctgcaatccttccgcgaccacacattcctctacgaaaagctttatacaggcaaacccaacctagttaacggcctccaggctcgtacttttggcatctggacactgttgagctctgttatccgttgcctttgcgccatcgacatccacaacaagacgctgtatcacattacattgtggactttcctcctcgctctgggacactttctttctgaactctttgtgtatggaacagccgcccctactattggtgtcctggctccactcatggtggcgagcttctctatcctgggcatgttggttggcctgaggtacctcgaggtagagcctgtgagcagacaaaagaagcggaattag

SEQ ID NO: 170702 - DNA, 423 bp, Artificial Sequence
  derived and/or modified sequence
atgagccgcttcctgaatgtgctgcgctcctggctggtgatggtgtccatcatcgccatgggcaacaccctgcagagcttccgggaccacaccttcctgtatgagaagctgtacacaggcaagcccaacctggtgaatggcctgcaggcccggaccttcggcatctggaccctgctgagcagcgtcatccgctgcctgtgtgccatcgacatccacaacaagaccctgtaccacatcaccctgtggaccttcctgctggccctgggccacttcctgtctgagctgtttgtgtatggaacagctgcccccaccatcggcgtgctggcccccctgatggtggccagcttcagcatcctgggcatgctggtgggcctgcgctacctggaggtggagcctgtgtcccggcagaagaagagaaattag

SEQ ID NO: 170703 - DNA, 423 bp, Artificial Sequence
  derived and/or modified sequence
atgagccggttcctgaacgtgctgcggagctggctggtgatggtgagcattattgcgatgggaaatactcttcagtcattcagagaccatacattcctgtacgaaaaactgtacacagggaaacccaatttagttaatggactccaagcacggactttcgggatctggaccctgttgtcgtctgtcatcagatgtctgtgcgcgattgacattcacaataagaccctctatcatataactctgtggacattcctcctggcattggggcactttcttagcgaactgttcgtttatggcacggcggctccgacaatcggagttttggctccactcatggtagcttcattctcaatcttgggcatgctagtgggtttacgctacctggaagtcgagccagtgtcacgccagaagaagaggaattag

SEQ ID NO: 170704 - DNA, 423 bp, Artificial Sequence
  derived and/or modified sequence
atgagcagatttctcaacgttttgaggtcgtggttggttatggtgtctattatcgctatgggaaatactctgcagtccttccgcgaccacacctttctatacgagaaactctataccgggaaaccaaatcttgtgaacggcttacaagcccgtacatttggcatttggactctcctcagtagcgtgattcgatgcctttgtgcaatcgacatccacaataaaacactgtatcacatcacgctatggaccttccttcttgccctgggccacttcctttctgaactctttgtgtatggcaccgctgcgccaacaataggagtattagccccattaatggtggcttcatttagcatcctcggcatgcttgttggcctgcgctacttggaggttgaaccagttagtcggcagaagaagcggaactag

SEQ ID NO: 170705 - DNA, 2633 bp, Artificial Sequence
  derived and/or modified sequence
cgtcaccgccgcgcagcgcgggcgcagagccctgccctcagctgaagggagtcttcttttttttttttttttccgctgtttttttctccgcccctaagaggttgactccaaacccggagttccgctaggtccaacaggagggcttacggcgtgagcggcgtacctggggagaggcttaggcagcggcaaccgctgattggcagtaaaggggttcactccccatctcctgctcgggcgaaaccgggacagccaatcagagagagtactgacggaaacggcccaatcctggagcagggctgagggagggggcggggacaaatggctcaggtggactccgggctggagctgtcctgggggagcttgtttgcggcagcggctgctgctgccactgctgtgctgggggcccggtcgccaggcaaaaagccctcccacgtttgaggggagtcatgagccgtttcctgaatgtgttaagaagttggctggttatggtgtccatcatagccatggggaacacgctgcagagcttccgagaccacacttttctctatgaaaagctctacactggcaagccaaaccttgtgaatggcctccaagctcggacctttgggatctggacgctgctctcatcagtgattcgctgcctctgtgccattgacattcacaacaagacgctctatcacatcacactctggaccttcctccttgccctggggcatttcctctctgagttgtttgtctatggaactgcagctcccacgattggcgtcctggcacccctgatggtggcaagtttctccatcctgggtatgctggtcgggctccggtatctagaagtagaaccagtatccagacagaagaagagaaactgaggccagcattatcacctccaggactttctcgttttccaccttggccatcttcttccttcgtcgtctctcctctttaatttcttttctattccatcatctgcccttttattcacttttagcctctttttttaatttttaaaatttaaagatatgcatactgaaaagtatataacatgtacgtacaatttaaagaataattttaaagtgaatactacgtaactccatccaagtcaagaaattgccagcttctcggaagcccactgtgtctccttcccctacctgcaacctcttccaggctcccttttccagccttcccctttttcccttttattttcatgccttgatttgacttgtgtggtgggaacatgtgaactatgaaacttaaacctgctgcccacccagagcagctgtgaccaagggctgcctcaaggggttgtccacgcaggttgggctcctctctgctgctggacccaagactctgaaccttccaagggacaggcagttcttctaagaagggctcccctgtgtgtgagcaagaccacagctctccttctatctacagatgcatgagggttggaagagtctgggctgtttttagaccttctggtcagctgtatttgtgtaacaacttttgtaataaatagaaaaaccctctgctctgatcagttcttgtactttgacctctgctaagacaagagcatggctgcctcctctgagccctaggagaatcacagctttatgcctgattgaatacaccatagtgagtaggacagctcatgacacaggtcagcctggctgcctccggctccttactgtcatttgctcattcctcttgtattcttgaagtcaaatcttcttttttctcaccttcaagagtctgcgttcacaactaaacactaagtgccctttcttatttcctcctaaagaagaaacagattcttgagagagcagagacaaaaaaatagaactaggcagcatagatgaaacaactgcatgacatgggaagaagacaactaaaccccgaggagaatgcactggaatggacagttgctcttaaaccctacccagagggcctcccccagctggaccctcatacacagtgtgtgtatccaaaaggccattgctatttcagcaaatatttgttgagtacttctccatgccggacacttgggaaagagaaatgaacgacacaggcaatgcccctgccctgtgggccttatattatagtcaaggtaacagaatcaacaagccaacacaaaaataaagaacttcaaatagggataagaactctaacaaacacaaggtattttggtcaagaaggaatgtggggtgggcagtggggaacgtaacttaaattagatcatcagaaagtcctccctgaggagatgggatttttttgttttttagagacagggtttcactctgtcacccaggctggagtgcagtggcacaatcacacctcactgcagcctcaacttcctgggctcaagtgatcctcctgcatcagcttcccaagtagctgggactacaagtgtgtaccaccacatccagctaacatttttgggggtgggaagagatggggtcttactatgttgtccaggctaagaggtgggatttgagctgagacttgaatgcccaggagttaaatgtcttaagatatggagcaggccgttagaaaggagggagcagcaactggaaggtagaatagtcttattcaaggaataagaactatgtaatcacagcatggtgaagagttaggaagtg

SEQ ID NO: 170706 - DNA, 423 bp, Artificial Sequence
  derived and/or modified sequence
atgagcagattcctgaacgtgctgagaagctggctggtgatggtgagcatcatcgccatgggcaacaccctgcagagcttcagagaccacaccttcctgtacgagaagctgtacaccggcaagcccaacctggtgaacggcctgcaggccagaaccttcggcatctggaccctgctgagcagcgtgatcagatgcctgtgcgccatcgacatccacaacaagaccctgtaccacatcaccctgtggaccttcctgctggccctgggccacttcctgagcgagctgttcgtgtacggcaccgccgcccccaccatcggcgtgctggcccccctgatggtggccagcttcagcatcctgggcatgctggtgggcctgagatacctggaggtggagcccgtgagcagacagaagaagagaaactag

SEQ ID NO: 170707 - DNA, 435 bp, Artificial Sequence
  derived and/or modified sequence
atgtactctgagattcaaagggagagggccgatatcggcggtctcatggcacggcccgagtatcgggaatggaatcctgagctcattaaacctaaaaaactgcttaatcccgtcaaggcatcgcgtagccaccaagaactacatcgagagctgctgatgaaccatagaagggggctgggcgtggatagtaagcctgagctacagcgagtgttggaacatcggcggcgaaatcaattgattaagaagaaaaaggaggagcttgaggcgaaacggctgcagtgtcctttcgagcaagagttactaaggcgacagcaacgattgaatcagcttgagaaaccccctgagaaggaggaggaccatgcacctgagttcatcaaagtgagagaaaacctgagacgtatcgcaaccctcacgtccgaggagcgagagttgtag

SEQ ID NO: 170708 - DNA, 435 bp, Artificial Sequence
  derived and/or modified sequence
atgtacagtgaaattcagagggaaagagctgatatcggtggccttatggctaggcctgaatacagagaatggaatcccgagctcatcaaacctaagaagctgctgaacccagttaaagcttcaagaagtcatcaggagctgcaccgagaactgctcatgaatcacaggagaggtttgggggtggactctaaacctgagctgcagcgagtgctggagcacaggagaagaaatcagcttatcaaaaagaaaaaagaagagctagaggccaagaggctgcagtgcccgttcgaacaggaattgctgcggcggcaacagcgcctgaatcagctcgagaagccacctgaaaaagaggaggaccatgcgcctgagttcatcaaagtccgcgagaacctaagaagaatagcaaccctgacaagtgaggaacgggaactctag

SEQ ID NO: 170709 - DNA, 408 bp, Artificial Sequence
  derived and/or modified sequence
atgtattctgagatacaacgcgagcgtgcggatatcggaggtctcatggccagacccgagtacagggagtggaatcccgaactgatcaagcctaaaaagttgctcaacccagtcaaagccagcaggagccatcaggagctgcatagagaacttctgatgaaccaccgtagaggtcttggagtagattctaagccagaattgcagcgcgtgctggaacaccgacgcagaaaccaattaatcaaaaagaaaaaggaggaacttgaggcaaagagactgcagtgtccatttgaacaggagctcttacgaagacaacaaagactgaatcaggtcggggatggccatccggcaggcacaactcacccaccagggctgagttccagagaggaactctgttgcggccatagttag

SEQ ID NO: 170710 - DNA, 318 bp, Artificial Sequence
  derived and/or modified sequence
atgtattccgagatccagcgggagagagcagatatcggagggttgatggctcgacctgaatatcgggagtggaatcccgagctgattaaaccaaagaaacttcttaatccggtgaaggctagccggtcccaccaggagctgcatagagaactgctgatgaaccatcgcagaggccttggggtcgactctaaacctgaacttcagcgagttctggagcacaggcggcgaaaccaattaataaaaaagaaaaaggaggagcttgaggccaagagactgcagtgtccctttgaacaggagttgttaagaaggcagcagtag

SEQ ID NO: 170711 - DNA, 435 bp, Artificial Sequence
  derived and/or modified sequence
atgtacagcgagatccagcgggagagagctgacatcggcggcctgatggcccggcctgagtaccgggagtggaaccctgagctgatcaagcccaagaagctgctgaaccctgtgaaggccagccgcagccaccaggagctgcaccgggagctgctgatgaaccaccggcggggcctgggcgtggacagcaagccagagctgcagagggtgctggagcacagaagaagaaaccagctgatcaagaagaagaaggaggagctggaggccaagaggctgcagtgcccctttgagcaggagctgctgcggcggcagcagaggctgaaccagctggagaagcccccagagaaggaggaggaccacgcccctgagttcatcaaggtgcgggagaacctgcggcgcatcgccaccctgaccagcgaggagcgggagctgtag

SEQ ID NO: 170712 - DNA, 408 bp, Artificial Sequence
  derived and/or modified sequence
atgtacagcgagatccagcgggagagagctgacatcggcggcctgatggcccggcctgagtaccgggagtggaaccctgagctgatcaagcccaagaagctgctgaaccctgtgaaggccagccgcagccaccaggagctgcaccgggagctgctgatgaaccaccggcggggcctgggcgtggacagcaagccagagctgcagagggtgctggagcacagaagaagaaaccagctgatcaagaagaagaaggaggagctggaggccaagaggctgcagtgcccctttgagcaggagctgctgcggcggcagcagaggctgaaccaggtgggagatggccaccctgctggcaccacccaccccccaggcctgagcagccgggaggagctgtgctgcggccacagctag

SEQ ID NO: 170713 - DNA, 318 bp, Artificial Sequence
  derived and/or modified sequence
atgtacagcgagatccagcgggagagagctgacatcggcggcctgatggcccggcctgagtaccgggagtggaaccctgagctgatcaagcccaagaagctgctgaaccctgtgaaggccagccgcagccaccaggagctgcaccgggagctgctgatgaaccaccggcggggcctgggcgtggacagcaagccagagctgcagagggtgctggagcacagaagaagaaaccagctgatcaagaagaagaaggaggagctggaggccaagaggctgcagtgcccctttgagcaggagctgctgcggcggcagcagtag

SEQ ID NO: 170714 - DNA, 435 bp, Artificial Sequence
  derived and/or modified sequence
atgtacagcgagatccagcgggagcgggccgacatcggcggcctgatggccaggccagagtacagagagtggaaccccgaacttattaagcctaagaagttattaaaccctgttaaggcgagcagatcacaccaggagttgcatcgggaattgctgatgaaccatcgcagaggcctcggagtggactcgaagccggagctgcaaagggtactggaacacaggcgccgaaatcagctgattaagaaaaaaaaggaggaactcgaggctaaacggctccagtgccctttcgaacaggagcttttacgtaggcagcagagactgaaccagttggagaagccccctgagaaggaggaggatcacgctccagaattcataaaggtcagagagaacctgcgtaggatagcaacactgacctctgaagaaagagagctgtag

SEQ ID NO: 170715 - DNA, 435 bp, Artificial Sequence
  derived and/or modified sequence
atgtacagcgagatccagcgggagcgggccgacatcggcggcctgatggcccgaccagaatatagggaatggaacccggagctgatcaagccaaagaaactcttgaaccccgtgaaagccagccggtcacatcaagaactgcatagagaattattgatgaaccaccggagggggttaggcgtcgactccaagccagagttacaaagagtactcgaacatcggaggaggaatcagttaattaaaaagaaaaaggaagagcttgaagcaaagcgactacagtgccccttcgagcaagagttactaagacgccagcagagactcaaccagttggaaaaacctcccgaaaaggaggaggaccacgcccccgagttcattaaagtgcgcgagaatttgaggcggatcgcaacactgacatctgaggaaagagaactgtag

SEQ ID NO: 170716 - DNA, 408 bp, Artificial Sequence
  derived and/or modified sequence
atgtacagcgagatccagcgggagcgggccgacatcggcggcctgatggctcggcctgagtatcgcgaatggaatcccgagctgattaagcctaaaaagctgctcaacccagttaaggccagtcgaagccaccaggagctgcaccgagagctattaatgaaccatagacgcggactgggcgtagattctaagccagagctacaacgtgtgctggagcaccgccgacgcaatcagctcataaagaaaaaaaaggaggagctggaggctaagagactccagtgtccattcgagcaggagctgttgagacgacaacaaagacttaatcaggtgggtgatgggcatcctgcggggacaacacaccccccagggctatcgagccgggaagagctttgctgtggtcattcatag

SEQ ID NO: 170717 - DNA, 318 bp, Artificial Sequence
  derived and/or modified sequence
atgtacagcgagatccagcgggagcgggccgacatcggcggcctgatggcacgacctgagtacagggaatggaatccagaattgatcaaaccgaagaagctgctcaatcctgtgaaggccagtaggagccatcaggaacttcacagggagctacttatgaaccatcgccgcggactcggcgtggactctaagcctgaactgcagcgggtgttggaacaccgaaggcggaatcagctgattaaaaagaaaaaggaggagctcgaggccaaacgactgcagtgtccatttgagcaggaactgctgaggagacagcagtag

SEQ ID NO: 170718 - DNA, 435 bp, Artificial Sequence
  derived and/or modified sequence
atgtattctgaaattcagagagagagagccgatatcggcggacttatggcaagaccagaataccgggaatggaaccccgagctcataaagccaaaaaaactcctgaacccagtgaaggcatccagatcacaccaagaactgcatcgagaactgctgatgaaccacaggcgaggactcggcgtcgattctaagccggaactgcaaagggtgctggaacacagacgcaggaatcagctcattaaaaagaagaaagaagaactggaagcaaaaaggcttcagtgcccattcgaacaggaactgctaaggaggcagcaacgcctgaaccagcttgaaaagccacctgagaaggaagaggatcatgcccctgagttcattaaggtgcgtgagaatttacgcagaattgcgaccctcacaagcgaggaacgcgaactctag

SEQ ID NO: 170719 - DNA, 435 bp, Artificial Sequence
  derived and/or modified sequence
atgtattccgaaatacagagagaaagggctgacatcggaggactgatggcacggccagaataccgcgagtggaatcccgaactgattaagcccaagaaactgctcaatccagtcaaagcatcacgctcccaccaggagctgcatcgagaacttctgatgaaccatcgcagaggactaggcgtcgactctaagcccgaactgcagagggtgcttgagcacagaagaaggaaccagctgatcaagaagaagaaggaagagcttgaagctaagcgactccagtgcccctttgaacaggagctcctgcggaggcagcagcggttgaatcagcttgaaaagccaccggaaaaggaggaagaccatgcgcctgaattcattaaagtgcgcgagaaccttcgccgaatagccacattgactagcgaggagcgggagctgtag

SEQ ID NO: 170720 - DNA, 408 bp, Artificial Sequence
  derived and/or modified sequence
atgtacagcgagatccagagggagagagccgacatcggaggcctgatggcgagaccagagtaccgagagtggaatccggaactaatcaagcccaaaaagttgctcaaccccgtgaaggcatcgaggagtcaccaggaacttcatcgagagttgttaatgaatcatcgcaggggattaggcgtggattcgaaaccggagctgcaacgtgtcctggaacatcggaggagaaaccagcttattaagaagaagaaagaagagctcgaagcaaagcggctgcagtgcccctttgagcaggagttgctgagacggcagcagcgtttgaaccaggtcggggatgggcaccctgccggtaccacacacccaccaggactgtcctcaagagaggaactttgctgcggccattcatag

SEQ ID NO: 170721 - DNA, 318 bp, Artificial Sequence
  derived and/or modified sequence
atgtactctgagatccagcgggaacgggcagacatagggggactcatggccagaccggagtaccgcgagtggaacccagaactgattaagccaaaaaagttactaaatcccgtgaaagcctcccgctcccaccaggaactgcatcgggagttgctcatgaatcacaggaggggactgggcgttgatagcaagcccgaactccagcgtgtccttgagcaccgccgtcggaaccagttgatcaaaaaaaaaaaagaggagctggaagcaaagcgtctccagtgtccattcgaacaggaactgcttcggcgacagcagtag

SEQ ID NO: 170722 - DNA, 435 bp, Artificial Sequence
  derived and/or modified sequence
atgtacagcgagatccagagagagagagccgacatcggcggcctgatggccagacccgagtacagagagtggaaccccgagctgatcaagcccaagaagctgctgaaccccgtgaaggccagcagaagccaccaggagctgcacagagagctgctgatgaaccacagaagaggcctgggcgtggacagcaagcccgagctgcagagagtgctggagcacagaagaagaaaccagctgatcaagaagaagaaggaggagctggaggccaagagactgcagtgccccttcgagcaggagctgctgagaagacagcagagactgaaccagctggagaagccccccgagaaggaggaggaccacgcccccgagttcatcaaggtgagagagaacctgagaagaatcgccaccctgaccagcgaggagagagagctgtag

SEQ ID NO: 170723 - DNA, 408 bp, Artificial Sequence
  derived and/or modified sequence
atgtacagcgagatccagagagagagagccgacatcggcggcctgatggccagacccgagtacagagagtggaaccccgagctgatcaagcccaagaagctgctgaaccccgtgaaggccagcagaagccaccaggagctgcacagagagctgctgatgaaccacagaagaggcctgggcgtggacagcaagcccgagctgcagagagtgctggagcacagaagaagaaaccagctgatcaagaagaagaaggaggagctggaggccaagagactgcagtgccccttcgagcaggagctgctgagaagacagcagagactgaaccaggtgggcgacggccaccccgccggcaccacccacccccccggcctgagcagcagagaggagctgtgctgcggccacagctag

SEQ ID NO: 170724 - DNA, 318 bp, Artificial Sequence
  derived and/or modified sequence
atgtacagcgagatccagagagagagagccgacatcggcggcctgatggccagacccgagtacagagagtggaaccccgagctgatcaagcccaagaagctgctgaaccccgtgaaggccagcagaagccaccaggagctgcacagagagctgctgatgaaccacagaagaggcctgggcgtggacagcaagcccgagctgcagagagtgctggagcacagaagaagaaaccagctgatcaagaagaagaaggaggagctggaggccaagagactgcagtgccccttcgagcaggagctgctgagaagacagcagtag

SEQ ID NO: 170725 - protein, 363 aa, Artificial Sequence
  derived and/or modified sequence
MAMRQTPLTCSGHTRPVVDLAFSGITPYGYFLISACKGAGQHLPRLSGQHDGKPMLRQGDTGDWIGTFLGHKGAVWGATLNKDATKAATAAADFTAKVWDAVSGDELMTLAHKHIVKTVDFTQDSNYLLTGGQDKLLRIYDLNKPEAEPKEISGHTSGIKKALWCSEDKQILSADDKTVRLWDHATMTEVKSLNFNMSVSSMEYIPEGEILVITYGRSIAFHSAVSLDPIKSFEAPATINSASLHPEKEFLVAGGEDFKLYKYDYNSGEELESYKGHFGPIHCVRFSPDGELYASGSEDGTLRLWQTVVGKTYGLWKCVLPEEDSGELAKPKIGFPETTEEELEEIASENSDCIFPSAPDVKA

SEQ ID NO: 170726 - protein, 350 aa, Artificial Sequence
  derived and/or modified sequence
MAMRQTPLTCSGHTRPVVDLAFSGITPYGYFLISACKDGKPMLRQGDTGDWIGTFLGHKGAVWGATLNKDATKAATAAADFTAKVWDAVSGDELMTLAHKHIVKTVDFTQDSNYLLTGGQDKLLRIYDLNKPEAEPKEISGHTSGIKKALWCSEDKQILSADDKTVRLWDHATMTEVKSLNFNMSVSSMEYIPEGEILVITYGRSIAFHSAVSLDPIKSFEAPATINSASLHPEKEFLVAGGEDFKLYKYDYNSGEELESYKGHFGPIHCVRFSPDGELYASGSEDGTLRLWQTVVGKTYGLWKCVLPEEDSGELAKPKIGFPETTEEELEEIASENSDCIFPSAPDVKA

SEQ ID NO: 170727 - DNA, 1092 bp, Artificial Sequence
  derived and/or modified sequence
atggccatgcgccaaacaccgctcacctgcagtggccacactcggcccgttgtggatctcgcattctcggggatcactccctatggctactttctgatatctgcttgtaaaggagcaggtcagcaccttccgagactctctggtcagcatgacggaaaacccatgctaagacagggcgatacgggggattggattgggacctttttaggccataaaggcgcggtgtggggagcgaccttaaataaggacgccaccaaagctgcaactgcagcagcagacttcaccgctaaagtctgggatgctgtgtcaggagatgaactcatgacacttgcgcacaagcacatcgtcaagactgtggacttcacccaagattccaactaccttctgactggcgggcaagacaaattgcttcggatctacgacttaaacaagcctgaggcagaacccaaagaaattagcggacatactagtgggatcaagaaagcactgtggtgttctgaggataaacaaattttaagcgccgatgacaagacagtgcggctgtgggaccatgccaccatgactgaggtgaaaagcctgaactttaatatgtcagtgtcttcaatggagtatatccctgagggagaaattctagtcatcacctacggtcgaagcatagcctttcactctgccgtatccctggacccaataaagagttttgaggccccggcaaccatcaatagtgccagcttgcaccccgagaaggaatttctcgttgcgggcggagaagactttaagttgtataagtatgactataattccggcgaggaactcgaaagttacaagggacattttggcccaatccactgtgtgagattttcaccagacggagagctctatgcttctggcagcgaagacggaacactaagactgtggcagacagtggtgggaaagacctatggactgtggaaatgcgtgctgcccgaggaagacagcggggagcttgccaaacccaaaatcgggtttcctgagacaaccgaagaggagctggaggaaattgcctccgagaactccgactgcatattcccgtccgccccggatgtcaaggcatag

SEQ ID NO: 170728 - DNA, 1053 bp, Artificial Sequence
  derived and/or modified sequence
atggccatgcggcagactccacttacatgcagcggccacacacgtccagtcgttgacctggccttctcaggtatcacgccgtatggctattttctgatttccgcctgcaaggacggtaaacccatgcttagacagggcgacaccggcgactggattggcactttcttgggacacaaaggcgctgtttggggggccacactgaataaagacgccacgaaggcggcaaccgccgctgccgatttcaccgcgaaggtgtgggatgcagtcagtggggacgaattgatgacactggcacacaagcatatcgtgaagactgttgatttcacccaagactccaactaccttctgaccggagggcaggataagctgcttaggatttatgatttaaacaagcccgaagccgaaccaaaggagatctctgggcacaccagtggaatcaagaaagcactgtggtgctccgaagataaacagatcctaagcgccgacgacaagacagttaggctttgggaccacgccacgatgactgaggtcaagagtctaaattttaatatgtctgtgtctagcatggaatacattccagagggggagatcctcgttattacctacggaagaagcatcgcatttcattcggctgtgtctcttgatcctattaaatcttttgaggccccggcgactattaactcggcctctctgcaccctgaaaaggagtttctggtggctggcggagaagactttaagctttacaaatatgattataatagtggcgaagagttagagtcctataagggacatttcggcccgattcactgtgtgcgctttagtccagacggcgagctctacgcctccggctctgaagatgggacccttcgactgtggcaaactgtggtgggaaaaacttatggactctggaaatgcgttttacctgaggaggatagcggggagctggccaagcctaagattggctttccagagacaaccgaggaagagttggaagaaattgctagtgaaaactccgactgcatatttccatctgcgccggatgtgaaggcttag

SEQ ID NO: 170729 - DNA, 1092 bp, Artificial Sequence
  derived and/or modified sequence
atggccatgaggcagacccccctgacctgcagcggccacaccaggcctgtggtggacctggccttcagcggcatcaccccctacggctacttcctgatcagcgcctgcaagggagctggccagcacctgccccggctgagcggccagcatgatggcaagcccatgctgcggcagggcgacacaggagactggattggcaccttcctgggccacaagggagctgtgtggggcgccaccctgaacaaggatgccaccaaggccgccacagctgctgctgacttcaccgccaaggtgtgggatgctgtgtctggagatgagctgatgaccctggcccacaagcacatcgtgaagacagtggacttcacccaggacagcaactacctgctgaccggcggccaggacaagctgctgcgcatctatgacctgaacaagccagaggccgagcccaaggagatcagcggccacaccagcggcatcaagaaggccctgtggtgcagcgaggacaagcagatcctgtctgcagatgacaagacagtgcggctgtgggaccacgccaccatgacagaggtgaagagcctgaacttcaacatgtctgtgtcctccatggagtacatccctgagggggagatcctggtgatcacctacggccgcagcatcgccttccacagcgctgtgtccctggaccccatcaagagctttgaggccccagccaccatcaacagcgccagcctgcaccctgagaaggagttcctggtggccggcggggaggacttcaagctgtacaagtatgactacaacagcggggaggagctggagagctacaagggccacttcggccccatccactgtgtgcgcttctccccagatggagagctgtatgccagcggctctgaagatggcaccctgcggctgtggcagacagtggtgggcaagacctacggcctgtggaagtgtgtgctgcctgaagaagattctggagagctggccaagcccaagattggcttccctgagaccacagaggaggagctggaggagatcgcctctgaaaattctgactgcatcttccccagcgccccagatgtgaaggcctag

SEQ ID NO: 170730 - DNA, 1053 bp, Artificial Sequence
  derived and/or modified sequence
atggccatgaggcagacccccctgacctgcagcggccacaccaggcctgtggtggacctggccttcagcggcatcaccccctacggctacttcctgatcagcgcctgcaaggatggcaagcccatgctgcggcagggcgacaccggggactggattggcaccttcctgggccacaagggagctgtgtggggcgccaccctgaacaaggatgccaccaaggccgccacagctgctgctgacttcaccgccaaggtgtgggatgctgtgtctggagatgagctgatgaccctggcccacaagcacatcgtgaagacagtggacttcacccaggacagcaactacctgctgactggaggccaggacaagctgctgcgcatctatgacctgaacaagccagaggccgagcccaaggagatcagcggccacaccagcggcatcaagaaggccctgtggtgcagcgaggacaagcagatcctgtctgcagatgacaagacagtgcggctgtgggaccacgccaccatgacagaggtgaagagcctgaacttcaacatgtctgtgtcctccatggagtacatccctgagggggagatcctggtgatcacctacggccgcagcatcgccttccacagcgctgtgtccctggaccccatcaagagctttgaggccccagccaccatcaacagcgccagcctgcaccctgagaaggagttcctggtggccggaggagaggacttcaagctgtacaagtatgactacaacagcggggaggagctggagagctacaagggccacttcggccccatccactgtgtgcgcttctccccagatggagagctgtatgccagcggctctgaagatggcaccctgcggctgtggcagacagtggtgggcaagacctacggcctgtggaagtgtgtgctgcctgaggaggacagcggggagctggccaagcccaagattggcttccctgagaccacagaggaggagctggaggagatcgccagcgagaacagcgactgcatcttccccagcgccccagatgtgaaggcctag

SEQ ID NO: 170731 - DNA, 1092 bp, Artificial Sequence
  derived and/or modified sequence
atggccatgcggcagacccccctgacctgcagcggccacacccggcccgtggtcgatttagcctttagcgggatcacgccatatggctactttctgattagtgcctgcaaaggagccggtcaacatttgcccaggctctcgggacaacatgacggaaagcctatgctcagacaaggggacaccggggactggatcggcacctttctgggccataagggtgcagtctggggcgccactctgaataaggatgccaccaaggctgctaccgccgctgccgatttcactgccaaagtttgggacgcagtgagcggggacgaacttatgactctggcacacaaacatattgttaaaaccgtggattttacgcaggatagcaactatctgctgacgggaggacaggacaagctgcttaggatatatgacctcaacaagcccgaggccgagcccaaggagattagcgggcacacaagtggcatcaagaaagcgctgtggtgctcggaggacaagcagattctgagcgctgacgataaaaccgttagattatgggatcacgccaccatgaccgaagtcaagtcactgaatttcaacatgtctgtctcctctatggaatatataccagaaggggaaatcttggtgatcacatacggaagatccatcgctttccactcggccgtctcccttgatcccattaaatcctttgaggctccagccaccattaactctgcctccttgcatcccgaaaaggagttcctagtggccggcggtgaggattttaaactgtataaatacgactataatagtggagaggagctggagtcttacaaagggcactttggaccaatacattgcgtgagatttagcccagacggggaattatatgcctccggttcagaggacggtactctccgcctgtggcaaacagttgttggcaaaacctacggcctctggaaatgcgtgcttccagaggaggactctggtgaactggcgaagcctaagatcggatttcccgagaccacagaggaggaactggaggagatcgcgagcgaaaacagcgattgtatctttccctctgccccagatgtgaaggcatag

SEQ ID NO: 170732 - DNA, 1053 bp, Artificial Sequence
  derived and/or modified sequence
atggccatgcggcagacccccctgacctgcagcggccacacccggcctgtagtggacctggctttttcagggatcactccttacgggtatttcctgatcagcgcatgcaaggacggaaaaccgatgctgcgccagggcgatactggagactggatcggaacctttctgggacataagggcgcagtctggggcgcaactcttaacaaggacgccacaaaggctgcaacagcggccgccgattttacagccaaagtctgggatgctgttagtggggatgagttgatgaccctggcccataaacacatagtgaaaactgtggatttcacacaagatagtaattacttgctaaccggaggacaggacaaactactacggatctatgatctgaataaacccgaagccgagcctaaggagatttccgggcatacatcgggaattaagaaggccctctggtgcagcgaggacaaacagatcttgagtgctgatgacaaaacagtacgtttatgggaccatgcgaccatgactgaggtgaaaagccttaacttcaacatgagtgtctcttcaatggagtacatcccggagggggagattctggtcataacctatgggagaagtatcgcttttcatagcgccgtcagtctggatccaatcaaatcatttgaggcccctgctacaatcaattccgcgtcccttcacccagaaaaggagtttctcgtcgctggtggcgaagacttcaagctttacaagtacgactacaacagtggagaggagctggaatcctataaggggcactttggccctattcattgtgtgaggttcagtccagacggagagctgtacgcaagtggctctgaggacgggaccctgagactctggcagacggttgtgggtaaaacatatggattatggaagtgtgtgctccctgaagaggacagcggagaacttgccaaacccaagatcggcttccctgaaacaactgaggaggaactggaggaaatcgcatccgaaaacagtgactgtatcttccccagcgctccagatgtgaaagcatag

SEQ ID NO: 170733 - DNA, 1092 bp, Artificial Sequence
  derived and/or modified sequence
atggctatgcgccagactccgcttacatgttctggccatactagaccggtcgtggatctggccttctcaggtattacaccctatggctatttcttaatctctgcatgcaagggtgctgggcagcatcttccccgactcagcgggcaacacgacggcaaacccatgctgcggcagggtgatactggcgactggataggaacctttctcggccataaaggcgctgtatggggcgctacactgaacaaggacgccaccaaagccgcaacagccgctgccgactttaccgcgaaagtgtgggacgctgtctcaggagatgagctgatgacattggcacacaaacatatagtgaagaccgtggacttcacacaggattcgaattatctccttacgggtgggcaagacaagctgctacggatatatgacctgaataagcccgaggccgagccaaaagagatttccggacataccagtggcattaagaaggccttatggtgttccgaggataaacaaatcctaagcgcggacgacaaaaccgtcaggctctgggaccatgcaacgatgaccgaggtgaaatccttaaattttaatatgtccgtttcaagcatggaatatatacctgagggcgaaatcctggtgattacatatggaagatctatcgcatttcactccgctgtgagtctggatcccattaaaagtttcgaggctcccgctacaataaacagcgctagtttacaccctgaaaaagaatttctagtggctgggggagaggattttaagctgtataaatacgactacaatagcggcgaagaattggagagctacaagggccatttcggccctattcactgcgtgcggtttagccccgacggagaattgtatgcttctggtagcgaagatggaaccctgcgcctgtggcagaccgttgtgggaaaaacttacggcttatggaaatgtgtgctgccagaagaggacagcggcgaactcgccaaacccaaaatcggattccccgaaacgaccgaggaggagctggaggagatagcctcggagaactccgactgtatcttcccgtcagctcctgatgtgaaggcctag

SEQ ID NO: 170734 - DNA, 1053 bp, Artificial Sequence
  derived and/or modified sequence
atggccatgcggcagacacctctgacttgctcaggacacacgaggcctgtcgtagacctggccttcagtgggattactccatacggctatttcctgatctctgcgtgcaaagatggaaaacctatgctgcgccaaggcgatacaggagattggatcggtacgtttttaggacacaagggcgctgtatggggggctacccttaataaggatgccacaaaggctgctaccgctgccgctgattttactgctaaggtgtgggatgcggtcagtggtgatgaattgatgaccctggcccacaagcacatcgtgaagaccgtggactttactcaggactccaattacctgttaacaggcggacaggataaattactgcgaatatacgacctcaataaaccagaggccgagcccaaagaaatttccgggcacacatctggcattaagaaggctctgtggtgttctgaagacaagcagatattatctgccgatgataaaaccgtgcgcttatgggatcatgcgactatgacagaggtgaaaagtctgaacttcaacatgagcgtgtcctcaatggaatacatccccgagggtgagattttggttattacatatggcaggtcaattgcctttcactcagctgtgagcctggatcccattaagagcttcgaggcccctgcaacaattaactcagcttccctccaccccgaaaaggagtttcttgttgccggaggagaggacttcaagctgtacaaatacgactacaactctggggaggagctggaatcctacaagggtcacttcggccctatccattgtgtgagattttcacctgacggggaactgtacgcctccggcagcgaggatggcacactccgactctggcaaactgttgttggtaagacttatggcctgtggaagtgtgttttgccagaagaggacagtggggaactggctaaacccaaaatcgggttcccagaaaccactgaggaggagttagaagaaatcgcatcagaaaacagcgattgcatattcccatccgctcccgacgttaaggcctag

SEQ ID NO: 170735 - DNA, 4237 bp, Artificial Sequence
  derived and/or modified sequence
ggctcttcgggtaaagatggcggagcgcgggtacagcttttcgctgactacattcagctgcaaatggtgtggtattagcaactgagaaaaaacagaaatccattctgtatgatgagcgaagtgtacacaaagtagaaccaattaccaagcatataggtttggtgtacagtggcatgggccccgattacagagtgcttgtgcacagagctcgaaaactagctcaacaatactatcttgtgtaccaagaacccattcctacagctcagctggtacagagagtagcttctgtgatgcaagaatatactcagtcaggtggtgttcgtccatttggagtttctttacttatttgtggttggaatgagggacgaccatatttatttcagtcagatccatctggagcttactttgcctggaaagctacagcaatgggaaagaactatgtgaatgggaagactttccttgagaaaaggtaggcctactcattgtaactgcattctttagcaaactcactttatggtttttggtgctctttaagtaaattaatatcatgggactaaagaaacttgctatattactctgtatatgaatctagttacagataaaccaaaaacttctctcccttctagtttcctagacttcagtatattaagtggtaattaatattcatttcctaaggagttctctttctacattctatggtttcctaaatgcttttggtttttttactttttacttcactttttgtgccatttcaggagggaaaaaaaagaacattgaatctggaataaaacatttggggagacaaatttttaaatgatttaatgataacagtttacgacagtaaaaaaaattgtgaaaccaaatgcctggagttgaaggtatattaaatatttgatacatgtgcttgataaaaagtggagcactatgtaaaaatctgtcggtgcccaagtacaagctgctcttacttatttccagctgtattctagtctcagtgttactgtagtccttcgggactctccaagcttttgaagaagaaaatgttttatttcttgatatgtaatagttgcacatatttttgcagtacatgtgatattttgatacctgtatacagtgtcaaatcagggtaattggatatccattacctcaaacatctgtcttttctttgtgttgggaacatagcagatcttctagctgttctgaaatatacagtaaattgttaacgataatttcctgactgtactactggacaccagaacttattcctcctgtctgaccgtatttttagaccccttaaccaacttccttcagttcttcttcccttctcccttcccagcctctggtaaccactgtgctactctctccctccatgagatccacttttttagctcccacatatgagtgacaacatgcaatatttatctttctgtgcctggcttattttgcttaacgtaatgacctcgagttccatccatgttgctgcaaatgacaggatttcatttttttatggctgaataataataaaaaacttcgtaactccgtttaacagatgagccttcacagtacatttttcacgtaacgttaaggttattaaaaatcttaggcctggatttaaatggtaaacttaatcttaggctcttaaagcactttttcatttttcttttatatattaatgagtcttccaaagatttcacattgttattacatgatatgttatgatttgttttattttttgtttcagaggcattttatttagacaactaaaaataattagatgttcagaaccagtgtacaatgaaagaaattaaaccagttactttatcatgtattccctctttacaaccaaagcaaaaaacaatagcaacaaagacattctgctttaagggaaaagtcagacaaataagccaatatatttttcttctccataatgacataaacagctgcaagaactcttaattgtaataagagaagttggatgttatcttgtacatattcattaaaaagatgacaggccattgtactacaagaggataactcaacctcccttcatctgatactcttgagatttcacttatgggtaacaccatgttagttgtttcagcaatggagctaattcatattcctcattatttattgctgtttttgccttaagcagagagtaactctggaaggctgatgcttttctctgcttgctcgttctagtccagttgtatgctgtctgtggcacatgcttgatgttcaggccttaacttgaggagttgaagaatagatggaatctgaattctctgaagcaatttcttctagctcttctcttgtctttggaaaaccaatctttggctttgccagctcaccagtatcttcttcaggaagcacacatttccaaaggccatatgtttttcctaccacagtttgccagtctcagtgttccatcttcagaaccactggcatagagttctccatcaggatcaaatctcacacagtgaataggaccagagtgtcctttgtaggattctaattcttctccactattatcatcatacttataagtttaacatcttcaccacctgcaacaagaaattctttctcaaggtgaagagattcagagttaatgtttgcaggagcttgaaaggatttaattggttccaaacttactgtactgtcaaaagcactggatcagccataagttattaccaaaatctctccctcagaaatatattccatactactagccaacataataaaatttagagatttcacttctgtcatagtagcatgatcccaaagtcttaacagttttgtcatcagaagaaagaatctgtttatcctcactgtaccatagggcctttttaatatcagagctgtgatcactaatttcctcaggttctgcttcgggtttgttcaagtcatatatgcaaaacagtttattctgtcccctggttaacaaataattactatcctgcatgaaatccatagtcttgataatgtgtttatgagccagggtcatcagttcatctcctgggatagcatcccacactttgtgaaatctgcagctgctgtggctgctttggtggcatccttattcagtgttgcattccagacagcatctttatgacccaaaattgttccaatccagtctcctgtatctccctggcatagcataggtttgccgtctttgcaagcactgatttagaaatactcataagactggccaggcgcagtggctcacgcctgtaatcccagcactttgggaggccaaggcaggcggatcacctgaggtcagaagttcgagaccagctgggccaacatggtgaaaccccgtctctactaaaaatacaaaaattagccaggagtgatagcgcgcgcctgtaatcccagctactcgggaggctgaggcaggagaatcacttgaacctgggaggcggagtttgcagtgagccaagattgcaccactgcactccagcctgggcgacagagcaagattctgtcttgagggaaaaaaaagcccctaaggcatgatgccactgaaggccaagtcagccacgggccatatgtggccagaacaggtgagcagcatcagtctcattgctatggaggtggtgaacccagtgattgggctggtgggctgagggtcatccttgtcttttctcctctggtacagcgcccggggttcctccaggcttcaccctaacacgggctgagcagagaaaaaggaaaaggtggcaccgagattaggaaggagctagggaggggctggggagtctgggaagggtgagcaacagttgacaatggagggaggaaagtaggggatggggagaaccgaagaaacgacccagccactcttcgcaccgtccacactggtatcggcaggaagtgacatgttatgttttaacttataagaaaaagattttagcaaagttctgatttttctgtgttttaaaaattataataatgccaccacatcctgattgttaaaatatttatacttaagaagtttcctggctgggtgtgttggctcgtgcctgtaatcccagcactttggtaggtcaaggcaggcggatcacgaggtcaggagatcgagaccatcctggctgacacagtgaaacccatctctactaaaaatacaaagaaattagctgggcgtagtgggcgcctgtagtcccagctacttgggaggctgaggcaggagaatggcatgagcccgggaggtggagcttgcagtaagccaagataactgtgtctc

SEQ ID NO: 170736 - DNA, 1092 bp, Artificial Sequence
  derived and/or modified sequence
atggccatgcgccagacacctctcacatgctctggacatacacgcccagtcgtggaccttgcgttctccgggataacgccgtacggatattttctgatttcggcttgtaagggcgctggacagcatctcccacgcctttccgggcagcacgacgggaaaccaatgctcaggcagggcgacaccggcgactggattggcacctttctaggacataagggagcagtatggggcgccacacttaataaagatgccaccaaagcggctactgctgccgccgattttaccgcaaaagtatgggatgccgtgtctggtgacgaactcatgacgctcgctcataagcacattgtgaaaacagttgatttcacgcaggactccaactaccttctaacaggaggacaggacaagctgctaagaatctacgatttgaataaaccggaggccgagcctaaagaaatatcaggccatactagtggtataaaaaaagccctctggtgctctgaggacaaacaaattctctccgccgatgacaaaacagtccgtctttgggaccacgccacgatgacagaagtcaaatcgctcaactttaacatgtcggtctcttccatggagtacattccagagggcgagattctcgtaataacctacggccgctccattgcattccactccgccgtgtcgcttgacccaattaagtcatttgaggcccccgccactatcaattccgcttccctccacccagagaaggagttcctcgtggctggaggagaggactttaagctgtacaaatatgattataacagcggagaagaattggagtcttacaagggtcattttgggccaattcattgcgtaagattctcacctgatggagagctgtatgctagcggaagcgaggacggtaccctgagactgtggcaaacggtggttgggaagacctacggcttgtggaagtgcgtcctgcccgaagaagattcaggcgaactggcaaaaccaaagatcggcttcccagagaccacagaggaggaattggaggagattgctagtgaaaactctgattgtatctttccaagtgcaccagatgttaaggcttag

SEQ ID NO: 170737 - DNA, 1092 bp, Artificial Sequence
  derived and/or modified sequence
atggcaatgagacagacaccactcacatgcagcggtcatacaagacctgtggtcgatttggcatttagtggaatcacaccttacggttatttcctgatttctgcatgcaaaggcgcaggacagcatctccctcgcttatctggacagcatgatggtaaacccatgctacgccagggcgataccggcgactggataggaaccttcctgggtcacaaaggggccgtgtggggcgctacattgaataaggatgcaacaaaagccgcaacagccgctgccgacttcactgccaaggtgtgggacgcggtgtctggggacgagctaatgacgttagcacataagcacattgtgaagacggtagattttacccaggacagcaactaccttctgaccggcggacaagacaaactgctgcgcatctatgatttgaacaaacccgaagccgaacccaaagaaatcagtggtcacacttccggaattaaaaaagctctgtggtgttctgaagataagcaaattctgtcagctgacgataaaactgtccggttgtgggaccacgcgaccatgaccgaagttaagtctctcaatttcaatatgagcgtgtccagcatggaatacatccctgagggcgaaatcctagttattacatacggcaggtctatagcctttcacagcgctgtcagtctggacccaatcaaatcattcgaggctcctgctacaataaactcagccagcttacatcccgaaaaggaattcttagtggccggaggtgaggactttaagctctataaatacgattataacagcggcgaggaactcgaaagctataaaggtcactttggcccgatacattgcgtgcgcttttcacctgatggcgaattgtatgcttctggtagtgaggacggaactctcagattatggcagactgttgttggaaagacctacggactgtggaaatgcgtactaccagaggaagactcaggtgagctagctaagccaaaaatcggcttcccagagaccacagaagaggagcttgaggaaatcgcatctgaaaactcggattgtatcttcccatccgcgccagacgtaaaggcctag

SEQ ID NO: 170738 - DNA, 1442 bp, Artificial Sequence
  derived and/or modified sequence
acttcctgccgatgccggtgtggacgctgtgaatcgtggctggcccggttctccgcttctccccatcccctactttcctccctccctccctttccctccctcgtcgactgttgcttgctggtcgcagactccctgacccctccctcacccctccctaacctcggtgccaccggattgcccttcttttcctgttgcccagcccagccctagtgtcagggcgggggcctggagcagcccgaggcactgcagcagaagagagaaaagacaacgacgaccctcagctcgccagtccggtcgctggcttcgccgccgccatggcaatgagacagacgccgctcacctgctctggccacacgcgacccgtggttgatttggccttcagtggcatcacgccttatgggtatttcttaatcagcgcttgcaaaggagctggtcagcatttgcctagactctcgggacaacacgatggtaaacctatgctacgccagggagatacaggagactggattggaacatttttgggtcataaaggtgctgtttggggtgcaacactgaataaggatgccaccaaagcagctacagcagctgcagatttcacagccaaagtgtgggatgctgtctcaggagatgaattgatgaccctggctcataaacacattgtcaagactgtggatttcacgcaggatagtaattatttgttaaccgggggacaggataaactgttacgcatatatgacttgaacaaacctgaagcagaacctaaggaaattagtggtcatacttctggtataaaaaaagctctgtggtgcagtgaggataaacagattctttctgctgatgacaaaactgttcgactttgggatcatgctactatgacagaagtgaaatctctaaattttaatatgtctgttagtagtatggaatatattcctgagggagagattttggttataacttatggacgatctattgcttttcatagtgcagtaagtttggacccaattaaatcctttgaagctcctgcaaccatcaattctgcatctcttcatcctgagaaagaatttcttgttgcaggcggtgaagattttaaactttataagtatgattataatagtggagaagaattagaatcctacaagggacactttggtcctattcactgtgtgagatttagtcctgatggagaactctatgccagtggttcagaagatggaacattgagactatggcaaactgtggtaggaaaaacgtatggcctttggaaatgtgtgcttcctgaagaagatagtggtgagctggcaaagccaaagattggttttccagagacaacagaagaggagctagaagaaattgcttcagagaattcagattgcatctttccttcagctcctgatgttaaggcctgagcgtcaatcatatgtgcagttagtatacaactgact

SEQ ID NO: 170739 - DNA, 1866 bp, Artificial Sequence
  derived and/or modified sequence
cttcctgccgatgccggtgtggacgctgtgaatcgtggctggcccggttctccgcttctccccatcccctactttcctccctccctccctttccctccctcgtcgactgttgcttgctggtcgcagactccctgacccctccctcacccctccctaacctcggtgccaccggattgcccttcttttcctgttgcccagcccagccctagtgtcagggcgggggcctggagcagcccgaggcactgcagcagaagagagaaaagacaacgacgaccctcagctcgccagtccggtcgctggcttcgccgccgccatggcaatgagacagacgccgctcacctgctctggccacacgcgacccgtggttgatttggccttcagtggcatcacgccttatgggtatttcttaatcagcgcttgcaaagatggtaaacctatgctacgccagggagatacaggagactggattggaacatttttgggtcataaaggtgctgtttggggtgcaacactgaataaggatgccaccaaagcagctacagcagctgcagatttcacagccaaagtgtgggatgctgtctcaggagatgaattgatgaccctggctcataaacacattgtcaagactgtggatttcacgcaggatagtaattatttgttaaccgggggacaggataaactgttacgcatatatgacttgaacaaacctgaagcagaacctaaggaaattagtggtcatacttctggtataaaaaaagctctgtggtgcagtgaggataaacagattctttctgctgatgacaaaactgttcgactttgggatcatgctactatgacagaagtgaaatctctaaattttaatatgtctgttagtagtatggaatatattcctgagggagagattttggttataacttatggacgatctattgcttttcatagtgcagtaagtttggacccaattaaatcctttgaagctcctgcaaccatcaattctgcatctcttcatcctgagaaagaatttcttgttgcaggcggtgaagattttaaactttataagtatgattataatagtggagaagaattagaatcctacaagggacactttggtcctattcactgtgtgagatttagtcctgatggagaactctatgccagtggttcagaagatggaacattgagactatggcaaactgtggtaggaaaaacgtatggcctttggaaatgtgtgcttcctgaagaagatagtggtgagctggcaaagccaaagattggttttccagagacaacagaagaggagctagaagaaattgcttcagagaattcagattgcatctttccttcagctcctgatgttaaggcctgagcgtcaatcatatgtgcagttagtatacaactgactaaaacaagcaagcagagaaaagcatcagccttccagagttactgtctgcttaaggcagaaacagcagtaaataatgaggaaaatgaattagctccagtgctggaacaactaactaacttggtgttacctgtaagtgaaaactcaagtgtcagatgaagggaggtggagttatcctcttatagtacagtggcctgttatctttttaatgaatatatacaagccaacatccaatttctattattacaattagggttcttgtagctgtttatgttaatatggagaagaaaactatattggctgattttttctgatcttaaagcagaatgccttttctttttttgcttcagttgtaaagaagagggaatacatgataaagtaactggtttgatttctcgttcattgtacactgcctctgaacatctaattgtttttagttgtctaaataaaatgcctctaaaacaaaa

SEQ ID NO: 170740 - DNA, 1364 bp, Artificial Sequence
  derived and/or modified sequence
gtcacttcctgccgatgccggtgtggacgctgtgaatcgtggctggcccggttctccgcttctccccatcccctactttcctccctccctccctttccctccctcgtcgactgttgcttgctggtcgcagactccctgacccctccctcacccctccctaacctcggtgccaccggattgcccttcttttcctgttgcccagcccagccctagtgtcagggcgggggcctggagcagcccgaggcactgcagcagaagagagaaaagacaacgacgaccctcagctcgccagtccggtcgctggcttcgccgccgccatggcaatgagacagacgccgctcacctgctctggccacacgcgacccgtggttgatttggccttcagtggcatcacgccttatgggtatttcttaatcagcgcttgcaaagcaaagtgtgggatgctgtctcaggagatgaattgatgaccctggctcataaacacattgtcaagactgtggatttcacgcaggatagtaattatttgttaaccgggggacaggataaactgttacgcatatatgacttgaacaaacctgaagcagaacctaaggaaattagtggtcatacttctggtataaaaaaagctctgtggtgcagtgaggataaacagattctttctgctgatgacaaaactgttcgactttgggatcatgctactatgacagaagtgaaatctctaaattttaatatgtctgttagtagtatggaatatattcctgagggagagattttggttataacttatggacgatctattgcttttcatagtgcagtaagtttggacccaattaaatcctttgaagctcctgcaaccatcaattctgcatctcttcatcctgagaaagaatttcttgttgcaggcggtgaagattttaaactttataagtatgattataatagtggagaagaattagaatcctacaagggacactttggtcctattcactgtgtgagatttagtcctgatggagaactctatgccagtggttcagaagatggaacattgagactatggcaaactgtggtaggaaaaacgtatggcctttggaaatgtgtgcttcctgaagaagatagtggtgagctggcaaagccaaagattggttttccagagacaacagaagaggagctagaagaaattgcttcagagaattcagattgcatctttccttcagctcctgatgttaaggcctgagcgtcaatcatatgtgcagttagtatacaactgactaaaacaagcaagcagagaaaagcatcagccttccagagttactgtctgcttaaggcagaaacagcagtaaataatgaggaaaatgaattagctc

SEQ ID NO: 170741 - DNA, 1092 bp, Artificial Sequence
  derived and/or modified sequence
atggccatgagacagacccccctgacctgcagcggccacaccagacccgtggtggacctggccttcagcggcatcaccccctacggctacttcctgatcagcgcctgcaagggcgccggccagcacctgcccagactgagcggccagcacgacggcaagcccatgctgagacagggcgacaccggcgactggatcggcaccttcctgggccacaagggcgccgtgtggggcgccaccctgaacaaggacgccaccaaggccgccaccgccgccgccgacttcaccgccaaggtgtgggacgccgtgagcggcgacgagctgatgaccctggcccacaagcacatcgtgaagaccgtggacttcacccaggacagcaactacctgctgaccggcggccaggacaagctgctgagaatctacgacctgaacaagcccgaggccgagcccaaggagatcagcggccacaccagcggcatcaagaaggccctgtggtgcagcgaggacaagcagatcctgagcgccgacgacaagaccgtgagactgtgggaccacgccaccatgaccgaggtgaagagcctgaacttcaacatgagcgtgagcagcatggagtacatccccgagggcgagatcctggtgatcacctacggcagaagcatcgccttccacagcgccgtgagcctggaccccatcaagagcttcgaggcccccgccaccatcaacagcgccagcctgcaccccgagaaggagttcctggtggccggcggcgaggacttcaagctgtacaagtacgactacaacagcggcgaggagctggagagctacaagggccacttcggccccatccactgcgtgagattcagccccgacggcgagctgtacgccagcggcagcgaggacggcaccctgagactgtggcagaccgtggtgggcaagacctacggcctgtggaagtgcgtgctgcccgaggaggacagcggcgagctggccaagcccaagatcggcttccccgagaccaccgaggaggagctggaggagatcgccagcgagaacagcgactgcatcttccccagcgcccccgacgtgaaggcctag

SEQ ID NO: 170742 - DNA, 1053 bp, Artificial Sequence
  derived and/or modified sequence
atggccatgagacagacccccctgacctgcagcggccacaccagacccgtggtggacctggccttcagcggcatcaccccctacggctacttcctgatcagcgcctgcaaggacggcaagcccatgctgagacagggcgacaccggcgactggatcggcaccttcctgggccacaagggcgccgtgtggggcgccaccctgaacaaggacgccaccaaggccgccaccgccgccgccgacttcaccgccaaggtgtgggacgccgtgagcggcgacgagctgatgaccctggcccacaagcacatcgtgaagaccgtggacttcacccaggacagcaactacctgctgaccggcggccaggacaagctgctgagaatctacgacctgaacaagcccgaggccgagcccaaggagatcagcggccacaccagcggcatcaagaaggccctgtggtgcagcgaggacaagcagatcctgagcgccgacgacaagaccgtgagactgtgggaccacgccaccatgaccgaggtgaagagcctgaacttcaacatgagcgtgagcagcatggagtacatccccgagggcgagatcctggtgatcacctacggcagaagcatcgccttccacagcgccgtgagcctggaccccatcaagagcttcgaggcccccgccaccatcaacagcgccagcctgcaccccgagaaggagttcctggtggccggcggcgaggacttcaagctgtacaagtacgactacaacagcggcgaggagctggagagctacaagggccacttcggccccatccactgcgtgagattcagccccgacggcgagctgtacgccagcggcagcgaggacggcaccctgagactgtggcagaccgtggtgggcaagacctacggcctgtggaagtgcgtgctgcccgaggaggacagcggcgagctggccaagcccaagatcggcttccccgagaccaccgaggaggagctggaggagatcgccagcgagaacagcgactgcatcttccccagcgcccccgacgtgaaggcctag

SEQ ID NO: 170743 - protein, 213 aa, Artificial Sequence
  derived and/or modified sequence
MPRLLRLSLLWLGLLLVRFSRELSDISSARKLCGRYLVKEIEKLCGHANWSQFRFEEETPFSRLIAQASEKVEAYSPYQFESPQTASPARGRGTNPVSTSWEEAVNSWEMQSLPEYKDKKGYSPLGKTREFSSSHNINVYIHENAKFQKKRRNKIKTLSNLFWGHHPQRKRRGYSEKCCLTGCTKEELSIACLPYIDFKRLKEKRSSLVTKIY

SEQ ID NO: 170744 - DNA, 642 bp, Artificial Sequence
  derived and/or modified sequence
atgccaaggctgctccgcctctccctattgtggctggggttactgctggtgcgcttttcacgcgaactgtcagacatctcttccgcgcgcaagctctgtggtcgttatttggttaaagaaattgagaaactatgtggtcacgccaactggtcccagtttcgcttcgaagaggagactccattttcccgactgatcgcccaggcctcagagaaggtcgaggcttattccccctaccagttcgaatcgcctcaaaccgcgtccccagcaagaggcaggggaacaaaccctgtctctaccagctgggaggaggccgtgaattcctgggaaatgcaaagcctgcccgaatacaaggataagaaaggttacagtccccttggcaagacacgggaattcagctctagtcacaacattaatgtatacattcatgaaaacgcaaaattccagaagaaaaggcgtaacaagataaaaaccctcagcaatctgttttggggccaccacccacaacggaaaagacggggttacagcgaaaagtgttgtctcacgggatgcacaaaggaggaattaagcatcgcctgtctaccctatatcgacttcaaacggctgaaggagaaaaggagtagcctcgtgactaaaatctactag

SEQ ID NO: 170745 - DNA, 758 bp, Artificial Sequence
  derived and/or modified sequence
agacagggagcagggtccggccgaccgccattgcacaacgcggaggactagcctggggtcacagggatgccgcggctcctccgcttgtccctgctgtggcttggactcctgctggttcggttttctcgtgaactgagcgacatcagcagtgccaggaagctgtgcggcaggtacttggtgaaagaaatagaaaaactctgcggccatgccaactggagccagttccgtttcgaggaggaaacccctttctcacggttgattgcacaggcctcggagaaggtcgaagcctacagcccataccagttcgaaagcccgcaaaccgcttccccggcccggggaagaggcacaaacccagtgtctacttcttgggaagaagcagtaaacagttgggaaatgcagtcactacctgagtataaggataaaaagggatattcaccccttggtaagacaagagaattttcttcatcacataatatcaatgtatatattcatgagaatgcaaaatttcagaagaaacgtagaaacaaaattaaaaccttaagcaatttgttttgggggcatcatccccaaagaaaacgcagaggatattcagaaaagtgttgtcttacaggatgtacaaaagaagaacttagcattgcatgtcttccatatattgattttaaaaggctaaaggaaaaaagatcatcacttgtaactaagatatactaaccatcttagaattttttctaacctaataaaagcttaatacatttatttaa

SEQ ID NO: 170746 - DNA, 642 bp, Artificial Sequence
  derived and/or modified sequence
atgccccggctgctgcggctgagcctgctgtggctgggcctgctgctggtgcgcttcagccgggagctgagtgacatcagcagcgccaggaagctgtgtggccgctacctggtgaaggagattgagaagctgtgtggccacgccaactggagccagttccgctttgaggaggagacccccttcagccggctgattgcccaggccagcgagaaggtggaggcctacagcccctaccagtttgagagcccccagacagccagccctgcccggggccggggcaccaaccctgtgtccacctcctgggaggaggccgtgaacagctgggagatgcagagcctgcctgagtacaaggacaagaagggctacagccccctgggcaagacccgggagttcagcagcagccacaacatcaacgtgtacatccatgaaaatgccaagttccagaagaagagaagaaacaagatcaagaccctgagcaacctcttctggggccaccacccccagaggaagagaagaggctacagcgagaagtgctgcctgaccggctgcaccaaggaggagctgagcatcgcctgcctgccctacatcgacttcaagaggctgaaggagaagaggagcagcctggtgaccaagatctactag

SEQ ID NO: 170747 - DNA, 642 bp, Artificial Sequence
  derived and/or modified sequence
atgccccggctgctgcggctgagcctgctgtggctgggcctgctgctggtgcgcttcagcagggaactgagcgatatctctagtgctcgcaagctgtgcggaagatatctcgtgaaagagatagagaagttatgcggccatgcaaactggtcacagttccgttttgaggaggagactccattttcacgactcatcgctcaagccagtgagaaggtagaagcctactccccctaccaatttgagagcccgcagaccgcgagtcccgcgcggggacgtgggacaaatcccgtgtccacgagttgggaggaagcagtcaattcatgggaaatgcaatctctcccagaatacaaagacaagaaaggatatagccccctaggtaagacaagagaattcagcagcagtcataatatcaacgtgtacatacacgaaaacgcaaaatttcaaaaaaaacgccggaacaaaatcaagaccctgtcaaatcttttctggggccatcacccccagagaaagcgtaggggttacagtgaaaagtgctgtctcaccggatgtactaaagaggaactgtcgattgcctgtttgccttacattgattttaagaggctgaaggagaagaggtcctctctcgttacgaagatctactag

SEQ ID NO: 170748 - DNA, 642 bp, Artificial Sequence
  derived and/or modified sequence
atgccacggctactcaggctttcgttactgtggctgggccttttgctagtccggttttctagggagctgagtgacatcagttctgcccgaaagttgtgcgggaggtatctggtgaaggaaattgaaaaactttgcgggcacgctaattggtctcagttcagattcgaggaggagacgcccttctcgcgcctgattgcccaggcctcagagaaggtagaagcctattcaccgtatcagtttgagtctccccaaaccgcctccccggctcgcggacgcggaacaaatccagtctccacctcctgggaagaagcagttaactcttgggagatgcagagtttgcccgaatacaaagataagaaaggctactcacccttgggcaagactcgagagttcagctccagtcacaatatcaacgtgtacattcacgagaatgcaaagttccaaaagaaacgacgaaataaaattaagactcttagcaatctcttctgggggcaccatcctcaacgaaagagacggggttattcagagaagtgttgcctgaccgggtgtacaaaggaggaactttcgatcgcatgcctaccgtacatcgacttcaagcgattgaaggagaaaaggtctagcctggtcaccaagatctactag

SEQ ID NO: 170749 - DNA, 642 bp, Artificial Sequence
  derived and/or modified sequence
atgcccagactgctgagactgagcctgctgtggctgggcctgctgctggtgagattcagcagagagctgagcgacatcagcagcgccagaaagctgtgcggcagatacctggtgaaggagatcgagaagctgtgcggccacgccaactggagccagttcagattcgaggaggagacccccttcagcagactgatcgcccaggccagcgagaaggtggaggcctacagcccctaccagttcgagagcccccagaccgccagccccgccagaggcagaggcaccaaccccgtgagcaccagctgggaggaggccgtgaacagctgggagatgcagagcctgcccgagtacaaggacaagaagggctacagccccctgggcaagaccagagagttcagcagcagccacaacatcaacgtgtacatccacgagaacgccaagttccagaagaagagaagaaacaagatcaagaccctgagcaacctgttctggggccaccacccccagagaaagagaagaggctacagcgagaagtgctgcctgaccggctgcaccaaggaggagctgagcatcgcctgcctgccctacatcgacttcaagagactgaaggagaagagaagcagcctggtgaccaagatctactag

SEQ ID NO: 170750 - protein, 584 aa, Artificial Sequence
  derived and/or modified sequence
MPGRTWELCLLLLLGLGLGSQEALPPPCESEIYCHGELLNQVQMAKLYQDDKQFVDMPLSIAPEQVLQTFTELSRDHNHSIPREQLQAFVHEHFQAKGQELQPWTPADWKDSPQFLQKISDAKLRAWAGQLHQLWKKLGKKMKPEVLSHPERFSLIYSEHPFIVPGGRFVEFYYWDSYWVMEGLLLSEMAETVKGMLQNFLDLVKTYGHVPNGGRVYYLQRSQPPLLTLMMDCYLTHTNDTAFLQENIETLALELDFWTKNRTVSVSLEGKNYLLNRYYVPYGGPRPESYSKDVELADTLPEGDREALWAELKAGAESGWDFSSRWLIGGPNPNSLSGIRTSKLVPVDLNAFLCQAEELMSNFYSRLAGNDSQATKYRILRSQRLAALNTVLWDEQTGAWFDYDLEKKKKNREFYPSNLTPLWAGCFSDPGVADKALKYLEDNRILTYQYGIPTSLQKTGQQWDFPNAWAPLQDLVIRGLAKAPLRRAQEVAFQLAQNWIRTNFDVYSQKSAMYEKYDVSNGGQPGGGGEYEVQEGFGWTNGVVLMLLDRYGDRLTSGAKLAFLEPHCLAATLLPSLLLSLLPW

SEQ ID NO: 170751 - protein, 582 aa, Artificial Sequence
  derived and/or modified sequence
MPGRTWELCLLLLLGLGLGSQEALPPPCESEIYCHGELLNQVQMAKLYQDDKQFVDMPLSIAPEQVLQTFTELSRDHNHSIPREQLQAFVHEHFQAKGQELQPWTPADWKDSPQFLQKISDAKLRAWAGQLHQLWKKLGKKMKPEVLSHPERFSLIYSEHPFIVPGGRFVEFYYWDSYWVMEGLLLSEMAETVKGMLQNFLDLVKTYGHVPNGGRVYYLQRSQPPLLTLMMDCYLTHTNDTAFLQENIETLALELDFWTKNRTVSVSLEGKNYLLNRYYVPYGGPRPESYSKDVELADTLPEGDREALWAELKAGAESGWDFSSRWLIGGPNPNSLSGIRTSKLVPVDLNAFLCQAEELMSNFYSRLGNDSQATKYRILRSQRLAALNTVLWDEQTGAWFDYDLEKKKKNREFYPSNLTPLWAGCFSDPGVADKALKYLEDNRILTYQYGIPTSLQKTGQQWDFPNAWAPLQDLVIRGLAKAPLRRAQEVAFQLAQNWIRTNFDVYSQKSAMYEKYDVSNGGQPGGGGEYEVQEGFGWTNGVVLMLLDRYGDRLTSGPKLPFLEPHCLATLLPSLLLSLLPW

SEQ ID NO: 170752 - protein, 459 aa, Artificial Sequence
  derived and/or modified sequence
MPNCVPGQGSCISSGRSWGRRYQRPGPAQGLTKGTEERNVPGAHSVFGAQIRDSYWVMEGLLLSEMAETVKGMLQNFLDLVKTYGHVPNGGRVYYLQRSQPPLLTLMMDCYLTHTNDTAFLQENIETLALELDFWTKNRTVSVSLEGKNYLLNRYYVPYGGPRPESYSKDVELADTLPEGDREALWAELKAGAESGWDFSSRWLIGGPNPNSLSGIRTSKLVPVDLNAFLCQAEELMSNFYSRLGNDSQATKYRILRSQRLAALNTVLWDEQTGAWFDYDLEKKKKNREFYPSNLTPLWAGCFSDPGVADKALKYLEDNRILTYQYGIPTSLQKTGQQWDFPNAWAPLQDLVIRGLAKAPLRRAQEVAFQLAQNWIRTNFDVYSQKSAMYEKYDVSNGGQPGGGGEYEVQEGFGWTNGVVLMLLDRYGDRLTSGPKLPFLEPHCLATLLPSLLLSLLPW

SEQ ID NO: 170753 - protein, 577 aa, Artificial Sequence
  derived and/or modified sequence
MPGRTWELCLLLLLGLGLGSQEALPPPCESEIYCHGELLNQVQMAKLYQDDKQFVDMPLSIAPEQVLQTFTELSRDHNHSIPREQLQAFVHEHFQAKGQELQPWTPADWKDSPQFLQKISDAKLRAWAGQLHQLWKKLGKKMKPEVLSHPERFSLIYSEHPFIVPGGRFVEFYYWDSYWVMEGLLLSEMAETVKGMLQNFLDLVKTYGHVPNGGRVYYLQRSQPPLLTLMMDCYLTHTNDTAFLQENIETLALELDFWTKNRTVSVSLEGKNYLLNRYYVPYGGPRPESYSKDVELADTLPEGDREALWAELKAGAESGWDFSSRWLIGGPNPNSLSGIRTSKLVPVDLNAFLCQAEELMSNFYSRLGNDSQATKYRILRSQRLAALNTVLWDEQTGAWFDYDLEKKKKNREFYPSNLTPLWAGCFSDPGVADKALKYLEDNRILTYQYGIPTSLQKTGQQWDFPNAWAPLQDLVIRGLAKAPLRRAQEVAFQLAQNWIRTNFDVYSQKSAMYEKYDVSNGGQPGGGGEYEVQEGFGWTNGVVLMLLDRYGDRLTSGPKLPFLEPHCLGPPFCPASC

SEQ ID NO: 170754 - DNA, 1755 bp, Artificial Sequence
  derived and/or modified sequence
atgcccggcagaacctgggagctgtgcctgctgctgctgctgggcctgggcctgggcagccaggaggccctgccccccccctgcgagagcgagatctactgccacggcgagctgctgaaccaggtgcagatggccaagctgtaccaggacgacaagcagttcgtggacatgcccctgagcatcgcccccgagcaggtgctgcagaccttcaccgagctgagcagagaccacaaccacagcatccccagagagcagctgcaggccttcgtgcacgagcacttccaggccaagggccaggagctgcagccctggacccccgccgactggaaggacagcccccagttcctgcagaagatcagcgacgccaagctgagagcctgggccggccagctgcaccagctgtggaagaagctgggcaagaagatgaagcccgaggtgctgagccaccccgagagattcagcctgatctacagcgagcaccccttcatcgtgcccggcggcagattcgtggagttctactactgggacagctactgggtgatggagggcctgctgctgagcgagatggccgagaccgtgaagggcatgctgcagaacttcctggacctggtgaagacctacggccacgtgcccaacggcggcagagtgtactacctgcagagaagccagccccccctgctgaccctgatgatggactgctacctgacccacaccaacgacaccgccttcctgcaggagaacatcgagaccctggccctggagctggacttctggaccaagaacagaaccgtgagcgtgagcctggagggcaagaactacctgctgaacagatactacgtgccctacggcggccccagacccgagagctacagcaaggacgtggagctggccgacaccctgcccgagggcgacagagaggccctgtgggccgagctgaaggccggcgccgagagcggctgggacttcagcagcagatggctgatcggcggccccaaccccaacagcctgagcggcatcagaaccagcaagctggtgcccgtggacctgaacgccttcctgtgccaggccgaggagctgatgagcaacttctacagcagactggccggcaacgacagccaggccaccaagtacagaatcctgagaagccagagactggccgccctgaacaccgtgctgtgggacgagcagaccggcgcctggttcgactacgacctggagaagaagaagaagaacagagagttctaccccagcaacctgacccccctgtgggccggctgcttcagcgaccccggcgtggccgacaaggccctgaagtacctggaggacaacagaatcctgacctaccagtacggcatccccaccagcctgcagaagaccggccagcagtgggacttccccaacgcctgggcccccctgcaggacctggtgatcagaggcctggccaaggcccccctgagaagagcccaggaggtggccttccagctggcccagaactggatcagaaccaacttcgacgtgtacagccagaagagcgccatgtacgagaagtacgacgtgagcaacggcggccagcccggcggcggcggcgagtacgaggtgcaggagggcttcggctggaccaacggcgtggtgctgatgctgctggacagatacggcgacagactgaccagcggcgccaagctggccttcctggagccccactgcctggccgccaccctgctgcccagcctgctgctgagcctgctgccctggtag

SEQ ID NO: 170755 - DNA, 1755 bp, Artificial Sequence
  derived and/or modified sequence
atgccaggcaggacttgggaactgtgcttactgctgcttttaggactcggtctgggaagtcaggaggccctcccacccccttgcgagtccgaaatctactgtcacggcgaactcctcaatcaggtgcagatggcgaaactgtatcaggacgataaacagttcgtggatatgcctctatctattgctcccgaacaggttttacagacttttacagagctgagcagagatcataaccactcaatccctcgggagcagctgcaagcattcgtccatgaacacttccaggccaagggccaggaactgcagccctggacccccgccgattggaaagacagcccgcagttcctacagaagattagcgatgcaaagctgcgcgcttgggccggtcagctgcaccagttgtggaagaaactggggaaaaagatgaagcccgaggtactctcccaccccgaaaggttttccctgatctacagtgagcaccccttcatcgtccccgggggtcgttttgtagagttttattattgggactcttactgggtgatggaagggttgttgctctctgaaatggctgaaaccgttaaaggtatgctgcagaattttctcgacctcgttaagacatacggtcacgtccccaacggagggagggtttattatctccagcgttcccagcctccactcctaacccttatgatggactgctaccttacacatactaacgacacagccttcctgcaggagaacatcgagacactcgccctcgagttggacttttggactaagaacagaactgtgagcgtctcgttggaaggaaaaaattacctcctcaaccggtactatgtcccatatggaggcccacggccggagtcctactccaaggacgtagagttagcagatacattaccagagggggatcgagaagcactgtgggcagagctcaaggcaggcgccgaaagtggatgggatttcagctcacggtggctcatcggagggcctaatcccaatagtttaagcggcatcagaactagtaagctggttccggtagaccttaatgccttcctgtgccaggctgaggagctgatgtctaacttctacagccgcctcgccggaaacgatagtcaagccactaaatacaggatactgagatctcagaggcttgccgctctgaacacagtgctctgggacgaacagacaggcgcttggtttgattatgacctagaaaaaaagaaaaaaaatagagagttttatcctagcaatctgacaccattgtgggccggctgctttagtgaccctggtgtggccgacaaggctctgaaatacctggaagacaacaggattctaacatatcagtatggtattccgacaagtctgcaaaaaaccggccagcagtgggatttccccaacgcctgggcaccgctccaggacctcgtcattaggggtttggctaaagcccctctccggcgcgcccaggaagtggctttccagctggcacagaattggatcaggacaaacttcgacgtgtacagtcagaaatcggccatgtatgagaaatacgacgtcagcaacggggggcagccaggcggagggggagagtacgaagtgcaggagggctttggttggacgaacggagtggtgctcatgctcttggataggtatggcgaccgcctgacaagcggagccaaactggcatttcttgaacctcattgtctggcagcaacactgctgccatccctcctcttgagtttgcttccttggtag

SEQ ID NO: 170756 - DNA, 1755 bp, Artificial Sequence
  derived and/or modified sequence
atgcctggccgcacctgggagctgtgcctgctgctgctgctgggcctgggcctgggcagccaggaggccctgcccccaccctgtgagagcgagatctactgccacggggagctgctgaaccaggtgcagatggccaagctgtaccaggatgacaagcagtttgtggacatgcccctgagcatcgcccctgagcaggtgctgcagaccttcacagagctgagccgggaccacaaccacagcatcccccgggagcagctgcaggcctttgtgcatgagcacttccaggccaagggccaggagctgcagccctggaccccagctgactggaaggacagcccccagttcctgcagaagatcagtgatgccaagctgcgggcctgggccggccagctgcaccagctgtggaagaagctgggcaagaagatgaagccagaggtgctgagccaccctgagcgcttcagcctcatctacagcgagcaccccttcatcgtgcctgggggccgctttgtggagttctactactgggacagctactgggtgatggagggcctgctgctgtctgagatggccgagaccgtgaagggcatgctgcagaacttcctggacctggtgaagacctacggccacgtgcccaacggcggccgggtgtactacctgcagaggagccagccccccctgctgaccctgatgatggactgctacctgacccacaccaatgacacagccttcctgcaggagaacatcgagaccctggccctggagctggacttctggaccaagaacagaacagtgtctgtgtccctggagggcaagaactacctgctgaaccgctactacgtgccctacggcggccccaggcctgagagctacagcaaggatgtggagctggccgacaccctgcctgagggggaccgggaggccctgtgggccgagctgaaggccggggctgagagcggctgggacttcagcagccgctggctgattggaggccccaaccccaacagcctgagcggcatccgcaccagcaagctggtgcctgtggacctgaatgccttcctgtgccaggccgaggagctgatgagcaacttctacagccggctggccggaaatgacagccaggccaccaagtaccgcatcctgcggagccagaggctggccgccctgaacacagtgctgtgggatgagcagacaggagcctggtttgattatgacctggagaagaagaagaagaaccgggagttctaccccagcaacctgacccccctgtgggccggctgcttcagtgaccccggggtggccgacaaggccctgaagtacctggaggacaaccgcatcctgacctaccagtatggcatccccaccagcctgcagaagacaggccagcagtgggacttccccaatgcctgggcccccctgcaggacctggtgatccggggcctggccaaggcccccctgcggcgggcccaggaggtggccttccagctggcccagaactggatccgcaccaactttgatgtgtacagccagaagagcgccatgtatgagaagtatgatgtgtccaatggaggccagcccggcggcggcggggagtatgaggtgcaggagggcttcggctggaccaatggagtggtgctgatgctgctggacagatatggagaccggctgaccagcggggccaagctggccttcctggagccccactgcctggccgccaccctgctgcccagcctgctgctgagcctgctgccctggtag

SEQ ID NO: 170757 - DNA, 1755 bp, Artificial Sequence
  derived and/or modified sequence
atgcccggccggacctgggagctgtgcctgctgctgctgctgggcttggggctaggctctcaggaggctctgcctcccccgtgcgagtccgaaatctattgccacggtgaacttttgaaccaggtccagatggccaagctctaccaggacgacaaacagtttgtggatatgccactgagtatcgcacccgagcaagtattgcaaacgttcacagaactcagccgagatcataatcattcaatcccgcgcgagcagctgcaggccttcgtgcacgagcacttccaggccaaggggcaggagctccagccctggacacctgcagattggaaggattcccctcagttcctccagaaaatctcagatgccaagctgcgcgcctgggccggccagttgcaccagttatggaaaaagcttggcaaaaaaatgaaaccggaggtgctgtcccacccggagcggttctccctgatctactcggagcacccctttattgtgccaggaggccgctttgttgagttctactactgggactcttattgggtcatggagggcctgctgttgtcggagatggccgagacagttaaggggatgctgcaaaatttcctcgacctcgtgaaaacttacggccacgttcctaacgggggccgagtgtactatttgcagaggtcccaacctcctctgctgacattaatgatggattgttacttaacccacacgaacgacactgccttcttgcaagaaaacattgaaacccttgctctggagcttgatttctggactaagaatcgtaccgtctccgtcagcctggagggcaagaactatctgctgaatcggtattacgtgccttacggtggacctagacccgagtcttacagcaaggacgtggaactggctgacaccctgcccgagggggacagggaggccctgtgggcagaacttaaagctggcgctgagtccggttgggacttttcatccaggtggttaattggggggccaaacccaaacagcctgagcggcatccgcactagcaagctggtgcccgtagaccttaacgcgtttctgtgccaggcagaagagctgatgtctaacttttactcaagacttgcagggaacgatagccaagccactaaataccgcatactgagaagccagaggttggccgccctaaacaccgtcttatgggacgagcagaccggcgcttggttcgactatgatctggagaagaaaaagaagaatagggagttttacccatcaaatctcacccctctgtgggccggctgcttctccgaccccggtgttgccgacaaggcgctgaagtacttggaggacaacagaatcctcacataccagtacggcatcccaaccagtttacagaagaccgggcagcaatgggattttccaaatgcttgggctcccctgcaagacctagtgatccgagggctggctaaagcccctctcaggcgagcccaggaagttgcattccagttggcacagaactggattcggaccaattttgatgtgtattctcagaagtctgccatgtatgagaagtacgacgtgtcaaacgggggccagcctgggggcggaggggaatacgaggtgcaggagggatttggctggactaatggggtggtccttatgctgttggataggtacggggaccggctcaccagtggagctaaactggcattcctggagccacactgcctcgctgctacgctgctcccctccctgctgttatctctgctgccatggtag

SEQ ID NO: 170758 - DNA, 1755 bp, Artificial Sequence
  derived and/or modified sequence
atgccaggcagaacatgggaactatgcctgcttctgctgctgggactgggactcggcagtcaggaagccctgcccccaccatgcgagtcagagatctattgtcacggagagctgttgaaccaggtacagatggccaagctgtaccaagacgacaaacaattcgtggatatgccattgagcattgcaccagagcaggtgcttcagaccttcacagagctcagccgggatcacaaccactctattcctcgggaacagttacaagccttcgtgcacgagcatttccaggcaaagggacaagagctgcagccatggacgccagccgactggaaggatagccctcagtttttacagaagatcagcgatgctaaacttcgtgcatgggcaggtcagctccaccagctttggaaaaaactcggaaagaagatgaaacccgaggtgcttagccatccagagcgtttttctctgatttattcagagcacccctttatcgtgccaggagggcgatttgtagaattttattactgggactcttactgggtgatggagggcttgttgcttagcgagatggctgagaccgtcaagggcatgcttcagaatttcctggacttagtcaaaacgtatggacacgtgcccaatgggggacgagtctattacctccagaggtcacagccccctcttctcactctaatgatggattgctatctgacccatacaaatgataccgcctttctccaagagaacatcgagacattggcactagagctggacttctggactaaaaatcggaccgtatctgtaagtcttgagggaaagaactacctgctgaatagatattatgtgccctacggaggtcccagacctgagtcatattcaaaagatgttgagctggctgacacccttcccgagggagaccgcgaggccctctgggcagagctcaaagcaggcgcagagagcggttgggatttctccagccgttggctgatcggcggaccaaaccccaattccctctctgggattagaacatccaagctcgttcctgtggacttgaatgccttcctgtgccaagccgaggaattaatgtctaatttctactctcgactcgccggtaacgactctcaggctaccaaataccggattctcagatcacagagactagcggcactgaacacagtcctgtgggacgagcagaccggggcttggtttgactacgatctcgaaaagaaaaagaagaatcgagaattctacccctcaaacctgacacctttatgggcgggatgtttttctgacccgggtgtggctgataaagccctgaaatatctcgaggataaccgcatcctcacgtatcaatacgggatccctacatcccttcagaaaaccggccaacagtgggatttccctaatgcatgggcgcctttgcaggacctcgttattagaggcttggcgaaggcacctctccgaagagctcaggaggtggcgtttcagctcgcccagaactggatacggactaacttcgatgtctactcccagaaatcagccatgtacgagaagtatgacgtgtccaacggcggtcagcccggagggggtggcgagtacgaggtgcaggagggatttggttggaccaacggcgtggtgctcatgctgctcgatagatacggtgatcgccttaccagcggagctaagctcgcatttctcgagcctcattgcctcgcagctacactgttaccctcactcctcctctctctattgccatggtag

SEQ ID NO: 170759 - DNA, 1857 bp, Artificial Sequence
  derived and/or modified sequence
ccgaaggtgcctgggcttgctcattcagtcacagtcacagccaccatgccagggaggacctgggagctgtgcctgctactgctgctggggctgggactggggtcccaggaggccctacccccaccctgtgagagtgagatttactgccacggggagctcctaaaccaagttcaaatggccaagctctaccaggatgacaagcagtttgtggacatgccactgtctatagctccagaacaagtcctgcagaccttcactgagctgtccagggaccacaatcacagcatccccagggagcagctgcaggcgtttgtccacgaacacttccaggccaaggggcaggagctgcagccctggacccctgcagactggaaagacagcccccagttcctgcagaagatttcagatgccaaactgcgtgcctgggcagggcagctgcatcagctctggaagaagctggggaagaagatgaagccagaggttctcagccaccctgagcggttctctctcatctactcagaacatcccttcattgtgcctggcggtcgctttgttgagttctactactgggactcctactgggtcatggagggtctgctcctctcagagatggctgagacggtgaagggcatgctgcagaacttcttggacctggtgaaaacctatgggcatgtccccaatggtgggcgcgtgtactacctgcagcggagccagcccccactcttgaccctcatgatggattgctacttgactcacaccaatgacaccgcctttctacaggaaaacattgaaacactagccttggaattggacttttggaccaagaacaggactgtctctgtgagcttggagggaaagaactacctcctgaatcgctattatgtcccttatgggggacccaggcctgagtcctacagcaaagatgtggagttggctgacaccttgccagaaggagaccgggaggctctgtgggctgagctcaaggctggggctgagtctggctgggacttctcttcacgctggctcattggaggcccaaaccccaactcgcttagcggcatccgaacaagcaaactggtgcctgttgacctgaatgccttcctatgccaagcagaggagctgatgagcaacttctattccaggctggcagggaacgactcccaggccacgaagtacagaatcctgcggtcgcagcgcttggccgccctgaacacagtcctgtgggatgagcagaccggagcctggttcgattacgaccttgagaagaagaagaaaaaccgggagttttacccatccaacctcactccactctgggccgggtgtttctctgaccctggcgtggcggacaaggctctgaaatacctggaggacaaccggatcctgacttaccagtatgggatcccgacctctctccagaagacaggccagcagtgggatttccccaatgcctgggcccccctgcaggacctggtcatcagaggcctggccaaggcacctttacgtcgggcccaggaagtggctttccagctggctcagaattggatccgaaccaattttgatgtctactcgcagaagtcagccatgtatgagaagtatgacgtcagcaacggtggacagcccggtgggggaggagaatatgaagttcaggagggatttggctggacgaatggcgtggtcctgatgctgctggaccgctatggtgaccggctgacctcaggggccaagctggctttcctggagccccactgcctggcggccacccttctgcccagcctcctgctcagcctcctgccatggtgacagccctcctctcctcacctggccccagctcctgccccattaaacctctgcaccagt

SEQ ID NO: 170760 - DNA, 1749 bp, Artificial Sequence
  derived and/or modified sequence
atgcccggcagaacctgggagctgtgcctgctgctgctgctgggcctgggcctgggcagccaggaggccctgccccccccctgcgagagcgagatctactgccacggcgagctgctgaaccaggtgcagatggccaagctgtaccaggacgacaagcagttcgtggacatgcccctgagcatcgcccccgagcaggtgctgcagaccttcaccgagctgagcagagaccacaaccacagcatccccagagagcagctgcaggccttcgtgcacgagcacttccaggccaagggccaggagctgcagccctggacccccgccgactggaaggacagcccccagttcctgcagaagatcagcgacgccaagctgagagcctgggccggccagctgcaccagctgtggaagaagctgggcaagaagatgaagcccgaggtgctgagccaccccgagagattcagcctgatctacagcgagcaccccttcatcgtgcccggcggcagattcgtggagttctactactgggacagctactgggtgatggagggcctgctgctgagcgagatggccgagaccgtgaagggcatgctgcagaacttcctggacctggtgaagacctacggccacgtgcccaacggcggcagagtgtactacctgcagagaagccagccccccctgctgaccctgatgatggactgctacctgacccacaccaacgacaccgccttcctgcaggagaacatcgagaccctggccctggagctggacttctggaccaagaacagaaccgtgagcgtgagcctggagggcaagaactacctgctgaacagatactacgtgccctacggcggccccagacccgagagctacagcaaggacgtggagctggccgacaccctgcccgagggcgacagagaggccctgtgggccgagctgaaggccggcgccgagagcggctgggacttcagcagcagatggctgatcggcggccccaaccccaacagcctgagcggcatcagaaccagcaagctggtgcccgtggacctgaacgccttcctgtgccaggccgaggagctgatgagcaacttctacagcagactgggcaacgacagccaggccaccaagtacagaatcctgagaagccagagactggccgccctgaacaccgtgctgtgggacgagcagaccggcgcctggttcgactacgacctggagaagaagaagaagaacagagagttctaccccagcaacctgacccccctgtgggccggctgcttcagcgaccccggcgtggccgacaaggccctgaagtacctggaggacaacagaatcctgacctaccagtacggcatccccaccagcctgcagaagaccggccagcagtgggacttccccaacgcctgggcccccctgcaggacctggtgatcagaggcctggccaaggcccccctgagaagagcccaggaggtggccttccagctggcccagaactggatcagaaccaacttcgacgtgtacagccagaagagcgccatgtacgagaagtacgacgtgagcaacggcggccagcccggcggcggcggcgagtacgaggtgcaggagggcttcggctggaccaacggcgtggtgctgatgctgctggacagatacggcgacagactgaccagcggccccaagctgcccttcctggagccccactgcctggccaccctgctgcccagcctgctgctgagcctgctgccctggtag

SEQ ID NO: 170761 - DNA, 1734 bp, Artificial Sequence
  derived and/or modified sequence
atgcccggcagaacctgggagctgtgcctgctgctgctgctgggcctgggcctgggcagccaggaggccctgccccccccctgcgagagcgagatctactgccacggcgagctgctgaaccaggtgcagatggccaagctgtaccaggacgacaagcagttcgtggacatgcccctgagcatcgcccccgagcaggtgctgcagaccttcaccgagctgagcagagaccacaaccacagcatccccagagagcagctgcaggccttcgtgcacgagcacttccaggccaagggccaggagctgcagccctggacccccgccgactggaaggacagcccccagttcctgcagaagatcagcgacgccaagctgagagcctgggccggccagctgcaccagctgtggaagaagctgggcaagaagatgaagcccgaggtgctgagccaccccgagagattcagcctgatctacagcgagcaccccttcatcgtgcccggcggcagattcgtggagttctactactgggacagctactgggtgatggagggcctgctgctgagcgagatggccgagaccgtgaagggcatgctgcagaacttcctggacctggtgaagacctacggccacgtgcccaacggcggcagagtgtactacctgcagagaagccagccccccctgctgaccctgatgatggactgctacctgacccacaccaacgacaccgccttcctgcaggagaacatcgagaccctggccctggagctggacttctggaccaagaacagaaccgtgagcgtgagcctggagggcaagaactacctgctgaacagatactacgtgccctacggcggccccagacccgagagctacagcaaggacgtggagctggccgacaccctgcccgagggcgacagagaggccctgtgggccgagctgaaggccggcgccgagagcggctgggacttcagcagcagatggctgatcggcggccccaaccccaacagcctgagcggcatcagaaccagcaagctggtgcccgtggacctgaacgccttcctgtgccaggccgaggagctgatgagcaacttctacagcagactgggcaacgacagccaggccaccaagtacagaatcctgagaagccagagactggccgccctgaacaccgtgctgtgggacgagcagaccggcgcctggttcgactacgacctggagaagaagaagaagaacagagagttctaccccagcaacctgacccccctgtgggccggctgcttcagcgaccccggcgtggccgacaaggccctgaagtacctggaggacaacagaatcctgacctaccagtacggcatccccaccagcctgcagaagaccggccagcagtgggacttccccaacgcctgggcccccctgcaggacctggtgatcagaggcctggccaaggcccccctgagaagagcccaggaggtggccttccagctggcccagaactggatcagaaccaacttcgacgtgtacagccagaagagcgccatgtacgagaagtacgacgtgagcaacggcggccagcccggcggcggcggcgagtacgaggtgcaggagggcttcggctggaccaacggcgtggtgctgatgctgctggacagatacggcgacagactgaccagcggccccaagctgcccttcctggagccccactgcctgggcccccccttctgccccgccagctgctag

SEQ ID NO: 170762 - DNA, 1749 bp, Artificial Sequence
  derived and/or modified sequence
atgccaggccgcacctgggaactgtgcctacttcttttgctgggcctgggcctgggatcacaagaggccctgcccccaccatgcgagtcagagatttattgccatggagaactcctgaatcaggtgcaaatggccaaactctaccaggacgacaagcagttcgtggatatgcctttatccattgccccagaacaggttctgcagactttcacagaactcagccgggatcataaccactctatccccagggagcaattgcaggcctttgtgcatgaacatttccaagcaaaggggcaggaactgcaaccatggacccctgccgactggaaggactcaccccagtttcttcaaaaaatctccgacgcgaaactgcgcgcctgggccggtcagctgcatcagctgtggaaaaaactcggcaagaagatgaagcccgaagtgcttagccatccagaaaggttctccttaatctacagtgagcaccctttcatcgtgcccggtgggcggttcgtggagttttattattgggactcctactgggtgatggagggtctattgctcagtgagatggcggagactgtcaaggggatgcttcaaaactttcttgacctggtcaagacctacggccatgtgccaaacggtgggcgggtgtattacttgcagaggtcgcagccacctctgttgacactgatgatggattgttacctgactcatactaatgacaccgccttcctgcaagaaaacatcgagaccctggctctggagctagacttctggaccaagaatcgaactgtgtcagtctcactggaaggaaagaattatctcctgaaccgttactacgtaccatacgggggtccgcggcccgagtcttattcgaaggacgttgagctggcagatacattgcccgagggggaccgcgaggccctctgggctgagctgaaagccggggccgaatccggctgggatttttcaagtcggtggctgataggggggccaaatcctaattctttgagtggaatccgtacaagcaaacttgtgcctgtggatctcaacgcttttttatgccaggctgaagagctgatgtccaacttttatagccgcctgggcaacgacagccaggccacaaagtacagaattctgcggtcacagaggctggctgccttgaacactgtgctgtgggatgaacaaacgggagcgtggttcgactatgacctggaaaagaagaagaagaatagagaattttatcctagcaacctgacacccctttgggctggatgtttttccgaccccggggtcgctgataaagcactgaagtaccttgaggataataggattctcacttaccaatacggtatacctacctctctgcagaagacagggcagcagtgggacttccctaatgcctgggctcccctccaggacctggttatacgcggattagccaaagcccccctacggagggcacaagaggtcgcattccagcttgcccagaactggatccgcacaaacttcgatgtttactcccaaaaaagcgcaatgtatgaaaaatatgacgtgagcaatggcggtcagccaggcggcggaggagagtacgaagtgcaagaaggtttcggatggacaaacggagtcgtgttgatgctgttggatagatacggcgaccgccttacctctggcccgaaattaccgttccttgaacctcactgccttgcaacccttttgccatctctcctgctgtcactgctcccttggtag

SEQ ID NO: 170763 - DNA, 1734 bp, Artificial Sequence
  derived and/or modified sequence
atgcctggacgaacctgggaactgtgcttactacttctcctgggccttgggctaggtagccaggaagcactgccacctccttgcgaatccgagatatactgccatggcgagctactcaatcaggttcagatggccaagctgtaccaggacgacaaacaatttgttgatatgccgttaagcattgctccagaacaggtcctccagacattcaccgaactgtctcgtgaccacaaccactcaatcccaagagaacagctccaggcttttgttcatgaacactttcaggccaagggccaggagttgcagccctggacaccagcagattggaaggattccccccagtttctccagaaaatttctgacgcaaagctgagagcttgggctgggcagctccaccagctctggaagaagctggggaaaaagatgaagccagaggtcctttcccatcctgaacgattttctttaatttatagcgagcaccccttcattgtgccaggtgggcgcttcgttgagttctattactgggatagctattgggtcatggagggacttttattatctgaaatggccgaaaccgtgaaagggatgctgcagaacttcctcgacctggtgaagacgtacggccacgtccctaacggtgggcgggtgtactacctacagaggtctcagccaccattgcttaccctaatgatggactgctacctgacacatactaacgatacggcattcctccaggagaacattgagactctggcactggagctggatttctggacaaagaaccgaacagtgtccgtgtcactcgagggaaagaattacctgctgaatcgatactacgttccctatggcggtcctagacccgagtcctattcgaaagacgtggagctggctgacacgctcccggagggcgaccgcgaggccctctgggccgagctgaaagcaggggctgaatcgggctgggatttctcttctcggtggttaattggcggccctaatcctaattctttgtccggcatcaggacgtcaaagctcgtgccagttgacctgaacgccttcctctgccaagccgaggaactgatgagcaacttctatagccggttgggcaacgactcccaggccaccaagtaccggatccttagaagtcaacgtctagcggccttgaacacagttctatgggacgagcagacaggcgcttggtttgattacgacctcgaaaagaagaagaagaaccgggagttttatccctcaaacctgacgcctctatgggcgggctgcttcagtgatccaggcgtggcagacaaagcgcttaagtatctagaggataacagaattttgacgtaccaatacgggattccaacatctctgcagaagacgggtcagcagtgggatttcccaaacgcgtgggctcccctgcaggatcttgttatccgcgggttagcaaaagctcctcttagacgagcccaggaggtggcatttcagcttgctcaaaattggattcgcacgaacttcgacgtgtatagtcagaagtccgccatgtacgaaaagtacgacgtttcgaacgggggccagccaggcgggggcggggagtacgaagtgcaagaaggcttcggctggaccaacggagtggttctcatgctgctagaccggtatggcgaccgcctgacgagtggaccgaagttaccttttctagaaccacattgtctcgggcccccgttttgccctgcgagttgttag

SEQ ID NO: 170764 - DNA, 1749 bp, Artificial Sequence
  derived and/or modified sequence
atgcctggccgcacctgggagctgtgcctgctgctgctgctgggcctgggcctgggcagccaggaggccctgcccccaccctgtgagagcgagatctactgccacggggagctgctgaaccaggtgcagatggccaagctgtaccaggatgacaagcagtttgtggacatgcccctgagcatcgcccctgagcaggtgctgcagaccttcacagagctgagccgggaccacaaccacagcatcccccgggagcagctgcaggcctttgtgcatgagcacttccaggccaagggccaggagctgcagccctggaccccagctgactggaaggacagcccccagttcctgcagaagatcagtgatgccaagctgcgggcctgggccggccagctgcaccagctgtggaagaagctgggcaagaagatgaagccagaggtgctgagccaccctgagcgcttcagcctcatctacagcgagcaccccttcatcgtgcctgggggccgctttgtggagttctactactgggacagctactgggtgatggagggcctgctgctgtctgagatggccgagaccgtgaagggcatgctgcagaacttcctggacctggtgaagacctacggccacgtgcccaacggcggccgggtgtactacctgcagaggagccagccccccctgctgaccctgatgatggactgctacctgacccacaccaatgacacagccttcctgcaggagaacatcgagaccctggccctggagctggacttctggaccaagaacagaacagtgtctgtgtccctggagggcaagaactacctgctgaaccgctactacgtgccctacggcggccccaggcctgagagctacagcaaggatgtggagctggccgacaccctgcctgagggggaccgggaggccctgtgggccgagctgaaggccggggctgagagcggctgggacttcagcagccgctggctgattggaggccccaaccccaacagcctgagcggcatccgcaccagcaagctggtgcctgtggacctgaatgccttcctgtgccaggccgaggagctgatgagcaacttctacagccggctgggcaatgacagccaggccaccaagtaccgcatcctgcggagccagaggctggccgccctgaacacagtgctgtgggatgagcagacaggagcctggtttgattatgacctggagaagaagaagaagaaccgggagttctaccccagcaacctgacccccctgtgggccggctgcttcagtgaccccggggtggccgacaaggccctgaagtacctggaggacaaccgcatcctgacctaccagtatggcatccccaccagcctgcagaagacaggccagcagtgggacttccccaatgcctgggcccccctgcaggacctggtgatccggggcctggccaaggcccccctgcggcgggcccaggaggtggccttccagctggcccagaactggatccgcaccaactttgatgtgtacagccagaagagcgccatgtatgagaagtatgatgtgtccaatggaggccagcccggcggcggcggggagtatgaggtgcaggagggcttcggctggaccaacggggtggtgctgatgctgctggaccgctacggggaccggctgaccagcggccccaagctgcccttcctggagccccactgcctggccaccctgctgcccagcctgctgctgagcctgctgccctggtag

SEQ ID NO: 170765 - DNA, 1734 bp, Artificial Sequence
  derived and/or modified sequence
atgcctggccgcacctgggagctgtgcctgctgctgctgctgggcctgggcctgggcagccaggaggccctgcccccaccctgtgagagcgagatctactgccacggggagctgctgaaccaggtgcagatggccaagctgtaccaggatgacaagcagtttgtggacatgcccctgagcatcgcccctgagcaggtgctgcagaccttcacagagctgagccgggaccacaaccacagcatcccccgggagcagctgcaggcctttgtgcatgagcacttccaggccaagggccaggagctgcagccctggaccccagctgactggaaggacagcccccagttcctgcagaagatcagtgatgccaagctgcgggcctgggccggccagctgcaccagctgtggaagaagctgggcaagaagatgaagccagaggtgctgagccaccctgagcgcttcagcctcatctacagcgagcaccccttcatcgtgcctgggggccgctttgtggagttctactactgggacagctactgggtgatggagggcctgctgctgtctgagatggccgagaccgtgaagggcatgctgcagaacttcctggacctggtgaagacctacggccacgtgcccaacggcggccgggtgtactacctgcagaggagccagccccccctgctgaccctgatgatggactgctacctgacccacaccaatgacacagccttcctgcaggagaacatcgagaccctggccctggagctggacttctggaccaagaacagaacagtgtctgtgtccctggagggcaagaactacctgctgaaccgctactacgtgccctacggcggccccaggcctgagagctacagcaaggatgtggagctggccgacaccctgcctgagggggaccgggaggccctgtgggccgagctgaaggccggggctgagagcggctgggacttcagcagccgctggctgattggaggccccaaccccaacagcctgagcggcatccgcaccagcaagctggtgcctgtggacctgaatgccttcctgtgccaggccgaggagctgatgagcaacttctacagccggctgggcaatgacagccaggccaccaagtaccgcatcctgcggagccagaggctggccgccctgaacacagtgctgtgggatgagcagacaggagcctggtttgattatgacctggagaagaagaagaagaaccgggagttctaccccagcaacctgacccccctgtgggccggctgcttcagtgaccccggggtggccgacaaggccctgaagtacctggaggacaaccgcatcctgacctaccagtatggcatccccaccagcctgcagaagacaggccagcagtgggacttccccaatgcctgggcccccctgcaggacctggtgatccggggcctggccaaggcccccctgcggcgggcccaggaggtggccttccagctggcccagaactggatccgcaccaactttgatgtgtacagccagaagagcgccatgtatgagaagtatgatgtgtccaatggaggccagcccggcggcggcggggagtatgaggtgcaggagggcttcggctggaccaacggggtggtgctgatgctgctggaccgctacggggaccggctgaccagcggccccaagctgcccttcctggagccccactgcctgggcccccccttctgcccagccagctgctag

SEQ ID NO: 170766 - DNA, 1749 bp, Artificial Sequence
  derived and/or modified sequence
atgcccggccggacctgggagctgtgcctgctgctgctgctgggcctcggtttggggtcacaagaagccctcccacccccttgcgagagcgagatatattgccatggagagctcctgaaccaggttcagatggccaaactgtatcaagatgataagcaatttgtcgatatgccactgtcaattgcgcccgagcaggtgcttcagacatttactgaactcagccgcgatcataaccactccatccctagggaacaattacaggctttcgtgcatgagcactttcaggctaaggggcaggagttgcagccatggactcccgccgattggaaggacagcccccagttcctccagaagatttccgacgcaaagcttagagcgtgggccggccagttacaccaactgtggaagaagctcggaaaaaaaatgaagccagaagttctcagccatcccgagaggttcagcctcatttacagtgagcacccatttatcgtgcctggtggcaggttcgtggagttttactattgggatagttattgggtcatggaagggctcttattgtcagaaatggctgaaactgttaagggtatgcttcaaaattttttagaccttgtgaaaacctatggacatgtgcccaatggaggcagagtgtattatctgcaacgctcgcagcctcctctcttaactctgatgatggattgctacttgactcataccaatgacacagctttcttgcaggagaacattgagaccctggcattggagctcgatttctggaccaagaatagaactgtcagtgtgtccctggagggcaagaattatctcctgaacaggtactatgtgccatacggtggcccgcggccggagagttatagcaaagatgttgagctcgctgatacgctgcccgaaggcgatagagaggccctctgggccgagttgaaggccggagccgagagcggatgggatttctcctctagatggttaattggtggaccaaacccaaattccctgtcaggcattcgtacatcaaagcttgttccggtagatctcaacgcattcctgtgccaggcagaagagctgatgagcaatttttactcccgattaggtaacgactcacaggccacgaagtacagaattctcaggtcacaaaggctcgcagccctcaataccgtgctgtgggacgagcagactggtgcatggttcgactacgacctcgagaaaaagaagaagaacagagagttttacccatcaaatctgacaccactgtgggccgggtgtttctctgatccaggtgtagccgacaaagctctgaaatacctcgaagataacagaattttaacgtatcagtatggcataccaacctcgctgcaaaagacaggccagcagtgggacttccccaatgcgtgggccccgctgcaagatctcgtgattaggggattggctaaggctccactccggcgagcccaggaagtcgcctttcaactggcacagaattggatacgcacaaacttcgacgtgtactcccagaagagtgccatgtacgagaagtatgacgtttccaacgggggccagcctgggggtggaggcgagtacgaggtccaggaggggttcggatggaccaatggcgttgtgctcatgctgctcgaccgctatggcgacagactcactagcggccccaagctgccattcctcgaacctcactgcctagctactctgctgccctctctcctgttaagtcttcttccttggtag

SEQ ID NO: 170767 - DNA, 1734 bp, Artificial Sequence
  derived and/or modified sequence
atgcccggccggacctgggagctgtgcctgctgctgctgctgggcctgggactggggagtcaggaagctttgccgcctccctgcgaatcagaaatttactgccatggcgagcttcttaaccaggttcagatggccaagctctaccaagacgacaagcagttcgtggatatgcctctgtcaatcgctccagaacaggtacttcagaccttcactgagctctctcgggatcacaaccatagcatccctcgtgaacagctgcaggcgtttgttcatgagcactttcaggccaagggacaagaacttcaaccgtggactcccgcagactggaaagattcgcctcaatttttacagaagatcagcgatgccaaactgcgtgcttgggccggtcagctccaccagctctggaagaagctaggtaaaaaaatgaagcctgaggtgcttagccacccggaaaggtttagtctgatatattcggaacacccttttatcgtcccgggcggaaggttcgtggaattttattattgggacagctattgggtgatggaggggctcctactcagcgaaatggctgagaccgttaaagggatgttgcagaatttcctggatctcgtgaagacttatggacacgtccccaatggtggtagggtgtattacctacaaaggtcacagcctcctttactgactctcatgatggattgttacctaacacacacaaatgatacagctttcctacaagagaatatcgagaccctcgctctcgaactggatttctggacgaaaaacaggaccgtttccgtgtcccttgaaggaaagaattacctgctcaataggtattacgtgccctatgggggcccgaggcccgagtcttactctaaggacgtcgaactcgccgatactctcccggagggggaccgggaggctctctgggccgagttgaaggctggagccgaatctggctgggattttagctcccgttggctgattggaggtcccaatccaaattcgctctccgggatcagaactagcaaactggtaccagtggatctgaacgcattcttatgtcaggccgaagaactgatgagcaatttctacagcaggctgggcaacgactcccaggctacaaagtatcggatcctgcggtcccagcggttggctgctctgaacacagtcctgtgggacgagcagacaggcgcgtggtttgattacgacctagagaagaaaaaaaaaaatcgcgagttctatccctccaatctaacacctctgtgggccggatgtttttccgatccgggggtggcagacaaagcccttaagtacctggaggataatagaatcctgacctatcagtatggcatccctactagcctccagaagacaggccagcagtgggatttccctaacgcatgggctccactacaggatctggtcatccggggccttgctaaggctccgctcagaagggcgcaagaggtggcttttcagttggctcagaattggatcagaacgaatttcgacgtctacagccagaagtccgccatgtatgagaagtacgacgtttcgaacggggggcaacccggtggaggaggcgaatatgaggtgcaagaggggttcggctggacgaacggcgtcgttctgatgctcctggacaggtatggggaccgcttaacttctggtcccaagctaccgtttcttgagccccactgtctggggcccccattctgccctgcctcttgttag

SEQ ID NO: 170768 - DNA, 1749 bp, Artificial Sequence
  derived and/or modified sequence
atgccagggagaacttgggagttgtgtctgctgttgctgttgggcctgggcttgggaagccaagaggcgctcccacccccttgcgagagcgagatctactgccacggggagctcctaaaccaagtacagatggccaaactctaccaggacgataaacagtttgttgatatgcccctgagcattgcccctgaacaggttctgcagacgtttaccgaactgtcgcgagaccacaatcactccattccacgcgaacagctccaggcctttgtgcacgagcatttccaggcgaaagggcaagaattgcagccgtggaccccagccgattggaaggattccccccaattcctgcaaaagattagtgatgcaaagctcagggcgtgggccggtcaattgcaccaactgtggaaaaaactcggaaaaaagatgaaacctgaagtcctgtcgcacccagagaggttcagcctgatttactcagagcatcctttcattgttccgggagggagattcgtggaattttactactgggacagctattgggtaatggaaggactgttactgagtgagatggcggagacagtcaaagggatgctgcagaactttcttgatctcgtcaaaacttacggccacgttccgaatggaggacgcgtgtactacttacagcgcagccagccaccactcctgacattaatgatggattgctacctgacacatactaacgataccgcctttctgcaggagaacattgaaaccctcgcgctcgaactggacttttggacaaaaaatcgaactgttagcgtcagtctggaagggaaaaattacttgttaaatcgctactacgtgccatatggagggcctagaccagagagctactctaaagatgttgagctggcagatacactcccggagggcgatagggaggccctgtgggcggagctcaaggcaggcgctgaatctggctgggatttttcaagcaggtggctgattggcggaccgaatcccaattccctgtccggcatccgaactagcaagcttgtgccagtagacctgaatgcgtttctgtgccaagccgaggagttaatgagtaatttctattcacggctcggaaacgactcacaggccaccaagtacagaatcctacgcagccaaagactcgctgccctgaataccgtactgtgggatgaacagactggagcctggtttgactacgacctggaaaaaaaaaaaaagaaccgcgaattctatcccagcaatctgacgccgctgtgggccggatgcttttccgacccaggggtcgccgacaaggctctgaagtacctggaggataatagaattctcacttaccagtacggcattcccaccagtctgcaaaaaactgggcagcagtgggatttcccaaatgcctgggctccccttcaggatctggtgatccggggtttggccaaagccccactccgccgagcgcaagaagtagcattccagctcgcacagaattggatcaggacaaactttgacgtatattcccagaaatctgcaatgtacgaaaaatatgatgtgtctaatggcggacagccaggagggggtggggagtatgaagtgcaggagggatttggctggacgaatggagtggtgctcatgctacttgatcggtacggcgaccggctgacctccgggccaaagctgccctttctggagccacactgcttggccacattactgccatccttgctgcttagcctcctcccttggtag

SEQ ID NO: 170769 - DNA, 1734 bp, Artificial Sequence
  derived and/or modified sequence
atgcctgggcgtacttgggagttgtgtctcctgctacttttggggctcggtctcggtagtcaggaggctctgcccccaccgtgcgagtctgagatttattgccacggggaacttctcaaccaggtacaaatggccaagctctatcaggatgacaagcagtttgtggatatgccactttcaatagctcccgagcaggtccttcagacattcaccgaacttagccgcgaccacaatcacagtatcccgcgtgaacaattgcaggctttcgtgcatgagcactttcaagcaaagggccaggagctccagccttggacaccagctgattggaaagacagcccccagttcctgcagaagatctcagacgcgaagcttagagcttgggccggacaactgcatcagctttggaagaaattagggaagaaaatgaagcccgaggtcctatcccacccagaacgtttttcactcatatactccgagcatccttttatcgtgcctgggggtcgcttcgtggaattctattactgggattcatattgggtgatggaaggattattgctgagcgaaatggctgagacagtgaaaggcatgctccagaacttcctggatcttgtaaagacctacggccacgtgcccaatgggggaagggtttattacctgcagagatcacaacctcccctcctgacactgatgatggactgctatctgacacacactaacgataccgcctttttacaggagaacatcgagaccttggccctcgagctggacttttggacaaagaacagaactgtatcggtgagcttggaaggtaaaaattatctcctgaataggtactacgtaccatatggcggtccaagacccgagagctattccaaagatgtcgaactggcagacacccttccagagggagacagagaggccctatgggccgagttgaaggcaggagcggagtcaggatgggatttcagctcccgttggctcataggtggacctaatcccaatagcctttcaggaatcagaacatctaagctggttcccgtggacctcaacgcattcctgtgtcaggctgaggaacttatgagcaacttctactctcgactagggaacgattctcaagcaactaaatatcggattctacgcagccagagactggcggcactcaatacagttctgtgggacgagcagaccggcgcatggtttgattacgacctagaaaagaagaagaagaacagggagttctatcccagtaacttgacccccctgtgggccggatgtttctccgatcccggagttgctgataaagctctcaagtacctggaagataataggattctcacttaccagtacggaatccccacctcccttcagaaaactggtcagcaatgggactttcccaacgcatgggctcccttacaagatctggtgattaggggtctggccaaggcccctctgagacgggctcaggaggtggcttttcagcttgctcagaattggattcgaaccaacttcgatgtgtatagtcaaaagtcggctatgtacgagaagtatgatgtgtctaacggcggacaaccaggaggcggaggagagtatgaggtccaagaaggcttcggttggacaaatggcgtggtgctgatgctactagaccggtacggggatcggctgacttctggacctaagctgcctttcctggagcctcactgcctcggtcccccattttgtcccgcatcttgctag

SEQ ID NO: 170770 - DNA, 1851 bp, Artificial Sequence
  derived and/or modified sequence
ccgaaggtgcctgggcttgctcattcagtcacagtcacagccaccatgccagggaggacctgggagctgtgcctgctactgctgctggggctgggactggggtcccaggaggccctacccccaccctgtgagagtgagatttactgccacggggagctcctaaaccaagttcaaatggccaagctctaccaggatgacaagcagtttgtggacatgccactgtctatagctccagaacaagtcctgcagaccttcactgagctgtccagggaccacaatcacagcatccccagggagcagctgcaggcgtttgtccacgaacacttccaggccaaggggcaggagctgcagccctggacccctgcagactggaaagacagcccccagttcctgcagaagatttcagatgccaaactgcgtgcctgggcagggcagctgcatcagctctggaagaagctggggaagaagatgaagccagaggttctcagccaccctgagcggttctctctcatctactcagaacatcccttcattgtgcctggcggtcgctttgttgagttctactactgggactcctactgggtcatggagggtctgctcctctcagagatggctgagacggtgaagggcatgctgcagaacttcttggacctggtgaaaacctatgggcatgtccccaatggtgggcgcgtgtactacctgcagcggagccagcccccactcttgaccctcatgatggattgctacttgactcacaccaatgacaccgcctttctacaggaaaacattgaaacactagccttggaattggacttttggaccaagaacaggactgtctctgtgagcttggagggaaagaactacctcctgaatcgctattatgtcccttatgggggacccaggcctgagtcctacagcaaagatgtggagttggctgacaccttgccagaaggagaccgggaggctctgtgggctgagctcaaggctggggctgagtctggctgggacttctcttcacgctggctcattggaggcccaaaccccaactcgcttagcggcatccgaacaagcaaactggtgcctgttgacctgaatgccttcctatgccaagcagaggagctgatgagcaacttctattccaggctggggaacgactcccaggccacgaagtacagaatcctgcggtcgcagcgcttggccgccctgaacacagtcctgtgggatgagcagaccggagcctggttcgattacgaccttgagaagaagaagaaaaaccgggagttttacccatccaacctcactccactctgggccgggtgtttctctgaccctggcgtggcggacaaggctctgaaatacctggaggacaaccggatcctgacttaccagtatgggatcccgacctctctccagaagacaggccagcagtgggatttccccaatgcctgggcccccctgcaggacctggtcatcagaggcctggccaaggcacctttacgtcgggcccaggaagtggctttccagctggctcagaattggatccgaaccaattttgatgtctactcgcagaagtcagccatgtatgagaagtatgacgtcagcaacggtggacagcccggtgggggaggagaatatgaagttcaggagggatttggctggacgaatggcgtggtcctgatgctgctggaccgctatggtgaccggctgacctcagggcccaagctgcctttcctggagccccactgcctggccacccttctgcccagcctcctgctaagcctcctgccatggtgacagccctcctctcctcacctggccccagctcctgccccattaaacctctgcaccagt

SEQ ID NO: 170771 - DNA, 2770 bp, Artificial Sequence
  derived and/or modified sequence
gccgaaggtgcctgggcttgctcattcagtcacagtcacagccaccatgccagggaggacctgggagctgtgcctgctactgctgctggggctgggactggggtcccaggaggccctacccccaccctgtgagagtgagatttactgccacggggagctcctaaaccaagttcaaatggccaagctctaccaggatgacaagcagtttgtggacatgccactgtctatagctccagaacaagtcctgcagaccttcactgagctgtccagggaccacaatcacagcatccccagggagcagctgcaggcgtttgtccacgaacacttccaggccaaggggcaggagctgcagccctggacccctgcagactggaaagacagcccccagttcctgcagaagatttcagatgccaaactgcgtgcctgggcagggcagctgcatcagctctggaagaagctggggaagaagatgaagccagaggttctcagccaccctgagcggttctctctcatctactcagaacatcccttcattgtgcctggcggtcgctttgttgagttctactactgggactcctactgggtcatggagggtctgctcctctcagagatggctgagacggtgaagggcatgctgcagaacttcttggacctggtgaaaacctatgggcatgtccccaatggtgggcgcgtgtactacctgcagcggagccagcccccactcttgaccctcatgatggattgctacttgactcacaccaatgacaccgcctttctacaggaaaacattgaaacactagccttggaattggacttttggaccaagaacaggactgtctctgtgagcttggagggaaagaactacctcctgaatcgctattatgtcccttatgggggacccaggcctgagtcctacagcaaagatgtggagttggctgacaccttgccagaaggagaccgggaggctctgtgggctgagctcaaggctggggctgagtctggctgggacttctcttcacgctggctcattggaggcccaaaccccaactcgcttagcggcatccgaacaagcaaactggtgcctgttgacctgaatgccttcctatgccaagcagaggagctgatgagcaacttctattccaggctggggaacgactcccaggccacgaagtacagaatcctgcggtcgcagcgcttggccgccctgaacacagtcctgtgggatgagcagaccggagcctggttcgattacgaccttgagaagaagaagaaaaaccgggagttttacccatccaacctcactccactctgggccgggtgtttctctgaccctggcgtggcggacaaggctctgaaatacctggaggacaaccggatcctgacttaccagtatgggatcccgacctctctccagaagacaggccagcagtgggatttccccaatgcctgggcccccctgcaggacctggtcatcagaggcctggccaaggcacctttacgtcgggcccaggaagtggctttccagctggctcagaattggatccgaaccaattttgatgtctactcgcagaagtcagccatgtatgagaagtatgacgtcagcaacggtggacagcccggtgggggaggagaatatgaagttcaggagggatttggctggacgaatggcgtggtcctgatgctgctggaccgctatggtgaccggctgacctcagggcccaagctgcctttcctggagccccactgcctggggccacccttctgcccagcctcctgctaagcctcctgccatggtgacagccctcctctcctcacctggccccagctcctgccccattaaacctctgcaccagttcctgccttcccctgcctcttcatgccctcctacctcccagcctgtcctcagagcgaagtggagggcagggtcacgacctggaggtcatgggtaggggcctagctccctcctggaaccttgaatagggtggaaatcctgctctggagggaagacctatccccaagtgcctcagcgccaagccccacaccggccttccactcacttccgtagtccaaaggctttattgttctgctgaaatgcttacaaatactgaaaacccccagcctgggcccaggcaaccaagggctcaatgctgggaaggagagcaggggaggtgggcttagtgttaaggcgtgaagggcgaggccagacagctggaggcctggtcctccactctccatttccatcacccttcggaggctgaaggaagggcggcggcaccacagggcccttcccctctgctgcatcatctcctgctcaggctttctctctaggagcattggaggaatcctctttccctgtcggaaactcaacactgtacagaactccaaccataacccttctagcttcctctcccaactgcatcgctcctcctctgttccatagatcccccggcttcatcccttctggctctaagcaaggcaccagtggaagggagagggctggactggggggctggcagcctgtgcatcagggctgaagacacaggcagggggaaggaaaaaggtattcagtcccttccccccagcatgagatgcccaggggcctgggctggagagatgatggcacgtaccctcagatggcccacagctgaagcagtgggctgggccacagagctgcagcaattagtatgtaaccatggcaatgaagcagtcactatggtaaccatggtgatgagtctgcaactaggggatggagctgggacctcaaggttga

SEQ ID NO: 170772 - protein, 833 aa, Artificial Sequence
  derived and/or modified sequence
MDVVDPDIFNRDPRDHYDLLQRLGGGTYGEVFKARDKVSGDLVALKMVKMEPDDDVSTLQKEILILKTCRHANIVAYHGSYLWLQKLWICMEFCGAGSLQDIYQVTGSLSELQISYVCREVLQGLAYLHSQKKIHRDIKGANILINDAGEVRLADFGISAQIGATLARRLSFIGTPYWMAPEVAAVALKGGYNELCDIWSLGITAIELAELQPPLFDVHPLRVLFLMTKSGYQPPRLKEKGKWSAAFHNFIKVTLTKSPKKRPSATKMLSHQLVSQPGLNRGLILDLLDKLKNPGKGPSIGDIEDEEPELPPAIPRRIRSTHRSSSLGIPDADCCRRHMEFRKLRGMETRPPANTARLQPPRDLRSSSPRKQLSESSDDDYDDVDIPTPAEDTPPPLPPKPKFRSPSDEGPGSMGDDGQLSPGVLVRCASGPPPNSPRPGPPPSTSSPHLTAHSEPSLWNPPSRELDKPPLLPPKKEKMKRKGCALLVKLFNGCPLRIHSTAAWTHPSTKDQHLLLGAEEGIFILNRNDQEATLEMLFPSRTTWVYSINNVLMSLSGKTPHLYSHSILGLLERKETRAGNPIAHISPHRLLARKNMVSTKIQDTKGCRACCVAEGASSGGPFLCGALETSVVLLQWYQPMNKFLLVRQVLFPLPTPLSVFALLTGPGSELPAVCIGVSPGRPGKSVLFHTVRFGALSCWLGEMSTEHRGPVQVTQVEEDMVMVLMDGSVKLVTPEGSPVRGLRTPEIPMTEAVEAVAMVGGQLQAFWKHGVQVWALGSDQLLQELRDPTLTFRLLGSPRLECSGTISPHCNLLLPGSSNSPASASRVAGITGL

SEQ ID NO: 170773 - protein, 239 aa, Artificial Sequence
  derived and/or modified sequence
MEFRKLRGMETRPPANTARLQPPRDLRSSSPRKQLSESSDDDYDDVDIPTPAEDTPPPLPPKPKFRSPSDEGPGSMGDDGQLSPGVLVRCASGPPPNSPRPGPPPSTSSPHLTAHSEPSLWNPPSRELDKPPLLPPKKEKMKRKGCALLVKLFNGCPLRIHSTAAWTHPSTKDQHLLLGAEEGIFILNRNDQEATLEMERPPTCILIASLACWNGKRPEQETPSLTLAPTAYWQGTSSQ

SEQ ID NO: 170774 - DNA, 2502 bp, Artificial Sequence
  derived and/or modified sequence
atggatgtagtcgatccagatattttcaaccgggatccccgggaccattatgacctactgcaaagactggggggagggacgtatggcgaagtgtttaaggcaagggacaaggtctctggcgacctcgtcgccctgaagatggtgaagatggagcctgacgacgacgtgtctacactgcagaaggagatcctgattcttaagacctgccgccatgccaatatagtcgcctatcacggcagttatctgtggcttcagaaactgtggatttgcatggagttttgtggagcaggctcccttcaagacatttatcaggttaccgggagcctgtcggagctgcagatctcttatgtttgccgggaggtccttcagggcttggcatacctgcactcccagaaaaaaatacatagggatattaaaggggcaaacatcttgatcaatgatgcaggagaggtacgcctggcagacttcggaatctccgcccaaatcggtgccactttagcccggagactgtcttttattggcacgccatattggatggcgcctgaggtggccgccgtggcactgaaaggcggctacaatgaactttgcgacatatggtccctgggaattactgctatcgagttggctgagctccagcctccccttttcgacgtccacccccttagagtgctctttctgatgacaaaatccgggtatcagccacctcggctaaaagaaaaaggcaaatggtctgccgcatttcataatttcatcaaggtgaccttaacaaagagccccaaaaaaagaccttcggctactaaaatgctgtcacaccaactggtctcccagcccggcctgaatcggggcctgatcttggacctgctggacaagctgaagaatcctgggaagggaccatccatcggtgacattgaggacgaggagccagaattacctccagctatcccccgtcggataaggagcactcatcgctcgagctctctgggtataccagatgctgactgctgccgtaggcacatggagtttagaaagttaaggggcatggaaactagaccccctgctaatacagcccggcttcaacctccgcgagacctgagatctagctcaccacgcaaacaactcagtgaaagtagtgatgatgactacgatgatgtagacatccccacacctgccgaggatactccaccgccacttccaccaaaacctaagttccggagcccttctgacgagggaccaggatccatgggcgacgacggccaactatcccctggagtcttggtgcgttgcgcttctggacctccgccaaattctccacgccccggaccgccgccctccacgtcttccccacacctcaccgcgcactctgaaccttctctgtggaatcccccatctcgtgagttggataagcctcccctgttgcctcctaaaaaggaaaaaatgaaaagaaagggctgcgccctgctggtaaagctcttcaatggctgccccctcaggatccattccaccgccgcctggacacacccatcaacgaaagaccaacacctgctgctgggagccgaggagggtatctttattctgaaccggaacgatcaggaggccaccctcgaaatgctgttccctagtaggacaacatgggtgtactctatcaataatgttcttatgtctctcagcggaaagacaccccatctctatagtcactccattctcggactcctcgagaggaaggagacccgagctgggaacccaatcgcacatatctctccgcacaggctgctggcccggaagaacatggtttccactaaaatccaggatacaaaaggctgtcgggcctgttgtgtggcagagggagcatcttcaggtggacctttcctctgcggagcactcgaaaccagtgttgttctgctacagtggtaccagccaatgaacaaattcctgttggttcggcaggtgctatttcccctgcctacacccctgagcgttttcgcattgctgaccggccctgggtcagagttgccggcggtatgtatcggcgtgtcaccaggacggccaggtaagagcgttctttttcacacagtgaggtttggtgccttgtcatgctggctaggagagatgtctacagagcatagaggccctgttcaagtcacgcaagtggaggaagacatggttatggtgctgatggacggcagcgtgaagctggtcacccctgagggatctcctgtgcggggcctgcggacaccagaaatcccaatgaccgaggctgttgaagccgttgcgatggtggggggacagctccaggccttttggaagcatggcgttcaagtgtgggcgttagggagtgatcagttgctgcaggaactcagagacccaacgctcacgtttagactgctggggtccccccggcttgagtgctccggtactatctccccacactgtaatctgttgcttcccgggagttctaacagtcctgcctcagcaagccgcgtcgccggaattacgggattgtag

SEQ ID NO: 170775 - DNA, 2502 bp, Artificial Sequence
  derived and/or modified sequence
atggacgttgtagatcctgacatttttaatagagacccgcgagaccattacgaccttttgcagagactgggcggaggcacttacggagaggtctttaaagccagagacaaggtgtcaggagatctggtggctctcaagatggtgaaaatggagcccgatgatgatgtgtcgacactgcagaaggagattctaattttaaagacctgccggcacgcaaacatcgtcgcttatcatggctcttatctttggctgcagaagctttggatctgcatggagttttgcggagccggaagcctgcaagacatctatcaggttacgggatccttaagtgagttgcagatctcctatgtctgccgggaggtgctgcaaggtctggcgtatctgcattctcagaagaagatccaccgggatatcaaaggcgctaacattttaattaatgacgctggtgaggtgaggctggccgactttggaatcagtgctcagataggggccacccttgcacgccgcctgtcctttatcgggacaccatattggatggccccagaggtggcggctgttgcccttaagggtgggtacaatgaactgtgcgatatatggagtttgggcatcactgccatagagctggcggaactccaaccccctctgtttgatgtgcatcctctccgggtgctgtttcttatgactaaaagcggctaccaacctcctcgacttaaagaaaagggtaagtggagcgccgctttccataactttattaaagtaactttgaccaaatctccaaaaaagagaccgtctgctacgaaaatgcttagtcatcagctggtgtcacagcccggcctcaatcgcgggttgattttggaccttctggacaaactgaaaaatccgggcaaaggaccttcaattggcgatatagaggatgaggaaccggagctgccccctgctatacccagaaggattaggagcactcaccggtccagtagcctaggaataccagacgctgactgctgcaggaggcacatggaatttaggaaattgcgcggcatggagaccaggcctcctgctaataccgctcgcctgcaacctcctagagatctgcgaagctcatccccacgtaaacaattatctgaatcctcggatgacgactacgatgacgtggatatccctacccccgcggaagacacaccaccacctctgcctcctaagcccaaattccgatctcctagcgatgagggtcccggaagcatgggggatgacggccaacttagccccggggtgcttgtgagatgtgccagtggtcccccacctaattctccacgccctgggcctcctcccagtacctcctccccccatctgactgcacatagcgagccttccctgtggaacccaccaagtcgggagctcgataaaccacccctgttgccgcctaaaaaggagaagatgaagcgcaaaggctgcgccctcttggtgaaattgttcaacggatgtccactcagaatccattccacagcagcgtggacccatccaagcactaaggaccagcatctgcttttgggggcagaagaggggatcttcattctgaatcgaaatgaccaagaagcaacccttgaaatgttatttccctcaagaaccacctgggtctattctattaataacgtcctgatgagtctgtcagggaagaccccccacctgtacagtcacagcattttgggcctgctggaacgcaaggaaacaagagcaggaaaccctatcgcacacattagcccccatcgcctcctggccaggaagaacatggtaagcaccaaaattcaagatacgaaaggatgtagggcttgctgtgttgcggagggcgcttcctctggcggccctttcttatgtggggctttagaaacatcggtcgtgttgctgcagtggtaccagcctatgaacaagttcctattagttcgtcaggtcctcttcccacttccgacacctctgagtgtgttcgccttgctaactgggcccggaagcgaactgcccgctgtgtgtatcggcgtgtcacctggtcgtccaggcaaatccgtgctgttccacacagtgaggttcggggccctttcttgctggctgggcgagatgtcaacggaacaccgcggacccgtgcaggtgactcaggttgaggaagatatggttatggtcctgatggatggttctgttaagctcgttacccccgagggctccccagtgcgcggactgcggacacccgaaatccccatgaccgaggccgtggaagccgtcgccatggtgggaggacaactacaggccttctggaaacacggcgttcaggtgtgggccctagggagcgaccagctgttacaggagctacgagaccccacgctgacgtttcggctcttaggatcgccaaggctcgagtgctctgggacgatcagccctcattgcaatcttctgctccctgggtcttctaattctcctgcctcagcaagccgggtagccgggatcaccggcctgtag

SEQ ID NO: 170776 - DNA, 2502 bp, Artificial Sequence
  derived and/or modified sequence
atggatgtggtggaccctgacatcttcaacagagacccccgggaccactatgacctgctgcagaggctgggcggcggcacctacggggaggtgttcaaggcccgggacaaggtgtctggggacctggtggccctgaagatggtgaagatggagccagatgatgatgtgtccaccctgcagaaggagatcctgatcctgaagacctgcagacatgccaacatcgtggcctaccacggcagctacctgtggctgcagaagctgtggatctgcatggagttctgtggggccggcagcctgcaggacatctaccaggtgacaggcagcctgtctgagctgcagatctcctatgtgtgccgggaggtgctgcagggcctggcctacctgcacagccagaagaagatccaccgggacatcaagggggccaacatcctgatcaatgatgctggggaggtgcggctggccgactttggcatcagcgcccagatcggggccaccctggcccggcggctgtccttcatcggcaccccctactggatggcccctgaggtggccgctgtggccctgaagggcggctacaatgagctgtgtgacatctggagcctgggcatcacagccatcgagctggccgagctgcagccccccctgtttgatgtgcaccccctgcgggtgctcttcctgatgaccaagagcggctaccagcccccccggctgaaggagaagggcaagtggagcgctgccttccacaacttcatcaaggtgaccctgaccaagagccccaagaagaggcccagcgccaccaagatgctgagccaccagctggtgtcccagcccggcctgaacagaggcctcatcctggacctgctggacaagctgaagaaccctgggaagggccccagcatcggggacattgaagatgaggagcctgagctgcccccagccatcccccggcgcatccgcagcacccacaggagcagcagcctgggcatcccagatgctgactgctgccgccgccacatggagttcaggaagctgcggggcatggagacccggcccccagccaacacagcccggctgcagcccccccgggacctgcggagcagcagccccaggaagcagctgtctgagagcagtgatgatgattatgatgatgtggacatccccaccccagctgaggacaccccaccacccctgccccccaagcccaagttccgcagccccagtgatgagggccctggctccatgggagatgatggccagctgagccctggggtgctggtgcgctgtgccagcggccccccacccaacagccccaggcctggccccccacccagcaccagcagcccccacctgacagcccacagcgagcccagcctgtggaacccccccagccgggagctggacaagccacccctgctgccccccaagaaggagaagatgaagaggaagggctgtgccctgctggtgaagctgttcaacggctgccccctgcgcatccacagcacagctgcctggacccaccccagcaccaaggaccagcacctgctgctgggcgctgaggagggcatcttcatcctgaacagaaatgaccaggaggccaccctggagatgctgttccccagcaggaccacctgggtgtacagcatcaacaacgtgctgatgagcctgagcggcaagaccccccacctgtacagccacagcatcctgggcctgctggagaggaaggagacccgggccggcaaccccatcgcccacatcagcccccaccggctgctggccaggaagaacatggtgtccaccaagatccaggacaccaagggctgccgggcctgctgcgtggccgagggcgccagcagcggcggccccttcctgtgtggggccctggagacctctgtggtgctgctgcagtggtaccagcccatgaacaagttcctgctggtgcggcaggtgctcttccccctgcccacccccctgtctgtgtttgccctgctgaccggccctggcagcgagctgcctgctgtgtgcattggagtgtccccaggccggcctgggaagtctgtgctcttccacacagtgcgctttggagccctgagctgctggctgggggagatgagcacagagcaccggggccctgtgcaggtgacccaggtggaggaggacatggtgatggtgctgatggatggctctgtgaagctggtgaccccagagggcagccctgtgcggggcctgcggaccccagagatccccatgacagaggccgtggaggccgtggccatggtgggcggccagctgcaggccttctggaagcatggagtgcaggtgtgggccctgggcagtgaccagctgctgcaggagctgcgggaccccaccctgaccttccggctgctgggcagcccccggctggagtgcagcggcaccatcagcccccactgcaacctgctgctgcccggcagcagcaacagccctgccagcgccagccgggtggccggcatcaccggcctgtag

SEQ ID NO: 170777 - DNA, 2607 bp, Artificial Sequence
  derived and/or modified sequence
gcggaggcaaggcgggtgcagggcttctggggacggagggaggtgccagaagttgagccctgaggccctgctggcccctgggcgcaggcccagctcaggcccccagggatggacgtcgtggaccctgacattttcaatagagacccccgggaccactatgacctgctacagcggctgggtggcggcacgtatggggaagtctttaaggctcgagacaaggtgtcaggggacctggtggcactgaagatggtgaagatggagcctgatgatgatgtctccacccttcagaaggaaatcctcatattgaaaacttgccggcacgccaacatcgtggcctaccatgggagttatctctggttgcagaaactctggatctgcatggaattctgtggggctggttctctccaggacatctaccaagtgacaggctccctgtcagagctccagattagctatgtctgccgggaagtgctccagggactggcctatttgcactcacagaagaagatacacagggacatcaagggagctaacatcctcatcaatgatgctggggaggtcagattggctgactttggcatctcggcccagattggggctacactggccagacgcctctctttcattgggacaccctactggatggctccggaagtggcagctgtggccctgaagggaggatacaatgagctgtgtgacatctggtccctgggcatcacggccatcgaactggccgagctacagccaccgctctttgatgtgcaccctctcagagttctcttcctcatgaccaagagtggctaccagcctccccgactgaaggaaaaaggcaaatggtcggctgccttccacaacttcatcaaagtcactctgactaagagtcccaagaaacgacccagcgccaccaagatgctcagtcatcaactggtatcccagcctgggctgaatcgaggcctgatcctggatcttcttgacaaactgaagaatcccgggaaaggaccctccattggggacattgaggatgaggagcccgagctaccccctgctatccctcggcggatcagatccacccaccgctccagctctctggggatcccagatgcagactgctgtcggcggcacatggagttcaggaagctccgaggaatggagaccagacccccagccaacaccgctcgcctacagcctcctcgagacctcaggagcagcagccccaggaagcaactgtcagagtcgtctgacgatgactatgacgacgtggacatccccacccctgcagaggacacacctcctccacttccccccaagcccaagttccgttctccatcagacgagggtcctgggagcatgggggatgatgggcagctgagcccgggggtgctggtccggtgtgccagtgggcccccaccaaacagcccccgtcctgggcctcccccatccaccagcagcccccacctcaccgcccattcagaaccctcactctggaacccaccctcccgggagcttgacaagcccccacttctgccccccaagaaggaaaagatgaagagaaagggatgtgcccttctcgtaaagttgttcaatggctgccccctccggatccacagcacggccgcctggacacatccctccaccaaggaccagcacctgctcctgggggcagaggaaggcatcttcatcctgaaccggaatgaccaggaggccacgctggaaatgctctttcctagccggactacgtgggtgtactccatcaacaacgttctcatgtctctctcaggaaagaccccccacctgtattctcatagcatccttggcctgctggaacggaaagagaccagagcaggaaaccccatcgctcacattagcccccaccgcctactggcaaggaagaacatggtttccaccaagatccaggacaccaaaggctgccgggcgtgctgtgtggcggagggtgcgagctctgggggcccgttcctgtgcggtgcattggagacgtccgttgtcctgcttcagtggtaccagcccatgaacaaattcctgcttgtccggcaggtgctgttcccactgccgacgcctctgtccgtgttcgcgctgctgaccgggccaggctctgagctgcccgctgtgtgcatcggcgtgagccccgggcggccggggaagtcggtgctcttccacacggtgcgctttggcgcgctctcttgctggctgggcgagatgagcaccgagcacaggggacccgtgcaggtgacccaggtagaggaagatatggtgatggtgttgatggatggctctgtgaagctggtgaccccggaggggtccccagtccggggacttcgcacacctgagatccccatgaccgaagcggtggaggccgtggctatggttggaggtcagcttcaggccttctggaagcatggagtgcaggtgtgggctctaggctcggatcagctgctacaggagctgagagaccctaccctcactttccgtctgcttggctcccccaggctggagtgcagtggcacgatctcgcctcactgcaacctcctcctcccaggttcaagcaattctcctgcctcagcctcccgagtagctgggattacaggtttg

SEQ ID NO: 170778 - DNA, 2700 bp, Artificial Sequence
  derived and/or modified sequence
gggcgcaggcccagctcaggcccccagggatggacgtcgtggaccctgacattttcaatagagacccccgggaccactatgacctgctacagcggctgggtggcggcacgtatggggaagtctttaaggctcgagacaaggtgtcaggggacctggtggcactgaagatggtgaagatggagcctgatgatgatgtctccacccttcagaaggaaatcctcatattgaaaacttgccggcacgccaacatcgtggcctaccatgggagttatctctggttgcagaaactctggatctgcatggaattctgtggggctggttctctccaggacatctaccaagtgacaggctccctgtcagagctccagattagctatgtctgccgggaagtgctccagggactggcctatttgcactcacagaagaagatacacagggacatcaagggagctaacatcctcatcaatgatgctggggaggtcagattggctgactttggcatctcggcccagattggggctacactggccagacgcctctctttcattgggacaccctactggatggctccggaagtggcagctgtggccctgaagggaggatacaatgagctgtgtgacatctggtccctgggcatcacggccatcgaactggccgagctacagccaccgctctttgatgtgcaccctctcagagttctcttcctcatgaccaagagtggctaccagcctccccgactgaaggaaaaaggcaaatggtcggctgccttccacaacttcatcaaagtcactctgactaagagtcccaagaaacgacccagcgccaccaagatgctcagtcatcaactggtatcccagcctgggctgaatcgaggcctgatcctggatcttcttgacaaactgaagaatcccgggaaaggaccctccattggggacattgaggatgaggagcccgagctaccccctgctatccctcggcggatcagatccacccaccgctccagctctctggggatcccagatgcagactgctgtcggcggcacatggagttcaggaagctccgaggaatggagaccagacccccagccaacaccgctcgcctacagcctcctcgagacctcaggagcagcagccccaggaagcaactgtcagagtcgtctgacgatgactatgacgacgtggacatccccacccctgcagaggacacacctcctccacttccccccaagcccaagttccgttctccatcagacgagggtcctgggagcatgggggatgatgggcagctgagcccgggggtgctggtccggtgtgccagtgggcccccaccaaacagcccccgtcctgggcctcccccatccaccagcagcccccacctcaccgcccattcagaaccctcactctggaacccaccctcccgggagcttgacaagcccccacttctgccccccaagaaggaaaagatgaagagaaagggatgtgcccttctcgtaaagttgttcaatggctgccccctccggatccacagcacggccgcctggacacatccctccaccaaggaccagcacctgctcctgggggcagaggaaggcatcttcatcctgaaccggaatgaccaggaggccacgctggaaatgctctttcctagccggactacgtgggtgtactccatcaacaacgttctcatgtctctctcaggaaagaccccccacctgtattctcatagcatccttggcctgctggaacggaaagagaccagagcaggaaaccccatcgctcacattagcccccaccgcctactggcaaggaagaacatggtttccaccaagatccaggacaccaaaggctgccgggcgtgctgtgtggcggagggtgcgagctctgggggcccgttcctgtgcggtgcattggagacgtccgttgtcctgcttcagtggtaccagcccatgaacaaattcctgcttgtccggcaggtgctgttcccactgccgacgcctctgtccgtgttcgcgctgctgaccgggccaggctctgagctgcccgctgtgtgcatcggcgtgagccccgggcggccggggaagtcggtgctcttccacacggtgcgctttggcgcgctctcttgctggctgggcgagatgagcaccgagcacaggggacccgtgcaggtgacccaggtagaggaagatatggtgatggtgttgatggatggctctgtgaagctggtgaccccggaggggtccccagtccggggacttcgcacacctgagatccccatgaccgaagcggtggaggccgtggctatggttggaggtcagcttcaggccttctggaagcatggagtgcaggtgtgggctctaggctcggatcagctgctacaggagctgagagaccctaccctcactttccgtctgcttggctcccccaggctggagtgcagtggcacgatctcgcctcactgcaacctcctcctcccaggttcaagcaattctcctgcctcagcctcccgagtagctgggattacaggcctgtagtggtggagacacgcccagtggatgatcctactgctcccagcaacctctacatccaggaatgagtccctaggggggtgtcaggaactagtccttgcaccccctcccccatagacacactagtggtcatggcatgtcctcatctcccaataaacatgactttagcctctgc

SEQ ID NO: 170779 - DNA, 2502 bp, Artificial Sequence
  derived and/or modified sequence
atggacgtggtggaccccgacatcttcaaccgggacccccgggaccattatgatctgttacagaggctgggcggtggaacctatggggaagtgtttaaggcacgcgataaggtttctggtgacttagttgcccttaagatggtcaagatggaaccagatgatgacgtatctactctccagaaagaaattttaatcctgaagacatgccgacacgctaacatagtggcttaccatggtagctacttgtggttacagaaattatggatttgtatggagttttgcggcgccggctcactccaggatatctaccaggttactgggtccttgtccgagttacagatatcctatgtctgtagggaagtgcttcaggggttagcgtatctacatagccagaaaaaaatccaccgggatataaagggcgccaacatacttataaatgacgcaggagaagtacgcctggcagactttggaatcagtgctcaaatcggtgccactctggcacgcagactatcgtttatcggcaccccctactggatggctcctgaggtggccgccgtggctctgaagggtggatataatgaactgtgtgatatatggtctctggggatcactgctattgagttggctgaactccaaccacctctgtttgacgtgcacccacttcgggtgctgtttttaatgactaaaagcgggtaccagccaccgagactcaaagagaaaggtaagtggagtgctgccttccacaatttcattaaagtgacattaacaaagtcaccaaagaagcgcccatctgccaccaagatgttaagccaccagttagtgtcacagccagggctaaatcgaggccttatcctagacctgcttgataaattaaaaaaccctgggaaaggaccctctatcggggacattgaagatgaggagccagagcttcctcctgcaataccccggagaattcgatccactcaccgatcttcttccttgggaatccccgatgctgattgctgccgacgccatatggagtttagaaagctccgggggatggaaacgagacctcccgccaatacagccagactgcagccccctagagacctgaggtccagctcccctcgaaagcagctctccgagtcctcagatgacgattacgacgacgtagacattccaactccggcagaagacaccccgccacctctgcctcctaagccaaagtttaggagtccaagcgacgaaggcccaggatcaatgggcgatgatgggcagctgtccccgggagtgctggtccgttgtgcaagcggacctccccctaactctcccagacctggcccacctccatctacctccagcccacatttaactgcacacagcgagccttctttgtggaacccaccctcacgggagctcgacaagcctcctctacttcctccgaaaaaagaaaagatgaagaggaaggggtgcgcacttttagtaaagctgtttaatgggtgccctcttaggatacacagcacagcagcttggactcatccgtccacgaaagaccagcacctgcttctgggagccgaggagggcatctttatattaaaccggaacgaccaggaagctaccttagaaatgctctttcccagtcgcaccacttgggtttactccatcaataatgtcctgatgtccttaagcggcaagactccccacctgtatagccactcaattctgggccttcttgaacggaaggagacccgggccggcaatcccatagcccacatatccccccatcggctgctagcacggaaaaacatggtgtcaactaagattcaggatacaaagggttgccgagcttgctgcgtcgccgagggcgcttcctccggcgggcccttcctgtgcggagccctagagacatcggtggtgctcttgcagtggtatcaaccaatgaacaagtttctattggtgagacaggttttgtttcccctcccaactcctctttcagtattcgccctcctcaccggacctggttcagagttgcccgctgtgtgcataggcgtcagtccaggccgaccggggaaatctgtgctttttcacactgtccgttttggcgccctgagttgctggttgggagaaatgagtactgagcacaggggaccagttcaagtgacacaggtggaggaagacatggtgatggttttgatggacgggtccgttaagctagtaacccccgaaggtagcccggtccgtggactgaggaccccagagattcctatgacagaagctgttgaagccgtggcaatggtgggaggacagctgcaggctttttggaagcacggggtgcaggtgtgggctctggggtcggaccagcttctgcaagaattaagggacccaacattgaccttcagactgctgggatctccgcgactcgagtgctccggtactatcagtccacactgtaatttacttttacctgggtcttctaatagccctgccagtgcctctagggtcgctggcatcacagggctgtag

SEQ ID NO: 170780 - DNA, 2502 bp, Artificial Sequence
  derived and/or modified sequence
atggacgtggtggaccccgacatcttcaaccgggacccccgggaccactacgacctgcttcagagacttgggggcggaacttacggagaagtcttcaaggcccgcgacaaggtctctggcgacctagtggccctgaaaatggtgaaaatggaacccgacgatgatgtgagtactttacagaaagaaatcctgattttaaagacctgcagacatgcaaatatagtagcgtatcacggatcttatctgtggttacagaaactatggatatgtatggagttctgtggagccggatctctgcaggacatttaccaggtgaccggcagcctgtccgagcttcagatcagctacgtctgccgggaggtgttgcagggtctagcttacctacattcccaaaagaagatccatcgcgatattaaaggggccaacatactgatcaatgatgcaggagaggttcggctggcggattttgggatttctgcgcagattggcgccacactggccagaaggctctctttcatagggacgccatactggatggcaccagaagtggcggcggttgctctcaaggggggttataacgaactctgcgacatttggagtctgggtataacggccattgagttggcagaactccagccaccgctgtttgatgtccaccctcttagggttcttttcctgatgacaaagagtggctaccagccaccgcgactgaaggaaaagggtaagtggagtgcagccttccataactttatcaaggtcacgctgactaagtctccgaaaaagagacccagtgcgactaaaatgttgagtcatcaacttgtgagccagccaggtctgaacagagggcttattctggacctccttgacaaacttaaaaatcccgggaaaggccccagcatcggagatattgaggacgaggagccagagctccctcctgctattccaagacgaatccgatccacccaccgctcctcgagccttggtattccagacgctgactgctgcaggagacatatggagtttagaaagctgcgcggcatggagacaagaccccctgcgaacactgccaggctacagccccctagagatcttaggagctcaagccccaggaaacagctgtccgagtcatcagacgacgactatgacgatgtagatataccaacaccggcagaggatacacctccacccctaccccctaaaccaaagttcagatcacccagcgatgagggcccaggttccatgggggacgacggacaactgtcccccggcgtgctggtgaggtgcgccagcggacccccccccaattctccaagacccgggcctcctccgtccacctcaagcccccatctcaccgcccactctgagcctagcttatggaatcccccatcccgcgagctggataagccgccgttgctcccacccaagaaagaaaagatgaagaggaagggatgcgccctattggtgaaactctttaacggttgtccccttcgcattcacagcacagctgcctggactcatccctcgaccaaagaccaacatttgctgttgggagccgaggaaggaatatttatcctgaatcggaatgaccaggaagctacactggagatgcttttcccatccagaaccacctgggtgtactcaattaacaacgtgctgatgagtctgagcggcaagacccctcatctgtactctcactctattctggggctgctcgagagaaaggagactcgcgcgggcaatcctattgcgcacatctcacctcataggctactggcacgtaaaaatatggtgtccactaagatccaggatacaaaaggatgtagagcatgctgcgtggcagagggggcgtcttccggaggaccgttcctgtgtggggcactagaaacatcagtggtactgctgcaatggtaccagcctatgaacaagttccttttagtgagacaggtgttgttcccgctgcccacccccctgtctgtctttgcgttactgacgggcccaggctctgaacttcccgctgtttgcattggtgttagtcccggacgacctggcaagagcgtcctattccatactgtgagattcggtgctctgtcatgctggcttggggaaatgagcaccgaacatagaggtccggttcaggtgacccaggtggaggaagatatggtcatggtgctcatggatggcagcgtcaaactggtcacacctgagggctcgcccgtgcgggggctgaggactccagaaattccaatgaccgaggccgtcgaggccgtggctatggttgggggacaacttcaggcattctggaagcacggcgttcaggtttgggcgctgggatcagatcaactgttacaggagctaagagacccaacactaacctttcgcctgctcggcagcccgcgcctcgagtgctcgggaacaatcagtccccactgcaatctgctgctgcctggcagttctaattctccggcgtcagcctctcgagttgctggtattacgggcctatag

SEQ ID NO: 170781 - DNA, 2502 bp, Artificial Sequence
  derived and/or modified sequence
atggatgtagtcgacccggatatcttcaaccgggaccctagggaccattatgatttgttacagaggttaggaggtggaacatacggagaggtattcaaggcaagagataaagtgtcaggtgatctggttgccctgaagatggttaagatggaacctgatgacgacgtgtctacattacagaaggaaatccttattctgaagacttgcagacacgccaatatagtggcataccacgggagctacctctggctgcagaaactatggatctgtatggagttctgcggggcaggatctcttcaggacatttatcaggtgacaggttccctgtctgagttacaaattagctatgtgtgccgcgaagtgctacaaggactggcttacctacactcccagaagaagatacatagagatattaaaggggcaaatatcctaatcaatgacgctggcgaggtgaggctggccgattttggaatatctgcccaaattggagccacactcgctagacgcctgtcattcattggcacaccttattggatggccccagaagtggccgctgtcgccctcaaggggggatacaatgagctttgcgacatctggtctcttggcattaccgctatcgaactcgccgagctgcagccgccattatttgacgtccaccctttacgagtactttttctaatgactaagtccgggtaccagcccccaagattaaaagagaaaggcaaatggtcagccgcatttcacaatttcattaaagtgaccttgacgaagtctccaaaaaaacggccttccgctaccaaaatgttgtcccatcagctggtctcacagccaggccttaaccggggtcttattctggatctgcttgataaactcaagaaccccggtaagggcccatctatcggggacatcgaggacgaagaacctgaactgcctcccgctattcctaggcggattaggagcacccacagaagctcctccttaggcatacccgatgctgattgttgccggcgtcatatggaattccggaagctgcgagggatggaaacccgtcctcctgcgaatacagcccgactccagcctcctagggaccttaggtctagctcccctcggaagcaattgagcgaatcatctgatgatgattatgatgacgtcgatatccctacccctgctgaagatacacccccaccactgccccctaagcctaagttccggtccccctctgatgaaggacccggtagcatgggcgacgacggacagctgtcgccaggggtgctggtaagatgcgcttccgggcctccacctaactccccgagacctggccctccccctagcacctctagtccccacctgactgctcatagcgagcctagcctctggaacccaccttcgcgcgagcttgataagccaccactgctgcctcccaagaaagagaaaatgaaaagaaagggctgtgcccttctggttaaactgttcaatggttgtcccctgagaatccattccaccgcggcttggacacatccttctactaaggaccagcatcttctgcttggggctgaggaggggatattcatcctcaacagaaacgatcaagaagctacactggagatgctgtttccctctcgaactacatgggtgtatagcataaataatgtcctgatgtcgctctccggcaagacgccccacctgtatagtcacagcattcttggtttgctggagcgcaaagagacgagagccggaaacccaatcgctcacatctccccacacaggctgctcgcaaggaaaaacatggtttctactaaaatccaggacaccaaaggctgcagagcatgctgcgtggcagagggggcttcaagcggcggacccttcttgtgcggcgctttagagactagcgtcgtgttgcttcagtggtatcaacccatgaataaattcctccttgtaagacaagtgctgtttccactgcctactcctctctccgtttttgccctactgaccggtcccggatcggagctaccggctgtgtgcataggagtttctcccggtcgccctgggaagtcggtcctcttccacacggtccggtttggtgctctgtcatgctggctcggcgagatgtctactgagcatagggggcctgttcaggtgacccaggtggaagaggatatggtgatggtgctgatggacggttcggtgaaactggtgacaccagagggaagtcctgtccgtggtcttagaacccccgagatcccaatgacagaggccgtggaagcggtggccatggtcggtgggcagctacaggcattctggaagcacggagtgcaggtgtgggccctgggcagcgaccagcttttacaggagttgcgcgatccaacattgacttttcggctactgggatcaccgaggctggagtgcagcggcaccatatctccccactgtaacttacttcttcctggatcgtccaactcgcccgcatcagctagtcgcgtggctggtattaccggcctgtag

SEQ ID NO: 170782 - DNA, 2502 bp, Artificial Sequence
  derived and/or modified sequence
atggacgtcgtggaccccgacatcttcaatcgggacccacgagaccattacgatctgctccagcgactcggcggaggcacttatggagaagtcttcaaggccagggataaggtatctggcgatcttgtggcgctgaagatggttaagatggaaccagatgatgacgtgtccaccctccagaaggagattctgatcctcaagacttgtaggcatgccaatatcgtcgcgtaccacgggtcttacctgtggttacagaaactgtggatatgcatggagttctgtggcgctggcagcctgcaggacatctatcaggttacaggcagcctgtctgagctgcagatctcatatgtctgcagggaggtacttcagggtcttgcataccttcatagccagaaaaaaattcatagagatattaaaggagccaacatcctcattaacgacgcgggtgaagttcgcctagctgactttggcatctcggcccagatcggggcaacacttgcaagacgcctgagtttcatcggcacaccctattggatggccccagaggtcgccgcagtcgccttgaagggaggctacaacgagctctgcgacatttggagtctgggcatcacagccattgaacttgctgagttgcaaccacctctgttcgacgttcacccactgagagtgctgttcctgatgacaaaatctgggtaccagcctcccaggctgaaggagaaaggaaaatggtcggctgctttccacaattttatcaaggtgacgctcactaaaagtcctaaaaaaagacccagcgcaaccaaaatgctctcacaccagctggtgtcccaacccggactcaaccggggtttgatcctagatttgctggacaagctgaagaaccccggaaagggtccctcaataggtgacattgaagatgaggaacccgaactgccaccggcaatccctcggcgaattcgaagcacacaccgcagcagttccctgggtattccagatgcggattgctgtcggagacacatggagttcaggaaattgcgcggtatggagacccgaccgcctgctaataccgctagattacaacccccacgagacctcagaagctcctcccctcgaaagcagctcagcgagagtagcgacgatgattacgatgatgtggacattcctacaccagccgaggacaccccacccccactgcccccaaagcctaaattccgcagtcctagcgatgagggtcccggtagcatgggtgatgacggccagctgtctcctggtgttttagtacgatgcgcatcgggtccccctcctaactcccctcgacccggaccacctcccagtacgtcctctccccacctgacggctcattcagaaccgagcttgtggaacccccctagccgggagctcgacaagccccctctgctacctcccaaaaaagaaaagatgaagaggaagggctgcgctctgctggtcaagctgtttaatggctgcccacttcggatccattccacagctgcgtggacacatccctcaacaaaagatcagcacctgttactaggggcagaggagggtatcttcatactgaacaggaacgaccaggaggcaacactcgagatgctctttccctcaaggaccacatgggtgtacagtattaataacgtgctgatgtccttgtccggcaagacacctcatctgtactcccactcaatccttggccttttagaacgaaaggaaactcgggctgggaacccaatcgcccacatcagccctcataggctgttggcaaggaaaaacatggtctctactaagatccaggatacaaagggatgccgggcatgttgcgttgcagagggtgcctctagtggcggacctttcctttgcggcgcactggaaacttctgtggttctgctacagtggtaccagccaatgaacaagtttctgctggttcgacaggtactcttcccacttccaactccacttagcgtgttcgccctgttgacaggcccaggtagtgagttgccagccgtctgtatcggcgtgagccctgggcgtcctggtaagtctgtcctgttccacacggtgcggttcggcgcactctcgtgctggcttggggagatgtcaacagaacaccggggtcctgtgcaggtcacccaggtcgaagaagacatggtgatggttctgatggacggtagcgtgaaactggtcacacccgagggctctccagtgcgcggacttaggacacccgagataccaatgactgaggccgtggaagccgtggccatggttggtgggcaactccaagccttctggaaacatggggtccaggtgtgggcactgggtagcgatcaactccttcaggaacttagggacccgacactaacatttcgactgctggggagtccacgcctggagtgctccggaaccatttctccccattgtaatctcctcctgccaggttccagtaattccccagcctccgccagccgcgtcgccggaatcactggactctag

SEQ ID NO: 170783 - DNA, 2502 bp, Artificial Sequence
  derived and/or modified sequence
atggacgtggtggaccccgacatcttcaacagagaccccagagaccactacgacctgctgcagagactgggcggcggcacctacggcgaggtgttcaaggccagagacaaggtgagcggcgacctggtggccctgaagatggtgaagatggagcccgacgacgacgtgagcaccctgcagaaggagatcctgatcctgaagacctgcagacacgccaacatcgtggcctaccacggcagctacctgtggctgcagaagctgtggatctgcatggagttctgcggcgccggcagcctgcaggacatctaccaggtgaccggcagcctgagcgagctgcagatcagctacgtgtgcagagaggtgctgcagggcctggcctacctgcacagccagaagaagatccacagagacatcaagggcgccaacatcctgatcaacgacgccggcgaggtgagactggccgacttcggcatcagcgcccagatcggcgccaccctggccagaagactgagcttcatcggcaccccctactggatggcccccgaggtggccgccgtggccctgaagggcggctacaacgagctgtgcgacatctggagcctgggcatcaccgccatcgagctggccgagctgcagccccccctgttcgacgtgcaccccctgagagtgctgttcctgatgaccaagagcggctaccagccccccagactgaaggagaagggcaagtggagcgccgccttccacaacttcatcaaggtgaccctgaccaagagccccaagaagagacccagcgccaccaagatgctgagccaccagctggtgagccagcccggcctgaacagaggcctgatcctggacctgctggacaagctgaagaaccccggcaagggccccagcatcggcgacatcgaggacgaggagcccgagctgccccccgccatccccagaagaatcagaagcacccacagaagcagcagcctgggcatccccgacgccgactgctgcagaagacacatggagttcagaaagctgagaggcatggagaccagaccccccgccaacaccgccagactgcagccccccagagacctgagaagcagcagccccagaaagcagctgagcgagagcagcgacgacgactacgacgacgtggacatccccacccccgccgaggacacccccccccccctgccccccaagcccaagttcagaagccccagcgacgagggccccggcagcatgggcgacgacggccagctgagccccggcgtgctggtgagatgcgccagcggccccccccccaacagccccagacccggccccccccccagcaccagcagcccccacctgaccgcccacagcgagcccagcctgtggaacccccccagcagagagctggacaagccccccctgctgccccccaagaaggagaagatgaagagaaagggctgcgccctgctggtgaagctgttcaacggctgccccctgagaatccacagcaccgccgcctggacccaccccagcaccaaggaccagcacctgctgctgggcgccgaggagggcatcttcatcctgaacagaaacgaccaggaggccaccctggagatgctgttccccagcagaaccacctgggtgtacagcatcaacaacgtgctgatgagcctgagcggcaagaccccccacctgtacagccacagcatcctgggcctgctggagagaaaggagaccagagccggcaaccccatcgcccacatcagcccccacagactgctggccagaaagaacatggtgagcaccaagatccaggacaccaagggctgcagagcctgctgcgtggccgagggcgccagcagcggcggccccttcctgtgcggcgccctggagaccagcgtggtgctgctgcagtggtaccagcccatgaacaagttcctgctggtgagacaggtgctgttccccctgcccacccccctgagcgtgttcgccctgctgaccggccccggcagcgagctgcccgccgtgtgcatcggcgtgagccccggcagacccggcaagagcgtgctgttccacaccgtgagattcggcgccctgagctgctggctgggcgagatgagcaccgagcacagaggccccgtgcaggtgacccaggtggaggaggacatggtgatggtgctgatggacggcagcgtgaagctggtgacccccgagggcagccccgtgagaggcctgagaacccccgagatccccatgaccgaggccgtggaggccgtggccatggtgggcggccagctgcaggccttctggaagcacggcgtgcaggtgtgggccctgggcagcgaccagctgctgcaggagctgagagaccccaccctgaccttcagactgctgggcagccccagactggagtgcagcggcaccatcagcccccactgcaacctgctgctgcccggcagcagcaacagccccgccagcgccagcagagtggccggcatcaccggcctgtag

SEQ ID NO: 170784 - protein, 340 aa, Artificial Sequence
  derived and/or modified sequence
MSGEPELIELRELAPAGRAGKGRTRLERANALRIARGTACNPTRQLVPGRGHRFQPAGPATHTWCDLCGDFIWGVVRKGLQCAHCKFTCHYRCRALVCLDCCGPRDLGWEPAVERDTNVDEPVEWETPDLSQAEIEQKIKEYNAQINSNLFMSLNKDGSYTGFIKVQLKLVRPVSVPSSKKPPSLQDARRGPGRGTSVRRRTSFYLPKDAVKHLHVLSRTRAREVIEALLRKFLVVDDPRKFALFERAERHGQVYLRKLLDDEQPLRLRLLAGPSDKALSFVLKENDSGEVNWDAFSMPELHNFLRILQREEEEHLRQILQKYSYCRQKIQEALHACPLG

SEQ ID NO: 170785 - DNA, 1023 bp, Artificial Sequence
  derived and/or modified sequence
atgagcggcgagcccgagctgatcgagctgagagagctggcccccgccggcagagccggcaagggcagaaccagactggagagagccaacgccctgagaatcgccagaggcaccgcctgcaaccccaccagacagctggtgcccggcagaggccacagattccagcccgccggccccgccacccacacctggtgcgacctgtgcggcgacttcatctggggcgtggtgagaaagggcctgcagtgcgcccactgcaagttcacctgccactacagatgcagagccctggtgtgcctggactgctgcggccccagagacctgggctgggagcccgccgtggagagagacaccaacgtggacgagcccgtggagtgggagacccccgacctgagccaggccgagatcgagcagaagatcaaggagtacaacgcccagatcaacagcaacctgttcatgagcctgaacaaggacggcagctacaccggcttcatcaaggtgcagctgaagctggtgagacccgtgagcgtgcccagcagcaagaagccccccagcctgcaggacgccagaagaggccccggcagaggcaccagcgtgagaagaagaaccagcttctacctgcccaaggacgccgtgaagcacctgcacgtgctgagcagaaccagagccagagaggtgatcgaggccctgctgagaaagttcctggtggtggacgaccccagaaagttcgccctgttcgagagagccgagagacacggccaggtgtacctgagaaagctgctggacgacgagcagcccctgagactgagactgctggccggccccagcgacaaggccctgagcttcgtgctgaaggagaacgacagcggcgaggtgaactgggacgccttcagcatgcccgagctgcacaacttcctgagaatcctgcagagagaggaggaggagcacctgagacagatcctgcagaagtacagctactgcagacagaagatccaggaggccctgcacgcctgccccctgggctag

SEQ ID NO: 170786 - DNA, 1023 bp, Artificial Sequence
  derived and/or modified sequence
atgagcggcgagcctgagctgatcgaactgagagagctagcacctgccggcagggctgggaaaggaaggacccgactcgaaagagctaacgcgctgagaatagctcgaggaactgcctgcaaccccacaaggcagctggttcccggcaggggacaccgtttccagccagctggtccagcaactcacacctggtgcgacttgtgcggggatttcatctggggcgtcgtgaggaaaggtcttcagtgtgcgcactgcaagtttacctgtcactaccggtgcagggccttagtatgtttggattgttgcggccctagggacttaggttgggaacctgccgtggaacgcgacacaaacgtggacgagcctgtagaatgggagaccccagatctgagccaggccgagatcgagcagaagatcaaggaatacaatgcccagattaactccaacctgttcatgagtctaaacaaagatggatcctatactggctttatcaaagtgcagcttaaattagttcgccctgtgagcgtgccctcatcaaagaaacccccatccctacaagacgccaggcgcggacccgggcgggggacgtcagtgaggaggagaacatctttttacctacccaaggacgcagtgaagcatctgcacgtactcagcagaactcgagccagagaggtgattgaggctctgttgcgaaaatttctggtcgttgatgacccgagaaagtttgctctgtttgaaagagctgagaggcacgggcaagtgtacttaagaaagctcctggacgatgagcagcctctgcggttacgcctcctggcaggacctagcgataaggctttgtctttcgttctgaaagaaaatgactctggtgaggtgaactgggatgcattcagtatgcccgagctccataattttctgcggatcctgcagcgcgaggaggaggagcacctgcgccagattctgcagaaatatagttactgtaggcagaaaatacaggaagctctgcacgcctgtccgctgggatag

SEQ ID NO: 170787 - DNA, 1023 bp, Artificial Sequence
  derived and/or modified sequence
atgtctggagagcctgagctgattgagctgcgggagctggccccagctggccgggccgggaaaggaagaacccggctggagcgggccaatgccctgcgcatcgcccggggcacagcctgcaaccccacccggcagctggtgcccggccggggccaccgcttccagcctgctggccctgccacccacacctggtgtgacctgtgtggggacttcatctggggcgtggtgaggaagggcctgcagtgtgcccactgcaagttcacctgccactaccgctgccgggccctggtgtgcctggactgctgcggcccccgggacctgggctgggagcctgctgtggagcgggacaccaacgtggatgagcctgtggagtgggagaccccagacctgagccaggccgagattgagcagaagatcaaggagtacaatgcccagatcaacagcaacctcttcatgagcctgaacaaggatggcagctacacaggcttcatcaaggtgcagctgaagctggtgcggcctgtgtctgtgcccagcagcaagaagccacccagcctgcaggatgcccggcggggccctggccggggcacctctgtgagaagaaggaccagcttctacctgcccaaggatgctgtgaagcacctgcacgtgctgagcaggacccgggcccgggaggtgattgaggccctgctgaggaagttcctggtggtggatgaccccaggaagtttgccctgtttgagcgggcagagagacatggccaggtgtacctgaggaagctgctggatgatgagcagcccctgcggctgcggctgctggccggccccagcgacaaggccctgagctttgtgctgaaggaaaatgacagcggggaggtgaactgggatgccttctccatgcctgagctgcacaacttcctgcgcatcctgcagcgggaggaggaggagcacctgcggcagatcctgcagaagtacagctactgccggcagaagatccaggaggccctgcacgcctgccccctgggctag

SEQ ID NO: 170788 - DNA, 1023 bp, Artificial Sequence
  derived and/or modified sequence
atgagcggcgagcccgagctgatcgagctgcgggagctggcccccgcaggcagagcgggaaagggtcggactaggctggagagggctaatgccttacgtatcgcaagggggaccgcttgcaatccaacgagacagctggttccagggaggggacataggttccagcctgccgggcccgcaacccatacgtggtgtgacctctgcggcgacttcatatggggagtggttagaaaagggctccagtgtgcccactgtaaattcacgtgccactaccggtgcagagccctcgtttgcctggactgctgtgggccgcgagacctgggatgggagccagctgtcgagcgagatactaacgtggacgagccagtagagtgggagacacccgatctcagccaggctgagattgaacaaaaaatcaaagagtacaatgcccagatcaactctaacctattcatgagcctgaacaaagatgggtcctataccggtttcattaaggtgcaactcaagctggtgcggcccgtgagcgtgcctagcagtaaaaaacctcccagcctgcaggacgccagacgcggtcctggacgcggcactagcgtccggcgcagaacctccttttacctgcccaaagatgcggtaaaacatttacatgttctgtccaggacgagggctcgagaggtgatagaggcgttgcttagaaagtttcttgtggttgacgatccccgcaagttcgctctgtttgaacgggcagagcgccacggccaggtataccttcgaaaactgctggacgatgaacaaccacttaggttacgactgttggctggtccgagtgacaaggcgctgtcgttcgtgttgaaagaaaacgacagcggggaggtgaattgggacgctttctctatgccagagctccataactttctccgtatactgcagcgtgaagaggaagaacatttacggcagatactccagaagtattcttactgccgccagaaaattcaggaagccctgcacgcctgtccgctcggctag

SEQ ID NO: 170789 - DNA, 1023 bp, Artificial Sequence
  derived and/or modified sequence
atgagcggggaacctgaactgatagagcttcgtgagctggcacccgcaggacgtgctggaaaggggagaacaaggctcgagcgcgctaatgccttgagaatcgcacgcggtactgcctgtaatcctacccgtcagctggtgcctggacggggacatagatttcagccagccggtcccgctactcatacttggtgcgatttgtgcggggattttatctggggtgtggttagaaaaggtcttcagtgtgcacactgcaagtttacctgtcactacagatgtagggccctggtgtgcctggactgctgtggacctcgcgacctgggctgggaaccagccgttgagcgagacaccaacgtcgatgagcccgtcgagtgggaaactcctgatctcagccaggcagagatcgagcaaaaaatcaaagaatacaacgctcaaattaattccaatctctttatgtctttaaataaagatggctcttacactgggttcatcaaggtgcagttgaagctcgttcggccagtgagcgtaccgtccagtaagaaaccccctagcctccaggatgcacggagaggcccaggccgaggaaccagtgtccgccgacggacatcgttctacttaccgaaagatgccgtcaaacacctgcatgtcctcagccgaactcgcgctagagaagtgatagaggcactcctaagaaaatttctcgtcgtcgacgacccacgaaaatttgcgctgttcgaaagagctgagaggcatggccaggtctatctgcggaaattacttgatgacgaacagccgctgcgcctccgactgctggcaggcccttctgacaaagccctttccttcgtgctcaaggagaatgacagcggggaggttaattgggacgcttttagtatgcccgagcttcacaattttctgaggatccttcagcgggaggaagaagaacacctgcgacagattctccagaagtattcttactgcagacagaagatccaggaagcattacacgcttgtccccttggctag

SEQ ID NO: 170790 - DNA, 1923 bp, Artificial Sequence
  derived and/or modified sequence
cagtctggatcctgggggaggcgctgaagtcggggcccgccctgtggccccgcccggcccgcgcttgctagcgcccaaagccagcgaagcacgggcccaaccgggccatgtcgggggagcctgagctcattgagctgcgggagctggcacccgctgggcgcgctgggaagggccgcacccggctggagcgtgccaacgcgctgcgcatcgcgcggggcaccgcgtgcaaccccacacggcagctggtccctggccgtggccaccgcttccagcccgcggggcccgccacgcacacgtggtgcgacctctgtggcgacttcatctggggcgtcgtgcgcaaaggcctgcagtgcgcgcattgcaagttcacctgccactaccgctgccgcgcgctcgtctgcctggactgttgcgggccccgggacctgggctgggaacccgcggtggagcgggacacgaacgtggacgagcctgtggagtgggagacacctgacctttctcaagctgagattgagcagaagatcaaggagtacaatgcccagatcaacagcaacctcttcatgagcttgaacaaggacggttcttacacaggcttcatcaaggttcagctgaagctggtgcgccctgtctctgtgccctccagcaagaagccaccctccttgcaggatgcccggcggggcccaggacggggcacaagtgtcaggcgccgcacttccttttacctgcccaaggatgctgtcaagcacctgcatgtgctgtcacgcacaagggcacgtgaagtcattgaggccctgctgcgaaagttcttggtggtggatgacccccgcaagtttgcactctttgagcgcgctgagcgtcacggccaagtgtacttgcggaagctgttggatgatgagcagcccctgcggctgcggctcctggcagggcccagtgacaaggccctgagctttgtcctgaaggaaaatgactctggggaggtgaactgggacgccttcagcatgcctgaactacataacttcctacgtatcctgcagcgggaggaggaggagcacctccgccagatcctgcagaagtactcctattgccgccagaagatccaagaggccctgcacgcctgcccccttgggtgacctcttgtacccccaggtggaaggcagacagcaggcagcgccaagtgcgtgccgtgtgagtgtgacagggccagtggggcctgtggaatgagtgtgcatggaggccctcctgtgctgggggaatgagcccagagaacagcgaagtagcttgctccctgtgtccacctgtgggtgtagccaggtatggctctgcacccctctgccctcattactgggccttagtgggccagggctgccctgagaagctgctccaggcctgcagcaggagtggtgcagacagaagtctcctcaatttttgtctcagaagtgaaaatcttggagaccctgcaaacagaacagggtcatgtttgcaggggtgacggccctcatctatgaggaaaggttttggatcttgaatgtggtctcaggatatccttatcagagctaagggtgggtgctcagaataaggcaggcattgaggaagagtcttggtttctctctacagtgccaactcctcacacaccctgaggtcagggagtgctggctcacagtacagcatgtgccttaatgcttcatatgaggaggatgtccctgggccagggtctgtgtgaatgtgggcactggcccaggttcataccttatttgctaatcaaagccagggtctctccctcaggtgttttttatgaagtgcgtgaatgtatgtaatgtgtggtggcctcagctgaatgcctcctgtggggaaaggggttggggtgacagtcatcatcagggcctggggcctgagagaattggctcaataaagatttcaagatcc

SEQ ID NO: 170791 - protein, 797 aa, Artificial Sequence
  derived and/or modified sequence
MQDGNFLLSALQPEAGVCSLALPSDLQLDRRGAEGPEAERLRAARVQEQVRARLLQLGQQPRHNGAAEPEPEAETARGTSRGQYHTLQAGFSSRSQGLSGDKTSGFRPIAKPAYSPASWSSRSAVDLSCSRRLSSAHNGGSAFGAAGYGGAQPTPPMPTRPVSFHERGGVGSRADYDTLSLRSLRLGPGGLDDRYSLVSEQLEPAATSTYRAFAYERQASSSSSRAGGLDWPEATEVSPSRTIRAPAVRTLQRFQSSHRSRGVGGAVPGAVLEPVARAPSVRSLSLSLADSGHLPDVHGFNSYGSHRTLQRLSSGFDDIDLPSAVKYLMASDPNLQVLGAAYIQHKCYSDAAAKKQARSLQAVPRLVKLFNHANQEVQRHATGAMRNLIYDNADNKLALVEENGIFELLRTLREQDDELRKNVTGILWNLSSSDHLKDRLARDTLEQLTDLVLSPLSGAGGPPLIQQNASEAEIFYNATGFLRNLSSASQATRQKMRECHGLVDALVTSINHALDAGKCEDKSVENAVCVLRNLSYRLYDEMPPSALQRLEGRGRRDLAGAPPGEVVGCFTPQSRRLRELPLAADALTFAEVSKDPKGLEWLWSPQIVGLYNRLLQRCELNRHTTEAAAGALQNITAGDRRWAGVLSRLALEQERILNPLLDRVRTADHHQLRSLTGLIRNLSRNARNKDEMSTKVVSHLIEKLPGSVGEKSPPAEVLVNIIAVLNNLVVASPIAARDLLYFDGLRKLIFIKKKRDSPDSEKSSRAASSLLANLWQYNKLHRDFRAKGYRKEDFLGP

SEQ ID NO: 170792 - DNA, 2394 bp, Artificial Sequence
  derived and/or modified sequence
atgcaagacggcaacttcttgctatcagctctccaacctgaggcgggtgtgtgttccctggccctgccaagtgacctgcagctcgaccggcgaggcgctgaaggacctgaggcggagcggctgagggccgcgcgcgtccaggagcaggtgcgtgctcgcttacttcagctcgggcagcagcccagacataatggggctgccgaacctgagcccgaagccgagacagccaggggcacctctaggggacaataccataccctacaagctggattctcctccaggtcgcagggtctttctggagataagactagtggattccgcccaattgcaaagcccgcttattcaccggcatcctggtctagcagatcagctgtggacctcagctgcagtagaagactgtcatctgcccataacggcggttccgcctttggcgcagccggctacggaggtgcgcaacctaccccgccaatgcctaccagaccagtatcattccatgaaagaggaggcgtgggcagcagagccgattacgatactctatccttgaggtctctcagacttggtcctggcggactcgacgaccgctatagtctcgtgtccgaacagctcgagcccgctgccacatcaacctacagagcgtttgcttacgaacggcaggcatcatcaagctcatctcgggcaggcgggctggactggcctgaagccactgaggttagccccagccgaacaattcgggccccagctgttcgcaccctacagagatttcaatcctcccatagatctcggggtgtcggcggcgcagtgccaggcgccgtgctggaacccgtggctagggcaccgagtgtgcggtccctgagcttgtctctcgcagattcaggacatctgccagacgtgcatgggtttaatagctacgggtcccacaggacactgcaaagactaagctctggctttgacgatattgacctgccttcagcggtgaagtacctgatggcgagcgaccctaacctgcaggtactgggagccgcatatattcaacataaatgctactccgacgccgcggcgaaaaagcaagcaaggtctttgcaagccgtaccccgcctggtgaagctatttaatcacgctaaccaagaggtgcagcgacacgcaacaggagctatgcgaaatttaatatatgacaatgcagacaataaactggctctggtcgaggagaatggcatcttcgagcttctacggacgctgcgtgagcaggatgacgagttaagaaaaaacgttaccgggatcctgtggaatctgagtagttcggatcatttgaaggatcgcctagctagagatacactcgagcagcttaccgacctcgtgctctcccccctgagtggagctggaggaccgcctctgatccaacagaacgcaagtgaagctgaaattttctacaatgcaaccggtttcttaagaaatctgtcctcagcctcccaggctacaagacagaagatgcgcgagtgtcacggactggtcgacgccctcgtgacatccattaaccatgcactcgatgctggcaaatgtgaagataaatccgtcgagaatgctgtatgtgttctgcggaacttgagctacagactttacgacgagatgcctcccagcgccctgcagaggttagagggccggggccggagggatctggcgggggcaccacctggggaggtggtgggttgcttcacgccccaatcaaggagactccgcgagttacccttggccgcagatgccctaacttttgccgaggttagcaaggatcctaaaggtcttgagtggctgtggtccccacagatcgtggggctgtataacagactgctacagcgatgcgagctgaaccggcacaccacagaggccgcagctggcgctctccaaaacataaccgccggcgacaggagatgggccggcgtgctttctaggctagcccttgagcaggaacggatccttaatccgctcctggatagggtcaggaccgctgaccaccaccagctgaggagcctgactggactgattagaaacttatctcggaacgcacggaacaaagacgaaatgtcgactaaagtcgttagccacttgattgaaaagctgcccggttcggttggagaaaagagtccgccagccgaggtgttggtaaacatcatagcggttctgaacaacttagtagtggctagccccatcgccgcgagggacctgttgtatttcgatggcctgcggaaactcatctttatcaaaaaaaaacgcgactcgcctgatagcgaaaagtcctctagagccgccagctccctgctagccaatttatggcagtacaataagctgcaccgtgactttcgggccaaaggctataggaaggaggactttcttggaccttag

SEQ ID NO: 170793 - DNA, 2394 bp, Artificial Sequence
  derived and/or modified sequence
atgcaggacggcaacttcctgctgagcgccctgcagcctgaggccggcgtgtgcagcctggccctgcccagcgacctgcagctggacagaagaggagctgagggccctgaggccgagcggctgcgggccgcccgggtgcaggagcaggtgcgggcccggctgctgcagctgggccagcagcccaggcacaacggggctgctgagcctgagcctgaggccgagacagcccggggcaccagccggggccagtaccacaccctgcaggccggcttcagcagccgcagccagggcctgagcggggacaagaccagcggcttccggcccatcgccaagccagcctacagccctgcctcctggagcagccgctctgctgtggacctgagctgcagccggcggctgagcagcgcccacaacggcggcagcgcctttggagctgctggctacggcggggcccagcccaccccacccatgcccaccaggcctgtgtccttccacgagcggggcggcgtgggcagcagagctgactatgacaccctgagcctgcggagcctgcggctgggccctgggggcctggatgaccgctacagcctggtgtctgagcagctggagcctgctgccaccagcacctaccgggcctttgcctatgagcggcaggccagcagcagcagcagccgggccggcggcctggactggccagaggccacagaggtgagccccagcaggaccatccgggccccagctgtgaggaccctgcagcgcttccagagcagccacaggagccggggcgtgggcggcgctgtgcctggagctgtgctggagcctgtggcccgggcccccagcgtgcgcagcctgagcctgagcctggccgacagcggccacctgcctgatgtgcacggcttcaacagctatggcagccacaggaccctgcagaggctgagcagcggctttgatgacatcgacctgcccagcgctgtgaagtacctgatggccagtgaccccaacctgcaggtgctgggcgccgcctacatccagcacaagtgctacagtgatgctgctgccaagaagcaggcccggagcctgcaggccgtgccccggctggtgaagctgttcaaccacgccaaccaggaggtgcagagacatgccaccggggccatgaggaacctgatctatgacaatgctgacaacaagctggccctggtggaggagaatggcatctttgagctgctgcggaccctgcgggagcaggatgatgagctgaggaagaatgtgacaggcatcctgtggaacctgagcagcagtgaccacctgaaggaccggctggcccgggacaccctggagcagctgacagacctggtgctgagccccctgtctggagctgggggccccccactcatccagcagaatgccagcgaggccgagatcttctacaatgccaccggcttcctgaggaacctgagcagcgccagccaggccacccggcagaagatgagggagtgccacggcctggtggatgccctggtgaccagcatcaaccacgccctggatgctggaaaatgtgaggacaagtctgtggagaatgctgtgtgtgtgctgaggaacctgagctaccgcctgtatgatgagatgcctccttctgccctgcagaggctggagggccggggcagaagagacctggccggggcccctcctggagaggtggtgggctgcttcaccccccagagccggcggctgcgggagctgcccctggccgcagatgccctgacctttgctgaggtgtccaaggaccccaagggcctggagtggctgtggagcccccagatcgtgggcctgtacaaccggctgctgcagagatgtgagctgaacagacacaccacagaagctgctgctggggccctgcagaacatcacagctggggaccggcgctgggccggcgtgctgagccggctggccctggagcaggagcgcatcctgaaccccctgctggacagagtgaggacagctgaccaccaccagctgcggagcctgaccggcctcatccggaacctgagcagaaatgccaggaacaaggatgagatgagcaccaaggtggtgagccacctgattgagaagctgcccggctctgtgggggagaagagccccccagctgaggtgctggtgaacatcatcgctgtgctgaacaacctggtggtggccagccccatcgccgcccgggacctgctgtactttgatggcctgaggaagctgatcttcatcaagaagaagagggacagcccagacagcgagaagagcagccgggccgccagcagcctgctggccaacctgtggcagtacaacaagctgcaccgggacttccgggccaagggctacaggaaggaggacttcctgggcccctag

SEQ ID NO: 170794 - DNA, 2394 bp, Artificial Sequence
  derived and/or modified sequence
atgcaggacggcaacttcctgctgagcgccctgcagcccgaggccggggtctgtagcctcgctctcccgtcagaccttcagctggacaggcggggagccgaggggcctgaggccgagagattgcgggctgcgagagttcaggaacaggttcgagccaggctgctccagcttgggcagcagcctaggcacaacggcgcagccgagcccgagcccgaggccgaaactgcgagaggaacgtcccggggccagtaccacacactccaggcaggtttttctagccgatcccaaggcctctccggtgataaaactagtgggttccgtccaatcgcaaaacccgcctattcccccgcctcatggtcctctagatcagctgtagacctgagttgctctcgcagattgtcatcagcacataacggaggttctgcattcggagccgctggctatgggggggcccaacccaccccacctatgccaacacgacctgtcagcttccacgaaagggggggagtcggcagcagggccgactacgacacactaagcttgagatctctgagactcggcccaggcgggcttgacgatcgctactcactggtcagcgaacagctggaaccggccgcaacatctacatatagagcctttgcctatgagaggcaagcctctagctcttcttctcgggctggaggcttggactggccagaggcgaccgaagtgtctccgagcaggacaatcagggcacccgcagtgcgcactttgcagagatttcaaagcagccatcgttctagaggcgtgggtggagccgtgcccggcgcagtactggagcctgttgcacgcgcgccaagcgttagatcattatcattgtctctggccgactcaggccatcttcccgacgtacacggcttcaatagttatggatcacatcgaacgctgcaacgcctgagctctggattcgacgatatcgatttaccttcagccgttaagtatctgatggcaagcgaccctaacctgcaagtcttgggcgcagcatacatacagcacaagtgctacagtgacgcagcagccaagaaacaagcccggtctctccaagctgttcctaggttagtaaaacttttcaaccatgctaaccaagaggtccagcgccacgcaaccggcgccatgagaaatcttatctatgataacgccgacaacaagttagcactggtcgaagagaatggcatttttgaactgctgagaacactgcgtgaacaagacgatgagctgagaaagaacgtgactggtatcttatggaacctttcgagtagcgaccacctcaaagaccgattagctcgggatactcttgagcagttgaccgacttggtgctatcccccctatcaggggccggcggacctcccttgattcagcaaaatgctagcgaagccgaaattttctacaacgccacaggtttcctgcgcaacctcagctccgcaagccaagcaaccaggcaaaaaatgcgagaatgtcacgggctggtggacgctctcgttacatcgattaatcacgcccttgacgcagggaagtgcgaagacaagtccgtggaaaatgccgtgtgtgtgctgaggaacttgtcataccgcctgtacgacgagatgccccccagcgcccttcaacgcctggagggccgcgggaggagggacctggcaggggctccacccggtgaggttgtcggctgcttcacgccccaatcccgccggctgcgggagctacccttggccgccgatgcccttacattcgctgaagtgtcgaaagatcccaaagggctggaatggctgtggtccccccagattgtagggctatataacagattgctgcagcgatgtgagctcaataggcatactaccgaagccgccgcaggcgcactacagaacattacggctggtgatcgccgctgggcgggtgtcctcagcagactcgctctggaacaggagcggattctgaaccctctcttggatcgagtgagaactgccgatcaccaccaacttagaagcctgactggactgatccggaatctgagccgcaatgctcggaataaggacgagatgagtacaaaagttgtgagccatctgattgagaagctcccagggtctgtgggtgaaaagtcacctcccgcagaggtgctggtcaatatcattgccgttctgaataatttagtagtggcttcgcctatcgctgcgagagacctcctttacttcgatggattgcgaaagttgatttttatcaaaaagaaacgcgactcgcctgattcggaaaaaagctcccgtgctgcttcctcacttttagccaacttgtggcagtataacaagttgcatcgtgacttcagggccaaagggtacagaaaggaggactttttaggaccctag

SEQ ID NO: 170795 - DNA, 2809 bp, Artificial Sequence
  derived and/or modified sequence
ggcctcgagggacaggacgtgaagatagttgggtttggaggcggccgccaggcccaggcccggtggacctgccgccatgcaggacggtaacttcctgctgtcggccctgcagcctgaggccggcgtgtgctccctggcgctgccctctgacctgcagctggaccgccggggcgccgaggggccggaggccgagcggctgcgggcagcccgcgtccaggagcaggtccgcgcccgcctcttgcagctgggacagcagccgcggcacaacggggccgctgagcccgagcctgaggccgagactgccagaggcacatccagggggcagtaccacaccctgcaggctggcttcagctctcgctctcagggcctgagtggggacaagacctcgggcttccggcccatcgccaagccggcctacagcccagcctcctggtcctcccgctccgccgtggatctgagctgcagtcggaggctgagttcagcccacaacgggggcagcgcctttggggccgctgggtacgggggtgcccagcccacccctcccatgcccaccaggcccgtgtccttccatgagcgcggtggggttgggagccgggccgactatgacacactctccctgcgctcgctgcggctggggcccgggggcctggacgaccgctacagcctggtgtctgagcagctggagcccgcggccacctccacctacagggcctttgcgtacgagcgccaggccagctccagctccagccgggcaggggggctggactggcccgaggccactgaggtttccccgagccggaccatccgtgcccctgccgtgcggaccctgcagcgattccagagcagccaccggagccgcggggtaggcggggcagtgccgggggccgtcctggagccagtggctcgagcgccatctgtgcgcagcctcagcctcagcctggctgactcgggccacctgccggacgtgcatgggttcaacagctacggtagccaccgaaccctgcagagactcagcagcggttttgatgacattgacctgccctcagcagtcaagtacctcatggcttcagaccccaacctgcaggtgctgggagcggcctacatccagcacaagtgctacagcgatgcagccgccaagaagcaggcccgcagccttcaggccgtgcctaggctggtgaagctcttcaaccacgccaaccaggaagtgcagcgccatgccacaggtgccatgcgcaacctcatctacgacaacgctgacaacaagctggccctggtggaggagaacgggatcttcgagctgctgcggacactgcgggagcaggatgatgagcttcgcaaaaatgtcacagggatcctgtggaacctttcatccagcgaccacctgaaggaccgcctggccagagacacgctggagcagctcacagacctggtgttgagccccctgtcgggggctgggggtccccccctcatccagcagaacgcctcggaggcagagatcttctacaacgccaccggcttcctcaggaacctcagctcagcctctcaggccactcgccagaagatgcgggagtgccacgggctggtggacgccctggtcacctctatcaaccacgccctggacgcgggcaaatgcgaggacaagagcgtggagaacgcggtgtgcgtcctgcggaacctgtcctaccgcctctacgacgagatgccgccgtccgcgctgcagcggctggagggtcgcggccgcagggacctggcgggggcgccgccgggagaggtcgtgggctgcttcacgccgcagagccggcggctgcgcgagctgcccctcgccgccgatgcgctcaccttcgcggaggtgtccaaggaccccaagggcctcgagtggctgtggagcccccagatcgtggggctgtacaaccggctgctgcagcgctgcgagctcaaccggcacacgacggaggcggccgccggggcgctgcagaacatcacggcaggcgaccgcaggtgggcgggggtgctgagccgcctggccctggagcaggagcgtattctgaaccccctgctagaccgtgtcaggaccgccgaccaccaccagctgcgctcactgactggcctcatccgaaacctgtctcggaacgctaggaacaaggacgagatgtccacgaaggtggtgagccacctgatcgagaagctgccgggcagcgtgggtgagaagtcgcccccagccgaggtgctggtcaacatcatagctgtgctcaacaacctggtggtggccagccccatcgctgcccgagacctgctgtattttgacggactccgaaagctcatcttcatcaagaagaagcgggacagccccgacagtgagaagtcctcccgggcagcatccagcctcctggccaacctgtggcagtacaacaagctccaccgtgacttccgggcgaagggctatcggaaggaggacttcctgggcccataggtgaagccttctggaggagaaggtgacgtggcccagcgtccaagggacagactcagctccaggctgcttggcagcccagcctggaggagaaggctaatgacggaggggcccctcgctggggcccctgtgtgcatctttgagggtcctgggccaccaggaggggcagggtcttatagctggggacttggcttccgcagggcagggggtggggcagggctcaaggctgctctggtgtatggggtggtgacccagtcacattggcagaggtgggggttggctgtggcctggcagtatcttgggatagccagcactgggaataaagatggccatgaacagtca

SEQ ID NO: 170796 - DNA, 2394 bp, Artificial Sequence
  derived and/or modified sequence
atgcaggacggcaactttctcctgagtgctctgcagcccgaggcaggggtgtgcagcctcgcacttccttctgacctgcagctcgaccggagaggtgcggaaggtcctgaagcagagagactgcgggcagctcgagtacaggagcaagttcgcgcaagattgctgcagctgggacagcaaccccgacataatggagcggcagaaccagaaccggaggctgagactgccagaggtaccagccggggacagtaccacacactgcaggccggattcagcagccgcagtcagggtctctcaggagataaaacatctgggtttcggcctattgctaagccagcatacagtcccgctagttggtctagcaggtcggccgtggacctgagttgctcaaggagactgagtagcgcccataacgggggatcagctttcggtgctgctggatatggcggagcgcagccgaccccccctatgcccacccgccctgtgagctttcacgagcgcggaggcgtcgggagcagagccgattacgacaccctgtccctgcgctccttaagactgggaccagggggtttagacgacaggtactcccttgtctccgaacagctggaacccgctgccacatcaacctatcgggcttttgcatatgaacgacaggccagttcttcctcctcccgtgctgggggactggactggccagaagcaaccgaggtgagcccatcacggaccatccgcgcaccagccgtgcgcaccctgcagcgcttccagtccagtcatcgcagtcggggtgtgggaggggcagtccccggagcggtgctggaaccagttgcgagagccccttctgtgcgttctcttagcctgagcctagccgactcgggccaccttccagatgtccacgggtttaatagttatgggtcccaccggacattgcagcgcttgtcaagtggattcgacgatattgacttaccaagtgccgtgaaatacttaatggcctccgacccaaatttgcaagtgctaggggctgcctatatccaacacaaatgctattccgacgccgcagcgaaaaagcaggcgaggagtctgcaggccgtgccccgattggtgaaattgttcaaccacgcaaatcaggaagtgcagcgccacgcaacgggggcaatgaggaacctcatctacgacaacgctgacaacaaactggctctggttgaagagaacggaatctttgagctgctgcggacattgagggagcaggatgacgaacttcggaagaatgtgactggcattctttggaatttgtcttccagcgatcaccttaaagatcggctcgcgagagacacactggagcagctgactgacctggtcctgagccccttaagcggggcagggggaccacctttgatacaacagaatgcttccgaggctgaaatcttttacaacgctacaggtttcctgcggaatctctcttcagcatcacaggctactcgccaaaaaatgcgggagtgtcacgggctggtcgatgctctagtgaccagcatcaaccacgcattagatgctgggaagtgtgaggacaagtcagtggagaacgcagtatgtgtgctcagaaatttgtcttatagactgtatgatgaaatgcccccttccgcccttcaacgcctggaaggcagggggaggagggacctggccggagctccacctggcgaagttgtcggatgctttaccccccagagtaggagacttagggagttgccattagcagccgatgccttgacttttgcagaagtgagtaaggatcctaaaggcctggaatggttgtggagccctcagattgtgggtttgtataataggctcctgcaacgctgcgaactgaaccggcacacgaccgaggccgcagccggtgccctgcagaatattacagctggcgatagacgttgggccggtgtactgtcccgactcgctctggaacaggagagaatcctgaaccctttacttgacagggtgcggaccgccgatcaccatcagctgagatcgctgaccggcctcatcaggaacctgtcgagaaacgctcgaaacaaggatgagatgagtactaaggttgtcagtcacctgatagagaagctgccagggtccgttggtgaaaaatcacctccagctgaagtcttggtgaacattatcgcagtcctcaataacctcgttgtcgcctcaccaattgccgctagagatctgctgtactttgatgggctccgaaagctcatattcatcaaaaaaaagcgggattcacccgatagcgagaagtcctcacgagcggcaagctccttgctggctaacctgtggcagtataataagctacaccgcgactttcgtgccaaagggtatcggaaagaagactttttgggcccatag

SEQ ID NO: 170797 - DNA, 2394 bp, Artificial Sequence
  derived and/or modified sequence
atgcaggacggcaacttcctgctgagcgccctgcagcccgaggccggcgtgtgcagcctggccctgcccagcgacctgcagctggacagaagaggcgccgagggccccgaggccgagagactgagagccgccagagtgcaggagcaggtgagagccagactgctgcagctgggccagcagcccagacacaacggcgccgccgagcccgagcccgaggccgagaccgccagaggcaccagcagaggccagtaccacaccctgcaggccggcttcagcagcagaagccagggcctgagcggcgacaagaccagcggcttcagacccatcgccaagcccgcctacagccccgccagctggagcagcagaagcgccgtggacctgagctgcagcagaagactgagcagcgcccacaacggcggcagcgccttcggcgccgccggctacggcggcgcccagcccaccccccccatgcccaccagacccgtgagcttccacgagagaggcggcgtgggcagcagagccgactacgacaccctgagcctgagaagcctgagactgggccccggcggcctggacgacagatacagcctggtgagcgagcagctggagcccgccgccaccagcacctacagagccttcgcctacgagagacaggccagcagcagcagcagcagagccggcggcctggactggcccgaggccaccgaggtgagccccagcagaaccatcagagcccccgccgtgagaaccctgcagagattccagagcagccacagaagcagaggcgtgggcggcgccgtgcccggcgccgtgctggagcccgtggccagagcccccagcgtgagaagcctgagcctgagcctggccgacagcggccacctgcccgacgtgcacggcttcaacagctacggcagccacagaaccctgcagagactgagcagcggcttcgacgacatcgacctgcccagcgccgtgaagtacctgatggccagcgaccccaacctgcaggtgctgggcgccgcctacatccagcacaagtgctacagcgacgccgccgccaagaagcaggccagaagcctgcaggccgtgcccagactggtgaagctgttcaaccacgccaaccaggaggtgcagagacacgccaccggcgccatgagaaacctgatctacgacaacgccgacaacaagctggccctggtggaggagaacggcatcttcgagctgctgagaaccctgagagagcaggacgacgagctgagaaagaacgtgaccggcatcctgtggaacctgagcagcagcgaccacctgaaggacagactggccagagacaccctggagcagctgaccgacctggtgctgagccccctgagcggcgccggcggcccccccctgatccagcagaacgccagcgaggccgagatcttctacaacgccaccggcttcctgagaaacctgagcagcgccagccaggccaccagacagaagatgagagagtgccacggcctggtggacgccctggtgaccagcatcaaccacgccctggacgccggcaagtgcgaggacaagagcgtggagaacgccgtgtgcgtgctgagaaacctgagctacagactgtacgacgagatgccccccagcgccctgcagagactggagggcagaggcagaagagacctggccggcgccccccccggcgaggtggtgggctgcttcaccccccagagcagaagactgagagagctgcccctggccgccgacgccctgaccttcgccgaggtgagcaaggaccccaagggcctggagtggctgtggagcccccagatcgtgggcctgtacaacagactgctgcagagatgcgagctgaacagacacaccaccgaggccgccgccggcgccctgcagaacatcaccgccggcgacagaagatgggccggcgtgctgagcagactggccctggagcaggagagaatcctgaaccccctgctggacagagtgagaaccgccgaccaccaccagctgagaagcctgaccggcctgatcagaaacctgagcagaaacgccagaaacaaggacgagatgagcaccaaggtggtgagccacctgatcgagaagctgcccggcagcgtgggcgagaagagcccccccgccgaggtgctggtgaacatcatcgccgtgctgaacaacctggtggtggccagccccatcgccgccagagacctgctgtacttcgacggcctgagaaagctgatcttcatcaagaagaagagagacagccccgacagcgagaagagcagcagagccgccagcagcctgctggccaacctgtggcagtacaacaagctgcacagagacttcagagccaagggctacagaaaggaggacttcctgggcccctag

SEQ ID NO: 170798 - protein, 1504 aa, Artificial Sequence
  derived and/or modified sequence
MATARTFGPEREAEPAKEARVVGSELVDTYTVYIIQVTDGSHEWTVKHRYSDFHDLHEKLVAERKIDKNLLPPKKIIGKNSRSLVEKREKDLEVYLQKLLAAFPGVTPRVLAHFLHFHFYEINGITAALAEELFEKGEQLLGAGEVFAIGPLQLYAVTEQLQQGKPTCASGDAKTDLGHILDFTCRLKYLKVSGTEGPFGTSNIQEQLLPFDLSIFKSLHQVEISHCDAKHIRGLVASKPTLATLSVRFSATSMKEVLVPEASEFDEWEPEGTTLEGPVTAVIPTWQALTTLDLSHNSVSEIDESVKLIPKIEFLDLSHNGLLVVDNLQHLYNLVHLDLSYNKLSSLEGLHTKLGNIKTLNLAGNLLESLSGLHKLYSLVNLDLRDNRIEQMEEVRSIGSLPCLEHVSLLNNPLSIIPDYRTKVLAQFGERASEVCLDDTVTTEKELDTVEVLKAIQKAKEVKSKLSNPEKKGGEDSRLSAAPCIRPSSSPPTVAPASASLPQPILSNQGIMFVQEEALASSLSSTDSLTPEHQPIAQGCSDSLESIPAGQAASDDLRDVPGAVGGASPEHAEPEVQVVPGSGQIIFLPFTCIGYTATNQDFIQRLSTLIRQAIERQLPAWIEAANQREEGQGEQGEEEDEEEEEEEDVAENRYFEMGPPDVEEEEGGGQGEEEEEEEEDEEAEEERLALEWALGADEDFLLEHIRILKVLWCFLIHVQGSIRQFAACLVLTDFGIAVFEIPHQESRGSSQHILSSLRFVFCFPHGDLTEFGFLMPELCLVLKVRHSENTLFIISDAANLHEFHADLRSCFAPQHMAMLCSPILYGSHTSLQEFLRQLLTFYKVAGGCQERSQGCFPVYLVYSDKRMVQTAAGDYSGNIEWASCTLCSAVRRSCCAPSEAVKSAAIPYWLLLTPQHLNVIKADFNPMPNRGTHNCRNRNSFKLSRVPLSTVLLDPTRSCTQPRGAFADGHVLELLVGYRFVTAIFVLPHEKFHFLRVYNQLRASLQDLKTVVIAKTPGTGGSPQGSFADGQPAERRASNDQRPQEVPAEALAPAPAEVPAPAPAAASASGPAKTPAPAEASTSALVPEETPVEAPAPPPAEAPAQYPSEHLIQATSEENQIPSHLPACPSLRHVASLRGSAIIELFHSSIAEVENEELRHLMWSSVVFYQTPGLEVTACVLLSTKAVYFVLHDGLRRYFSEPLQDFWHQKNTDYNNSPFHISQCFVLKLSDLQSVNVGLFDQHFRLTGSTPMQVVTCLTRDSYLTHCFLQHLMVVLSSLERTPSPEPVDKDFYSEFGNKTTGKMENYELIHSSRVKFTYPSEEEIGDLTFTVAQKMAEPEKAPALSILLYVQAFQVGMPPPGCCRGPLRPKTLLLTSSEIFLLDEDCVHYPLPEFAKEPPQRDRYRLDDGRRVRDLDRVLMGYQTYPQALTLVFDDVQGHDLMGSVTLDHFGEVPGGPARASQGREVQWQVFVPSAESREKLISLLARQWEALCGRELPVELTG

SEQ ID NO: 170799 - protein, 818 aa, Artificial Sequence
  derived and/or modified sequence
MGPPDVEEEEGGGQGEEEEEEEEDEEAEEERLALEWALGADEDFLLEHIRILKVLWCFLIHVQGSIRQFAACLVLTDFGIAVFEIPHQESRGSSQHILSSLRFVFCFPHGDLTEFGFLMPELCLVLKVRHSENTLFIISDAANLHEFHADLRSCFAPQHMAMLCSPILYGSHTSLQEFLRQLLTFYKVAGGCQERSQGCFPVYLVYSDKRMVQTAAGDYSGNIEWASCTLCSAVRRSCCAPSEAVKSAAIPYWLLLTPQHLNVIKADFNPMPNRGTHNCRNRNSFKLSRVPLSTVLLDPTRSCTQPRGAFADGHVLELLVGYRFVTAIFVLPHEKFHFLRVYNQLRASLQDLKTVVIAKTPGTGGSPQGSFADGQPAERRASNDQRPQEVPAEALAPAPAEVPAPAPAAASASGPAKTPAPAEASTSALVPEETPVEAPAPPPAEAPAQYPSEHLIQATSEENQIPSHLPACPSLRHVASLRGSAIIELFHSSIAEVENEELRHLMWSSVVFYQTPGLEVTACVLLSTKAVYFVLHDGLRRYFSEPLQDFWHQKNTDYNNSPFHISQCFVLKLSDLQSVNVGLFDQHFRLTGSTPMQVVTCLTRDSYLTHCFLQHLMVVLSSLERTPSPEPVDKDFYSEFGNKTTGKMENYELIHSSRVKFTYPSEEEIGDLTFTVAQKMAEPEKAPALSILLYVQAFQVGMPPPGCCRGPLRPKTLLLTSSEIFLLDEDCVHYPLPEFAKEPPQRDRYRLDDGRRVRDLDRVLMGYQTYPQALTLVFDDVQGHDLMGSAESREKLISLLARQWEALCGRELPVELTG

SEQ ID NO: 170800 - DNA, 4515 bp, Artificial Sequence
  derived and/or modified sequence
atggccaccgccagaaccttcggccccgagagagaggccgagcccgccaaggaggccagagtggtgggcagcgagctggtggacacctacaccgtgtacatcatccaggtgaccgacggcagccacgagtggaccgtgaagcacagatacagcgacttccacgacctgcacgagaagctggtggccgagagaaagatcgacaagaacctgctgccccccaagaagatcatcggcaagaacagcagaagcctggtggagaagagagagaaggacctggaggtgtacctgcagaagctgctggccgccttccccggcgtgacccccagagtgctggcccacttcctgcacttccacttctacgagatcaacggcatcaccgccgccctggccgaggagctgttcgagaagggcgagcagctgctgggcgccggcgaggtgttcgccatcggccccctgcagctgtacgccgtgaccgagcagctgcagcagggcaagcccacctgcgccagcggcgacgccaagaccgacctgggccacatcctggacttcacctgcagactgaagtacctgaaggtgagcggcaccgagggccccttcggcaccagcaacatccaggagcagctgctgcccttcgacctgagcatcttcaagagcctgcaccaggtggagatcagccactgcgacgccaagcacatcagaggcctggtggccagcaagcccaccctggccaccctgagcgtgagattcagcgccaccagcatgaaggaggtgctggtgcccgaggccagcgagttcgacgagtgggagcccgagggcaccaccctggagggccccgtgaccgccgtgatccccacctggcaggccctgaccaccctggacctgagccacaacagcgtgagcgagatcgacgagagcgtgaagctgatccccaagatcgagttcctggacctgagccacaacggcctgctggtggtggacaacctgcagcacctgtacaacctggtgcacctggacctgagctacaacaagctgagcagcctggagggcctgcacaccaagctgggcaacatcaagaccctgaacctggccggcaacctgctggagagcctgagcggcctgcacaagctgtacagcctggtgaacctggacctgagagacaacagaatcgagcagatggaggaggtgagaagcatcggcagcctgccctgcctggagcacgtgagcctgctgaacaaccccctgagcatcatccccgactacagaaccaaggtgctggcccagttcggcgagagagccagcgaggtgtgcctggacgacaccgtgaccaccgagaaggagctggacaccgtggaggtgctgaaggccatccagaaggccaaggaggtgaagagcaagctgagcaaccccgagaagaagggcggcgaggacagcagactgagcgccgccccctgcatcagacccagcagcagcccccccaccgtggcccccgccagcgccagcctgccccagcccatcctgagcaaccagggcatcatgttcgtgcaggaggaggccctggccagcagcctgagcagcaccgacagcctgacccccgagcaccagcccatcgcccagggctgcagcgacagcctggagagcatccccgccggccaggccgccagcgacgacctgagagacgtgcccggcgccgtgggcggcgccagccccgagcacgccgagcccgaggtgcaggtggtgcccggcagcggccagatcatcttcctgcccttcacctgcatcggctacaccgccaccaaccaggacttcatccagagactgagcaccctgatcagacaggccatcgagagacagctgcccgcctggatcgaggccgccaaccagagagaggagggccagggcgagcagggcgaggaggaggacgaggaggaggaggaggaggaggacgtggccgagaacagatacttcgagatgggcccccccgacgtggaggaggaggagggcggcggccagggcgaggaggaggaggaggaggaggaggacgaggaggccgaggaggagagactggccctggagtgggccctgggcgccgacgaggacttcctgctggagcacatcagaatcctgaaggtgctgtggtgcttcctgatccacgtgcagggcagcatcagacagttcgccgcctgcctggtgctgaccgacttcggcatcgccgtgttcgagatcccccaccaggagagcagaggcagcagccagcacatcctgagcagcctgagattcgtgttctgcttcccccacggcgacctgaccgagttcggcttcctgatgcccgagctgtgcctggtgctgaaggtgagacacagcgagaacaccctgttcatcatcagcgacgccgccaacctgcacgagttccacgccgacctgagaagctgcttcgccccccagcacatggccatgctgtgcagccccatcctgtacggcagccacaccagcctgcaggagttcctgagacagctgctgaccttctacaaggtggccggcggctgccaggagagaagccagggctgcttccccgtgtacctggtgtacagcgacaagagaatggtgcagaccgccgccggcgactacagcggcaacatcgagtgggccagctgcaccctgtgcagcgccgtgagaagaagctgctgcgcccccagcgaggccgtgaagagcgccgccatcccctactggctgctgctgaccccccagcacctgaacgtgatcaaggccgacttcaaccccatgcccaacagaggcacccacaactgcagaaacagaaacagcttcaagctgagcagagtgcccctgagcaccgtgctgctggaccccaccagaagctgcacccagcccagaggcgccttcgccgacggccacgtgctggagctgctggtgggctacagattcgtgaccgccatcttcgtgctgccccacgagaagttccacttcctgagagtgtacaaccagctgagagccagcctgcaggacctgaagaccgtggtgatcgccaagacccccggcaccggcggcagcccccagggcagcttcgccgacggccagcccgccgagagaagagccagcaacgaccagagaccccaggaggtgcccgccgaggccctggcccccgcccccgccgaggtgcccgcccccgcccccgccgccgccagcgccagcggccccgccaagacccccgcccccgccgaggccagcaccagcgccctggtgcccgaggagacccccgtggaggcccccgcccccccccccgccgaggcccccgcccagtaccccagcgagcacctgatccaggccaccagcgaggagaaccagatccccagccacctgcccgcctgccccagcctgagacacgtggccagcctgagaggcagcgccatcatcgagctgttccacagcagcatcgccgaggtggagaacgaggagctgagacacctgatgtggagcagcgtggtgttctaccagacccccggcctggaggtgaccgcctgcgtgctgctgagcaccaaggccgtgtacttcgtgctgcacgacggcctgagaagatacttcagcgagcccctgcaggacttctggcaccagaagaacaccgactacaacaacagccccttccacatcagccagtgcttcgtgctgaagctgagcgacctgcagagcgtgaacgtgggcctgttcgaccagcacttcagactgaccggcagcacccccatgcaggtggtgacctgcctgaccagagacagctacctgacccactgcttcctgcagcacctgatggtggtgctgagcagcctggagagaacccccagccccgagcccgtggacaaggacttctacagcgagttcggcaacaagaccaccggcaagatggagaactacgagctgatccacagcagcagagtgaagttcacctaccccagcgaggaggagatcggcgacctgaccttcaccgtggcccagaagatggccgagcccgagaaggcccccgccctgagcatcctgctgtacgtgcaggccttccaggtgggcatgcccccccccggctgctgcagaggccccctgagacccaagaccctgctgctgaccagcagcgagatcttcctgctggacgaggactgcgtgcactaccccctgcccgagttcgccaaggagcccccccagagagacagatacagactggacgacggcagaagagtgagagacctggacagagtgctgatgggctaccagacctacccccaggccctgaccctggtgttcgacgacgtgcagggccacgacctgatgggcagcgtgaccctggaccacttcggcgaggtgcccggcggccccgccagagccagccagggcagagaggtgcagtggcaggtgttcgtgcccagcgccgagagcagagagaagctgatcagcctgctggccagacagtgggaggccctgtgcggcagagagctgcccgtggagctgaccggctag

SEQ ID NO: 170801 - DNA, 4515 bp, Artificial Sequence
  derived and/or modified sequence
atggccactgccaggacatttggtcccgagcgggaggccgaaccagcgaaggaagcccgtgtggtgggatccgagctggtcgatacttacaccgtttacataatccaggtgacagacggctctcacgagtggaccgtgaaacaccgctattcagattttcatgacttacatgagaaattggttgctgagagaaagatagacaaaaatctccttcctccgaagaagatcattggaaagaattcccgtagcctggtggaaaaacgggagaaggatctggaagtttacctgcaaaagctcctggccgccttccccggcgttaccccgcgagtcctggcccacttcttgcacttccatttttacgaaattaacggcatcaccgccgccctggctgaggaattatttgagaagggtgagcagctgctcggggccggagaagtctttgccatcggacctcttcagttatacgccgtgaccgagcagcttcaacaaggcaagcccacctgcgcctctggcgatgctaagacggacttgggccacatcctggatttcacatgccgtctcaaatatttgaaagtgtcagggaccgagggaccctttggtacatccaacatccaggagcagcttctgccgttcgatctgtccatcttcaagtctctgcatcaggtggagatttcacactgtgacgctaaacatataagggggcttgttgcctcaaaacctacattagcaacattaagcgtacggttttctgccacgagtatgaaggaagttctggttccggaagcatctgaattcgacgagtgggaacccgaaggcaccaccctcgaaggcccagttaccgcagtcatacccacttggcaagccctcaccacactggacctgagccacaacagtgtctccgagattgacgaatcggtgaaactgatcccaaaaatcgagttcctggacctaagccacaacggcctgctcgtggtggacaacctgcagcatctgtacaacttggtgcatctcgacctgagctacaacaagctctcatctctcgagggactgcacaccaagttagggaacatcaaaactctgaacctggccggcaatttgttagaaagcctgtccggtctgcataagctctacagtctggtgaatctggatctgcgcgataaccgaatcgagcagatggaggaagttcggtctattgggagtctcccatgcctggagcacgtcagtctcctgaataaccctcttagtatcatcccagattatcgcacaaaggtcctggctcagtttggagaaagggcatccgaggtgtgtctggacgatactgtgacgaccgaaaaagagctcgacaccgtagaggtactgaaggctattcagaaagctaaggaggttaaaagtaaactctctaatcccgagaagaaggggggtgaagatagccggctcagcgcagctccatgtataagaccctccagtagccctcctaccgtggcccccgcatctgcatctttacctcaacctatcttgtccaatcaaggaattatgttcgttcaggaggaagccctggcctcttccctatcctctactgactccctgacacccgaacatcagccaattgcccaggggtgtagcgactcccttgagagcataccagcagggcaggcggcatcagatgaccttcgggatgtgcccggcgcggtcggtggcgcaagccctgagcatgcggagcccgaagtgcaggttgtccctgggtcagggcagatcattttcctccctttcacctgcattggatacacagccaccaaccaggattttatccagaggctgagcactctaatccggcaggccatcgagcgccagctgccggcctggatcgaggccgctaaccagcgggaggaaggccaaggagaacagggcgaagaggaggacgaggaggaggaggaggaggaagacgtggctgaaaaccggtactttgagatggggccacctgacgtcgaggaagaggagggggggggccagggagaagaggaagaagaggaggaagaggacgaagaagcagaggaagaaagactggctctagaatgggcccttggcgccgacgaagattttttattggaacacatcagaatactgaaggttctgtggtgcttcctgatacacgtccaaggcagcattaggcagttcgctgcgtgcctggtgctcaccgactttggaatcgccgtgtttgagatccctcatcaagagtcccgcgggagcagccagcacatattatcatccttgcgctttgtgttttgcttcccacacggtgacctcaccgagttcgggttcttgatgcccgagctctgtctcgtcctgaaggtgcgtcactctgaaaatacattattcatcataagtgacgccgccaatttgcacgagtttcacgcagacctgcggtcctgcttcgcacctcagcacatggcaatgctgtgttcccccatcttgtacggctctcacacttcactacaggagtttttgcgccagctactgaccttctacaaggttgccggcggatgccaggaacgcagccagggctgcttccccgtatacctcgtatattccgataagcgcatggtgcagactgcagcgggcgattacagcggaaatatagaatgggctagctgtaccctctgctcagccgtgcggaggtcctgttgcgccccaagcgaggctgtcaaatccgccgctatcccgtactggctcctccttacacctcagcaccttaacgtgattaaagcagacttcaaccccatgcctaacaggggtacccataattgtcgtaacagaaactcttttaaactctccagagttcccctcagcacagtactgttggacccgactcgctcgtgcacccaaccccgcggtgctttcgctgacggacacgttctggagctgttggtgggctacagattcgtgactgctatcttcgtgcttcctcatgagaagttccattttctgagggtgtacaatcaactgcgcgccagtttacaggaccttaagaccgtagtgatcgccaagacccccgggaccggaggttcacctcagggctctttcgccgatgggcagcccgccgaacgtcgggcctctaacgaccaacgcccacaggaagtccccgcagaggccctggcgccagccccagccgaggtgcccgcaccagctcccgcagctgcaagtgcatccgggcccgctaagacccccgccccagccgaggccagcacgagcgcacttgtgcctgaagaaacacccgtggaggcccccgctccaccccctgctgaagctcccgcacagtatccatccgaacatttgattcaagctacatccgaggagaaccagattccatcgcatctccccgcttgtcccagtctgcgtcacgtggcgagtcttcggggttcagcaattatcgaattatttcactcttctatcgcagaagttgagaacgaggagctgaggcatctgatgtggagttctgtggtcttttatcagaccccggggctggaggtgacagcctgtgtcctcttaagtacaaaagctgtgtattttgtcttgcacgatggactgaggaggtacttcagtgagcctctccaggacttttggcatcagaagaataccgactataataatagtccgttccacatttctcagtgtttcgttctgaagctgtccgacctgcaaagcgtgaacgtgggccttttcgatcagcacttcagattgacggggagtacccccatgcaggtggtgacatgcctaacccgtgacagttaccttacccactgtttcttgcagcacctaatggtggtgctcagcagcctcgagaggaccccatcgccggagcccgtcgacaaggatttctactccgagtttggcaacaaaaccacaggcaagatggaaaattacgagttgatccactcctcccgagtgaagttcacgtatcccagcgaggaggaaattggtgacctaacattcactgtggctcagaaaatggcagagcctgagaaggcccctgcactgtctatcctcctttacgtccaggcttttcaggtgggcatgcccccacctgggtgctgccgcggccctttacggccgaagacactgctgctgacgtcctccgaaatctttctgttagatgaagactgcgtgcattaccctcttcccgagtttgccaaggaaccgccacaacgtgaccggtatagattggacgacggacggcgcgtgcgcgacctggatcgagtcttaatggggtaccaaacctatccccaggccctgactctggtgttcgatgacgtgcaggggcacgacttaatggggtcagtaacccttgatcacttcggagaagtgcctgggggccccgcccgcgcctcccaaggccgcgaggtgcagtggcaagtgttcgtgcctagcgccgagagtcgggaaaaacttattagcctgcttgcgaggcagtgggaagccctctgcggtagggaacttcctgtggaattaactgggtag

SEQ ID NO: 170802 - DNA, 4515 bp, Artificial Sequence
  derived and/or modified sequence
atggccaccgcaagaacttttggtcccgaaagggaggccgaacctgctaaagaggccagagtggtggggtccgagctggtggatacatacaccgtgtacattattcaggtcacagacggctcgcacgaatggacggtgaaacatcgctactccgacttccacgatttgcatgagaaattagttgcggaacgaaaaatcgacaagaacttgctgccaccaaagaagatcatcggtaaaaacagtagaagtctggtggagaaaagagaaaaggatctcgaggtgtacctgcagaagcttctggcagcctttcctggggtgacgccccgggtgttggctcatttcctgcactttcacttctacgagatcaacggcatcacagccgccctggcagaagagctgttcgagaaaggcgaacagctgctcggtgctggtgaggtgtttgcaatcggtcctctgcaactctacgctgtaaccgagcagctgcagcaaggcaagccgacctgtgcctctggagacgctaaaaccgacctcggacatatcctggactttacgtgcaggcttaagtatttaaaagtcagtggaaccgaagggccattcggcacatctaacatacaggagcagctgctcccgtttgatctgtccatatttaagagtctgcatcaggttgaaatctcccactgcgatgccaagcacatcagaggtctcgtggcgagcaagccaactctcgcgactctgtcagtgaggttttcggccacaagtatgaaggaggtactcgtgcctgaggcctcagaatttgatgagtgggaacccgaaggcaccacactggaaggacccgtgactgccgtcatcccaacatggcaggctctcaccaccctagacctatcccataacagcgtctcggaaattgacgagagtgtgaagttgattccaaagatcgaatttctggatctgagtcacaatggcctgcttgtggtcgataatttgcagcacctatacaacctggtccacctagacctctcttataacaaactgtcttcgctggaaggcttgcataccaagcttggcaacattaaaaccctgaacctggctggaaatctgctggagtctttgtccggtctccacaaactctattccctggtgaacctggacctgcgcgataataggattgagcagatggaggaggtgcgaagtatcggctctttaccgtgcctagaacatgtgtcgctgcttaacaatccgctttctattatcccagactatcggaccaaagtattagcgcagtttggcgaacgcgcctccgaggtgtgtctagacgatacagtcacgactgagaaggagctggacaccgttgaggtgctcaaggccattcagaaagcgaaagaggtcaagagcaagctgtcaaatcctgagaagaagggaggcgaagacagccgactgtctgcagcgccctgcattcgaccaagtagttctcctcctacagttgctccagcctccgcatctctgcctcaacctatcctgtccaatcaggggatcatgtttgtgcaggaggaagcactggcatccagcttgtctagtaccgattccctgactcctgaacaccagcccatcgcacagggatgttccgactctctcgagagtatcccagctggccaagctgcttctgatgatctacgggatgtgcctggcgccgtgggcggcgcctctccagaacacgcagagcctgaagtgcaggtggtccccggctccggccaaatcatcttcctcccattcacatgtattggctacaccgcaaccaaccaagatttcattcagagactttcaactctgatcaggcaggccatagagcgccagctccccgcctggatcgaagccgcgaaccaacgcgaggaaggccagggcgagcagggcgaagaagaggacgaagaagaggaggaagaggaggacgtggcggaaaatcgatactttgagatgggacctcctgacgtggaggaggaagaaggcggagggcagggcgaggaggaggaggaggaagaggaggatgaggaagccgaggaggaacgtctggccttagagtgggctctcggggccgatgaggatttcttactggagcatattcggatcctgaaggtcctctggtgcttcctgatccatgtgcagggaagcataaggcagttcgcagcttgcctggtcctgaccgatttcggaatagctgtcttcgagatacctcatcaggaatcccggggttcctctcaacacattctgtcaagcttgcgcttcgtcttctgtttcccccacggcgacctcacagagttcgggtttctgatgcctgaactgtgtctggtactgaaagttaggcactctgagaacaccctttttattatctcagacgcagcaaatcttcatgagttccacgccgacctcaggagctgtttcgcaccacagcatatggcaatgctgtgctctccaattctgtacggcagtcacacttccttgcaggagttcctgcggcagctcttaaccttttataaagtcgcaggcgggtgtcaggaaagaagccagggatgctttccagtgtatttggtctatagtgataagagaatggtgcagactgccgcaggggattatagtggcaatatcgagtgggcttcttgtaccctgtgttccgcggtacggcgcagctgctgcgccccatctgaggccgtcaagagtgccgccattccctattggttgttactgacccctcagcacctcaatgtgatcaaggcagacttcaacccaatgcctaatcgaggcacacacaactgccgcaatcgaaactctttcaagctgtcccgggtgcccctgtctactgtgctgttggatccgactaggtcctgtacacagccccggggcgcattcgcagatggccatgtgctggaactgctcgttgggtaccgttttgttactgccattttcgtgctcccccatgagaagttccactttctgcgtgtctataatcagcttcgggcttctctgcaggaccttaaaacggtagtgattgccaagactcctggcaccgggggctctcctcaggggagcttcgccgacggccaacccgcggagcggcgggcctctaatgaccagagaccacaagaggtgcctgctgaggcactcgcccccgcacccgccgaggtgcccgcgccagcacccgccgcagctagcgcatccggtccagctaagactccagcaccagccgaggcgtctacctctgccttagtcccagaagagactccggtagaggcacccgcgccaccgcccgcggaagctcctgcacagtaccctagtgagcacctgatccaggctacttctgaggagaaccaaattcccagccatctccccgcttgccccagcctgcggcacgtagcatcccttaggggcagtgccatcattgagttgttccattcctcaattgctgaagtcgaaaacgaggaactccgccatttgatgtggtccagtgtggtgttctaccagacaccggggctggaggtgacagcgtgtgtgcttctgagcacaaaagctgtgtactttgtgttgcacgatggtttgcgtaggtacttctctgaacccctgcaggatttttggcaccagaagaatacagactacaacaactcgcctttccatatctcacagtgctttgttctcaagctcagtgatttacagagtgtgaatgtgggtctattcgatcagcacttccggctgaccggaagtactcccatgcaggtggtaacatgtcttacacgagactcatacctgacccattgctttctgcaacacctcatggtcgtcctaagttccctagagaggactcccagtcccgagcccgtggataaggacttctattcagagtttggcaacaagacgactggcaaaatggaaaactatgaactgattcactcaagccgcgttaaatttacatatcccagcgaagaggagatcggcgacttgaccttcaccgtagcccagaaaatggccgaacctgaaaaagccccagcgctgagcatcttgctgtacgttcaggcctttcaggttggtatgcccccacctgggtgctgtcgcggtcccttgaggcccaaaactcttctgttaaccagttcagagattttcctgcttgacgaggattgcgtgcattaccccctgccagagttcgccaaggaaccacctcagcgcgatagataccgtcttgatgacggtaggcgcgtaagggatttggatagagtgctgatgggctatcagacatatcctcaggccttaactctggtgttcgacgatgtacagggccacgatttgatggggagcgttaccctggatcacttcggtgaggtgcctggcggcccggctcgggcatcacagggacgagaagtccagtggcaggtgtttgtgccctctgccgagagcagagagaagcttataagtctgctcgcacggcagtgggaagccctttgcgggagagagctgcctgtcgagctgacagggtag

SEQ ID NO: 170803 - DNA, 4515 bp, Artificial Sequence
  derived and/or modified sequence
atggccacagcccggacctttggacctgagcgggaggccgagcccgccaaggaggcccgggtggtgggcagcgagctggtggacacctacacagtgtacatcatccaggtgacagatggcagccatgagtggacagtgaagcaccgctacagcgacttccatgacctgcacgagaagctggtggccgagaggaagattgacaagaacctgctgccccccaagaagatcatcggcaagaacagccgcagcctggtggagaagcgggagaaggacctggaggtgtacctgcagaagctgctggccgccttccctggggtgaccccccgggtgctggcccacttcctgcacttccacttctatgagatcaatggcatcacagctgccctggccgaggagctgtttgagaagggggagcagctgctgggcgctggggaggtgtttgccatcggccccctgcagctgtatgctgtgacagagcagctgcagcagggcaagcccacctgtgccagcggagatgccaagacagacctgggccacatcctggacttcacctgccgcctgaagtacctgaaggtgtctggaacagagggccccttcggcaccagcaacatccaggagcagctgctgccctttgacctgagcatcttcaagagcctgcaccaggtggagatcagccactgtgatgccaagcacatccggggcctggtggccagcaagcccaccctggccaccctgtctgtgcgcttcagcgccacctccatgaaggaggtgctggtgcctgaggccagcgagtttgatgagtgggagcctgagggcaccaccctggagggccctgtgacagctgtgatccccacctggcaggccctgaccaccctggacctgagccacaacagcgtgtctgaaattgatgaatctgtgaagctgatccccaagattgagttcctggacctgagccacaacggcctgctggtggtggacaacctgcagcacctgtacaacctggtgcacctggacctgagctacaacaagctgagcagcctggagggcctgcacaccaagctgggcaacatcaagaccctgaacctggccggcaacctgctggagagcctgagcggcctgcacaagctgtacagcctggtgaacctggacctgcgggacaacagaattgagcagatggaggaggtgcgcagcatcggcagcctgccctgcctggagcacgtgtccctgctgaacaaccccctgagcatcatcccagactaccgcaccaaggtgctggcccagtttggagagcgggccagcgaggtgtgcctggatgacacagtgaccacagagaaggagctggacacagtggaggtgctgaaggccatccagaaggccaaggaggtgaagagcaagctgagcaaccctgagaagaagggaggagaggacagccggctgtctgctgccccctgcatccggcccagcagcagccccccaacagtggccccagccagcgccagcctgccccagcccatcctgagcaaccagggcatcatgtttgtgcaggaggaggccctggccagcagcctgagcagcacagacagcctgaccccagagcaccagcccatcgcccagggctgcagcgacagcctggagagcatcccagctggccaggccgccagtgatgacctgagagatgtgcctggagctgtgggcggggccagccctgagcacgccgagcctgaggtgcaggtggtgcccggcagcggccagatcatcttcctgcccttcacctgcatcggctacacagccaccaaccaggacttcatccagaggctgagcaccctcatccggcaggccatcgagcggcagctgcctgcctggattgaggccgccaaccagcgggaggagggccagggcgagcagggcgaggaggaggatgaggaggaggaggaggaggaggatgtggctgaaaatcgctactttgagatgggccccccagatgtggaggaggaggagggcggcggccagggcgaggaggaggaggaggaggaggaggatgaggaggccgaggaggagcggctggccctggagtgggccctgggcgcagatgaggacttcctgctggagcacatccgcatcctgaaggtgctgtggtgcttcctgattcatgtgcagggcagcatccggcagtttgctgcctgcctggtgctgacagactttggaattgctgtgtttgagatcccccaccaggagagccggggcagcagccagcacatcctgagcagcctgcgctttgtgttctgcttcccccatggagacctgacagaatttggcttcctgatgcctgagctgtgcctggtgctgaaggtgcgccacagcgagaacaccctcttcatcatcagtgatgctgccaacctgcacgagttccacgccgacctgcggagctgctttgccccccagcacatggccatgctgtgcagccccatcctgtatggcagccacaccagcctgcaggagttcctgcggcagctgctgaccttctacaaggtggccggcggctgccaggagaggagccagggctgcttccctgtgtacctggtgtacagcgacaagaggatggtgcagacagctgctggggactacagcggcaacatcgagtgggccagctgcaccctgtgcagcgctgtgagaagaagctgctgtgcccccagcgaggccgtgaagtctgctgccatcccctactggctgctgctgaccccccagcacctgaatgtcatcaaggctgacttcaaccccatgcccaacagaggcacccacaactgcaggaacagaaacagcttcaagctgagccgggtgcccctgagcacagtgctgctggaccccaccaggagctgcacccagcccaggggggcctttgctgatggccacgtgctggagctgctggtgggctacagatttgtgacagccatctttgtgctgccccatgagaagttccacttcctgcgggtgtacaaccagctgcgggccagcctgcaggacctgaagacagtggtgattgccaagaccccaggcactggaggcagcccccagggcagctttgctgatggccagcctgctgagcggcgggccagcaatgaccagaggccccaggaggtgcctgctgaggccctggccccagccccagctgaggtgcctgccccagccccagctgctgccagcgccagcggccctgccaagaccccagccccagctgaggccagcaccagcgccctggtgcctgaggagacccctgtggaggccccagcccctcctcctgctgaggccccagcccagtaccccagcgagcacctgatccaggccaccagcgaggagaaccagatccccagccacctgcctgcctgccccagcctgcggcacgtggccagcctgcggggcagcgccatcatcgagctgttccacagcagcattgctgaggtggagaatgaggagctgcggcacctgatgtggagctctgtggtgttctaccagaccccaggcctggaggtgacagcctgtgtgctgctgagcaccaaggctgtgtactttgtgctgcatgatggcctgcggcgctacttcagcgagcccctgcaggacttctggcaccagaagaacacagactacaacaacagccccttccacatcagccagtgctttgtgctgaagctgagtgacctgcagagcgtgaatgtgggcctgtttgaccagcacttccggctgaccggcagcacccccatgcaggtggtgacctgcctgacccgggacagctacctgacccactgcttcctgcagcacctgatggtggtgctgagcagcctggagaggacccccagccctgagcctgtggacaaggacttctacagcgagtttggaaacaagaccaccgggaagatggagaactatgagctgatccacagcagccgggtgaagttcacctaccccagcgaggaggagattggagacctgaccttcaccgtggcccagaagatggccgagcctgagaaggccccagccctgagcatcctgctgtatgtgcaggccttccaggtgggcatgcctcctcctggctgctgccggggccccctgcggcccaagaccctgctgctgaccagcagcgagatcttcctgctggatgaggactgtgtgcactaccccctgcctgagtttgccaaggagcccccccagagggaccgctaccgcctggatgatggaagaagagtgcgggacctggacagagtgctgatgggctaccagacctacccccaggccctgaccctggtgtttgatgatgtgcagggccatgacctgatgggctctgtgaccctggaccactttggagaggtgcctgggggccctgcccgggccagccagggccgggaggtgcagtggcaggtgtttgtgcccagcgctgagagccgggagaagctgatcagcctgctggcccggcagtgggaggccctgtgtggccgggagctgcctgtggagctgactggatag

SEQ ID NO: 170804 - DNA, 5238 bp, Artificial Sequence
  derived and/or modified sequence
aggcggggccaagatggcggcgcagcgcgcggcgggggcgacgggcggcgggggccggggggcggtgggacgttgaccccgccccctgctgctgctagtctgcgccgggcggcggtggcggcggagacccgaacatggcgaccgcgcgcaccttcgggcccgagcgggaagccgagccggccaaggaagcgcgcgtcgtgggctcggagcttgtggacacttatacggtttacatcatccaggtcactgatggcagccatgagtggacagtaaagcaccgctacagcgacttccatgacctgcatgaaaagctcgttgcagagagaaagattgataaaaatctgcttccgcccaaaaagataattgggaaaaactcaagaagcttggtggagaagagggagaaggatctggaggtctacctccagaagctcctggctgccttccctggcgtgacccccagagtactggcccacttcttgcattttcacttctatgagataaatggcatcaccgcggcactggctgaagagctctttgagaaaggagaacagctcctgggggccggcgaggtctttgccattggacccctgcagctgtatgccgtcacggagcagctgcagcagggaaagcccacgtgcgccagtggggatgccaagaccgacctcgggcacatcctggacttcacctgtcgccttaagtaccttaaggtttctggcacagaaggaccttttgggaccagcaacattcaggagcagctcctgccgttcgacctatcaatattcaagtccctgcatcaggtggagataagtcactgtgatgctaagcacatcagagggctggtcgcatcgaagcccaccttagccacgctgagtgtccgcttctcagcaacctcgatgaaggaagtccttgttcctgaagcctcagaatttgatgagtgggagcctgaaggcacaaccctagaaggccctgtgactgccgtcatccccacttggcaggcattgaccacgcttgacctgagccacaacagcgtctccgagatcgacgagtctgtgaaactgatcccaaagattgagttcctggacctgagtcacaatggattgctggttgtggacaatctgcagcacctgtataaccttgtgcatctggacctgtcctacaacaagctctcctccttggaagggcttcacaccaagctggggaacatcaagaccttaaacctggcaggcaacctcctagagagtctgagtggcctgcacaagctctactcactggtcaacctggatctccgggacaacaggatcgaacagatggaggaggtccggagcataggcagcctcccgtgtctggagcacgtgtctctgctgaacaaccctctgagcatcatccccgactaccggaccaaggtgctggctcagttcggagagagggcctcagaggtctgtctggatgacacagtgaccacagagaaggagctggacactgtggaagtgctgaaagcaattcagaaagccaaggaggtcaagtccaaactgagcaacccagagaagaagggtggtgaagactcccggctctcagctgccccctgcatcagacccagcagctcccctcccactgtggctcccgcatctgcctccctgccccagcccatcctctctaaccaaggaatcatgttcgttcaggaggaggccctggccagcagcctctcgtccactgacagtctgactcccgagcaccagcccattgcccagggatgttctgattccttggagtccatccctgcgggacaggcagcttccgatgatttaagggacgtgccaggagctgttggtggtgcaagcccagaacatgccgagccggaggtccaggtggtgccggggtctggccagatcatcttcctgcccttcacctgcattggctacacggccaccaatcaggacttcatccagcgcctgagcacactgatccggcaggccatcgagcggcagctgcctgcctggatcgaggctgccaaccagcgggaggagggccagggtgaacagggcgaggaggaggatgaggaggaggaagaagaggaggacgtggctgagaaccgctactttgaaatggggcccccagacgtggaggaggaggagggaggaggccagggggaggaagaggaggaggaagaggaggatgaagaggccgaggaggagcgcctggctctggaatgggccctgggcgcggacgaggacttcctgctggagcacatccgcatcctcaaggtgctgtggtgcttcctgatccatgtgcagggcagtatccgccagttcgccgcctgccttgtgctcaccgacttcggcatcgcagtcttcgagatcccgcaccaggagtctcggggcagcagccagcacatcctctcctccctgcgctttgtcttttgcttcccgcatggcgacctcaccgagtttggcttcctcatgccggagctgtgtctggtgctcaaggtacggcacagtgagaacacgctcttcattatctcggacgccgccaacctgcacgagttccacgcggacctgcgctcatgctttgcaccccagcacatggccatgctgtgtagccccatcctctacggcagccacaccagcctgcaggagttcctgcgccagctgctcaccttctacaaggtggctggcggctgccaggagcgcagccagggctgcttccccgtctacctggtctacagtgacaagcgcatggtgcagacggccgccggggactactcaggcaacatcgagtgggccagctgcacactctgttcagccgtgcggcgctcctgctgcgcgccctctgaggccgtcaagtccgccgccatcccctactggctgttgctcacgccccagcacctcaacgtcatcaaggccgacttcaaccccatgcccaaccgtggcacccacaactgtcgcaaccgcaacagcttcaagctcagccgtgtgccgctctccaccgtgctgctggaccccacacgcagctgtacccagcctcggggcgcctttgctgatggccacgtgctagagctgctcgtggggtaccgctttgtcactgccatcttcgtgctgccccacgagaagttccacttcctgcgcgtctacaaccagctgcgggcctcgctgcaggacctgaagactgtggtcatcgccaagacccccgggacgggaggcagcccccagggctcctttgcggatggccagcctgccgagcgcagggccagcaatgaccagcgtccccaggaggtcccagcagaggctctggccccggccccagcggaagtcccagctccagcccctgcagcagcctcagcctcaggcccagcgaagactccggccccagcagaggcctcaacttcagctttggtcccagaggagacgccagtggaagctccagccccacccccagccgaggcccctgcccagtacccgagtgagcacctcatccaggccacctcggaggagaatcagatcccctcgcacttgcctgcctgcccgtcgctccggcacgtcgccagcctgcggggcagcgccatcatcgagctcttccacagcagcattgctgaggttgaaaacgaggagctgaggcacctcatgtggtcctcggtggtgttctaccagaccccagggctggaggtgactgcctgcgtgctgctctccaccaaggctgtgtactttgtgctccacgacggcctccgccgctacttctcagagccactgcaggatttctggcatcagaaaaacaccgactacaacaacagccctttccacatctcccagtgcttcgtgctaaagcttagtgacctgcagtcagtcaatgtggggcttttcgaccagcatttccggctgacgggttccaccccgatgcaggtggtcacgtgcttgacgcgggacagctacctgacgcactgcttcctccagcacctcatggtcgtgctgtcctctctggaacgcacgccctcgccggagcctgttgacaaggacttctactccgagtttgggaacaagaccacagggaagatggagaactacgagctgatccactctagtcgcgtcaagtttacctaccccagtgaggaggagattggggacctgacgttcactgtggcccaaaagatggctgagccagagaaggccccagccctcagcatcctgctgtacgtgcaggccttccaggtgggcatgccaccccctgggtgctgcaggggccccctgcgccccaagacactcctgctcaccagctccgagatcttcctcctggatgaggactgtgtccactacccactgcccgagtttgccaaagagccgccgcagagagacaggtaccggctggacgatggccgccgcgtccgggacctggaccgagtgctcatgggctaccagacctacccgcaggccctcaccctcgtcttcgatgacgtgcaaggtcatgacctcatgggcagtgtcaccctggaccactttggggaggtgccaggtggcccggctagagccagccagggccgtgaagtccagtggcaggtgtttgtccccagtgctgagagcagagagaagctcatctcgctgttggctcgccagtgggaggccctgtgtggccgtgagctgcctgtcgagctcaccggctagcccaggccacagccagcctgtcgtgtccagcctgacgcctactggggcagggcagcaggcttttgtgttctctaaaaatgttttatcctccctttggtaccttaatttgactgtcctcgcagagaatgtgaacatgtgtgtgtgttgtgttaattctttctcatgttgggagtgagaatgccgggcccctcagggctgtcggtgtgctgtcagcctcccacaggtggtacagccgtgcacaccagtgtcgtgtctgctgttgtgggaccgttgttaacacgtgacactgtgggtctgactttctcttctacacgtcctttcctgaagtgtcgagtccagtcctttgttgctgttgctgttgctgttgctgttgctgttgctgttggcatcttgctgctaatcctgaggctggtagcagaatgcacattggaagctcccaccccatattgttcttcaaagtggaggtctcccctgatccagacaagtgggagagcccgtgggggcaggggacctggagctgccagcaccaagcgtgattcctgctgcctgtattctctattccaataaagcagagtttgacaccgtctgc

SEQ ID NO: 170805 - DNA, 5173 bp, Artificial Sequence
  derived and/or modified sequence
gaactggcccagaatcactctcgccctgctccggcgtctgcgccgggcggcggtggcggcggagacccgaacatggcgaccgcgcgcaccttcgggcccgagcgggaagccgagccggccaaggaagcgcgcgtcgtgggctcggagcttgtggacacttatacggtttacatcatccaggtcactgatggcagccatgagtggacagtaaagcaccgctacagcgacttccatgacctgcatgaaaagctcgttgcagagagaaagattgataaaaatctgcttccgcccaaaaagataattgggaaaaactcaagaagcttggtggagaagagggagaaggatctggaggtctacctccagaagctcctggctgccttccctggcgtgacccccagagtactggcccacttcttgcattttcacttctatgagataaatggcatcaccgcggcactggctgaagagctctttgagaaaggagaacagctcctgggggccggcgaggtctttgccattggacccctgcagctgtatgccgtcacggagcagctgcagcagggaaagcccacgtgcgccagtggggatgccaagaccgacctcgggcacatcctggacttcacctgtcgccttaagtaccttaaggtttctggcacagaaggaccttttgggaccagcaacattcaggagcagctcctgccgttcgacctatcaatattcaagtccctgcatcaggtggagataagtcactgtgatgctaagcacatcagagggctggtcgcatcgaagcccaccttagccacgctgagtgtccgcttctcagcaacctcgatgaaggaagtccttgttcctgaagcctcagaatttgatgagtgggagcctgaaggcacaaccctagaaggccctgtgactgccgtcatccccacttggcaggcattgaccacgcttgacctgagccacaacagcgtctccgagatcgacgagtctgtgaaactgatcccaaagattgagttcctggacctgagtcacaatggattgctggttgtggacaatctgcagcacctgtataaccttgtgcatctggacctgtcctacaacaagctctcctccttggaagggcttcacaccaagctggggaacatcaagaccttaaacctggcaggcaacctcctagagagtctgagtggcctgcacaagctctactcactggtcaacctggatctccgggacaacaggatcgaacagatggaggaggtccggagcataggcagcctcccgtgtctggagcacgtgtctctgctgaacaaccctctgagcatcatccccgactaccggaccaaggtgctggctcagttcggagagagggcctcagaggtctgtctggatgacacagtgaccacagagaaggagctggacactgtggaagtgctgaaagcaattcagaaagccaaggaggtcaagtccaaactgagcaacccagagaagaagggtggtgaagactcccggctctcagctgccccctgcatcagacccagcagctcccctcccactgtggctcccgcatctgcctccctgccccagcccatcctctctaaccaaggaatcatgttcgttcaggaggaggccctggccagcagcctctcgtccactgacagtctgactcccgagcaccagcccattgcccagggatgttctgattccttggagtccatccctgcgggacaggcagcttccgatgatttaagggacgtgccaggagctgttggtggtgcaagcccagaacatgccgagccggaggtccaggtggtgccggggtctggccagatcatcttcctgcccttcacctgcattggctacacggccaccaatcaggacttcatccagcgcctgagcacactgatccggcaggccatcgagcggcagctgcctgcctggatcgaggctgccaaccagcgggaggagggccagggtgaacagggcgaggaggaggatgaggaggaggaagaagaggaggacgtggctgagaaccgctactttgaaatggggcccccagacgtggaggaggaggagggaggaggccagggggaggaagaggaggaggaagaggaggatgaagaggccgaggaggagcgcctggctctggaatgggccctgggcgcggacgaggacttcctgctggagcacatccgcatcctcaaggtgctgtggtgcttcctgatccatgtgcagggcagtatccgccagttcgccgcctgccttgtgctcaccgacttcggcatcgcagtcttcgagatcccgcaccaggagtctcggggcagcagccagcacatcctctcctccctgcgctttgtcttttgcttcccgcatggcgacctcaccgagtttggcttcctcatgccggagctgtgtctggtgctcaaggtacggcacagtgagaacacgctcttcattatctcggacgccgccaacctgcacgagttccacgcggacctgcgctcatgctttgcaccccagcacatggccatgctgtgtagccccatcctctacggcagccacaccagcctgcaggagttcctgcgccagctgctcaccttctacaaggtggctggcggctgccaggagcgcagccagggctgcttccccgtctacctggtctacagtgacaagcgcatggtgcagacggccgccggggactactcaggcaacatcgagtgggccagctgcacactctgttcagccgtgcggcgctcctgctgcgcgccctctgaggccgtcaagtccgccgccatcccctactggctgttgctcacgccccagcacctcaacgtcatcaaggccgacttcaaccccatgcccaaccgtggcacccacaactgtcgcaaccgcaacagcttcaagctcagccgtgtgccgctctccaccgtgctgctggaccccacacgcagctgtacccagcctcggggcgcctttgctgatggccacgtgctagagctgctcgtggggtaccgctttgtcactgccatcttcgtgctgccccacgagaagttccacttcctgcgcgtctacaaccagctgcgggcctcgctgcaggacctgaagactgtggtcatcgccaagacccccgggacgggaggcagcccccagggctcctttgcggatggccagcctgccgagcgcagggccagcaatgaccagcgtccccaggaggtcccagcagaggctctggccccggccccagcggaagtcccagctccagcccctgcagcagcctcagcctcaggcccagcgaagactccggccccagcagaggcctcaacttcagctttggtcccagaggagacgccagtggaagctccagccccacccccagccgaggcccctgcccagtacccgagtgagcacctcatccaggccacctcggaggagaatcagatcccctcgcacttgcctgcctgcccgtcgctccggcacgtcgccagcctgcggggcagcgccatcatcgagctcttccacagcagcattgctgaggttgaaaacgaggagctgaggcacctcatgtggtcctcggtggtgttctaccagaccccagggctggaggtgactgcctgcgtgctgctctccaccaaggctgtgtactttgtgctccacgacggcctccgccgctacttctcagagccactgcaggatttctggcatcagaaaaacaccgactacaacaacagccctttccacatctcccagtgcttcgtgctaaagcttagtgacctgcagtcagtcaatgtggggcttttcgaccagcatttccggctgacgggttccaccccgatgcaggtggtcacgtgcttgacgcgggacagctacctgacgcactgcttcctccagcacctcatggtcgtgctgtcctctctggaacgcacgccctcgccggagcctgttgacaaggacttctactccgagtttgggaacaagaccacagggaagatggagaactacgagctgatccactctagtcgcgtcaagtttacctaccccagtgaggaggagattggggacctgacgttcactgtggcccaaaagatggctgagccagagaaggccccagccctcagcatcctgctgtacgtgcaggccttccaggtgggcatgccaccccctgggtgctgcaggggccccctgcgccccaagacactcctgctcaccagctccgagatcttcctcctggatgaggactgtgtccactacccactgcccgagtttgccaaagagccgccgcagagagacaggtaccggctggacgatggccgccgcgtccgggacctggaccgagtgctcatgggctaccagacctacccgcaggccctcaccctcgtcttcgatgacgtgcaaggtcatgacctcatgggcagtgtcaccctggaccactttggggaggtgccaggtggcccggctagagccagccagggccgtgaagtccagtggcaggtgtttgtccccagtgctgagagcagagagaagctcatctcgctgttggctcgccagtgggaggccctgtgtggccgtgagctgcctgtcgagctcaccggctagcccaggccacagccagcctgtcgtgtccagcctgacgcctactggggcagggcagcaggcttttgtgttctctaaaaatgttttatcctccctttggtaccttaatttgactgtcctcgcagagaatgtgaacatgtgtgtgtgttgtgttaattctttctcatgttgggagtgagaatgccgggcccctcagggctgtcggtgtgctgtcagcctcccacaggtggtacagccgtgcacaccagtgtcgtgtctgctgttgtgggaccgttgttaacacgtgacactgtgggtctgactttctcttctacacgtcctttcctgaagtgtcgagtccagtcctttgttgctgttgctgttgctgttgctgttgctgttgctgttggcatcttgctgctaatcctgaggctggtagcagaatgcacattggaagctcccaccccatattgttcttcaaagtggaggtctcccctgatccagacaagtgggagagcccgtgggggcaggggacctggagctgccagcaccaagcgtgattcctgctgcctgtattctctattccaataaagcagagtttgacaccgtc

SEQ ID NO: 170806 - DNA, 4515 bp, Artificial Sequence
  derived and/or modified sequence
atggccaccgcccggaccttcggccccgagcgggaggccgagcccgccaaggaggctcgagtggtggggtccgaattggtggatacatacaccgtctacatcattcaggtgacagacgggagccacgaatggaccgtgaagcaccgttattccgacttccatgacctgcacgaaaagctggttgccgagcgaaagatcgataagaacctattgccaccaaagaagatcataggtaagaattctaggagtttggttgaaaaaagagagaaggacctggaagtgtatctgcagaaactgctggctgccttccccggcgttacccccagggtactggcccattttctacacttccacttctatgaaatcaatggcatcaccgctgctctggcagaggaacttttcgagaaaggtgagcagctactcggtgctggggaagtgttcgcaattggccccctgcagctatacgccgtgactgagcagcttcagcaggggaagcccacctgcgcatctggcgatgcaaaaacggatctgggacacatcctggactttacatgtaggctgaaatacctcaaggtctcaggcacggaagggccgttcggcacctcgaacattcaggagcagcttctgccttttgacctttcaatctttaagtcacttcaccaggttgagatctcacattgtgatgcaaaacacatacgcgggctggttgcttccaaacccactttggcaaccctgtccgtgcgatttagcgcaacttctatgaaagaagtgcttgtacccgaggcaagtgagttcgacgagtgggaaccagagggaactaccctggagggcccagtgactgccgttatacccacatggcaggccctgactaccctggacctgtcacacaactccgtcagcgagatagacgaatcagtgaaactgatacctaaaatcgaatttctggatttgagccacaacggcttgctggtagtagataacttgcagcacctctacaatttagttcatttggatctgtcgtacaataaattgagttccttggaggggctccatacgaaactgggaaatataaagacacttaatctggcagggaatctgctggaaagcctgagtgggttgcacaagttgtacagcttggtgaaccttgatctcagagataaccgaatcgaacagatggaagaggtgcgttctattggtagcctgccatgtctggaacatgtctctctacttaataacccactcagtatcattccagactatcggacaaaagttctggcccagttcggggagcgagctagtgaggtctgtctcgatgacacagtaactactgaaaaagaactcgataccgtcgaagtattaaaagccattcagaaggctaaggaggtcaagagtaagctgagtaacccagagaagaagggcggcgaagacagccggctgtccgccgcgccctgtatcaggccatcctcctcccccccgacagttgcgccagcctctgcgtccctcccacagccaatcctgagtaatcaggggatcatgtttgtgcaagaggaggctctggcatcctccctttctagcacagactccctaacccccgagcaccagcccatagctcagggctgtagcgattctctggagtcaataccagccggacaggctgctagtgatgatctgagagatgtacctggagcagtcgggggagcatccccagagcacgccgagcctgaagtgcaggttgtgccaggtagcggtcaaataattttcctgccctttacctgtattggctataccgcaaccaatcaggattttatacagagactttccacgctgatcaggcaggcaatcgagcgccagctgccggcttggattgaggctgccaaccagcgggaggagggccagggcgagcagggggaggaggaagatgaggaagaggaagaggaggaggatgtagccgagaaccgctacttcgagatgggcccgcctgatgtcgaagaagaggaaggtggtggccaaggggaagaagaggaggaagaagaagaagatgaagaagctgaggaggagaggctggcactggaatgggctctcggagctgacgaagactttctccttgagcacatcagaatactcaaagtcctctggtgcttcctgattcacgtgcagggctcaatcagacagttcgccgcatgtctggttttgaccgacttcggcattgcggtgttcgagatcccccaccaggagtctagggggtcctcacagcatattctttcgtcccttcgattcgtgttttgtttccctcacggcgatttaaccgaatttgggtttctcatgcctgagctgtgcctggttctgaaggtcagacacagtgaaaacaccttgtttatcatctccgatgccgcgaacttgcatgagtttcatgctgacttacgaagctgctttgccccacaacatatggccatgctctgttcaccaatcctgtatgggagccacacgtcactacaggagtttctgagacagctgctgactttttataaagtggcgggcggctgccaggagaggtcacagggttgcttccctgtttacctcgtctacagcgacaaacggatggtgcagactgctgctggagactactctggaaacattgagtgggcgtcttgtacactatgctccgctgttcggcggagctgttgcgctccaagcgaggccgtaaagtccgcagctatcccatactggctcctgctcaccccacaacacctcaatgtgattaaggcagacttcaaccccatgccaaatcggggcactcataactgtcggaaccgtaatagttttaagctttcaagggtacctctcagcaccgttctgctggacccaacccggagctgtacacagccacgaggtgcatttgcagacggccatgtcctggaactgctggtggggtaccgattcgttactgccatcttcgtgctgccacacgagaagttccacttcctccgcgtgtataatcagttgcgggcatcccttcaggatctcaaaaccgtagtgattgctaaaactccggggactggcggatcaccgcagggctcatttgccgatggccagcccgctgagcgccgtgcttccaacgatcagcggccacaggaggtacccgcagaggcgttggccccagcaccagccgaggtgccggcccccgcaccagctgctgccagtgcttcaggtcccgcgaaaactccagccccagctgaagccagcacatctgctttggtgcctgaggaaacccctgtggaagctcctgctcccccgccagctgaggcccccgctcaatacccctcagaacacctcatccaagcaacttccgaggagaaccagatcccttctcacctgccggcgtgccccagtctgaggcatgtcgcgagcctgcgcggctctgctattattgagttgttccacagctcaatagctgaggtggaaaatgaagagttgcggcacctgatgtggtcctccgtggttttctatcaaacccctggactagaagtgaccgcctgtgtcctgctttcaaccaaagcagtttacttcgtgctacatgatggactgagaaggtactttagtgagccacttcaagacttttggcaccaaaagaacactgactataacaactctccatttcacatctctcagtgcttcgtgttaaagttgtccgacctccagtctgttaacgtcgggcttttcgaccaacatttcagattgacaggctctaccccaatgcaagtggtgacctgtctgactagggattcctaccttacacactgttttttgcaacacctgatggtcgtcctctcatctttggagaggactccttccccagagcctgttgacaaagacttctatagcgaatttggaaataagactaccggcaagatggaaaactacgaactgatccactcctcgcgggtgaaattcacctatcccagcgaggaagagatcggagatctgaccttcacggtggcccaaaagatggctgagccagagaaggctccagcactgagcatcctgttgtacgtgcaagcttttcaggttggtatgccaccacccgggtgctgtcgcggacctcttcgtcccaagactctgctgctgacttccagcgagatatttctcctcgatgaggattgtgtgcactatcctttgcccgaatttgcgaaggaacctcctcagcgtgaccgatatagacttgacgacggccggagagtccgcgaccttgacagagtgttaatgggctatcagacataccctcaagctctgacgctggtcttcgatgatgtccaggggcacgacctgatgggttcagtcaccctggatcacttcggagaggtccccggtggcccggctagagctagccaaggcagggaggttcagtggcaagtgtttgtgccatccgccgaaagcagagagaagttgatcagtctcctggccagacaatgggaagccctttgtgggagggagctgccagtggagctgacaggctag

SEQ ID NO: 170807 - DNA, 4515 bp, Artificial Sequence
  derived and/or modified sequence
atggccaccgcccggaccttcggccccgagcgggaggccgagcccgccaaagaagcaagggtcgtcgggtctgaactggttgacacatacacggtgtacattatccaggtgacagacggttctcatgagtggactgtcaaacatagatattctgatttccacgatctccatgaaaaactggtggccgagaggaaaattgataagaacttgctgccccctaagaagatcatcgggaagaactcacgctctctcgttgagaaacgcgagaaagatctggaggtgtatctgcagaagttgcttgcagccttccctggggtcaccccgcgggtccttgcacacttccttcactttcacttttacgagattaacggcattacagccgcactagcagaggaactatttgaaaaaggcgagcaacttcttggagcgggcgaagtgtttgccatagggcccctccagctgtacgccgtcacagagcagctacagcaggggaagcctacctgcgcgtcaggcgacgccaaaacagatctggggcacattcttgacttcacgtgccggctcaaatacttaaaggtatccggaaccgaggggccattcggcacaagcaacatccaggaacaactgctcccctttgacctgtcgatttttaagagcctccatcaagtcgagataagtcactgtgacgccaaacacatccggggcctggtagcctcgaagcccacactcgccaccctatctgtgcgcttcagcgcaacctcaatgaaggaagttttagtgcccgaggcctctgaatttgacgaatgggagccagaaggtaccacgctggaaggaccggtgacggccgtgatacccacctggcaggccctaacgaccctggacctctctcataactctgtgagcgagatcgacgaaagcgtgaagctcattccaaaaattgagttcctggacctgtcacataacggtttgctggtggtggacaatcttcagcacttatataacttagtccatcttgatttgtcgtacaataaactgagttcgctggaggggctccacactaaactgggcaacatcaagaccctcaaccttgccggaaacctgctggaatctctcagcgggctgcataaactgtactccctggtgaacttagacctgcgcgacaatcgcatagaacagatggaagaggtgagaagtatcggctcacttccttgcctggaacacgtgtccctgcttaacaatcctctatccatcattccagactacagaaccaaagttctggcgcagtttggggagcgggccagcgaggtgtgtctggacgatacagtgacaacagagaaagaattagatacagtggaggtgctgaaggccatccagaaggccaaagaagtcaaaagcaaactttctaacccagagaaaaaaggtggtgaggactccagactgagcgcagctccctgtattcggcccagttcaagtccacccaccgtggcaccggctagtgcttccttgccgcagccaattttgagcaatcaaggaattatgttcgtacaggaggaagcactcgcaagcagtctcagctccaccgactctctgactcccgagcaccagcctattgcccaaggctgcagtgacagtcttgaatccatacctgctggccaggcggccagcgatgatctgagagatgtccccggcgcagtaggaggcgcttccccagagcacgccgagcccgaagtgcaagttgtgcctgggagcggtcagattattttcctgccttttacctgtattggatacacagccacaaaccaggattttatccagcggctcagcactctgattaggcaggccattgaaagacaacttcctgcttggatagaggccgctaaccagcgtgaggagggccagggtgagcagggggaggaagaggacgaagaggaggaagaggaagaggacgttgctgaaaatcggtactttgaaatggggccacctgacgtagaggaagaagaaggcggggggcagggagaggaagaggaggaagaggaggaggatgaagaagcagaagaggagcgtctcgctttggagtgggcgctgggcgcagacgaagacttcttgctggagcatattagaattttgaaagtcctgtggtgcttccttatacacgtccaggggagcattcgccagtttgccgcatgcctcgtccttaccgatttcggaatagcggtgttcgagatcccgcaccaagagtccaggggctcctctcagcacatcctgagtagcctgagatttgtgttctgtttccctcatggcgatctgactgaatttggatttttaatgccagaactatgtctggtgctcaaggtacggcactccgagaacacactcttcatcatttcagatgcggcgaatcttcacgagtttcatgccgacttgaggtcttgttttgcccctcagcacatggcaatgctctgttcgcctatactgtacgggagccacacgtcactgcaggaatttttgcggcagttgttgacattttacaaggtagcaggagggtgtcaggagcgctcccagggctgcttccctgtatatctggtctactctgataagaggatggtgcagaccgctgccggtgattatagcggcaacattgaatgggccagttgcacgctctgctccgccgtgaggcggtcttgttgtgctcctagcgaggcagtcaagtctgccgctatcccttattggctactcctcactccgcagcacctgaacgtgatcaaggctgacttcaaccctatgcccaaccggggtacacacaactgtcgcaatagaaattctttcaagctttcccgggtaccactgtcgaccgtcctcctcgacccaactcgcagttgtacacagcctagaggcgcatttgcggatggccatgttctagagctcctggtggggtatcgttttgtgacagccatttttgttctgcctcacgagaagtttcattttctgcgggtatacaatcaactacgcgctagcctgcaggacctgaaaacagtcgtgattgctaagacaccagggacagggggatcaccgcagggctcttttgcggacgggcagccggcagagaggagagcatctaacgaccagaggccacaggaagtgccagccgaagcacttgcaccagcacctgctgaagtccccgcaccagcaccagccgccgctagcgcctcgggtcccgctaaaactccagcccctgctgaggcaagcacatcagccctcgtcccagaagagacgcctgtcgaggctcccgccccgccgcccgccgaagcgccggcacaatatccatccgagcacctgatccaagccacgtctgaggagaatcaaattccgagtcacctgcctgcctgtccttctctcaggcatgtcgcaagcctacgcggctcggcaattatcgagctgtttcactcctccatcgctgaggttgaaaacgaggagctgaggcacctgatgtggtcaagcgtggtgttctatcagacacccggtctagaggtgacagcatgcgtgcttttatccacaaaggccgtttattttgttctgcacgatggacttaggcgctacttttccgagcccctccaggatttctggcaccagaaaaacacagattataacaactctccattccatatctcacagtgcttcgtgttaaaactgtcagatcttcagagtgtaaacgtcgggctcttcgaccagcactttcgattaacaggcagcacgcctatgcaggtggtgacttgcctgacacgcgactcatacctgacacactgttttctccaacacctgatggtggtgttaagtagcctggagagaacccctagtcccgaaccagtcgacaaggacttttatagtgagtttggtaataaaaccactggcaaaatggagaactacgagctgattcactcctcacgggtgaaattcacgtacccatcagaagaggagataggcgatcttacattcactgtggcacagaagatggctgaacccgaaaaagcccctgctttgagtatattgctgtatgtgcaagcatttcaggtcggaatgcctccccctggatgttgcagaggacccttgcgtccaaagactctgctactgaccagcagtgagattttcctacttgacgaagactgtgttcactacccactccctgaattcgctaaagaaccaccgcagagagaccggtacagacttgacgacggtaggcgcgtacgtgacctggaccgagtgctgatgggatatcagacctacccacaagctctgacgcttgtgtttgatgatgtgcaggggcacgatctcatgggaagtgtgacactggaccactttggtgaggtgccaggcggccccgcacgggcctcccagggccgagaggtccagtggcaggtattcgtgccatccgcggagagccgggaaaaattgatttcattgctggcaagacagtgggaggctctttgcgggcgggaactgcccgtcgagctgaccggatag

SEQ ID NO: 170808 - DNA, 4515 bp, Artificial Sequence
  derived and/or modified sequence
atggccacagcgagaactttcgggcctgaaagagaggccgaacctgccaaggaggctcgcgtcgtgggatccgaactggtggatacttacacggtgtatatcatccaagtgacagacgggtcccacgagtggaccgtgaagcatcgctacagcgacttccacgacctgcacgaaaagttagtggctgagcggaaaattgataagaacttactcccccctaagaagatcattggtaaaaattcaaggtcactagtagagaaacgagagaaagacttggaggtttatctacagaaacttctggcagctttccctggagtgaccccacgtgtacttgctcacttcctccactttcacttctatgagatcaacggcattactgctgcccttgcagaagagctctttgagaagggggagcagctgctgggcgctggagaggtgtttgccatcggccctctgcagctctacgcagttacagaacagctacagcagggcaagcctacatgcgcttcaggggacgccaaaaccgatctcgggcatatcctggacttcacgtgtcgtctgaagtatctcaaagtgtccggcacggaaggcccttttggtacaagcaacatccaggaacaactgttgccatttgacctttccatctttaagtctcttcatcaagtggagattagccactgtgacgcgaagcacattcgcggtttagtggcatctaagccaaccttggccacactgagtgtcaggttctccgccacaagtatgaaagaagtgttagtccctgaagccagtgagttcgatgagtgggagccagaaggaaccacactcgagggcccagttacagctgtgatccccacctggcaggccttgacaaccctggacctgagccacaacagtgtgtccgaaatagatgagtctgtgaagttgataccgaaaattgagttcctcgatctgtctcacaatgggctgcttgtcgtggacaatctgcagcatctgtataatctagttcacctagatctcagctataacaagttgtccagcctggaagggctgcacaccaagctcggaaatattaaaacattaaatctcgccggaaacctgctggaatccctcagtggcctccataaactgtactcactggtgaacctggacctgcgcgataacaggattgaacagatggaagaggtgagaagcatcggcagcttaccctgtcttgaacacgtttccctcctgaacaatccgttatctatcattcctgactatcgcactaaagttctcgcccagttcggcgagcgggcatccgaggtgtgcctggatgatacggtgacaaccgaaaaggaactcgataccgtcgaggtcttgaaggccatccagaaggctaaggaggtaaagtcaaagctgagtaatcctgaaaaaaaagggggtgaggacagccggctgtctgcggctccatgtatcagaccatcttcctctccccctaccgtggcccctgcatccgcaagcctcccccagccgattctttccaaccaggggatcatgtttgtacaggaggaggcgctcgcctcatctctatctagcaccgatagcctgaccccggagcaccagcctattgcccagggttgtagtgatagcctggaatcaataccagccggacaggctgcatcagatgacctccgcgatgttcccggtgcagtcggaggcgcttccccagagcacgccgagccggaagttcaggtggtgcccggaagtggacagatcatcttcctgccatttacttgtattggttacacggctacgaaccaggattttattcaacgcctaagcaccctgattagacaggcaatcgagagacagctgccggcttggatcgaagccgcaaatcagcgtgaggagggacagggcgaacaaggcgaggaagaggatgaggaggaagaggaggaagaagatgtggctgagaatcggtatttcgagatgggccctcccgacgtcgaggaggaggaagggggagggcagggtgaagaggaagaagaggaggaagaagatgaagaagctgaggaggagaggcttgctctggagtgggcacttggcgcagacgaagactttctgctggaacacattagaatcctcaaagtgctgtggtgctttctcatccatgtgcagggttccatccgccagttcgcggcatgcttggtgctgacagactttggcatcgctgtgtttgagataccccatcaagaatcacgcggaagctcccaacacattctttctagtctgcgattcgtcttttgtttccctcacggagatctaactgagttcggctttctcatgcccgagctgtgcttggtcctaaaggtgcggcattcggagaacacactgtttattatttccgacgccgctaacttgcatgaattccatgccgatctgaggtcttgctttgctccccaacacatggctatgctgtgcagccccatcctctacgggtcacacaccagcctgcaggaattcctccggcagttactgacgttctataaggtagcagggggatgccaggaacgtagccagggatgctttcccgtctacctggtatattctgacaaacgcatggtgcagaccgcggctggcgactatagcggcaatattgaatgggcttcctgcactctctgttctgccgtgcgaaggagttgctgtgcaccttccgaagcagtgaaatcagcggctataccctactggctgctcttaacgcctcaacatctcaacgtaatcaaggcagactttaacccaatgccaaaccggggtacacacaactgtcgcaatagaaacagctttaaactgagcagggtccccttgtcaactgtcttactggatccaactagaagctgcacgcagcctcgaggggcttttgccgatggacacgtactagagctgctggtgggttaccgcttcgtgaccgctatattcgtccttccacacgagaagtttcacttcttgagggtatataatcagctcagagccagtttgcaggacttgaaaacagtggtgattgccaagactcctggcacaggtggctccccacaagggtcctttgccgatggccaacccgctgaacggagggcgtcgaatgatcagagaccacaggaagtccctgctgaagcccttgcgccagctcctgctgaggtgccagcgccagccccagccgctgctagcgctagtgggccagctaagacaccagcccctgccgaagcctcgacgagcgccctcgttcccgaagaaactcctgtggaagccccagcccctcctcccgctgaagcaccagcccagtacccaagtgagcacctgatccaggcaacgagcgaagagaaccaaattccctcacacctccctgcctgtccaagccttcggcacgtcgcgtccctgcggggatctgccatcatcgagctgtttcacagctccatcgctgaggtggaaaacgaggagctacgacaccttatgtggtccagcgttgtgttttaccaaacaccaggtctggaggtcaccgcatgcgtgttactgagcaccaaggctgtgtacttcgtattgcacgatggactccgcaggtatttttctgaacctctgcaagacttctggcaccagaagaacaccgattataataactccccttttcacatcagccagtgtttcgttctgaagctgagcgacctgcagtctgtgaacgttggactgttcgaccagcacttccgcctgaccgggagcacccccatgcaggttgtgacctgcctcacgcgcgattcctaccttacccactgttttctgcagcacctgatggtggtgctttcctcacttgagcgcaccccgagccccgagccggtggataaggatttctactctgagtttgggaataagaccacaggcaaaatggaaaattatgagctaatccacagctctcgcgttaaatttacgtacccttctgaagaggaaatcggcgatcttacctttactgtggctcagaaaatggccgaacctgagaaggcccctgccttgtcaattctgctgtacgttcaggcttttcaggtcggaatgcccccacctgggtgttgcaggggcccactcaggccgaagactctgctcctgacatcttcagagattttcctgctggatgaggactgcgttcattaccctctgcctgagttcgctaaagaacccccacaaagggacaggtacagactagacgatggcagacgggtccgcgacttggacagagttttgatgggttatcagacctatccacaggctctcacactagtgttcgacgacgttcaagggcacgaccttatgggctctgtaactttagatcatttcggtgaagtgccaggcggtcccgctagggcatcccaggggcgagaagtccaatggcaagtgtttgttccatccgcagaatccagagaaaaactgatatcacttctggcacggcagtgggaggccctgtgtggtagagaactgccggtggaactgaccgggtag

SEQ ID NO: 170809 - DNA, 4515 bp, Artificial Sequence
  derived and/or modified sequence
atggctactgctcggacattcggacctgaacgggaggccgagcccgctaaggaagcacgggtggtaggcagtgaactcgtggacacctacaccgtgtacatcattcaggtcacagatgggagccatgagtggacggttaaacataggtactcggacttccatgatctgcatgaaaagctggtggccgagagaaaaatcgacaaaaaccttctgcccccaaagaagatcataggtaagaacagccggtccttagtggagaagcgggaaaaagatctggaggtgtatctgcaaaagctgcttgctgcattccccggtgtgacgcccagagtgcttgcgcatttccttcactttcacttctacgaaatcaacggtatcacagctgcgcttgcggaagaattgtttgagaagggtgagcagcttctcggggcaggtgaagtgtttgcgatcggtcccttacagctgtacgcagtcaccgagcagcttcagcagggaaaaccaacatgcgccagcggcgacgccaagactgacttagggcatatcctggactttacttgccgcctgaagtatttgaaggttagcggcactgaaggccctttcgggacgagcaacatccaggaacaacttcttccttttgacctgagcatcttcaaaagcctgcaccaggtggagatcagtcactgtgatgcaaaacatatccggggtcttgtggccagcaagccgaccctggcaacgttgtccgtgaggttcagtgcaaccagcatgaaagaggttctggtgccagaagccagtgaattcgatgaatgggagcccgagggtactaccttggaaggccctgtgactgccgtaatcccgacttggcaggcactgacaaccctggatctttctcataatagcgtcagcgagatcgatgagagcgtgaaacttattccaaaaatcgagttcttagacctaagccacaacggattgctcgttgtagacaacttgcagcatctttacaatttagtgcacctggatctgagttacaataaacttagctctctggaggggctccatactaaattgggaaatataaagactttgaacctcgctggcaacctgctggagagcctgagtggcctgcataaactctactcgctcgtcaatcttgacctcagagacaatcggatcgaacagatggaggaagtgcgctctatcggctctctaccatgtttggaacatgtgagtttacttaacaacccactgtctattattccagattaccgaacaaaggttttggctcaattcggcgaacgcgcttccgaagtttgtttggatgatacggttactacagagaaagaattagatacagtagaggttttgaaagccatccaaaaagctaaagaggttaaatccaagctctcaaacccagaaaagaaaggcggtgaggattccaggctatctgcggctccatgcatacgcccaagctcgagtccccctaccgtggcgcctgcatccgcctcactgcctcaaccgatcttgagtaaccagggaatcatgttcgtgcaggaggaggcgttggcctcctctttgagctcgacagacagtctgacccctgagcaccagcctatcgcccagggttgtagcgatagcctggaatccatccctgcaggtcaggccgcatctgatgatttaagggatgtgccgggagccgttgggggtgcatcccctgaacacgccgaacccgaggtccaggtggtcccagggtccgggcagattatctttctgccgtttacctgcatcgggtacacagccacaaatcaggactttattcagcgcctctccactcttatccggcaggccattgaacgccagttgcccgcatggatcgaagccgcaaaccagagggaggagggacagggggagcagggtgaggaagaggacgaagaggaggaagaggaagaagacgtcgcagagaataggtattttgagatgggacctcccgacgtcgaagaagaggaggggggaggccagggcgaagaggaggaagaggaagaggaagacgaggaggccgaagaggagcgccttgctctggagtgggccctaggggcagacgaggacttcctgctcgagcatatcagaatcctgaaggttctatggtgcttcttaatccacgtgcaaggttcgatacgacagtttgctgcttgcctcgttctgacggacttcggtattgctgtgttcgaaatccctcaccaggagagccggggatcctcacagcatatattgagcagcctgaggtttgttttttgctttccacacggagacctgactgagtttggcttcctgatgcccgagctttgcctggtgcttaaggtgcggcacagtgaaaatactttgttcataatctctgacgctgctaatctgcatgaattccacgcagaccttagaagttgtttcgcacctcaacatatggccatgctttgctcccctatcctctatggctctcacacatccctgcaggagttcctgaggcagttactgaccttctataaagttgccggaggctgccaagaacgaagccagggctgttttcccgtgtacttggtgtacagcgacaaaagaatggtgcagacagccgctggcgattatagcggcaatattgaatgggcctcctgtacactgtgctccgctgtccgccgatcttgttgcgcccctagtgaagctgttaagtctgctgccatcccatattggttactcctgaccccccagcacctcaatgtgataaaggcagatttcaacccaatgcctaacagaggaacacataattgtcgcaatcgaaattccttcaagctgtcccgagtaccattgtctacagttctgctagaccccactagatcttgtacccagcctaggggcgcatttgccgatggccatgttttagaactgctggtcgggtatcgctttgttaccgcaatcttcgtgctcccgcacgagaagttccattttcttcgcgtgtacaatcaactgcgggcatcactgcaggatctgaaaaccgttgttatcgcaaagacaccaggaacgggaggatcgccacagggtagcttcgcagacggccagcccgctgaaagacgtgcgtcaaacgatcagcgacctcaggaagtgcccgcagaggccctagctccggctccagccgaggtccccgcacccgcaccagccgctgcatcagccagtggacccgctaagacacctgcacccgctgaagcctctacttctgctcttgttccggaagagacccccgtagaagcgccagcccctcccccagcggaagcgccagcgcaatatcctagcgagcacctgattcaggccacctctgaggaaaaccaaatcccctcacatttgcccgcttgtccgtcactgagacacgtggcaagtctccgtggcagcgcaatcattgagttattccattcatctatcgccgaggtggaaaacgaggagctgcggcatctgatgtggtcatctgtagtgttctaccagacccctggtctggaggtaacagcctgtgtattactgtcgacgaaggctgtttacttcgtacttcacgatggactccgacgctacttctcagagccccttcaggacttttggcaccagaaaaacaccgattataacaacagtccctttcatatcagccagtgtttcgttctgaagctgagcgatctgcagtcggtgaacgtgggcctgtttgatcagcactttagactgaccggctcaaccccaatgcaggttgttacctgtctgacccgagactcgtaccttacccactgcttcttacaacatttgatggtggttctgtctagcctggagcgcacaccgtcacccgagcccgtagacaaggatttctatagtgaatttggcaacaaaacaacagggaaaatggagaactacgaactgatacacagctctagagtcaaattcacctacccatcagaggaggagatcggagatcttacgtttacagtagcccagaaaatggccgagccagaaaaggcccctgcactgagcattttgctgtatgtgcaggcctttcaggtgggaatgcctccaccgggttgctgcaggggaccattgcgaccgaagaccctgttgttgacctcgagtgaaatttttctgcttgacgaggactgtgtccattaccccctgcccgaatttgcgaaagagcccccacagagggacagatataggctcgacgacggacgccgagtgcgggatttagatagggtgcttatgggctatcagacctacccccaagcacttacactggtctttgacgacgtacagggacacgacctcatgggatccgttactcttgatcacttcggggaggtccctggcggaccggcaagggctagccagggcagggaagtacaatggcaggtgtttgttccatcagccgagtctcgggagaagctcatttcactcctcgctaggcaatgggaagctttgtgtgggagagagctgccagtcgaattgacaggatag

SEQ ID NO: 170810 - protein, 2442 aa, Artificial Sequence
  derived and/or modified sequence
METRSPGLNNMKPQSLQLVLEEQVLALQQQMAENQAASWRKLKNSQEAQQRQATLVRKLQAKVLQYRSWCQELEKRLEATGGPIPQRWENVEEPNLDELLVRLEEEQQRCESLAEVNTQLRLHMEKADVVNKALREDVEKLTVDWSRARDELMRKESQWQMEQEFFKGYLKGEHGRLLSLWREVVTFRRHFLEMKSATDRDLMELKAEHVRLSGSLLTCCLRLTVGAQSREPNGSGRMDGREPAQLLLLLAKTQELEKEAHERSQELIQLKSQGDLEKAELQDRVTELSALLTQSQKQNEDYEKMIKALRETVEILETNHTELMEHEASLSRNAQEEKLSLQQVIKDITQVMVEEGDNIAQGSGHENSLELDSSIFSQFDYQDADKALTLVRSVLTRRRQAVQDLRQQLAGCQEAVNLLQQQHDQWEEEGKALRQRLQKLTGERDTLAGQTVDLQGEVDSLSKERELLQKAREELRQQLEVLEQEAWRLRRVNVELQLQGDSAQGQKEEQQEELHLAVRERERLQEMLMGLEAKQSESLSELITLREALESSHLEGELLRQEQTEVTAALARAEQSIAELSSSENTLKTEVADLRAAAVKLSALNEALALDKVGLNQQLLQLEEENQSVCSRMEAAEQARNALQVDLAEAEKRREALWEKNTHLEAQLQKAEEAGAELQADLRDIQEEKEEIQKKLSESRHQQEAATTQLEQLHQEAKRQEEVLARAVQEKEALVREKAALEVRLQAVERDRQDLAEQLQGLSSAKELLESSLFEAQQQNSVIEVTKGQLEVQIQTVTQAKEVIQGEVRCLKLELDTERSQAEQERDAAARQLAQAEQEGKTALEQQKAAHEKEVNQLREKWEKERSWHQQELAKALESLEREKMELEMRLKEQQTEMEAIQAQREEERTQAESALCQMQLETEKERVSLLETLLQTQKELADASQQLERLRQDMKVQKLKEQETTGILQTQLQEAQRELKEAARQHRDDLAALQEESSSLLQDKMDLQKQVEDLKSQLVAQDDSQRLVEQEVQEKLRETQEYNRIQKELEREKASLTLSLMEKEQRLLVLQEADSIRQQELSALRQDMQEAQGEQKELSAQMELLRQEVKEKEADFLAQEAQLLEELEASHITEQQLRASLWAQEAKAAQLQLRLRSTESQLEALAAEQQPGNQAQAQAQLASLYSALQQALGSVCESRPELSGGGDSAPSVWGLEPDQNGARSLFKRGPLLTALSAEAVASALHKLHQDLWKTQQTRDVLRDQVQKLEERLTDTEAEKSQVHTELQDLQRQLSQNQEEKSKWEGKQNSLESELMELHETMASLQSRLRRAELQRMEAQGERELLQAAKENLTAQVEHLQAAVVEARAQASAAGILEEDLRTARSALKLKNEEVESERERAQALQEQGELKVAQGKALQENLALLTQTLAEREEEVETLRGQIQELEKQREMQKAALELLSLDLKKRNQEVDLQQEQIQELEKCRSVLEHLPMAVQEREQKLTVQREQIRELEKDRETQRNVLEHQLLELEKKDQMIESQRGQVQDLKKQLVTLECLALELEENHHKMECQQKLIKELEGQRETQRVALTHLTLDLEERSQELQAQSSQIHDLESHSTVLARELQERDQEVKSQREQIEELQRQKEHLTQDLERRDQELMLQKERIQVLEDQRTRQTKILEEDLEQIKLSLRERGRELTTQRQLMQERAEEGKGPSKAQRGSLEHMKLILRDKEKEVECQQEHIHELQELKDQLEQQLQGLHRKVGETSLLLSQREQEIVVLQQQLQEAREQGELKEQSLQSQLDEAQRALAQRDQELEALQQEQQQAQGQEERVKEKADALQGALEQAHMTLKERHGELQDHKEQARRLEEELAVEGRRVQALEEVLGDLRAESREQEKALLALQQQCAEQAQEHEVETRALQDSWLQAQAVLKERDQELEALRAESQSSRHQEEAARARAEALQEALGKAHAALQGKEQHLLEQAELSRSLEASTATLQASLDACQAHSRQLEEALRIQEGEIQDQDLRYQEDVQQLQQALAQRDEELRHQQEREQLLEKSLAQRVQENMIQEKQNLGQEREEEEIRGLHQSVRELQLTLAQKEQEILELRETQQRNNLEALPHSHKTSPMEEQSLKLDSLEPRLQRELERLQAALRQTEAREIEWREKAQDLALSLAQTKASVSSLQEVAMFLQASVLERDSEQQRLQDELELTRRALEKERLHSPGATSTAELGSRGEQGVQLGEVSGVEAEPSPDGMEKQSWRQRLEHLQQAVARLEIDRSRLQRHNVQLRSTLEQVERERRKLKREAMRAAQAGSLEISKATASSPTQQDGRGQKNSDAKCVAELQKEVVLLQAQLTLERKQKQDYITRSAQTSRELAGLHHSLSHSLLAVAQAPEATVLEAETRRLDESLTQSLTSPGPVLLHPSPSTTQAASR

SEQ ID NO: 170811 - DNA, 7329 bp, Artificial Sequence
  derived and/or modified sequence
atggagacccgttctccgggcttgaacaacatgaaaccacagtccctgcaactggtactggaggaacaggtcctagcgttacaacagcagatggccgagaatcaggcggcatcatggcggaagctgaagaacagccaggaagcccagcagagacaagctaccttggtgcgaaagttgcaggccaaggtattgcaataccggagctggtgtcaagaactggagaaacgtttagaggccactggcggccctattccccaacgatgggagaacgtagaagagccgaatcttgacgagttactggtgcgtctagaagaagagcagcagaggtgtgagtcattggccgaggtgaatactcagctacggctgcatatggagaaagccgatgtggtgaataaagcacttagagaagatgtggagaaactcactgtggactggagtcgcgctagggatgagctgatgcgtaaagagtctcaatggcagatggagcaggagtttttcaaaggctacttgaagggtgaacacggtcgcctgctgtcactgtggagggaggtcgttacctttagaagacacttcctggagatgaagagcgctaccgatagggacctgatggagttaaaagctgagcacgtgcggctatccggatccctgctgacctgctgtctcaggttgactgtgggggcgcaaagcagggagcctaacggatcaggcaggatggacggtcgggagcctgctcagctgttgctactcctggccaagactcaggaacttgagaaggaagcccacgagaggagccaagagctcatccagctaaaaagtcagggagatctggaaaaagccgaactccaagaccgtgtcacagagttatctgccttactgacccaatcccagaaacagaatgaggactatgaaaagatgatcaaggccctgcgcgaaacagtggagatcctggagaccaaccatactgagctaatggaacatgaggctagcctatcgcgcaatgcccaggaggagaaattatcgttgcagcaggtgattaaggacattactcaggtgatggtggaggagggcgataatatagcacagggctcaggccatgaaaattcattggagctcgacagcagtatcttcagccaattcgactaccaagacgctgataaggccctgaccctcgtcagaagcgtactcacccggaggcgccaggccgttcaggacctccgtcagcagctcgctggctgtcaggaagctgtgaatttgctccagcagcagcacgaccagtgggaagaggagggtaaggccctgcgacaaaggctgcagaaactgactggcgagcgggacacattggcggggcagacagtcgacctccagggggaggtggacagcctctccaaggagagggagctgctgcagaaagccagagaagagctaagacagcagcttgaagtgctggaacaggaggcttggcgcttgcgcagagtgaacgtggagttgcagctgcagggtgattcggcacaaggacagaaggaggagcagcaggaagagctgcatctcgcagtgcgtgagcgagagcggctccaggaaatgcttatgggcctcgaagcgaagcagtctgagtctcttagtgagcttattacgctgcgcgaagcgctggagtctagtcatctggagggcgaactcctcaggcaagagcagaccgaagtcactgccgctttagccagggccgagcagagtattgccgagctctcgtccagtgaaaacaccctaaagactgaggtcgcagacttaagggccgccgctgtgaagttgtcagccctcaacgaggcgctcgcattagataaggtgggactgaatcagcagttattacagctcgaggaagagaatcaatcagtctgctctaggatggaggccgctgagcaagcccgcaatgccctccaggtggacttggctgaggccgaaaagaggagagaagccctctgggagaaaaacacacacctggaagcccagctgcaaaaagccgaggaagctggagctgaattgcaggctgatctgcgcgacatccaggaagagaaagaagagatacagaaaaagctgtcagagtcccgccaccaacaggaggctgctaccacccagctagaacagcttcaccaggaagctaagaggcaagaagaggtgttggccagagcagtgcaggagaaggaggcactcgtgagggaaaaagcggccctggaggtgcggttgcaggccgtcgagcgagataggcaggatctggcagagcagcttcaaggactttcatctgccaaagagctgctggaatcttcactgtttgaggctcagcaacaaaatagcgtgatcgaggtcacaaaggggcagctcgaagtccagatacagaccgtgacacaggctaaagaggttatccagggcgaggtgcgatgcctgaaactggaactcgacacggaacgctctcaagcagagcaggagcgcgacgctgccgcccgccagctcgcccaggctgagcaggagggcaagactgctttagaacagcagaaagcagcccatgagaaagaggtaaaccagcttagagaaaaatgggagaaagaaaggtcttggcatcagcaggaactggccaaagccctggaatcacttgaacgcgagaagatggaactcgaaatgaggctcaaggagcagcagaccgagatggaagccattcaggctcagcgagaggaagaaaggacgcaggccgagtccgccctctgccaaatgcaacttgaaacagagaaggagagggtgtctctcctggaaacacttcttcagacgcagaaagagttagccgacgcttcgcagcagttagagagactgcggcaggatatgaaggtccaaaagctgaaagaacaggaaaccacagggatcctgcagacccagttacaagaggctcagcgcgaacttaaagaggctgcgcgccaacacagggatgatcttgctgctttacaggaagaaagctctagcctgctgcaagataagatggacctacagaaacaagtggaagatctcaaatctcagctggtagctcaggacgacagccagcgcctcgtggagcaggaagttcaggaaaagctgcgcgagacacaagagtacaatcgcatacagaaagaattggagcgagagaaagcgagcctgacactaagcttgatggagaaggagcagcgactcctggttttgcaggaagccgacagtatccggcagcaggagctgagcgctctgcgacaggacatgcaggaggcacaaggtgagcagaaagagctctccgcccagatggaactgctacgacaggaggtgaaggagaaagaagcagatttcctggcacaggaagcccagctgcttgaggaactggaggccagtcacatcactgaacagcagttgagggccagcctatgggcccaagaagccaaggcagcccagctgcaactgagattgcggtcaactgagtcccagctggaagccctcgctgcagagcagcaaccggggaaccaggcccaagcgcaagcacagctagcgtccctctacagtgccctgcagcaggcccttgggtcagtctgcgagagtcgccccgaattgagcggggggggcgactctgctcccagcgtatggggtttggagcctgatcagaacggagcgcggtctctcttcaagcgtggcccattgctcaccgccctcagcgctgaggcagtggcgagtgccttgcataaactgcatcaagacttgtggaagacccagcaaacgcgcgatgttcttcgagaccaggtgcagaagctggaggagcgccttaccgatacagaagcagagaaatcccaagtccatacagagttgcaggacctgcagaggcaacttagtcagaatcaggaagagaaaagcaagtgggagggtaagcaaaatagcttggagagcgaattaatggaattgcacgaaacgatggcttcccttcagtcgagactgcgacgagctgaattacagcgtatggaagcacagggagagagggagctgttacaggctgctaaggaaaatctcaccgctcaggtggaacatcttcaggcagcagtggtggaggccagagcccaggcgagcgctgccggaattctggaagaggatctccgaaccgcacgatcagcattgaagctaaagaacgaggaagtggagtctgaacgtgagcgagctcaggctctgcaggagcagggcgaactgaaagttgctcaggggaaagcactgcaggaaaatctcgctctgcttacccaaacgctggctgagagggaggaagaggtggagacactccgcgggcaaatacaggaattggaaaagcagagggaaatgcagaaagcggctctagaacttctgagcctcgacctcaagaagagaaaccaggaagttgatctgcagcaggagcagatacaggagctggaaaagtgcaggtccgtgctggagcacctgcccatggcagttcaggagcgagagcagaagctgactgtgcagagagagcagatcagagagctggagaaggatcgcgaaacccagaggaacgttttggagcatcagctcttagaactggagaaaaaggaccaaatgatcgaaagccagcgcggccaggtccaagacctgaagaagcagctcgtgacgttggagtgcctggccctcgaattggaagaaaaccaccataaaatggagtgccagcagaagctaatcaaggaactcgaagggcaaagagagacacagagggttgctctgactcacttgacactggacctggaggagcggtcccaggagttgcaggcccagtctagtcagatccacgacttagagtcacattcaaccgtgttggcgagagaactgcaggaacgggatcaagaggtgaaatcccagagagagcagattgaggaactccagcgacagaaagaacacctgacccaggacttagagcgtagagaccaggagctgatgttgcagaaagagcgaattcaggttctagaggatcagcggacacggcagaccaagattctggaagaagacctcgagcagatcaagctttctctgagagaaagaggacgcgagctgaccactcaaaggcagctcatgcaggagcgagccgaagaggggaagggacccagcaaggcccagcgtggctcactggagcatatgaaactgatcctgcgagacaaggagaaagaggtggagtgccagcaggagcatatccacgagctgcaagagctaaaggaccagctggagcagcagctgcaagggctgcacaggaaagtgggggaaacttctctgttgctgagtcagcgagaacaagagatagtcgtacttcaacagcagctgcaggaagcacgagaacaaggcgaattaaaggagcaaagcctccagagtcagctcgatgaagctcagcgggccctggctcaacgtgaccaggaactcgaagcactgcagcaagagcagcagcaggctcaggggcaggaagagagggtgaaagagaaagccgacgcactgcagggggcactggagcaggcacacatgacactcaaggaacgccacggggaactgcaggaccacaaggagcaggcccgacggttagaagaggagctggcagtggagggaaggcgggttcaggccttggaggaagtgctgggggatctccgggcagagagtcgcgagcaagagaaggctctgctggcgctccagcagcagtgtgctgagcaggcccaggaacacgaagttgagactagagccttgcaggactcgtggctgcaggctcaggctgtgctgaaagagagggatcaggaattagaagcattaagagcagagagtcaatcttcaaggcaccaggaggaagcggccagggcgcgcgccgaagccctgcaggaagccttgggcaaagctcacgctgccctgcaggggaaggaacaacatctcctggagcaggctgaactgtcccgaagtctcgaagcttcgacagccacgttacaggctagcctcgatgcctgccaggcccactcccgccaactcgaggaagccttgagaattcaggaaggcgagatccaggatcaggacctgagatatcaggaggacgtacaacagctccaacaagcactcgcgcagagagacgaggagctgcgacaccagcaggagcgcgagcagctgctggagaaatctctcgctcagcgtgtgcaagagaatatgattcaggagaagcagaacctgggtcaagaacgggaggaagaggagattcgcggattgcaccagagcgtccgagaactgcagctgactctcgcccagaaagaacaggaaatacttgagcttcgagagacgcagcagagaaacaacctagaggcattgccacatagccacaaaacttcacccatggaggagcaaagtctcaaactcgactcactggaacctaggctgcagagggaattagaacggctgcaagctgcactcagacagactgaggcccgtgagattgaatggcgcgaaaaagcccaagatcttgctctctccctggcccaaaccaaagcttctgtgtcaagtctgcaagaggtcgcaatgtttctccaagcctctgtgctggagcgcgactctgagcagcagagactgcaggatgaacttgaactcacccggagagctttggagaaagaaagattacattcacctggggccacatccacagccgagttggggagcaggggggagcaaggggtccaactgggagaggtgagtggtgtggaggctgagccgtccccagacggtatggaaaagcagagctggcgccagcgcctggaacacctgcagcaggccgtggcgagactggaaatcgatcgcagccgtctgcaacggcacaacgttcagctcagatcgaccctggagcaggttgaacgcgagcgacggaagctcaaaagagaggctatgcgcgcagcccaggcagggtctctcgagatctctaaggctaccgcttcttcgccgacccagcaggacggacgcggccaaaagaatagcgacgctaaatgtgtggcagagctgcagaaggaggtggttttactgcaggcgcagctgacccttgaacgcaaacagaagcaggattatataacccggagtgctcagacatctcgggagctagccgggctccatcacagcttgagccattctcttttggctgtcgctcaagccccagaggctaccgtgctcgaggccgaaactcggcgcctggatgaatctctgacacagagcctgacctctcctggccctgtgcttctgcacccatcgcccagcacaacacaggctgcttcccgctag

SEQ ID NO: 170812 - DNA, 2055 bp, Artificial Sequence
  derived and/or modified sequence
atggaaactcgctctccaggcctgaataatatgaaacctcaatccctccagctcgtcctggaggagcaagtgctagctctgcagcaacagatggccgagaatcaagcggcaagttggcggaaactcaagaattcacaggaggcacaacagcgtcaggccacactggtgcggaaattgcaagctaaggtattacagtaccgcagttggtgtcaggagttggagaagcggctcgaggctaccgggggacctatcccacagagatgggagaatgtcgaagaacctaatctcgatgaattacttgtcagactggaggaagagcaacagcggtgtgaatcacttgctgaagttaacacacagctccgcctccacatggagaaagcggatgtggtaaataaagccctccgggaagatgtcgagaagttgactgtcgattggtccagagctcgcgacgagctgatgcgtaaggaatcacaatggcagatggaacaggaatttttcaaaggctacttgaaaggggaacacgggcggctcctgtcactgtggagagaggttgtgacatttcgaaggcatttccttgagatgaagtccgctactgaccgggatctgatggaattaaaagcggagcacgtgagattgagtggctccctgctgacatgctgcctgcggctgacagtcggcgctcagtctcgggagccaaacggcagtggcagaatggatggccgagagcccgcccagttattgctgctgttggccaagacacaagagcttgagaaggaggcccacgagcgcagccaagaactgatccagctcaagtctcagggtgacctagagaaagcggaattacaggacagggttacagagctgtccgctttgcttacccagtcccagaaacaaaatgaagactatgagaaaatgatcaaagcccttagagaaaccgtggagatactaactaatcacactgagctgatggagcacgaggcatccctttctcggaacgcccaggaagagaagcttagtctccaacaggttattaaggatatcacccaggtgatggtggaggaaggggacaacattgctcagggatcggggcacgagaactcgcttgagttggattcatcgatctttagccagttcgattaccaggacgcagacaaagcgttgacattggtgagatccgtgcttacgaggcggcgtcaggcagttcaggatctgcggcagcagcttgcagggtgccaggaggccgtgaatcttctgcagcagcaacacgaccagtgggaagaggagggaaaagcacttagacagcgactgcagaagctaaccggggagcgcgacaccctggccggacagacagtcgacctccagggagaagtcgatagtctgagtaaagaacgtgagctgctccagaaggcgagggaggaactccgccagcagcttgaagtgctcgagcaggaggcgtggagactgcggagggttaacgtcgagctccagctacagggcgacagcgctcagggacagaaagaggagcaacaagaggagctccatttggctgtgcgggagcgggaacgcttgcaagaaatgctaatgggcctcgaagctaagcagagcgagtctctgtccgagctaattaccctgagggaggcgctggagtcttctcacctggaaggcgagttgctgcgacaggagcagaccgaggtcaccgctgctctagcaagggccgaacagtcaatcgctgaactgtcaagctccgagaatacactaaagacagaggtggccgaccttcgcgcggccgctgttaaactgagtgcgttgaacgaggccttagcattagacaaggtgggcctcaatcagcagttactccagctcgaggaagagaatcagtctgtgtgtagccgaatggaggccgctgaacaggcacggaacgccttacaggtcgacctggctgaagctgagaaaagacgagaggccctctgggagaaaaacacccatctcgaggctcagctgcagaaggcagaggaggccggagctgagctacaagcagatttgagagatatttag

SEQ ID NO: 170813 - DNA, 7329 bp, Artificial Sequence
  derived and/or modified sequence
atggagaccaggagccctggcctgaacaacatgaagccccagagcctgcagctggtgctggaggagcaggtgctggccctgcagcagcagatggccgagaaccaggccgcctcctggaggaagctgaagaacagccaggaggcccagcagaggcaggccaccctggtgaggaagctgcaggccaaggtgctgcagtaccgctcctggtgccaggagctggagaagaggctggaggccaccggcggccccatcccccagcgctgggagaatgtggaggagcccaacctggatgagctgctggtgcggctggaggaggagcagcagagatgtgagagcctggccgaggtgaacacccagctgcggctgcacatggagaaggcagatgtggtgaacaaggccctgcgggaggatgtggagaagctgactgtggactggagccgggccagagatgagctgatgaggaaggagagccagtggcagatggagcaggagttcttcaagggctacctgaagggggagcacggccgcctgctgagcctgtggagggaggtggtgaccttccgccgccacttcctggagatgaagagcgccacagaccgggacctgatggagctgaaggccgagcacgtgcggctgagcggcagcctgctgacctgctgcctgcggctgactgtgggcgcccagagccgggagcccaatggaagtggccgcatggatggccgggagcccgcccagctgctgctgctgctggccaagacccaggagctggagaaggaggcccacgagaggagccaggagctgatccagctgaagagccagggcgacctggagaaggccgagctgcaggacagagtgacagagctgagcgccctgctgacccagagccagaagcagaatgaagattatgagaagatgatcaaggccctgcgggagaccgtggagatcctggagaccaaccacacagagctgatggagcacgaggccagcctgagcagaaatgcccaggaggagaagctgagcctgcagcaggtgatcaaggacatcacccaggtgatggtggaggagggggacaacatcgcccagggcagcggccacgagaacagcctggagctggacagcagcatcttcagccagtttgactaccaggatgctgacaaggccctgaccctggtgcgctctgtgctgacccggcggcggcaggccgtgcaggacctgcggcagcagctggccggctgccaggaggccgtgaacctgctgcagcagcagcacgaccagtgggaggaggagggcaaggccctgcggcagaggctgcagaagctgactggagagcgggacaccctggccggccagacagtggacctgcagggcgaggtggacagcctgagcaaggagcgggagctgctgcagaaggcccgggaggagctgcggcagcagctggaggtgctggagcaggaggcctggaggctgcggcgggtgaatgtggagctgcagctgcagggcgacagcgcccagggccagaaggaggagcagcaggaggagctgcacctggccgtgcgggagcgggagcggctgcaggagatgctgatgggcctggaggccaagcagagcgagagcctgtctgagctgatcaccctgcgggaggccctggagagcagccacctggagggggagctgctgcggcaggagcagacagaggtgacagctgccctggcccgggcagagcagagcattgctgagctgagcagcagcgagaacaccctgaagacagaggtggccgacctgcgggctgctgctgtgaagctgagcgccctgaatgaggccctggccctggacaaggtgggcctgaaccagcagctgctgcagctggaggaggagaaccagagcgtgtgcagcaggatggaggccgctgagcaggccagaaatgccctgcaggtggacctggccgaggccgagaagagaagagaggccctgtgggagaagaacacccacctggaggcccagctgcagaaggccgaggaggccggggctgagctgcaggccgacctgcgggacatccaggaggagaaggaggagatccagaagaagctgtctgagagccgccaccagcaggaggccgccaccacccagctggagcagctgcaccaggaggccaagaggcaggaggaggtgctggcccgggctgtgcaggagaaggaggccctggtgcgggagaaggccgccctggaggtgcggctgcaggccgtggagcgggaccggcaggacctggccgagcagctgcagggcctgagcagcgccaaggagctgctggagagcagcctgtttgaggcccagcagcagaacagcgtgattgaggtgaccaagggccagctggaggtgcagatccagacagtgacccaggccaaggaggtgatccagggcgaggtgcgctgcctgaagctggagctggacacagagaggagccaggccgagcaggagagagatgctgctgcccggcagctggcccaggccgagcaggagggcaagacagccctggagcagcagaaggccgcccacgagaaggaggtgaaccagctgcgggagaagtgggagaaggagaggtcctggcaccagcaggagctggccaaggccctggagagcctggagcgggagaagatggagctggagatgaggctgaaggagcagcagacagagatggaggccatccaggcccagcgggaggaggagaggacccaggccgagagcgccctgtgccagatgcagctggagacagagaaggagcgggtgtccctgctggagaccctgctgcagacccagaaggagctggctgatgccagccagcagctggagcggctgcggcaggacatgaaggtgcagaagctgaaggagcaggagaccaccggcatcctgcagacccagctgcaggaggcccagcgggagctgaaggaggccgcccggcagcacagagatgacctggccgccctgcaggaggagagcagcagcctgctgcaggacaagatggacctgcagaagcaggtggaggacctgaagagccagctggtggcccaggatgacagccagaggctggtggagcaggaggtgcaggagaagctgcgggagacccaggagtacaaccgcatccagaaggagctggagcgggagaaggccagcctgaccctgagcctgatggagaaggagcagaggctgctggtgctgcaggaggccgacagcatccggcagcaggagctgagcgccctgcggcaggacatgcaggaggcccagggcgagcagaaggagctgagcgcccagatggagctgctgcggcaggaggtgaaggagaaggaggccgacttcctggcccaggaggcccagctgctggaggagctggaggccagccacatcacagagcagcagctgcgggccagcctgtgggcccaggaggccaaggccgcccagctgcagctgcggctgcggagcacagagagccagctggaggccctggccgctgagcagcagcccggcaaccaggcccaggcccaggcccagctggccagcctgtacagcgccctgcagcaggccctgggctctgtgtgtgagagcaggcctgagctgagcggcggcggggacagcgcccccagcgtgtggggcctggagccagaccagaatggagcccggagcctcttcaagaggggccccctgctgacagccctgtctgctgaggccgtggccagcgccctgcacaagctgcaccaggacctgtggaagacccagcagaccagagatgtgctgcgggaccaggtgcagaagctggaggagcggctgacagacacagaggccgagaagagccaggtgcacacagagctgcaggacctgcagaggcagctgagccagaaccaggaggagaagagcaagtgggagggcaagcagaacagcctggagagcgagctgatggagctgcacgagaccatggccagcctgcagagccggctgcggcgggcagagctgcagaggatggaggcccagggcgagcgggagctgctgcaggccgccaaggagaacctgacagcccaggtggagcacctgcaggccgctgtggtggaggcccgggcccaggccagcgctgctggcatcctggaggaggacctgaggacagcccggagcgccctgaagctgaagaatgaggaggtggagagcgagcgggagcgggcccaggccctgcaggagcagggcgagctgaaggtggcccagggcaaggccctgcaggagaacctggccctgctgacccagaccctggccgagcgggaggaggaggtggagaccctgcggggccagatccaggagctggagaagcagcgggagatgcagaaggccgccctggagctgctgagcctggacctgaagaagaggaaccaggaggtggacctgcagcaggagcagatccaggagctggagaagtgccgctctgtgctggagcacctgcccatggctgtgcaggagcgggagcagaagctgactgtgcagcgggagcagatccgggagctggagaaggaccgggagacccagagaaatgtgctggagcaccagctgctggagctggagaagaaggaccagatgattgagagccagaggggccaggtgcaggacctgaagaagcagctggtgaccctggagtgcctggccctggagctggaggagaaccaccacaagatggagtgccagcagaagctgatcaaggagctggagggccagcgggagacccagagggtggccctgacccacctgaccctggacctggaggagaggagccaggagctgcaggcccagagcagccagatccatgacctggagagccacagcacagtgctggcccgggagctgcaggagcgggaccaggaggtgaagagccagcgggagcagatcgaggagctgcagaggcagaaggagcacctgacccaggacctggagcggcgggaccaggagctgatgctgcagaaggagcgcatccaggtgctggaggaccagaggacccggcagaccaagatcctggaggaggacctggagcagatcaagctgagcctgcgggagcggggccgggagctgaccacccagaggcagctgatgcaggagcgggcagaggagggcaagggccccagcaaggcccagaggggcagcctggagcacatgaagctgatcctgcgggacaaggagaaggaggtggagtgccagcaggagcacatccacgagctgcaggagctgaaggaccagctggagcagcagctgcagggcctgcacaggaaggtgggggagaccagcctgctgctgagccagcgggagcaggagatcgtggtgctgcagcagcagctgcaggaggcccgggagcagggcgagctgaaggagcagagcctgcagagccagctggatgaggcccagagggccctggcccagagggaccaggagctggaggccctgcagcaggagcagcagcaggcccagggccaggaggagcgggtgaaggagaaggcagatgccctgcagggcgccctggagcaggcccacatgaccctgaaggagcggcacggggagctgcaggaccacaaggagcaggcccggcggctggaggaggagctggccgtggagggccggcgggtgcaggccctggaggaggtgctgggggacctgcgggcagagagccgggagcaggagaaggccctgctggccctgcagcagcagtgtgccgagcaggcccaggagcacgaggtggagacccgggccctgcaggacagctggctgcaggcccaggccgtgctgaaggagcgggaccaggagctggaggccctgcgggcagagagccagagcagccgccaccaggaggaggccgcccgggcccgggcagaggccctgcaggaggccctgggcaaggcccatgctgccctgcagggcaaggagcagcacctgctggagcaggccgagctgagccgcagcctggaggccagcacagccaccctgcaggccagcctggatgcctgccaggcccacagccggcagctggaggaggccctgcgcatccaggagggggagatccaggaccaggacctgcgctaccaggaggatgtgcagcagctgcagcaggccctggcccagagagatgaggagctgcggcaccagcaggagcgggagcagctgctggagaagagcctggcccagagggtgcaggagaacatgatccaggagaagcagaacctgggccaggagcgggaggaggaggagatccggggcctgcaccagagcgtgcgggagctgcagctgaccctggcccagaaggagcaggagatcctggagctgcgggagacccagcagaggaacaacctggaggccctgccccacagccacaagaccagccccatggaggagcagagcctgaagctggacagcctggagccccggctgcagcgggagctggagcggctgcaggccgccctgcggcagacagaggcccgggagattgagtggagggagaaggcccaggacctggccctgagcctggcccagaccaaggcctctgtgagcagcctgcaggaggtggccatgttcctgcaggcctctgtgctggagcgggacagcgagcagcagaggctgcaggatgagctggagctgacccggcgggccctggagaaggagcggctgcacagccctggggccaccagcacagctgagctgggcagcagaggagagcagggcgtgcagctgggggaggtgtctggagtggaggccgagcccagcccagatggcatggagaagcagagctggaggcagaggctggagcacctgcagcaggccgtggcccggctggagattgacaggagccggctgcagaggcacaacgtgcagctgcggagcaccctggagcaggtggagcgggagaggaggaagctgaagcgggaggccatgagagctgcccaggccggcagcctggagatcagcaaggccacagccagcagccccacccagcaggacggccggggccagaagaacagtgatgccaagtgtgtggccgagctgcagaaggaggtggtgctgctgcaggcccagctgaccctggagaggaagcagaagcaggactacatcaccaggtctgcccagaccagccgggagctggccggcctgcaccacagcctgagccacagcctgctggccgtggcccaggcccctgaggccaccgtgctggaggccgagacccggcggctggatgagagcctgacccagagcctgaccagccctggccctgtgctgctgcaccccagccccagcaccacccaggccgccagcaggtag

SEQ ID NO: 170814 - DNA, 2055 bp, Artificial Sequence
  derived and/or modified sequence
atggagaccaggagccctggcctgaacaacatgaagccccagagcctgcagctggtgctggaggagcaggtgctggccctgcagcagcagatggccgagaaccaggccgcctcctggaggaagctgaagaacagccaggaggcccagcagaggcaggccaccctggtgaggaagctgcaggccaaggtgctgcagtaccgctcctggtgccaggagctggagaagaggctggaggccaccggcggccccatcccccagcgctgggagaatgtggaggagcccaacctggatgagctgctggtgcggctggaggaggagcagcagagatgtgagagcctggccgaggtgaacacccagctgcggctgcacatggagaaggcagatgtggtgaacaaggccctgcgggaggatgtggagaagctgactgtggactggagccgggccagagatgagctgatgaggaaggagagccagtggcagatggagcaggagttcttcaagggctacctgaagggggagcacggccgcctgctgagcctgtggagggaggtggtgaccttccgccgccacttcctggagatgaagagcgccacagaccgggacctgatggagctgaaggccgagcacgtgcggctgagcggcagcctgctgacctgctgcctgcggctgactgtgggcgcccagagccgggagcccaatggaagtggccgcatggatggccgggagcccgcccagctgctgctgctgctggccaagacccaggagctggagaaggaggcccacgagaggagccaggagctgatccagctgaagagccagggcgacctggagaaggccgagctgcaggacagagtgacagagctgagcgccctgctgacccagagccagaagcagaatgaagattatgagaagatgatcaaggccctgcgggagaccgtggagatcctgaccaaccacacagagctgatggagcacgaggccagcctgagcagaaatgcccaggaggagaagctgagcctgcagcaggtgatcaaggacatcacccaggtgatggtggaggagggggacaacatcgcccagggcagcggccacgagaacagcctggagctggacagcagcatcttcagccagtttgactaccaggatgctgacaaggccctgaccctggtgcgctctgtgctgacccggcggcggcaggccgtgcaggacctgcggcagcagctggccggctgccaggaggccgtgaacctgctgcagcagcagcacgaccagtgggaggaggagggcaaggccctgcggcagaggctgcagaagctgaccggggagcgggacaccctggccggccagacagtggacctgcagggcgaggtggacagcctgagcaaggagcgggagctgctgcagaaggcccgggaggagctgcggcagcagctggaggtgctggagcaggaggcctggaggctgcggcgggtgaatgtggagctgcagctgcagggcgacagcgcccagggccagaaggaggagcagcaggaggagctgcacctggccgtgcgggagcgggagcggctgcaggagatgctgatgggcctggaggccaagcagagcgagagcctgtctgagctgatcaccctgcgggaggccctggagagcagccacctggagggggagctgctgcggcaggagcagacagaggtgacagctgccctggcccgggcagagcagagcattgctgagctgagcagcagcgagaacaccctgaagacagaggtggccgacctgcgggctgctgctgtgaagctgagcgccctgaatgaggccctggccctggacaaggtgggcctgaaccagcagctgctgcagctggaggaggagaaccagagcgtgtgcagcaggatggaggccgctgagcaggccagaaatgccctgcaggtggacctggccgaggccgagaagaggcgggaggccctgtgggagaagaacacccacctggaggcccagctgcagaaggccgaggaggccggggctgagctgcaggccgacctgcgggacatctag

SEQ ID NO: 170815 - DNA, 7329 bp, Artificial Sequence
  derived and/or modified sequence
atggagacccggagccccggcctgaacaacatgaagccccagagcttgcagctcgtcctggaagagcaagttttggctcttcagcaacagatggctgaaaaccaggcagccagttggcgcaagctgaaaaactctcaagaagcccagcagagacaagccacccttgtcaggaaactgcaagcaaaagtactgcagtaccgctcctggtgtcaagagctggaaaagcgcctggaggctaccggcggcccgattccccagcggtgggaaaacgttgaggaacccaatctcgacgagttgctcgtaaggctagaggaggagcagcagcgctgtgaatccctcgctgaagtgaatacacagcttcgactccatatggaaaaagcggacgtggtcaataaagctctgcgggaagacgtcgaaaaactgactgttgattggtcccgagctagggacgagctgatgcgcaaagaatcccaatggcagatggagcaggaattctttaaaggctaccttaagggagaacacggaaggcttcttagcctgtggagagaggtggttaccttccggagacattttctggagatgaaaagcgccacagaccgcgacttgatggagctgaaggccgaacacgtccgactgtcagggtcactgctgacgtgctgtcttcggcttactgtgggggcccagtctcgagagcccaacgggagtggaagaatggatggtagagagcccgctcagctactgttactgctagctaaaacccaggagctggagaaagaagcccacgagaggagtcaggaactcatccagctcaaatcacaaggggacctcgagaaggctgagcttcaagacagggtgaccgagctgtcagccctgctcacccagtcacaaaaacagaatgaagattacgagaaaatgattaaggcactgagagaaacagtggagatcctggaaacaaatcatacagagctgatggagcacgaggcttctctcagccgtaacgcgcaggaagaaaagctatccctgcagcaggtgatcaaggatatcacacaggtgatggttgaagagggggataacattgcacagggcagcgggcatgagaactcccttgagttggacagctctatcttcagccagttcgactaccaggatgcagacaaagcgctgaccctggtgcgttccgtgctgaccagaagacgccaagctgtgcaggatctcagacagcagctcgctggctgccaggaggccgtgaacctccttcagcagcaacacgaccagtgggaggaagaaggaaaggcacttcgacagcgtctccagaagctgaccggtgagcgggacacactagccggccaaaccgtggatttgcaaggtgaagtggacagcctgagcaaggaaagagaactgctccagaaggcacgagaagagctgcgccaacagctcgaagttttggagcaggaggcttggcgactccgcagagtgaatgtcgagttacagctccagggcgacagtgcacagggacaaaaggaggaacagcaggaggaactgcacttagccgtgagggagcgggaacggttgcaggagatgctgatgggactcgaggcaaagcagtcagaatcacttagcgagttgatcaccctgcgggaagctctggaatccagtcacctcgagggagaactcctccggcaggagcagaccgaagtcaccgcagcactggcacgggccgagcagtctattgccgaacttagcagctccgagaatactttgaagaccgaggttgcagacttgcgtgctgccgctgtgaagctctccgcactgaatgaagcgttagctctggataaggtaggtttaaatcagcagctcctgcagctggaagaagagaatcagtccgtgtgcagtagaatggaggcagcagagcaggcccgtaacgccctgcaggttgatctagcagaagcggaaaaacggcgcgaggcactgtgggaaaaaaatacacatttggaggcacagctgcagaaggccgaggaagcgggagctgaactgcaggcagacctgcgtgacatccaagaggaaaaagaagagatacagaagaagttgtcggagagtagacaccagcaggaagctgcgacgactcagcttgagcaactccatcaagaagccaagcgacaagaggaggttctggcaagggccgtgcaagagaaggaggctctcgtgagagagaaagccgctctggaagttcgtctccaggccgtagaaagggatcggcaggatcttgcagagcaactgcaaggactcagtagtgctaaggagctgctggaatctagcctgttcgaagcgcagcaacagaattcagtcatcgaggtaacaaaagggcagctggaggtgcaaatccaaactgtcacacaggctaaggaggtcattcagggggaggtgcggtgcctgaagctcgagctggacactgaaagatcacaggcggaacaagagagggacgccgccgcccgtcagcttgctcaagccgagcaggaagggaaaactgccctcgaacagcagaaagccgcacacgagaaggaagtgaaccagctcagagagaaatgggaaaaggagcgtagctggcatcagcaggagctggcgaaagcactagagagcctggaacgtgagaagatggaactggaaatgagactcaaagaacagcaaactgaaatggaagctatccaggctcaaagagaggaggagagaactcaggctgaatccgctctgtgccagatgcagttggaaactgaaaaggaaagagtttctctactagagacactgctgcagacacagaaagagctggcagatgcttcccagcagctcgagcggttaaggcaggatatgaaggttcagaaactgaaggagcaggagaccaccggaattctccagactcagttgcaggaggcccaaagggagctgaaagaagcagcccgccaacaccgagatgacctagcagctttgcaggaggagagcagcagcctcctgcaggacaagatggacctccagaaacaggttgaggatctgaagagtcaactcgtcgctcaggacgactcccagcgcctcgttgagcaggaagtgcaggaaaaattgcgggaaacacaagagtataacagaattcagaaagaactggaaagagagaaggccagcttgactctttcgttgatggaaaaggagcaaaggttgctggtactccaagaggccgactcaataagacagcaggagctgagcgcgctgaggcaggatatgcaggaggcacagggtgagcagaaagaacttagtgcccagatggaattactccgacaggaggtcaaggagaaggaggctgatttcttagcccaggaagcccagttgctggaggagctcgaagcttctcatattacggagcagcagcttagagctagtctctgggctcaagaggccaaggcggcgcagcttcagcttcgcctccggtcaaccgagtctcagttggaagcactggctgcagagcagcaacctggcaaccaggcccaggcccaggcacagctcgcatcgctatactcagctctgcaacaagcactgggttccgtatgcgaaagcagaccagagctgagcggcggcggggatagcgctccaagcgtgtggggattggagccggatcagaacggggctaggagcctatttaagcgcgggccactgctgacagccctgagtgcagaagcagtggcttctgcgctgcacaagcttcaccaagacctctggaagactcagcagactagggatgtcctgcgggaccaagtccaaaaactcgaggaacgacttactgacaccgaggctgagaaatctcaggtgcacaccgagctgcaggatctccaacgtcaactttcccagaatcaggaggagaagtccaaatgggagggaaaacagaactcattagagtcagaacttatggagctgcatgaaaccatggcctcacttcagagcaggctacgacgcgcagagcttcagaggatggaggctcagggggagagagagttgctgcaggcggccaaggagaacctcacagctcaggtggaacaccttcaagccgccgtggtggaggcccgcgcccaggcctccgccgccggcatcctggaggaggacctaagaaccgcccgcagcgccctgaagctgaaaaacgaggaggtggaaagcgagcgcgagagagctcaggccctccaggagcaaggcgagctaaaagtagcccagggtaaggccctgcaagagaatttggctctgctgactcaaactctggcggagcgggaggaggaagtcgaaacacttagagggcagatccaggaactagagaaacagagggaaatgcagaaagcagctttagaactcctgtcccttgatctgaaaaaaaggaaccaggaagtcgacttgcagcaagagcagatccaggaactggaaaaatgtcgatccgtactggagcacttaccaatggcggttcaagaacgggagcagaagctgaccgtgcagcgggaacagatacgcgaactggagaaagaccgggaaactcagcggaatgtgttagaacaccagctcctcgaactggaaaagaaagaccagatgatcgagtcccagagaggccaagtgcaagatctcaaaaaacagctggtgacacttgagtgtctggccctcgagttggaggagaatcatcacaagatggagtgtcagcagaaactcattaaggagttggagggccagcgagagactcagagagtggcgctgacccacctgacattagatcttgaggaacgctcacaggagctccaggcccagagctcacagatccacgaccttgaaagtcattccaccgttttggcccgcgaactccaggaaagggatcaggaagtgaagtctcaacgagaacagatcgaagagctgcaacgccagaaagagcacctcacacaggacctcgaacgacgggatcaggagctcatgctgcaaaaagagaggattcaagtgctggaagatcagcgcactcgacagacaaagatccttgaagaagatctggaacaaattaagctgagtctgcgtgagcgcgggagagagctgaccactcagcggcagttaatgcaggagcgagctgaagaggggaaaggcccaagcaaggcccagcgggggtcactcgagcatatgaagctcattctcagggacaaggagaaagaagtagagtgccagcaggagcatattcatgagctgcaggagctgaaagatcagctcgaacagcaactgcaaggtctccaccgaaaggtgggggagacaagtctgctgctctcacagagggagcaggagatcgtcgtcctccaacaacaacttcaagaggcacgagagcagggtgagctcaaggaacaatctctgcagagtcagctggacgaggctcaacgtgctctggcacagcgtgatcaggagctcgaggccctgcagcaggagcagcagcaggctcaaggacaggaggagagggtgaaggagaaagctgacgctcttcagggcgctcttgagcaggcacatatgaccctgaaggagcgtcatggagagcttcaggaccataaagaacaggcacgccgactggaggaggagttggctgtggagggccggcgtgtgcaagctcttgaagaggttctcggtgacctacgagcagaatcaagggagcaggagaaggccctgttggctctgcagcagcagtgcgctgaacaagctcaggaacacgaggtggaaacccgggcattgcaggactcatggctgcaagcccaggcggtccttaaggagcgcgatcaagaactggaggctctgcgggctgagagtcaatcctcaagacatcaggaggaagccgctagggcacgcgccgaagccctgcaagaggccctgggaaaggcacatgcagccctacagggaaaggagcaacatctcctggagcaggccgagctttcccgctccctggaggcatccaccgccaccctgcaggcttccttggacgcctgccaggctcactcacggcaactcgaggaggccctgaggattcaggaaggcgagatacaggaccaggatctgcggtaccaagaggacgtgcagcagcttcagcaagctctagcgcagagggacgaggagctcagacatcagcaggagcgcgagcagttgttggagaaatcccttgctcagcgcgttcaggaaaacatgattcaagagaagcaaaatctaggccaggagcgcgaggaggaggagatccgggggctacatcagagcgtgagggaactccaattgacgcttgcccaaaaagagcaggaaatcctggaactgcgggaaacccagcagagaaacaatcttgaggcactaccacactcacataaaacttctcccatggaggagcagtcactcaagctggattctctggaaccccgcctgcagcgggagctggagcgactgcaggctgctctcaggcaaacagaagcacgggagatcgaatggcgtgagaaggctcaggatctcgcattgtcactggcccagacaaaagcctcagtctcatccctgcaggaagtcgccatgttcctccaggcatcggtgctagagcgcgatagtgagcagcaacgactacaagacgaactcgagctcaccaggagagctttggaaaaggaaaggctccacagccccggcgctacatcaaccgccgagctgggctcccggggcgagcagggagttcaactaggagaagtatccggggtggaagctgagcccagcccagatggaatggagaaacaatcatggcggcagagattggagcacctgcagcaggccgtggctaggctcgagattgacagatcaagactgcagcgtcataatgtgcagctgcgttctaccctggagcaggtggaacgagaaagaaggaagctgaaacgcgaagcaatgcgtgccgcccaggccgggagccttgagatctcaaaagcgaccgcttcgagccccacgcagcaagacgggagaggacagaagaatagtgatgctaaatgcgtggctgagctacagaaggaagtcgtgctattgcaggcccagctgaccctggaacgaaagcagaagcaagattatatcacacgtagtgcccaaacttcaagggaacttgcaggcttacaccattccttatctcattcactgctggctgttgctcaggctcccgaagccacagtgttagaggcagagacacgcaggctggatgagagcttaactcaaagtctgaccagccccggccctgttttgcttcacccatcacctagcaccacccaggctgcctctaggtag

SEQ ID NO: 170816 - DNA, 2055 bp, Artificial Sequence
  derived and/or modified sequence
atggagacccggagccccggcctgaacaacatgaagccccagagcctgcagctcgtgctggaggaacaggtgcttgcactgcagcaacagatggctgaaaatcaggccgcttcttggcggaagttgaaaaattcccaagaggcccagcagcggcaggcgactcttgtgagaaagctccaggctaaagtcctgcagtatcgaagctggtgtcaggaactagaaaaaaggcttgaagcgactggaggaccaattcctcagaggtgggagaacgttgaggaaccgaacctggatgaactactggtgaggctggaagaggaacagcagaggtgcgagtcacttgcagaagtaaacactcagctgcggctgcacatggagaaagctgacgtcgtgaacaaggcccttcgggaagacgtagaaaagctgaccgtggattggtccagggctagagatgagctcatgcgtaaggagagtcagtggcagatggagcaggaattcttcaaggggtacctgaaaggggaacacggcaggcttctgtctttgtggcgcgaggtggtcacattcagaagacatttcttagaaatgaaaagtgctactgaccgggacctgatggagctgaaggccgagcacgtgagactgagtggtagtctcctgacttgttgtcttagattgaccgtgggcgcccaatcgcgtgagcctaatgggtccggccgcatggacggaagggagcccgctcaactgttacttctgctggccaagacacaggagctagagaaagaggcccacgaaagaagccaggagctgatccagctgaaatcccagggagatctagaaaaggcggagttgcaggaccgtgtgaccgaactgtccgcccttttgacccaatcacagaagcaaaacgaggactatgaaaagatgataaaggccctgcgcgagactgttgaaattttgactaatcataccgaactcatggaacacgaagcatcgctgtcccgtaacgcgcaggaggagaaactatcgctgcaacaggtgattaaagacattacccaagtgatggtggaggaaggtgacaatatcgctcagggttcaggacacgagaattctctggagctagattcgtcgattttcagccagttcgactaccaagatgccgataaggcactgaccctcgtgcggtctgttcttacccggcggcgccaggctgtgcaagacctccgccaacagctcgcaggctgtcaggaagcggtgaatttgctgcagcagcagcatgaccagtgggaggaggaaggtaaggccttgaggcagcggctgcagaaactaactggggagcgggatactttggctggacagactgtcgatcttcagggcgaggtcgacagcctttcaaaagagagagaattgctgcagaaggcaagggaagagttgcgccagcagctggaggtgctggaacaggaagcatggagactgcggcgagtgaacgtggagctgcaactgcagggagacagtgcccaaggtcagaaggaagagcagcaggaggaacttcacctcgccgtcagggaaagggaacgactccaggagatgctcatgggccttgaggctaaacagagtgagagtctatctgagcttatcaccctcagagaggcattggagtcctcacatctggagggggaactgctgaggcaagaacagacagaagtgaccgctgcactggcccgcgccgagcagagtattgctgagttgagcagttccgaaaataccctgaagactgaagtggctgacttgcgcgccgccgccgttaaactctcggccttaaacgaggccctggctctcgataaggttgggctgaaccagcagctgctgcagctggaggaggaaaatcaaagcgtctgcagtcgcatggaggcagccgagcaggcacgcaacgcacttcaagtcgatttggccgaggcagagaaacgtcgggaagccctctgggagaagaacacccacctcgaggcccagctgcaaaaggccgaagaggccggggctgaacttcaggccgatctccgagatatttag

SEQ ID NO: 170817 - DNA, 7328 bp, Artificial Sequence
  derived and/or modified sequence
atggaaaccagaagtcccggattgaacaacatgaaacctcagtcactgcaactggtgctcgaagagcaggtgttggccctgcagcaacagatggcagaaaaccaggccgcatcatggcgcaaactgaagaactcccaggaggcccagcagcgccaggctacgcttgtgcggaaattgcaggccaaagtgttgcaataccggagctggtgccaagagctggaaaagcgccttgaggcaacaggtgggcctataccccagcggtgggagaacgtggaagaacccaatttagacgaattactagtgagactggaagaggaacagcaaagatgtgaatcgctcgctgaagtgaatacgcagcttcgcttacacatggagaaggctgacgtcgtcaataaggcattgcgggaagatgttgaaaagctgactgtggactggtcccgagctcgggacgagctgatgcggaaagagagccagtggcaaatggagcaggagttttttaagggataccttaagggggagcatggaagactcttgtccctttggagagaagtggtgacctttcgtaggcactttctagagatgaaatctgcaaccgatcgagacctgatggaacttaaagcggaacacgttcggctgagcgggtctctcctcacttgttgcctgcgcctcactgtgggcgctcagtctagagaaccaaatggtagtggtcgtatggatgggcgagagcctgcccaacttctcttactcttagctaaaacacaggagctggagaaagaggcacatgagcgctcccaggagcttatccaattaaagagtcaaggagatctggaaaaggcggaacttcaagatagggtgacagagctatccgctttgctgactcagagccaaaagcagaacgaggattatgagaaaatgatcaaagcactccgggagactgtcgaaattctcgagacaaatcacactgagctcatggagcatgaggccagcttaagccggaatgcacaggaggaaaaactgagtctacaacaggtaatcaaggatatcacccaggtgatggtagaggaaggtgataacattgcacaagggagcggccatgagaactcacttgagttagattcatcaatcttttcgcaattcgattaccaggacgccgataaagccctgactttggtgagatctgtcctgacacggaggagacaggccgtccaggatttgaggcagcaattggctgggtgccaagaagccgttaacctgctccaacaacagcacgaccagtgggaggaagagggaaaagccctgaggcaacgcctccagaagcttacaggtgagcgggataccctggctggccagacagtggatttacaaggggaggtggatagtctctcaaaggagagagaattgttgcaaaaggccagggaagagctgcgccagcagctggaggtgctagagcaggaagcctggagattgcggagggtgaacgtggaattgcaactacaaggcgactcggcccaggggcagaaagaggagcagcaggaggagcttcatctggccgtgagggagcgcgagagactccaggagatgttgatggggctggaagcgaagcagtctgaaagtctttcggagttgattacactgcgagaggccctcgaatcgagtcatctggaaggagagctgctccggcaagaacagaccgaggtcacagctgccttggctagagccgaacagtccattgccgagttgtcttcttcagagaacacattgaaaactgaggtggccgatctgcgggcagcagctgtgaagctttctgcattaaacgaagctttggcattggacaaggttggtctcaaccagcaactgttacagctggaggaagagaatcagagcgtctgttctaggatggaagcggctgagcaagcacgtaatgccctccaggtcgacttagccgaagctgaaaagaggcgtgaagccttgtgggagaagaacacacacctagaggcacagctgcagaaggccgaggaagccggtgccgagctgcaggcagacctcagagacatccaggaggagaaggaagagattcaaaagaagctctccgagagccgccaccagcaagaagccgctacaacgcaattggaacaactccaccaggaggctaaacgacaggaagaggtactggctcgggcagtgcaagagaaagaagccctcgtgcgtgaaaaggctgccttggaagtaaggttacaggcagtggagagggatagacaggacctcgcagaacagttgcaaggactgtcttccgcaaaagaactcctcgagtctagcctgttcgaagcccaacagcagaactctgtcatcgaggtcactaaagggcaactcgaagtgcagattcagaccgtgacccaagccaaggaagttatacagggggaagttaggtgcttaaaacttgaattagatacagagcgcagccaggcggagcaggagcgggatgctgccgcacgccagctcgcccaggccgagcaggaaggaaagaccgccctggaacaacaaaaagccgcacacgagaaggaggtcaaccagttaagggagaaatgggagaaggagcggtcatggcaccagcaggaactggccaaggcgctcgagagccttgagagggaaaagatggagcttgaaatgagacttaaggagcaacagaccgagatggaggccatccaggctcagcgggaggaggagcgcactcaggccgaatccgccctgtgccagatgcagctggagactgaaaaggagcgagtgtcactgctcgagactcttttacagacccagaaggagctggcagatgcttctcagcagctcgagcgattacgccaagacatgaaagtccagaagcttaaagagcaggaaacgaccggcatcctacagacacagttgcaggaggcccagcgcgagctgaaagaggccgcacggcagcacagagatgacctcgcggctctgcaggaggaatcaagctctctcttacaggataagatggatctgcagaagcaggtggaggacttgaaaagccagcttgtggcacaggatgactcccagcgtctcgtcgagcaggaagtccaggagaaattacgcgaaacccaggaatacaacagaattcagaaggaactcgaacgcgagaaagcctctctaactttaagcctgatggaaaaagagcaaagacttctcgttctgcaggaggcagatagcatacggcaacaggagctgagcgcccttagacaggacatgcaggaggcgcagggtgaacagaaagagctgtctgctcagatggagctcctcaggcaggaagtgaaagaaaaggaagcggatttcctagcccaagaggcgcagctcctggaagaattggaggctagtcacataaccgagcagcagcttcgagctagcttgtgggcccaggaggcgaaagctgcacagctccagctgcgccttcggtcgaccgaatcccagcttgaagctttggctgctgagcagcagcccggaaatcaggcgcaggcacaggcgcagctggcatctctgtatagcgctcttcagcaggccctggggtcggtgtgcgagtcccggccagagctgagcggcggtggtgactcagctccttcggtgtggggcctcgaacccgatcaaaacggtgctcggtccctcttcaagcggggaccattactgaccgcattatctgccgaagccgtcgcctccgctctgcataaattacaccaggacctatggaagacacaacagaccagggacgtccttagggatcaagtgcagaaactggaagaaagattgacagatacggaggccgagaaatctcaggtgcacaccgagcttcaggatttacaaagacagctgagtcagaatcaggaggagaagagtaagtgggagggcaaacaaaacagtctggagtccgaactgatggagctgcacgagactatggcttcactccagagtcgcctccgaagggccgagcttcaacggatggaagctcagggagaacgtgagctcctccaggcagcaaaggaaaacctgactgctcaggtggagcacctacaggccgctgtggtcgaggctagagcacaagcatcggccgcaggcatcctggaggaagacctccgtaccgcacgttccgccctgaagctgaaaaacgaagaagttgaatccgagagagagagggcacaggcattacaggagcagggagaactaaaggtggcccaggggaaggccctgcaagagaacttggcactattgacgcagacactcgctgaacgcgaagaagaggtggagacgctgcgtggccagattcaagagctagagaaacagagggagatgcaaaaagccgctctggaactgctgtccttggacctcaaaaagcgtaaccaggaagtcgaccttcagcaggagcagatccaagaattggagaagtgcaggagcgtgttggagcacctgcctatggcagtacaagagcgagaacaaaaactgactgtgcagcgagagcagattagagagctggaaaaagaccgagaaactcagcgaaatgttctagaacatcagctgctggagttagaaaagaaagatcagatgatcgagagccagagggggcaggtccaggatctgaagaaacagctagtcacccttgaatgtcttgcattagaacttgaagagaatcatcacaaaatggagtgccagcaaaagcttatcaaggagctcgagggtcaacgcgaaacacaaagagtggctcttactcacctgacgctggatctagaggagcgtagtcaagagttacaggctcaatccagccagattcacgatctcgagtcccactctaccgtgctcgcacgtgagttgcaggaaagggaccaggaggttaaatcacagagggaacagattgaggagctgcagaggcagaaagagcatctcactcaggacctagaacggagggaccaagagctcatgctgcagaaagaaaggatacaggtcttggaagaccagaggactaggcaaacaaaaattctagaggaagatctagagcagatcaaactgtccctccgggaaagaggtcgggagctgacaacccagcggcagctgatgcaggaacgtgctgaggagggaaagggaccatcaaaagcacagcgaggttcgctggagcacatgaaattgattctgcgggacaaggaaaaggaggtagaatgtcagcaggagcatatccacgaactgcaggagttgaaggaccagctcgaacagcagttgcaggggctccaccggaaggtgggggaaactagcctattactcagccagagagagcaggaaatcgtggtccttcagcagcagctgcaagaggcacgagagcaaggcgagctcaaggaacagagcctccaatcgcagctggatgaagcacagagggctctggcccagcgtgaccaggaattagaggcactgcaacaagagcaacagcaggcccagggccaagaagaacgcgtgaaggaaaaagccgacgcactgcagggcgcactggagcaggcccatatgactcttaaggagcgccatggagaactccaggaccataaagaacaggccagaaggttggaagaggagctcgctgtggaaggtcggagggttcaagcccttgaagaggttctgggagacctacgcgcagagtcacgcgaacaggaaaaagctcttttggccctgcaacagcagtgcgctgaacaggctcaggagcatgaggtagagactcgggctctccaggactcctggctacaggctcaggccgtgttgaaagaaagagaccaggaactggaagccctgagagcagagtctcagagtagccggcatcaggaggaagccgcacgggctagggcagaggctctccaagaagctctgggaaaggcccacgccgcactccaggggaaggaacaacatctgctggagcaggcagaactgagccggagtctggaggcttctaccgccacactgcaggctagcctcgacgcctgtcaagctcacagccggcagctggaagaagcattacgcattcaggaaggtgaaatccaagatcaggatctccgctatcaggaagatgtccagcagttgcaacaggctctcgcgcagcgagatgaagagttaaggcaccagcaagaacgagaacaactgttagaaaagtccctcgcccagcgcgtgcaggagaacatgattcaagagaaacaaaacctcggccaggagcgggaggaagaggaaattcgaggcctccatcagagtgttcgggagctgcaactgacgcttgcccaaaaggaacaggagatccttgagctcagggagactcagcagcgtaataacctggaggccctgcctcactcccacaagacctctcctatggaagagcagtcgctgaagttggatagccttgagcccagactccagagagaattggaacggctacaggctgccctgaggcagacagaagccagggagatcgagtggagagagaaagcccaggaccttgccctatctctagcgcagactaaggcctcggtctcctcactccaggaagtagcaatgtttctacaggccagtgtgctcgagcgggattcagaacagcagcggctccaggatgagctggaactgacacggagagctctcgaaaaagaaaggttgcatagccctggtgcaacgtccaccgctgaactgggaagccggggagagcagggagtgcaattgggtgaagtttctggagtggaggctgagccgagccctgatggaatggaaaagcaatcatggagacagaggctggagcacctccagcaggctgtggcgaggctggagattgacagatccaggctgcagcggcataatgttcagttgcgctccaccctggaacaggtcgagcgcgagcgcaggaagttaaagagggaggccatgagggccgctcaggctggttctctggaaatttctaaagcaaccgcttctagtcccacccagcaggatggacggggacaaaaaaactcagatgctaaatgcgtggctgaactgcaaaaagaagtagtcctgttgcaggcacagctaactctcgagcgcaagcagaaacaagactacattactagaagcgcacaaacttccagagagcttgcaggtctgcaccactctctgtctcactctctgctagctgtagcacaagccccagaagctacagtcttggaggcggagaccaggcggctagatgagtctcttacgcagtccttgacatcacctggccctgtgttactgcacccgtcaccttccacaacgcaggcggcatcccgata

SEQ ID NO: 170818 - DNA, 2055 bp, Artificial Sequence
  derived and/or modified sequence
atggaaacccggtcccctggcctgaacaatatgaagccacagtcactgcagctggtcctggaggagcaggtgctagccctccagcagcaaatggccgagaaccaggcagccagctggagaaaactcaagaattcccaggaggcccagcaaagacaggcaaccctggtcaggaaacttcaagctaaggtgttgcagtatcggagctggtgtcaggagctggaaaagcggcttgaagcaacaggcggtcccataccacaaaggtgggaaaacgtggaggagcccaaccttgatgaactgctcgtgcgcttggaagaggaacaacagaggtgtgagtcacttgctgaagtaaacacgcaactcagactccatatggagaaagccgacgtagtcaacaaggcccttagagaggacgttgagaaactcaccgtagactggtcccgcgctagggatgagcttatgcgtaaggagtcacaatggcagatggagcaagaatttttcaagggctacctgaaaggggaacatggcaggctgcttagtttgtggagggaggtcgtcacgtttcgaaggcattttctcgagatgaaatcagcgaccgacagggacctcatggaactgaaggcagaacacgtgaggctttctgggtcattactgacttgctgtttgcggctcacagtcggagctcagagccgggagccaaacggctccggtcgcatggatggacgcgagccagctcagcttcttcttttactagcaaagacccaggaactcgagaaggaagcacatgaacgatcacaagagttgattcagctgaaaagccagggcgatctggagaaggccgaactccaggaccgtgtgaccgagttgtcagcactgttgacacaatctcaaaagcagaacgaggactatgagaagatgatcaaggcgcttcgggagacagttgagatccttaccaaccacaccgaattgatggagcacgaagcctccctgagccggaatgcccaagaagaaaagctctcactccagcaggtgattaaagacatcacccaggtgatggtagaggaaggcgataacattgcacaggggtccggacatgagaattccctggaactggattcctctatcttctcacagttcgactaccaggacgccgataaagctttaacactcgtacgttccgttctcacacggcgtcgacaagcagtccaagatctgcgccaacagctggcgggttgccaagaggctgttaatcttttgcagcaacaacatgaccagtgggaagaggaaggaaaagctctgaggcaaaggctgcaaaagctaacaggcgaacgtgacactctcgcgggtcagacagtcgatctgcagggagaagtggactctctgagtaaagaacgggagctgcttcaaaaagctcgcgaagagctgcgacagcaactcgaggtccttgaacaagaggcctggaggctgcggagggtgaatgtggagctgcaactgcagggcgacagcgctcagggccagaaagaggagcagcaagaggaacttcacttagcagtgcgcgagcgcgagaggctacaagaaatgctgatgggactcgaggcaaagcagagcgagtctttgtctgagcttatcaccctgcgcgaggctttagagtccagtcacctggagggcgagcttctgcgccaggagcagacagaggtcaccgcggcactcgccagggccgagcagagcatcgcagagctgtcatcctccgaaaacacgctcaaaacagaggtggccgacttgcgagcagcagctgtgaaattgtcagcccttaacgaggcactggcgctggataaagtcggactcaaccagcagctactgcaactggaagaagaaaatcagagcgtgtgttcccgaatggaggctgcagaacaggccagaaacgccctgcaggttgatctagcagaagcagaaaagagaagggaagctttatgggagaaaaatacacatctggaggcacaactgcaaaaggctgaggaggctggcgctgagcttcaagccgacctcagagacatctag

SEQ ID NO: 170819 - DNA, 8398 bp, Artificial Sequence
  derived and/or modified sequence
cgttcgggcagcggcctcttgttacccgggaggaacccgaggcccagagaggggctgggacgcgtcgttagggcccggggcccgcttgcctcagcttcttgctgccgccagcacgctaagctccagtcggcgccgaaggagagcttcccgaccctcgtgtccagtagccgcaatcccaggctgggagggtgaggcgccgcgctctgccgcccccccgcccctcgctccctgtgtcctggcggatttgcacgtaatctatccgaaagcccagtcccacccgccacccgactctggagctcccattcttcaggaccctgctgaagtatcgcttctcagccgccttctccaggcgcagctgcattcgcttctcggtttttgcactcgctgtgcaccgagttactttcccggcccctcgttgacaccgttcacaggtggctgttggtctttagtaagggtgctgtcttccctgtctgatccttagcaaaagtaggaaggtagagttgttggcagaaatcctgggataagagaatagtttcctggaagatctgtgcctccaaccagcagagagggattgagcttcattgaactcaacagagccaacatttcatagcaccatgttcaagaggaggttgaagtggcatggcaatggttagagaccctgctgggcgtgaacaccctctggctacctagggacctgtgggcctaccacctggtgccctcatggagacaagaagccctgggttgaacaacatgaagccccagtcactgcagctggtactggaagagcaggtgctggcactacagcagcagatggcagagaatcaggcagcctcctggcggaagctgaagaactcccaggaggcccagcagagacaagcaacccttgtgaggaagctgcaggccaaggtgctgcagtaccgaagctggtgccaagagctggagaagcggctagaagccactggaggaccaatcccccagaggtgggaaaatgtggaggagccaaacctggatgagctgctggtccgattggaggaggagcaacagaggtgtgagagtctagcagaggtgaacacccagcttcgactgcacatggaaaaagctgacgtggtgaataaagcccttagggaagatgtggaaaaactgacagtggactggagccgggcccgggatgagctaatgaggaaggagagccagtggcagatggagcaggagttcttcaagggctacctgaaaggggagcacggtcgccttctcagtctatggcgggaggttgtgacattccgacgccacttcctggaaatgaagtcagctactgacagagatctgatggagctaaaagctgagcatgtgaggctttcagggtctctgttgacctgttgtctgcgcttgactgtgggagcacagtctcgggaacccaacggatctggaagaatggatgggcgggagccggcccagctgctgctgctactagccaagacccaggagctggagaaggaagcccatgaaaggagccaggagttaatacagctgaagagtcaaggggatctggagaaggctgaacttcaggaccgggtgaccgagctctctgctctgttgacccagtctcagaagcaaaatgaagattatgaaaagatgataaaggctctgagagagacagtggagatcctggagacaaatcacacagaattaatggaacatgaagcatctcttagtaggaatgcgcaagaggagaagttgtctttacagcaggtgatcaaggatataacccaggtcatggtggaagaaggggacaatatagcccaaggctctggtcatgagaactctttggaattggactctagtatcttctcccagtttgattaccaggatgcagacaaggctcttactctggtgcgttcagtgctgactcggagacgccaggctgtgcaggacctaaggcagcagcttgcaggctgtcaagaggctgtgaacttgttgcaacagcagcatgatcagtgggaggaagagggcaaagccttgagacagcggctgcagaagctcactggggagcgggacactctggcagggcagactgtggacctccagggagaggtggactctctcagcaaggagcgagagctgctgcagaaggccagggaagagctgcggcagcagctggaggtgctagagcaggaggcatggcgcctgcgaagggtaaatgtggagcttcagctgcagggggactctgcccagggccagaaggaggaacagcaggaggagctgcacctggctgtccgggagagggagcgtcttcaggagatgctgatgggcctggaagccaaacagtcagaatcactcagtgaactgatcactcttcgggaagccctggagtcaagtcacctggaaggggagttactgaggcaagagcaaacggaagtgaccgcagcgctggctagggcagagcagtcaattgcagagctgtcgagttctgaaaacaccctgaagacagaagtagctgatcttcgggctgcagctgtcaagctcagtgccttaaatgaggctttggcgttagataaagttgggctgaaccagcagcttctccagttagaggaggagaaccagtctgtgtgcagcagaatggaggccgcagagcaggcgagaaatgctttgcaggtcgacctggcggaggcagagaagaggagggaagccctgtgggaaaagaacactcacctggaggctcagctgcagaaagctgaggaggctggggctgagctgcaggcagatctcagggacatccaagaagagaaggaagaaattcaaaagaaactaagtgagtcacgtcaccagcaggaggcagccacgactcagctggagcagctacatcaggaggcaaagcgacaggaagaagtgcttgccagggcagtccaggagaaggaggccctagtacgagagaaagcggctctagaggtgcggctgcaggccgtggagcgtgaccggcaggacctcgctgaacaactacaggggctcagctcagccaaggagctactggagagcagtctgtttgaagcccaacaacaaaattctgtgatagaggtcaccaaggggcagctggaggtccagattcaaactgtcactcaagccaaggaagtaatccaaggggaagtgaggtgcctgaagctggaactggacactgaacggagtcaggcagagcaggagcgggatgctgcagccagacagctggcccaggctgagcaagaagggaagactgccttggagcagcagaaggcagcccatgagaaagaggtgaaccagctccgggagaaatgggagaaggagcgctcctggcaccagcaggagctggcaaaggctctggagagcttagaaagggaaaaaatggagctggaaatgaggctaaaggagcagcagacagaaatggaggccatccaggcccagagggaagaagaacggacccaggcagagagtgccctatgccagatgcagctggaaacagagaaggagagagtatccctcctggagacactgctgcagacgcagaaggagctagcagatgccagccaacaactggaacgactgaggcaggacatgaaagtccagaaattaaaggagcaggagaccactgggatactacagacccagctccaggaggctcaacgggagctgaaggaggcagcccggcagcacagagatgaccttgctgccctccaagaagagagcagctccctgctgcaggataagatggacctgcagaagcaggtggaggacttgaagtctcagctggtggcccaggatgactcccagaggctggtggagcaggaggttcaggagaagctgagagagacccaggagtataaccgaattcagaaggagctggagagagagaaagccagcctgactctgtcactgatggaaaaggaacagagactccttgttttacaagaagctgactctattcgacaacaagagctgagtgccctgcgccaggacatgcaggaggcccagggagaacagaaagagctcagtgctcagatggaattactaaggcaagaggtgaaggaaaaggaggctgactttctggcccaggaagcacagctgctggaggagctggaggcgtctcatatcacggagcagcagctgcgagcctccttgtgggcccaggaagccaaggcagcccaactacagctgcgactgcgcagcacagagagccagctagaagcgctggccgcagagcagcagcccgggaaccaggcccaggcccaggcccagctggccagcctctactctgccctgcagcaggccctggggtctgtttgtgagagcaggcctgagctgagtggtgggggagactctgctccttccgtctggggccttgagccagaccagaatggagctaggagcctctttaagagagggcccctgctgactgctctctccgctgaggcagtagcatctgccctccacaagcttcatcaagacctgtggaagactcaacagacccgggatgttctgagggatcaggtccagaaactggaagagcgtctaactgatactgaggctgagaagagccaggtccacacagagttgcaggatctgcagagacagctctcccagaatcaggaagagaaatccaagtgggaaggaaagcagaactccctagaatctgagctgatggaactacatgaaactatggcatccttacagagtcgcctgcggagagcagagctacagcgaatggaagcccagggtgagcgagagttacttcaggcagccaaggagaacctgacagcccaggtggaacacctgcaagcagctgtcgtagaagccagggctcaggcaagtgctgctggcatcctggaagaagacctgagaacggctcgctcagcactgaagctgaaaaatgaggaagtagagagtgagcgtgagagagcccaggctctgcaagagcagggcgaactgaaggtggcccaagggaaggctctgcaagagaatttggccctcctgacccagaccctagctgaaagagaagaggaggtggagactctgcggggacaaatccaggaactggagaagcaacgggaaatgcagaaggctgctttggaattgctgtctctggacctgaagaagaggaaccaagaggtagatctgcagcaagaacagattcaggagctagagaagtgtaggtctgttttagagcatctgcccatggccgtccaggagcgagagcagaagctgactgtgcagagggagcagatcagagagctcgagaaggatcgggagactcagaggaacgtcttggagcatcagcttctagaacttgagaagaaagaccaaatgattgagtcccagagaggacaggttcaggacctgaaaaagcagttggttactctggaatgcctggccctggaactggaggaaaaccatcacaagatggagtgccagcaaaaactgatcaaggagctggagggccagagggaaacccagagagtggctttgacccaccttacgctggacctagaagaaaggagccaggagctgcaggcacaaagcagccagatccatgacctggagagccacagcaccgttctggcaagagagctgcaggagagggaccaggaggtgaagtctcagcgagaacagatcgaggagctgcagaggcagaaagagcatctgactcaggatctcgagaggagagaccaggagctgatgctgcagaaggagaggattcaggttctcgaggatcagaggacccggcagaccaagatcctggaggaggacctggaacagatcaagctgtccttgagagagcgaggccgggagctgaccactcagaggcagctgatgcaggaacgggcagaggaagggaagggcccaagtaaagcacagcgcgggagcctagagcacatgaagctgatcctgcgtgataaggagaaggaggtggaatgtcagcaggagcatatccatgaactccaggagctcaaagaccagctggagcagcagctccagggcctgcacaggaaggtaggtgagaccagcctcctcctgtcccagcgagagcaggaaatagtggtcctgcagcagcaactgcaggaagccagggaacaaggggagctgaaggagcagtcacttcagagtcaactggatgaggcccagagagccctagcccagagggaccaggaactggaggctctgcagcaagaacagcagcaggcccagggacaggaggagagggtgaaggaaaaggcagacgccctccagggagctctggagcaagcccatatgacactgaaggagcgtcatggagagcttcaggaccacaaggaacaggcacgaaggctggaggaagagctggcagtggagggacggcgggtccaggccctggaggaggtgctgggagacctaagggctgagtctcgggaacaggagaaagctctgttggccctccagcagcagtgtgctgagcaggcacaggagcatgaggtggagaccagggccctgcaggacagctggctgcaggcccaggcagtgctcaaggaacgggaccaggagctggaagctctgcgggcagaaagtcagtcctcccggcatcaggaggaggctgcccgggcccgggctgaggctctgcaggaggcccttggcaaggctcatgctgccctgcaggggaaagagcagcatctcctcgagcaggcagaattgagccgcagtctggaggccagcactgcaaccctgcaagcctccctggatgcctgccaggcacacagtcggcagctggaggaggctctgaggatacaagaaggtgagatccaggaccaggatctccgataccaggaggatgtgcagcagctgcagcaggcacttgcccagagggatgaagagctgagacatcagcaggaacgggagcagctgctggagaagtctctggcccagagggtccaagagaatatgatccaagagaagcagaatctggggcaagagagagaagaggaggagataaggggccttcatcagagtgtaagggagctacagctgactctagcccaaaaggaacaggagattctggagctgagggagacccagcaaaggaacaacctggaagccttaccccacagccacaaaacctccccaatggaggaacaatctctaaaacttgattctttagagcccaggctgcagcgggagctggagcggctacaggcagccctgagacagacagaagccagggagattgagtggagggagaaggcccaggacttggcactctccctagcgcagaccaaggccagtgtcagcagtctgcaggaggtagccatgttcctacaagcctctgtcctggagcgggactcagaacagcaaaggctgcaggatgaactggagctcaccagacgggctctggagaaggagcggctacacagcccaggtgcaaccagcacagcagaactggggtccagaggggagcagggtgtgcagctgggagaggtctcaggagtggaggctgagcctagtcctgatggaatggagaagcagtcatggagacaaaggcttgaacacctgcagcaagcagtggcccggctggagattgacaggagcaggctgcagcgccacaatgtccagctgcggagtaccttggagcaggtggagcgagaacggaggaagctgaagagggaggccatgcgtgcggcccaggcagggtccctagagatcagcaaggccacggcttcttcacccacacagcaggatgggagaggacagaagaactcagatgccaagtgtgtggctgaactgcagaaagaggtggtcctgctgcaagctcagctgactttggagcggaagcagaagcaggactacatcacccgctcagcacagaccagccgtgagctagcaggcctgcaccacagcctctcacactcacttcttgccgtggcccaggcccctgaggccactgtcctggaggcagagacccgcaggctggatgagtccctgactcaaagtctgacatccccagggccagtcctgctacaccccagccccagcactacccaagccgcctccaggtagcagccacagccaggagcacacagacagaagactgtgtcatgggtcatggcccctccgcacacctacaggtttgccaaaggaaaagcctggctctgttaggcacccaggagccccaggtcggcgggtgttcccaggaagaggaagtaaatctgcaaccctggggaggaccccaactcacctgggaatgaggcaaattgcatttgcttgctccctatggaatcacccagaggggtgccttgccctggctgagggacatgtactgcctctcatctagaatttattttcctagcacttcaccacctccttcatcttctccttcaacaataaaccctgagatctttgcattcat

SEQ ID NO: 170820 - DNA, 2156 bp, Artificial Sequence
  derived and/or modified sequence
ttcaagaggaggttgaagtggcatggcaatggttagagaccctgctgggcgtgaacaccctctggctacctagggacctgtgggcctaccacctggtgccctcatggagacaagaagccctgggttgaacaacatgaagccccagtcactgcagctggtactggaagagcaggtgctggcactacagcagcagatggcagagaatcaggcagcctcctggcggaagctgaagaactcccaggaggcccagcagagacaagcaacccttgtgaggaagctgcaggccaaggtgctgcagtaccgaagctggtgccaagagctggagaagcggctagaagccactggaggaccaatcccccagaggtgggaaaatgtggaggagccaaacctggatgagctgctggtccgattggaggaggagcaacagaggtgtgagagtctagcagaggtgaacacccagcttcgactgcacatggaaaaagctgacgtggtgaataaagcccttagggaagatgtggaaaaactgacagtggactggagccgggcccgggatgagctaatgaggaaggagagccagtggcagatggagcaggagttcttcaagggctacctgaaaggggagcacggtcgccttctcagtctatggcgggaggttgtgacattccgacgccacttcctggaaatgaagtcagctactgacagagatctgatggagctaaaagctgagcatgtgaggctttcagggtctctgttgacctgttgtctgcgcttgactgtgggagcacagtctcgggaacccaacggatctggaagaatggatgggcgggagccggcccagctgctgctgctactagccaagacccaggagctggagaaggaagcccatgaaaggagccaggagttaatacagctgaagagtcaaggggatctggagaaggctgaacttcaggaccgggtgaccgagctctctgctctgttgacccagtctcagaagcaaaatgaagattatgaaaagatgataaaggctctgagagagacagtggagatcctgacaaatcacacagaattaatggaacatgaagcatctcttagtaggaatgcgcaagaggagaagttgtctttacagcaggtgatcaaggatataacccaggtcatggtggaagaaggggacaatatagcccaaggctctggtcatgagaactctttggaattggactctagtatcttctcccagtttgattaccaggatgcagacaaggctcttactctggtgcgttcagtgctgactcggagacgccaggctgtgcaggacctaaggcagcagcttgcaggctgtcaagaggctgtgaacttgttgcaacagcagcatgatcagtgggaggaagagggcaaagccttgagacagcggctgcagaagctcactggggagcgggacactctggcagggcagactgtggacctccagggagaggtggactctctcagcaaggagcgagagctgctgcagaaggccagggaagagctgcggcagcagctggaggtgctagagcaggaggcatggcgcctgcgaagggtaaatgtggagcttcagctgcagggggactctgcccagggccagaaggaggaacagcaggaggagctgcacctggctgtccgggagagggagcgtcttcaggagatgctgatgggcctggaagccaaacagtcagaatcactcagtgaactgatcactcttcgggaagccctggagtcaagtcacctggaaggggagttactgaggcaagagcaaacggaagtgaccgcagcgctggctagggcagagcagtcaattgcagagctgtcgagttctgaaaacaccctgaagacagaagtagctgatcttcgggctgcagctgtcaagctcagtgccttaaatgaggctttggcgttagataaagttgggctgaaccagcagcttctccagttagaggaggagaaccagtctgtgtgcagcagaatggaggccgcagagcaggcgagaaatgctttgcaggtcgacctggcggaggcagagaagaggagggaagccctgtgggaaaagaacactcacctggaggctcagctgcagaaagctgaggaggctggggctgagctgcaggcagatctcagggacatcc

SEQ ID NO: 170821 - DNA, 7329 bp, Artificial Sequence
  derived and/or modified sequence
atggagaccagaagccccggcctgaacaacatgaagccccagagcctgcagctggtgctggaggagcaggtgctggccctgcagcagcagatggccgagaaccaggccgccagctggagaaagctgaagaacagccaggaggcccagcagagacaggccaccctggtgagaaagctgcaggccaaggtgctgcagtacagaagctggtgccaggagctggagaagagactggaggccaccggcggccccatcccccagagatgggagaacgtggaggagcccaacctggacgagctgctggtgagactggaggaggagcagcagagatgcgagagcctggccgaggtgaacacccagctgagactgcacatggagaaggccgacgtggtgaacaaggccctgagagaggacgtggagaagctgaccgtggactggagcagagccagagacgagctgatgagaaaggagagccagtggcagatggagcaggagttcttcaagggctacctgaagggcgagcacggcagactgctgagcctgtggagagaggtggtgaccttcagaagacacttcctggagatgaagagcgccaccgacagagacctgatggagctgaaggccgagcacgtgagactgagcggcagcctgctgacctgctgcctgagactgaccgtgggcgcccagagcagagagcccaacggcagcggcagaatggacggcagagagcccgcccagctgctgctgctgctggccaagacccaggagctggagaaggaggcccacgagagaagccaggagctgatccagctgaagagccagggcgacctggagaaggccgagctgcaggacagagtgaccgagctgagcgccctgctgacccagagccagaagcagaacgaggactacgagaagatgatcaaggccctgagagagaccgtggagatcctggagaccaaccacaccgagctgatggagcacgaggccagcctgagcagaaacgcccaggaggagaagctgagcctgcagcaggtgatcaaggacatcacccaggtgatggtggaggagggcgacaacatcgcccagggcagcggccacgagaacagcctggagctggacagcagcatcttcagccagttcgactaccaggacgccgacaaggccctgaccctggtgagaagcgtgctgaccagaagaagacaggccgtgcaggacctgagacagcagctggccggctgccaggaggccgtgaacctgctgcagcagcagcacgaccagtgggaggaggagggcaaggccctgagacagagactgcagaagctgaccggcgagagagacaccctggccggccagaccgtggacctgcagggcgaggtggacagcctgagcaaggagagagagctgctgcagaaggccagagaggagctgagacagcagctggaggtgctggagcaggaggcctggagactgagaagagtgaacgtggagctgcagctgcagggcgacagcgcccagggccagaaggaggagcagcaggaggagctgcacctggccgtgagagagagagagagactgcaggagatgctgatgggcctggaggccaagcagagcgagagcctgagcgagctgatcaccctgagagaggccctggagagcagccacctggagggcgagctgctgagacaggagcagaccgaggtgaccgccgccctggccagagccgagcagagcatcgccgagctgagcagcagcgagaacaccctgaagaccgaggtggccgacctgagagccgccgccgtgaagctgagcgccctgaacgaggccctggccctggacaaggtgggcctgaaccagcagctgctgcagctggaggaggagaaccagagcgtgtgcagcagaatggaggccgccgagcaggccagaaacgccctgcaggtggacctggccgaggccgagaagagaagagaggccctgtgggagaagaacacccacctggaggcccagctgcagaaggccgaggaggccggcgccgagctgcaggccgacctgagagacatccaggaggagaaggaggagatccagaagaagctgagcgagagcagacaccagcaggaggccgccaccacccagctggagcagctgcaccaggaggccaagagacaggaggaggtgctggccagagccgtgcaggagaaggaggccctggtgagagagaaggccgccctggaggtgagactgcaggccgtggagagagacagacaggacctggccgagcagctgcagggcctgagcagcgccaaggagctgctggagagcagcctgttcgaggcccagcagcagaacagcgtgatcgaggtgaccaagggccagctggaggtgcagatccagaccgtgacccaggccaaggaggtgatccagggcgaggtgagatgcctgaagctggagctggacaccgagagaagccaggccgagcaggagagagacgccgccgccagacagctggcccaggccgagcaggagggcaagaccgccctggagcagcagaaggccgcccacgagaaggaggtgaaccagctgagagagaagtgggagaaggagagaagctggcaccagcaggagctggccaaggccctggagagcctggagagagagaagatggagctggagatgagactgaaggagcagcagaccgagatggaggccatccaggcccagagagaggaggagagaacccaggccgagagcgccctgtgccagatgcagctggagaccgagaaggagagagtgagcctgctggagaccctgctgcagacccagaaggagctggccgacgccagccagcagctggagagactgagacaggacatgaaggtgcagaagctgaaggagcaggagaccaccggcatcctgcagacccagctgcaggaggcccagagagagctgaaggaggccgccagacagcacagagacgacctggccgccctgcaggaggagagcagcagcctgctgcaggacaagatggacctgcagaagcaggtggaggacctgaagagccagctggtggcccaggacgacagccagagactggtggagcaggaggtgcaggagaagctgagagagacccaggagtacaacagaatccagaaggagctggagagagagaaggccagcctgaccctgagcctgatggagaaggagcagagactgctggtgctgcaggaggccgacagcatcagacagcaggagctgagcgccctgagacaggacatgcaggaggcccagggcgagcagaaggagctgagcgcccagatggagctgctgagacaggaggtgaaggagaaggaggccgacttcctggcccaggaggcccagctgctggaggagctggaggccagccacatcaccgagcagcagctgagagccagcctgtgggcccaggaggccaaggccgcccagctgcagctgagactgagaagcaccgagagccagctggaggccctggccgccgagcagcagcccggcaaccaggcccaggcccaggcccagctggccagcctgtacagcgccctgcagcaggccctgggcagcgtgtgcgagagcagacccgagctgagcggcggcggcgacagcgcccccagcgtgtggggcctggagcccgaccagaacggcgccagaagcctgttcaagagaggccccctgctgaccgccctgagcgccgaggccgtggccagcgccctgcacaagctgcaccaggacctgtggaagacccagcagaccagagacgtgctgagagaccaggtgcagaagctggaggagagactgaccgacaccgaggccgagaagagccaggtgcacaccgagctgcaggacctgcagagacagctgagccagaaccaggaggagaagagcaagtgggagggcaagcagaacagcctggagagcgagctgatggagctgcacgagaccatggccagcctgcagagcagactgagaagagccgagctgcagagaatggaggcccagggcgagagagagctgctgcaggccgccaaggagaacctgaccgcccaggtggagcacctgcaggccgccgtggtggaggccagagcccaggccagcgccgccggcatcctggaggaggacctgagaaccgccagaagcgccctgaagctgaagaacgaggaggtggagagcgagagagagagagcccaggccctgcaggagcagggcgagctgaaggtggcccagggcaaggccctgcaggagaacctggccctgctgacccagaccctggccgagagagaggaggaggtggagaccctgagaggccagatccaggagctggagaagcagagagagatgcagaaggccgccctggagctgctgagcctggacctgaagaagagaaaccaggaggtggacctgcagcaggagcagatccaggagctggagaagtgcagaagcgtgctggagcacctgcccatggccgtgcaggagagagagcagaagctgaccgtgcagagagagcagatcagagagctggagaaggacagagagacccagagaaacgtgctggagcaccagctgctggagctggagaagaaggaccagatgatcgagagccagagaggccaggtgcaggacctgaagaagcagctggtgaccctggagtgcctggccctggagctggaggagaaccaccacaagatggagtgccagcagaagctgatcaaggagctggagggccagagagagacccagagagtggccctgacccacctgaccctggacctggaggagagaagccaggagctgcaggcccagagcagccagatccacgacctggagagccacagcaccgtgctggccagagagctgcaggagagagaccaggaggtgaagagccagagagagcagatcgaggagctgcagagacagaaggagcacctgacccaggacctggagagaagagaccaggagctgatgctgcagaaggagagaatccaggtgctggaggaccagagaaccagacagaccaagatcctggaggaggacctggagcagatcaagctgagcctgagagagagaggcagagagctgaccacccagagacagctgatgcaggagagagccgaggagggcaagggccccagcaaggcccagagaggcagcctggagcacatgaagctgatcctgagagacaaggagaaggaggtggagtgccagcaggagcacatccacgagctgcaggagctgaaggaccagctggagcagcagctgcagggcctgcacagaaaggtgggcgagaccagcctgctgctgagccagagagagcaggagatcgtggtgctgcagcagcagctgcaggaggccagagagcagggcgagctgaaggagcagagcctgcagagccagctggacgaggcccagagagccctggcccagagagaccaggagctggaggccctgcagcaggagcagcagcaggcccagggccaggaggagagagtgaaggagaaggccgacgccctgcagggcgccctggagcaggcccacatgaccctgaaggagagacacggcgagctgcaggaccacaaggagcaggccagaagactggaggaggagctggccgtggagggcagaagagtgcaggccctggaggaggtgctgggcgacctgagagccgagagcagagagcaggagaaggccctgctggccctgcagcagcagtgcgccgagcaggcccaggagcacgaggtggagaccagagccctgcaggacagctggctgcaggcccaggccgtgctgaaggagagagaccaggagctggaggccctgagagccgagagccagagcagcagacaccaggaggaggccgccagagccagagccgaggccctgcaggaggccctgggcaaggcccacgccgccctgcagggcaaggagcagcacctgctggagcaggccgagctgagcagaagcctggaggccagcaccgccaccctgcaggccagcctggacgcctgccaggcccacagcagacagctggaggaggccctgagaatccaggagggcgagatccaggaccaggacctgagataccaggaggacgtgcagcagctgcagcaggccctggcccagagagacgaggagctgagacaccagcaggagagagagcagctgctggagaagagcctggcccagagagtgcaggagaacatgatccaggagaagcagaacctgggccaggagagagaggaggaggagatcagaggcctgcaccagagcgtgagagagctgcagctgaccctggcccagaaggagcaggagatcctggagctgagagagacccagcagagaaacaacctggaggccctgccccacagccacaagaccagccccatggaggagcagagcctgaagctggacagcctggagcccagactgcagagagagctggagagactgcaggccgccctgagacagaccgaggccagagagatcgagtggagagagaaggcccaggacctggccctgagcctggcccagaccaaggccagcgtgagcagcctgcaggaggtggccatgttcctgcaggccagcgtgctggagagagacagcgagcagcagagactgcaggacgagctggagctgaccagaagagccctggagaaggagagactgcacagccccggcgccaccagcaccgccgagctgggcagcagaggcgagcagggcgtgcagctgggcgaggtgagcggcgtggaggccgagcccagccccgacggcatggagaagcagagctggagacagagactggagcacctgcagcaggccgtggccagactggagatcgacagaagcagactgcagagacacaacgtgcagctgagaagcaccctggagcaggtggagagagagagaagaaagctgaagagagaggccatgagagccgcccaggccggcagcctggagatcagcaaggccaccgccagcagccccacccagcaggacggcagaggccagaagaacagcgacgccaagtgcgtggccgagctgcagaaggaggtggtgctgctgcaggcccagctgaccctggagagaaagcagaagcaggactacatcaccagaagcgcccagaccagcagagagctggccggcctgcaccacagcctgagccacagcctgctggccgtggcccaggcccccgaggccaccgtgctggaggccgagaccagaagactggacgagagcctgacccagagcctgaccagccccggccccgtgctgctgcaccccagccccagcaccacccaggccgccagcagatag

SEQ ID NO: 170822 - DNA, 2055 bp, Artificial Sequence
  derived and/or modified sequence
atggagaccagaagccccggcctgaacaacatgaagccccagagcctgcagctggtgctggaggagcaggtgctggccctgcagcagcagatggccgagaaccaggccgccagctggagaaagctgaagaacagccaggaggcccagcagagacaggccaccctggtgagaaagctgcaggccaaggtgctgcagtacagaagctggtgccaggagctggagaagagactggaggccaccggcggccccatcccccagagatgggagaacgtggaggagcccaacctggacgagctgctggtgagactggaggaggagcagcagagatgcgagagcctggccgaggtgaacacccagctgagactgcacatggagaaggccgacgtggtgaacaaggccctgagagaggacgtggagaagctgaccgtggactggagcagagccagagacgagctgatgagaaaggagagccagtggcagatggagcaggagttcttcaagggctacctgaagggcgagcacggcagactgctgagcctgtggagagaggtggtgaccttcagaagacacttcctggagatgaagagcgccaccgacagagacctgatggagctgaaggccgagcacgtgagactgagcggcagcctgctgacctgctgcctgagactgaccgtgggcgcccagagcagagagcccaacggcagcggcagaatggacggcagagagcccgcccagctgctgctgctgctggccaagacccaggagctggagaaggaggcccacgagagaagccaggagctgatccagctgaagagccagggcgacctggagaaggccgagctgcaggacagagtgaccgagctgagcgccctgctgacccagagccagaagcagaacgaggactacgagaagatgatcaaggccctgagagagaccgtggagatcctgaccaaccacaccgagctgatggagcacgaggccagcctgagcagaaacgcccaggaggagaagctgagcctgcagcaggtgatcaaggacatcacccaggtgatggtggaggagggcgacaacatcgcccagggcagcggccacgagaacagcctggagctggacagcagcatcttcagccagttcgactaccaggacgccgacaaggccctgaccctggtgagaagcgtgctgaccagaagaagacaggccgtgcaggacctgagacagcagctggccggctgccaggaggccgtgaacctgctgcagcagcagcacgaccagtgggaggaggagggcaaggccctgagacagagactgcagaagctgaccggcgagagagacaccctggccggccagaccgtggacctgcagggcgaggtggacagcctgagcaaggagagagagctgctgcagaaggccagagaggagctgagacagcagctggaggtgctggagcaggaggcctggagactgagaagagtgaacgtggagctgcagctgcagggcgacagcgcccagggccagaaggaggagcagcaggaggagctgcacctggccgtgagagagagagagagactgcaggagatgctgatgggcctggaggccaagcagagcgagagcctgagcgagctgatcaccctgagagaggccctggagagcagccacctggagggcgagctgctgagacaggagcagaccgaggtgaccgccgccctggccagagccgagcagagcatcgccgagctgagcagcagcgagaacaccctgaagaccgaggtggccgacctgagagccgccgccgtgaagctgagcgccctgaacgaggccctggccctggacaaggtgggcctgaaccagcagctgctgcagctggaggaggagaaccagagcgtgtgcagcagaatggaggccgccgagcaggccagaaacgccctgcaggtggacctggccgaggccgagaagagaagagaggccctgtgggagaagaacacccacctggaggcccagctgcagaaggccgaggaggccggcgccgagctgcaggccgacctgagagacatctag

SEQ ID NO: 170823 - protein, 718 aa, Artificial Sequence
  derived and/or modified sequence
MLVHLFRVGIRGGPFPGRLLPPLRFQTFSAVRYSDGYRSSSLLRAVAHLRSQLWAHLPRAPLAPRWSPSAWCWVGGALLGPMVLSKHPHLCLVALCEAEEAPPASSTPHVVGSRFNWKLFWQFLHPHLLVLGVAVVLALGAALVNVQIPLLLGQLVEVVAKYTRDHVGSFMTESQNLSTHLLILYGVQGLLTFGYLVLLSHVGERMAVDMRRALFSSLLRQDITFFDANKTGQLVSRLTTDVQEFKSSFKLVISQGLRSCTQVAGCLVSLSMLSTRLTLLLMVATPALMGVGTLMGSGLRKLSRQCQEQIARAMGVADEALGNVRTVRAFAMEQREEERYGAELEACRCRAEELGRGIALFQGLSNIAFNCMVLGTLFIGGSLVAGQQLTGGDLMSFLVASQTVQRSMANLSVLFGQVVRGLSAGARVFEYMALNPCIPLSGGCCVPKEQLRGSVTFQNVCFSYPCRPGFEVLKDFTLTLPPGKIVALVGQSGGGKTTVASLLERFYDPTAGVVMLDGRDLRTLDPSWLRGQVVGFISQEPVLFGTTIMENIRFGKLEASDEEVYTAAREANAHEFITSFPEGYNTVVGERGTTLSGGQKQRLAIARALIKQPTVLILDEATSALDAESERVVQEALDRASAGRTVLVIAHRLSTVRGAHCIVVMADGRVWEAGTHEELLKKGGLYAELIRRQALDAPRTAAPPPKKPEGPRSHQHKS

SEQ ID NO: 170824 - protein, 701 aa, Artificial Sequence
  derived and/or modified sequence
MLVHLFRVGIRGGPFPGRLLPPLRFQTFSAVRYSDGYRSSSLLRAVAHLRSQLWAHLPRALLGPMVLSKHPHLCLVALCEAEEAPPASSTPHVVGSRFNWKLFWQFLHPHLLVLGVAVVLALGAALVNVQIPLLLGQLVEVVAKYTRDHVGSFMTESQNLSTHLLILYGVQGLLTFGYLVLLSHVGERMAVDMRRALFSSLLRQDITFFDANKTGQLVSRLTTDVQEFKSSFKLVISQGLRSCTQVAGCLVSLSMLSTRLTLLLMVATPALMGVGTLMGSGLRKLSRQCQEQIARAMGVADEALGNVRTVRAFAMEQREEERYGAELEACRCRAEELGRGIALFQGLSNIAFNCMVLGTLFIGGSLVAGQQLTGGDLMSFLVASQTVQRSMANLSVLFGQVVRGLSAGARVFEYMALNPCIPLSGGCCVPKEQLRGSVTFQNVCFSYPCRPGFEVLKDFTLTLPPGKIVALVGQSGGGKTTVASLLERFYDPTAGVVMLDGRDLRTLDPSWLRGQVVGFISQEPVLFGTTIMENIRFGKLEASDEEVYTAAREANAHEFITSFPEGYNTVVGERGTTLSGGQKQRLAIARALIKQPTVLILDEATSALDAESERVVQEALDRASAGRTVLVIAHRLSTVRGAHCIVVMADGRVWEAGTHEELLKKGGLYAELIRRQALDAPRTAAPPPKKPEGPRSHQHKS

SEQ ID NO: 170825 - DNA, 2157 bp, Artificial Sequence
  derived and/or modified sequence
atgttggtgcatttattccgtgttgggattaggggtggcccgttcccaggaagactactgccacctcttcgtttccagacattttctgcagtccggtactccgacggctacagaagctccagcctgctgagggccgtcgcgcacctgcgaagtcaattatgggctcacctgccaagggcacctctggccccccgatggagccccagcgcctggtgctgggttgggggagcactcctggggcccatggttttgtctaaacatcctcacctttgcctcgtcgccctatgcgaggccgaagaggctcctcccgcctcatccaccccccacgtcgtcggatcgcgctttaactggaagctattttggcagttcctgcatccacacctcctcgttttaggagtcgccgttgtcttagctctgggcgcagccctcgtgaacgtgcagattccactgttgctgggacagctggtggaggtggtcgccaaatacacccgggatcatgtcggctccttcatgacggagtctcagaacctgtctacccatctgctgatcctgtacggagtgcagggcctgcttacgttcgggtacctggtgctactgtctcacgtgggggaacgaatggctgtggatatgagaagggcccttttcagttcactgcttaggcaagatattactttttttgacgcgaacaaaaccggccaactggttagcagactgaccactgacgtacaggaattcaagtcatcctttaagttagtgatcagccaggggctgcgatcctgcactcaggtagctggttgcctggtaagtttgtccatgctctctactcggctgacactcctgctgatggtggctaccccagctctaatgggcgtgggcaccctgatgggcagtggactgcgaaagttatcaagacagtgtcaggaacagatcgcccgcgctatgggggtcgccgacgaggctttaggcaacgtcagaacagttagagcttttgccatggagcagagagaagaggagcgttacggggcagagctggaagcttgtcgatgtcgtgctgaggagctgggacgtggcatcgccctctttcaaggcctctctaacatagctttcaattgtatggtgcttgggaccttgttcatcggcggctctctggtggccggccagcagttgacaggtggcgacctgatgtccttcctagtggcttcgcagaccgtacaaaggagtatggccaacctctcagttctctttggacaggtggtgcgaggtctctcggcaggagcacgggtcttcgagtacatggctctgaacccgtgcatccctctctctggaggatgttgtgtgcctaaggaacagcttcgcggctctgtgacttttcaaaatgtgtgcttcagttacccgtgtcggcctgggttcgaggtcctcaaagactttacgttgaccctcccccctgggaagatcgtagctttggttggtcagagtgggggcggcaagaccaccgtcgcctcccttttagagaggttttacgatcctactgccggggtcgtgatgctggatggccgggaccttcgtactctggacccatcctggctgcggggccaagtcgtgggcttcatctcgcaggaaccagtcctttttggaaccacaattatggagaatataaggtttgggaagctcgaggcaagtgatgaggaagtctatacagccgcccgtgaagcaaatgcccacgagttcattacgtcctttccagaggggtataacaccgtagtcggtgagcggggcactactctcagtgggggccagaagcaaagactggcaatcgccagggccttgatcaagcaacccactgttctaatcttagacgaggcaacctcggcgctcgacgcagaatctgaaagagttgttcaggaagcgctggacagggcaagtgcaggtaggaccgttttagtaattgcacaccgtcttagcaccgtccgaggagcccactgtattgtagtgatggctgatggacgggtttgggaagcaggaacgcacgaggaacttttgaaaaagggtgggctgtatgcagagcttatccgaaggcaggccctggatgcgccacggacggctgctccgcccccaaagaagcccgagggtccacggagtcatcaacataaaagctag

SEQ ID NO: 170826 - DNA, 2106 bp, Artificial Sequence
  derived and/or modified sequence
atgctagtacacctctttagggtggggatcaggggcggtccattccccggcaggctcttgccccccttacgattccaaactttctcagccgttcgctactctgacgggtaccggagcagctcactgctgcgggcagtggcccatcttcggtcccagttgtgggcccatctgcctcgagccctgctggggccaatggttctcagcaaacacccacatctttgcttggtagctctgtgtgaggcagaggaggccccccctgcgtccagtacaccgcacgtggtcggcagcagatttaactggaagcttttttggcagttcctccacccacacctgctcgtgcttggggtggccgtggtgcttgccctaggtgcagcactggtcaatgtccagatccccttgttgttaggacagctggtggaggtggtcgcaaagtatacccgggaccacgttgggtcttttatgactgaaagccagaacctgagtactcacctgttaatattatacggcgtgcaggggctgctgacgttcgggtacctggtgctcctctcccacgtcggggagcgcatggctgtagatatgcgtcgagctctcttcagtagcttgcttcgtcaggatataacttttttcgacgcgaacaagacagggcagctggtgtccaggctcaccacagatgtccaggagtttaaaagctccttcaagcttgttataagccagggactgagatcctgcacccaggtggccgggtgtctcgtgtccctttctatgctgtcaaccaggctgactttgcttttgatggtggctacacctgcgctcatgggggtggggaccttgatgggcagtggcttgcgaaagctgtctcgccaatgtcaggagcagatagcccgggcgatgggcgtggctgatgaagccctgggaaacgtccgtacggtccgggcattcgcaatggaacaaagggaggaggagcgatacggcgctgaactggaggcatgcagatgccgcgccgaagaactgggtagaggtatcgccctcttccaaggcctgtctaacatcgccttcaattgtatggtactggggaccctgttcattggtggatctctggtagcagggcagcagctgactggaggcgatctcatgtccttcctggtggctagtcagactgtgcagaggtcaatggccaatctcagtgttctgttcgggcaagttgtgcgaggactaagcgccggcgcgagagtttttgagtatatggccctgaatccctgtatcccacttagcggcggctgttgcgttcctaaggagcaactgagaggatccgttacctttcagaatgtttgcttcagctacccgtgtcgcccaggttttgaagtgcttaaagacttcacacttaccctgccccctgggaaaatcgtggcgttagtgggacagtccgggggaggaaagaccactgtcgcctctttgctggagcgcttctacgaccctacagccggcgtcgtgatgttggatggtcgggatctacggacactggacccaagttggctgcggggccaggtggtgggctttatatcccaggagccagtgctcttcggcacaacaataatggaaaacattcgatttggcaagctggaggccagtgatgaggaagtttacactgctgcgagagaagccaacgcccacgagttcatcaccagttttcctgaggggtacaacaccgtggtgggtgagaggggcaccactctctcaggagggcagaaacagcgcctggctattgcgagagcgttaatcaaacagcctactgtactgatcctcgatgaggcgacctcagccctggacgctgaaagcgaacgcgtggtacaggaggcactcgatagagcatctgccggtaggacagtgctggtcatcgcccatagactcagtaccgtacgcggagcacactgcattgtcgtcatggctgacggtagggtgtgggaagccggcacacacgaggaattgctgaagaaggggggactatatgcggaattgattagacgccaggcattggacgccccaaggaccgccgcccctccacccaaaaagcccgagggccctaggtcccatcagcacaagtcctag

SEQ ID NO: 170827 - DNA, 2157 bp, Artificial Sequence
  derived and/or modified sequence
atgctggtgcacctgttccgggtgggcatccggggcggccccttccctggccgcctgctgccccccctgcgcttccagaccttctctgctgtgcgctacagtgatggctaccgcagcagcagcctgctgcgggctgtggcccacctgcggagccagctgtgggcccacctgccccgggcccccctggccccccgctggagccccagcgcctggtgctgggtgggcggggccctgctgggccccatggtgctgagcaagcacccccacctgtgcctggtggccctgtgtgaggccgaggaggcccccccagccagcagcacccctcatgtggtgggcagccgcttcaactggaagctgttctggcagttcctgcacccccacctgctggtgctgggcgtggccgtggtgctggccctgggcgccgccctggtgaatgtgcagatccccctgctgctgggccagctggtggaggtggtggccaagtacacccgggaccacgtgggcagcttcatgacagagagccagaacctgagcacccacctgctgatcctgtatggagtgcagggcctgctgaccttcggctacctggtgctgctgagccacgtgggggagaggatggctgtggacatgagaagagccctcttcagcagcctgctgcggcaggacatcaccttctttgatgccaacaagacaggccagctggtgtcccggctgaccacagatgtgcaggagttcaagagcagcttcaagctggtgatcagccagggcctgcggagctgcacccaggtggccggctgcctggtgtccctgtccatgctgagcacccggctgaccctgctgctgatggtggccaccccagccctgatgggcgtgggcaccctgatgggcagcggcctgaggaagctgagccggcagtgccaggagcagatcgcccgggccatgggcgtggctgatgaggccctgggcaatgtgaggacagtgcgggcctttgccatggagcagcgggaggaggagcgctacggggctgagctggaggcctgccgctgcagagctgaggagctgggccggggcatcgccctcttccagggcctgagcaacatcgccttcaactgcatggtgctgggcaccctcttcatcggcggcagcctggtggccggccagcagctgaccggcggggacctgatgtccttcctggtggccagccagacagtgcagaggtccatggccaacctgtctgtgctgtttggccaggtggtgcggggcctgtctgctggggcccgggtgtttgagtacatggccctgaacccctgcatccccctgagcggcggctgctgcgtgcccaaggagcagctgcggggctctgtgaccttccagaatgtgtgcttctcctacccctgccggcccggctttgaggtgctgaaggacttcaccctgaccctgcccccaggcaagatcgtggccctggtgggccagagcggcggcggcaagaccaccgtggccagcctgctggagcgcttctatgaccccacagctggggtggtgatgctggatggccgggacctgcggaccctggaccccagctggctgcggggccaggtggtgggcttcatcagccaggagcctgtgctgtttggcaccaccatcatggagaacatccgctttgggaagctggaggccagtgatgaggaggtgtacacagctgcccgggaggccaatgcccacgagttcatcaccagcttccctgagggctacaacacagtggtgggggagcggggcaccaccctgagcggcggccagaagcagaggctggccatcgcccgggccctgatcaagcagcccaccgtgctgatcctggatgaggccaccagcgccctggatgctgagagcgagcgggtggtgcaggaggccctggaccgggccagcgctggccgcacagtgctggtgattgcccaccggctgagcacagtgcggggggcccactgcatcgtggtgatggctgatggccgggtgtgggaggccggcacccatgaggagctgctgaagaagggcggcctgtatgcagagctgatccggcggcaggccctggatgcccccaggacagctgcccccccacccaagaagccagagggccccaggagccaccagcacaagagctag

SEQ ID NO: 170828 - DNA, 2106 bp, Artificial Sequence
  derived and/or modified sequence
atgctggtgcacctgttccgggtgggcatccggggcggccccttccctggccgcctgctgccccccctgcgcttccagaccttctctgctgtgcgctacagtgatggctaccgcagcagcagcctgctgcgggctgtggcccacctgcggagccagctgtgggcccacctgccccgggccctgctgggccccatggtgctgagcaagcacccccacctgtgcctggtggccctgtgtgaggccgaggaggcccccccagccagcagcaccccccacgtggtgggcagccgcttcaactggaagctgttctggcagttcctgcacccccacctgctggtgctgggcgtggccgtggtgctggccctgggcgccgccctggtgaatgtgcagatccccctgctgctgggccagctggtggaggtggtggccaagtacacccgggaccacgtgggcagcttcatgacagagagccagaacctgagcacccacctgctgatcctgtatggagtgcagggcctgctgaccttcggctacctggtgctgctgagccacgtgggggagaggatggctgtggacatgaggcgggccctcttcagcagcctgctgcggcaggacatcaccttctttgatgccaacaagacaggccagctggtgtcccggctgaccacagatgtgcaggagttcaagagcagcttcaagctggtgatcagccagggcctgcggagctgcacccaggtggccggctgcctggtgtccctgtccatgctgagcacccggctgaccctgctgctgatggtggccaccccagccctgatgggcgtgggcaccctgatgggcagcggcctgaggaagctgagccggcagtgccaggagcagatcgcccgggccatgggcgtggctgatgaggccctgggcaatgtgaggacagtgcgggcctttgccatggagcagcgggaggaggagagatatggagctgagctggaggcctgccgctgcagagctgaggagctgggccggggcatcgccctcttccagggcctgagcaacatcgccttcaactgcatggtgctgggcaccctcttcatcggcggcagcctggtggccggccagcagctgactggaggagacctgatgtccttcctggtggccagccagacagtgcagaggtccatggccaacctgtctgtgctgtttggccaggtggtgcggggcctgtctgctggggcccgggtgtttgagtacatggccctgaacccctgcatccccctgagcggcggctgctgcgtgcccaaggagcagctgcggggctctgtgaccttccagaatgtgtgcttctcctacccctgcaggcctggctttgaggtgctgaaggacttcaccctgaccctgcccccaggcaagatcgtggccctggtgggccagagcggcggcggcaagaccaccgtggccagcctgctggagcgcttctatgaccccacagctggggtggtgatgctggatggccgggacctgcggaccctggaccccagctggctgcggggccaggtggtgggcttcatcagccaggagcctgtgctgtttggcaccaccatcatggagaacatccgctttgggaagctggaggccagtgatgaggaggtgtacacagctgcccgggaggccaatgcccacgagttcatcaccagcttccctgagggctacaacacagtggtgggggagcggggcaccaccctgagcggcggccagaagcagaggctggccatcgcccgggccctgatcaagcagcccaccgtgctgatcctggatgaggccaccagcgccctggatgctgagagcgagcgggtggtgcaggaggccctggaccgggccagcgctggccgcacagtgctggtgattgcccaccggctgagcacagtgcggggggcccactgcatcgtggtgatggctgatggccgggtgtgggaggccggcacccatgaggagctgctgaagaagggcggcctgtatgcagagctgatccggcggcaggccctggatgcccccaggacagctgcccccccacccaagaagccagagggccccaggagccaccagcacaagagctag

SEQ ID NO: 170829 - DNA, 2157 bp, Artificial Sequence
  derived and/or modified sequence
atgctggtgcacctgttccgggtgggcatccggggcggccccttccctgggaggctgcttccaccactgcgattccagaccttctcagccgttcggtatagtgacgggtatcgcagtagttccctcctgagggccgtcgcgcatctgagatctcagctctgggcccatctaccccgagcacctcttgcgccacggtggtccccgtctgcatggtgttgggtcgggggcgctctgcttggtcccatggtgttatccaagcacccccacctctgtcttgtggcactttgcgaggctgaagaggccccaccggcttcttccacaccccacgtggtgggttctcggtttaactggaagttgttctggcagtttctccatccacaccttctggttttaggggtggctgtcgtcctggctcttggggccgcattagtaaacgttcaaattcctctgctgctgggccagttggtggaggtagtcgcaaaatacacgagagaccatgtgggcagcttcatgactgaatctcaaaacctgagcactcacctgttaattttgtatggtgttcagggactgttgacatttggctatctggtcttgctctcacatgtcggagagcgcatggccgtagatatgcgtagggccctgttttctagccttctacggcaggacatcaccttttttgatgcaaacaagaccggacagttagtctctcgactgacgaccgacgtgcaggagttcaaaagcagtttcaagcttgttatctcacaagggttaaggtcctgcactcaggttgccggttgcctggtgtctctgtctatgctcagcaccaggctgacattgcttcttatggtggcaactccagcactcatgggggtgggaacactaatgggatcgggactacgcaagctgtcccgccagtgtcaggagcagatcgctcgtgctatgggtgtcgcggatgaggccctggggaacgtgcggaccgtgcgggcattcgccatggagcagagagaggaagaaaggtatggggccgagctcgaggcatgcaggtgtcgggccgaggagcttggcagagggattgcactgttccaaggtctgagcaatatcgcctttaactgtatggttctgggtaccctgttcatcggtggctcgcttgtggcaggccagcagctgactggtggcgatctgatgagcttcctggtggcaagtcagacggtgcaacggagcatggcaaacctatctgtgctctttggccaggtcgtcaggggcctgagcgctggagctcgggtgtttgagtacatggccctcaacccttgcattcccctgtcgggcggctgctgcgttccgaaagaacaactgcggggtagcgtaacatttcaaaatgtgtgcttctcatatccctgcaggccagggttcgaagtcctgaaagatttcacattaaccctacctcctggcaaaatagttgctttagtgggtcaaagcggggggggcaaaacgaccgtcgcttctcttttggagagattttatgacccaaccgctggagtcgtgatgctcgacgggcgcgacctgaggacactggacccatcctggttgcgtggacaggtagttggcttcatttctcaggaacccgtcttattcggcactacaattatggaaaacatcaggtttggtaaactggaggcaagcgacgaggaggtttacaccgcagccagggaggccaatgcccacgagtttattacatccttcccagaagggtacaatacggtagtgggggagagagggaccacactttcaggagggcaaaagcagcggctggcaatcgcgcgagctcttattaagcaaccaactgtattgatcctagacgaggctacctccgcactcgatgcagaaagcgaacgggtggtgcaagaagctctggatcgtgcctctgcaggccggacagtcctggtgattgctcacagactcagcaccgtccggggggcccactgtatcgtggtgatggcggacgggagagtgtgggaggctggaacacatgaagaactcctcaagaagggcgggctctatgcggagttaatccggaggcaggcactcgatgcgccccgcactgccgccccgccaccaaagaagcccgagggcccccgtagccatcagcataaatcttag

SEQ ID NO: 170830 - DNA, 2106 bp, Artificial Sequence
  derived and/or modified sequence
atgctggtgcacctgttccgggtgggcatccggggcggccccttcccaggacgactgctgcctccactcagattccagactttttctgctgtgagatatagcgatgggtataggtcaagttctctgttgcgcgctgttgctcacctccggtcacaattatgggcccacctccctcgtgcgttgctgggacctatggtcctgagcaagcacccccatctgtgtctcgtggctttatgtgaagctgaagaggctcctcccgctagtagtacacctcatgtagttggaagccggtttaactggaaactcttctggcagtttctgcaccctcacctgctggtcctcggtgtggccgtggtgctagccttaggggcagcgctcgtcaacgtgcagattcctctcctattgggccagctggtggaagtggtggccaagtatacacgagatcatgtggggtcattcatgacagaatcacagaacctaagtactcacctcctcatcctgtatggggtccagggcctgttaacatttggatatctcgtcctgcttagccacgtgggtgagcggatggctgtggacatgcgtagagctctgttcagctccctcttgaggcaggatatcactttcttcgacgctaataaaaccggacaactcgttagtcggttgactaccgatgttcaggaatttaagtcctccttcaaattggtgatttctcagggtctgcgctcctgtacgcaggtcgcgggatgcttagtgtctctttccatgttgagcactcggctgacgcttctgttaatggtagcaactccagccctaatgggagtggggactttaatgggttcagggttacgaaagctgtctaggcaatgccaggagcaaattgcccgagctatgggggtagcagacgaggctttagggaacgtcagaacagtcagagcattcgcgatggagcaaagggaggaggagcgatacggggccgagcttgaagcttgccggtgtcgggccgaggagctaggccgcgggatagctcttttccagggactctcaaatatcgcatttaactgtatggtactgggcaccttgtttattggtggctccttggtagccggtcagcaactcactgggggcgacctcatgtcgttccttgtcgctagccagaccgtccaaaggtctatggccaacctgagtgtcctgtttggccaggtcgtgaggggcctgtctgctggcgcacgagtctttgagtatatggctctgaacccctgtattccgctgtctggcgggtgttgcgttccaaaggagcagctcagggggtcagtcacttttcaaaacgtttgctttagttacccttgcagacccgggttcgaggtgttaaaagacttcactttaaccctcccacccggtaagattgtggccctggtcggccaatccggaggtggcaagacgacagtggctagtctgttagagcgtttttacgaccccacggcaggcgtggtgatgctcgacggtcgggaccttaggacgctggacccctcatggttgcgagggcaagtggtgggctttatctcccaggagcccgtgctgtttggcaccaccattatggagaacattcggtttggcaaactggaggcttcagatgaggaagtttatacagctgctagggaagctaatgcacatgaattcatcaccagttttcccgagggatataatacggtcgtgggagaaagaggcacaacactgagcggggggcaaaagcagcggttagccattgctagagccctaattaagcaacccacagtactcatcctggatgaggcaacctctgcgctggacgctgagagcgagagggtggtccaggaagcccttgatagggcctccgccgggcggactgttttagtgatagcccaccggctgagcaccgtgaggggtgcgcactgtatcgtggtgatggcggacgggcgcgtatgggaggcaggcactcacgaagagctcctgaagaaaggcgggttatacgccgaactcatccggcgacaggcgctcgatgcccctcgcacagccgctcctcccccaaagaagccagagggtccaaggagccaccagcataaatcctag

SEQ ID NO: 170831 - DNA, 2157 bp, Artificial Sequence
  derived and/or modified sequence
atgttggtgcatctgttcagggtgggaatcaggggtggtcctttccccggacggctcctgcctcctctgcgattccaaaccttttccgccgttcgctatagcgacggttacagaagctcctctcttcttagggcagtggctcatctccgtagtcagctgtgggcccatctccctagagcccctctagcccctaggtggtcaccctccgcctggtgctgggtggggggtgcgctactggggccaatggttttgtccaaacacccccatttgtgcctggttgctctatgcgaggctgaggaggcccctcctgctagctctacgcctcacgtagtggggagccggtttaattggaagcttttctggcagtttcttcatccccacctgctagtgctgggagtggcagtcgttttggcactgggggcagcactggttaacgtccagattccactgctgctgggacagctggtcgaagtggtggccaaatacactagggaccatgtgggctcttttatgacggagtctcagaacctcagtactcacctgttgattctatacggcgtacagggtctgctcacattcggctatctagtccttctctcacatgtgggcgagcgcatggctgtggacatgcgtagagccctcttctcgagtctgttgcggcaggacatcacctttttcgatgcaaataagacgggacagcttgtgtccagactgaccaccgatgtccaagagtttaagtcaagcttcaagctggttatcagccaagggttgcggagctgcacccaggtagccggatgtctggtgtctttgtcaatgctgagtacaaggctgacattgctgcttatggttgccacacctgctctgatgggcgtgggaacactgatgggatcaggcctccggaaactcagtaggcaatgccaggagcagatcgcacgggctatgggagtggctgatgaggccttggggaacgttcgtacggtgcgggcttttgctatggaacaacgagaggaagagaggtacggggcagaattggaagcttgccgttgccgcgcagaggaactgggaagaggtatcgctctgtttcaggggttgtctaacatagctttcaattgcatggtgctcgggactctcttcattggtggctcattagtggccggtcagcagctcacaggtggtgatctcatgtcattcttggtggcgagtcaaactgttcagcgcagcatggcaaacctctctgtgctctttggccaggttgtgcgagggctgtccgccggtgccagagtatttgagtacatggccttgaatccttgcattcccctcagtgggggatgttgtgtgcccaaagaacagttgagaggatccgtgaccttccagaatgtttgtttttcctacccttgccgaccaggtttcgaggtccttaaggattttaccctgaccttacctcctggcaagatcgtggccctcgttggtcagtcagggggaggaaaaactacagtcgcaagtctccttgaacgattttacgacccaaccgcaggagtggtgatgctggacggccgagacttgcggacactggacccatcttggctgaggggacaggttgtcggattcattagtcaggaacctgtgcttttcggcacaaccattatggagaatatccgatttgggaaactggaagccagcgatgaggaggtgtacactgccgctcgtgaagccaatgctcatgagttcattacttcttttccagagggctacaacactgtcgtgggggagcgaggcaccacactgtctgggggacaaaagcagcgtttagcgatcgcaagagctctaattaagcagccaactgtcctcatcctcgatgaggccactagcgctctggacgccgagtcggaaagagtcgtgcaggaagccctggacagagccagcgccggtcggaccgtgctggtgatcgcacacaggctatccacagtgcgcggtgcacactgcattgttgttatggcagatggcagagtctgggaagcaggcacacacgaggagcttctcaagaagggcggtctatatgcagaactaataagacgacaagctctcgacgcacccagaaccgcagccccacctccaaaaaagcctgaggggcctaggagccaccagcacaaatcctag

SEQ ID NO: 170832 - DNA, 2106 bp, Artificial Sequence
  derived and/or modified sequence
atgcttgtccatttgttccgcgtggggatccgaggcggaccgtttcctgggaggctgttgccgccattgcgattccagacattcagtgcggtgcgctattccgacgggtatcggagtagctctctattgagagcggttgcgcacctgcggtctcagctctgggcacatctgcctcgggcactgctcgggcctatggtgctgagcaagcatccccatctctgcctagtcgccctgtgcgaagccgaagaggctcctcccgcttcatcaactccccatgtagttgggtctcgcttcaactggaagctcttttggcagtttctgcacccccatctcctagttctcggagttgctgtggttctagccctgggtgctgccttggtgaacgtacagattccgctgttactgggccagctagtggaagttgtcgcgaaatatacccgagaccacgtaggtagctttatgacggagtctcaaaacctgtcaacccatctgcttattctgtacggggtccaaggattgcttacattcggatacctagttctgctatcccacgtgggcgagagaatggcagtggatatgcgtcgcgctttgttctcgagtctcttaagacaggatattacattcttcgacgccaataagaccggacagctagtgtccagactgactacagatgtgcaggagttcaaaagcagcttcaagttggtgataagtcagggcctgcggtcatgtacacaagtagccggatgcttggtgagtctcagcatgctgtcgacccggctgaccctacttcttatggtcgctacgccagctctgatgggcgtcggtacacttatgggttctggtctccggaagctctctcgccagtgccaggaacagatcgcacgggctatgggcgtggctgatgaggcgctaggaaacgttagaaccgtgcgggcatttgccatggagcaacgggaggaggagcggtacggggctgagttggaggcgtgccgatgcagagcagaagaacttggtcggggtatcgctctgttccagggcctttcaaacatagcctttaactgtatggtgctaggtacgctctttatcggcggatcacttgtcgcaggccaacagctgacaggcggagaccttatgtccttccttgtggcctcacaaacagtccagagatctatggcaaacctgagcgtcctgtttggccaggtggtgcgtggcttgagtgcaggagccagagtgttcgagtacatggccctcaacccgtgtattcctttgagtggcggatgttgtgtgcctaaggaacagctgcgaggtagcgtgacctttcagaacgtttgtttctcatatccatgccggccagggtttgaggtattaaaggacttcacacttactctgcctcctgggaagatcgtggcactggtagggcagtccgggggagggaagaccacagttgctagccttttggagcgattctatgacccaactgcaggcgtggtgatgctcgatgggcgtgacttgcggactctcgatccgagctggcttcggggacaagttgtggggtttataagtcaggaaccagtgctctttggtaccaccattatggagaacattagatttggaaaactggaggcatccgatgaagaagtgtacactgcagctagggaggctaacgctcacgagttcattacctcttttcctgagggctataatactgtggtgggcgaacggggaaccaccctgtccggaggccaaaagcagcggcttgcaattgctcgggctttgataaaacagcccaccgtcctgatactggacgaggccacatctgccctagacgctgagtctgaacgtgtggtccaggaagccttggacagggcgtcagctggtcgaactgttctggtgatcgcccatagactcagcacagtaaggggagcacattgcatcgttgtgatggctgacgggagggtatgggaagccggaacgcatgaggagctcctgaagaagggcggactttatgctgagctcatccgcaggcaggccctagatgcccctcggacggccgctccaccacccaagaagcccgaaggcccaaggagccatcagcacaagtcctag

SEQ ID NO: 170833 - DNA, 4683 bp, Artificial Sequence
  derived and/or modified sequence
gttgtcgggatgggggcgggagccaacatagagccctcagtgggatgagggtgaaactgctattgccggcggctcctgttttaccgcgtcagcatgctggtgcatttatttcgggtcgggattcggggtggcccattcccaggcaggctgctaccgcccctccgcttccagacattctcagctgtcaggtactctgatggctaccgcagctcctccctcctccgggccgtggcccacctgcggtcccagctctgggcccacctccctcgagcccccctagctcccagatggagcccctctgcctggtgctgggttgggggagccctgctaggccccatggtactgagtaagcatccccacctctgccttgtggccctgtgtgaggcagaagaggcccctcctgccagctccacaccccatgtcgtggggtctcgctttaactggaagctcttctggcagtttctgcacccccacctgctggtcctgggggtagccgtcgtgctggccttgggtgcggcactcgtgaatgtacagatccccctgctcctgggccagctggtagaggtcgtggccaagtacacaagggaccacgtagggagtttcatgactgagtcccagaatctcagcacccacctgcttatcctctatggtgtccagggactgctgaccttcgggtacctggtgctgctgtcccacgttggcgagcgcatggctgtggacatgcggagggccctcttcagctccctgctccgacaagacatcaccttctttgacgccaataagacagggcagctggtgagccgcttgacaactgacgtgcaggagtttaagtcatccttcaagcttgtcatctcccaggggctgcgaagctgcacccaggtggcaggctgcctggtgtccctgtccatgctgtcgacacgcctcacgctgctgctgatggtggccacaccagccctgatgggagtgggcaccctgatgggctcaggcctccgaaaattgtctcgccagtgtcaggagcagatcgccagggcaatgggcgtagcagacgaggccctgggcaatgtgcggactgtgcgtgccttcgccatggagcaacgggaagaggagcgctatggggcagagctggaagcctgccgctgccgggcagaggagctgggccgcggcatcgccttgttccaagggctttccaacatcgccttcaactgcatggtcttgggtaccctatttattgggggctcccttgtggccggacagcagctgacagggggagacctcatgtccttcctggtggcctcccagacagtgcaaaggtccatggccaacctctctgtcctgtttgggcaggtggtccgggggctgagtgcaggtgcccgggtctttgagtacatggccctgaacccctgcatcccactgtctgggggctgctgcgtccccaaagagcagctgcgtggctccgttacatttcagaacgtctgcttcagctacccctgccgccccggcttcgaggtgctgaaagacttcaccctgacgctgccccctggcaagatcgtggccctcgtgggccagtctggcggaggaaagaccaccgtggcttccctgctggagcgcttctacgaccccacggcaggcgtggtgatgctggatgggcgggacctgcgcacccttgacccctcctggctccggggccaggttgtcggcttcatcagccaggagcccgtcctgtttgggacgaccatcatggaaaacatccgctttgggaagctggaagcttccgatgaagaggtgtacacagccgcccgggaagcgaatgctcacgagttcatcaccagcttccccgagggctacaacacggtcgtcggtgaacggggcactaccctgtctgggggccagaagcagcgcctggccatcgcccgagcccttatcaagcagcccacggtgctgatactggatgaagctaccagcgcgctggatgcagagtccgagcgggttgtacaggaggccctggaccgggccagtgcaggccgcacggtgctggtaattgcccaccggctcagcactgtccgtggggcccactgcattgtcgtcatggccgatggccgtgtctgggaggctgggacacatgaagagctcctgaagaaaggcgggctatacgccgagctcatccggaggcaggccctggatgccccgaggacagcggccccaccgcccaaaaagccagaaggccccaggagccaccagcacaagtcctgagaagggccccctgaggtgtggtcgctgccaagcatcagtgttagggctggggctcagcctgggggagcctactggggactgagcccccaggagggccagcatgtggagagtcgctgcggctgctcctgctcacaataaagccggggccgagcagctggcaggggaggccaatccctccctcccctccccagtcctgccggctgcctccctcccaccagagtctgccagagtcattgggctgcaatgggcagagacagagttccacgagacacctccactctattctccctttgcccagacccctccagacctctcaagagacgttctggccagtctccctgccccacccagcagcttcaaattggccaggcctacagtagctccagggaatttttaaaaatcagggtctggaagtgggcctgggaattcaaacctaggctcttcccacacccttgctaggacctcacttccctagactggcgactgactccctctcctgtgtccccactccctccatgggagaaggagcctatcccctggctcaccccgggacccacagtccccatcttccaaacaacctccctcctttctccctgcacagtgaacacagtcctgatttctagatttcacctcccctccccacccacaagggacacaggcctaacagggcccaacacttgggtcagggtaggagggacggggccacaatggccagttcccacgagaagcgccagcctgcctggctgtcttccaccggccctgccctgtgtgcctggcgtctttcacccactgagattgtgaaccagcctccatctacaccaagaacacccagcactgaaggagatgggaggggctgatgcccacctggagctctctgcttcctgcccacagtgctgacgagtacagagctaaatggagcagctactgcagaatccagtacagaatcggtccaggagggtgcggctgtggacaggccagcatccccagcaggttctgggaggcgcaccttgaaaggggaaggcagacatcctgagtgatgggcgcctgtggccctgagactgtggatgagggggctaggctccagctggcttctgaggggcctggaaaggcacacaagtaggtccttggctgaactggtgccccagcaggacctcgtgtccctgcactgctgcagatgcatcagccctccccatgttggtgccgctgtcacttcctactgggatccttcccctatccagccacatccaggctgtgggactacacggtgccctgttcccctgggcaggagaagaggtggtacctgcaatgcaccttcacagccaggcaagcattctggatttaccctgtgtaaagaagggtggtaccctctttcaggggtgtgatacagtgcattgatggagcagctggtgctgctgggaggccagcctggaagaggcagcagtggctcaagtttgcgtgcaggagccagagtgggacccacgggctcttgtgggtgtggtttagaactagatggtgctttggggacaagccatccaaaaaccccaggcccacatccaccctgatttgatatcccacttcctgacagatcagaggctgtgtctttaagcagtggaggtccaggagcagagcctggggctggttcacagctaaacccctccttagggcagcccagagtagggcctcagctggcaagtccacaagccctgctggggccctgcttgttggcctgacccctccctcaccaggcagccagccaaggtggttcctgcttcacccactcagtcatcagcctcaggctgcccaaaatgcctctgacaccagatttatatcttctgggcggcttctttaaatccagcccttcacccgccccctagagaagcagtgaaaccccttggctagtccagctggaagagctagaccgcaggagccgcgccgtcttcctaacctcgcctcggccttcgctccacagtggagagtgggagcctagctgtgcttgatgctgaatgcctgttttgagagtgtgagtgggatcatctacagtaaatacttgcaaagcatggcactgtggctctggggagctggtacgcctgtgctgtaaccatggtactcagtccttccaaagtgtttattaatcaagcacctgtcatgtgccattgagcccacgatggggaatgaggacagtccctgcccccatgaagcttgtgtcctgttgggaggacagacaggtggcccagcagttgcagcatggtgtgtgcacacgtttggctggtggaaccatgtttctaccactcatggtcaaaaaaagcccaccaaagtcctgggagttcacatctgtgtgatgatacggcaacattgtttgtaatggaaagactggacacccccagtgcccatcagtgggggagtcattaaataaactatggtatgtgcacataa

SEQ ID NO: 170834 - DNA, 2392 bp, Artificial Sequence
  derived and/or modified sequence
agccaacatagagccctcagtgggatgagggtgaaactgctattgccggcggctcctgttttaccgcgtcagcatgctggtgcatttatttcgggtcgggattcggggtggcccattcccaggcaggctgctaccgcccctccgcttccagacattctcagctgtcaggtactctgatggctaccgcagctcctccctcctccgggccgtggcccacctgcggtcccagctctgggcccacctccctcgagccctgctaggccccatggtactgagtaagcatccccacctctgccttgtggccctgtgtgaggcagaagaggcccctcctgccagctccacaccccatgtcgtggggtctcgctttaactggaagctcttctggcagtttctgcacccccacctgctggtcctgggggtagccgtcgtgctggccttgggtgcggcactcgtgaatgtacagatccccctgctcctgggccagctggtagaggtcgtggccaagtacacaagggaccacgtagggagtttcatgactgagtcccagaatctcagcacccacctgcttatcctctatggtgtccagggactgctgaccttcgggtacctggtgctgctgtcccacgttggcgagcgcatggctgtggacatgcggagggccctcttcagctccctgctccgacaagacatcaccttctttgacgccaataagacagggcagctggtgagccgcttgacaactgacgtgcaggagtttaagtcatccttcaagcttgtcatctcccaggggctgcgaagctgcacccaggtggcaggctgcctggtgtccctgtccatgctgtcgacacgcctcacgctgctgctgatggtggccacaccagccctgatgggagtgggcaccctgatgggctcaggcctccgaaaattgtctcgccagtgtcaggagcagatcgccagggcaatgggcgtagcagacgaggccctgggcaatgtgcggactgtgcgtgccttcgccatggagcaacgggaagaggagcgctatggggcagagctggaagcctgccgctgccgggcagaggagctgggccgcggcatcgccttgttccaagggctttccaacatcgccttcaactgcatggtcttgggtaccctatttattgggggctcccttgtggccggacagcagctgacagggggagacctcatgtccttcctggtggcctcccagacagtgcaaaggtccatggccaacctctctgtcctgtttgggcaggtggtccgggggctgagtgcaggtgcccgggtctttgagtacatggccctgaacccctgcatcccactgtctgggggctgctgcgtccccaaagagcagctgcgtggctccgttacatttcagaacgtctgcttcagctacccctgccgccccggcttcgaggtgctgaaagacttcaccctgacgctgccccctggcaagatcgtggccctcgtgggccagtctggcggaggaaagaccaccgtggcttccctgctggagcgcttctacgaccccacggcaggcgtggtgatgctggatgggcgggacctgcgcacccttgacccctcctggctccggggccaggttgtcggcttcatcagccaggagcccgtcctgtttgggacgaccatcatggaaaacatccgctttgggaagctggaagcttccgatgaagaggtgtacacagccgcccgggaagcgaatgctcacgagttcatcaccagcttccccgagggctacaacacggtcgtcggtgaacggggcactaccctgtctgggggccagaagcagcgcctggccatcgcccgagcccttatcaagcagcccacggtgctgatactggatgaagctaccagcgcgctggatgcagagtccgagcgggttgtacaggaggccctggaccgggccagtgcaggccgcacggtgctggtaattgcccaccggctcagcactgtccgtggggcccactgcattgtcgtcatggccgatggccgtgtctgggaggctgggacacatgaagagctcctgaagaaaggcgggctatacgccgagctcatccggaggcaggccctggatgccccgaggacagcggccccaccgcccaaaaagccagaaggccccaggagccaccagcacaagtcctgagaagggccccctgaggtgtggtcgctgccaagcatcagtgttagggctggggctcagcctgggggagcctactggggactgagcccccaggagggccagcatgtggagagtcgctgcggctgctcctgctcacaataaagccggggccgagcagctggcaggggaggccaatccctccctcccctccccagtcctgccggctgcctccctccc

SEQ ID NO: 170835 - DNA, 2157 bp, Artificial Sequence
  derived and/or modified sequence
atgctggtgcacctgttcagagtgggcatcagaggcggccccttccccggcagactgctgccccccctgagattccagaccttcagcgccgtgagatacagcgacggctacagaagcagcagcctgctgagagccgtggcccacctgagaagccagctgtgggcccacctgcccagagcccccctggcccccagatggagccccagcgcctggtgctgggtgggcggcgccctgctgggccccatggtgctgagcaagcacccccacctgtgcctggtggccctgtgcgaggccgaggaggccccccccgccagcagcaccccccacgtggtgggcagcagattcaactggaagctgttctggcagttcctgcacccccacctgctggtgctgggcgtggccgtggtgctggccctgggcgccgccctggtgaacgtgcagatccccctgctgctgggccagctggtggaggtggtggccaagtacaccagagaccacgtgggcagcttcatgaccgagagccagaacctgagcacccacctgctgatcctgtacggcgtgcagggcctgctgaccttcggctacctggtgctgctgagccacgtgggcgagagaatggccgtggacatgagaagagccctgttcagcagcctgctgagacaggacatcaccttcttcgacgccaacaagaccggccagctggtgagcagactgaccaccgacgtgcaggagttcaagagcagcttcaagctggtgatcagccagggcctgagaagctgcacccaggtggccggctgcctggtgagcctgagcatgctgagcaccagactgaccctgctgctgatggtggccacccccgccctgatgggcgtgggcaccctgatgggcagcggcctgagaaagctgagcagacagtgccaggagcagatcgccagagccatgggcgtggccgacgaggccctgggcaacgtgagaaccgtgagagccttcgccatggagcagagagaggaggagagatacggcgccgagctggaggcctgcagatgcagagccgaggagctgggcagaggcatcgccctgttccagggcctgagcaacatcgccttcaactgcatggtgctgggcaccctgttcatcggcggcagcctggtggccggccagcagctgaccggcggcgacctgatgagcttcctggtggccagccagaccgtgcagagaagcatggccaacctgagcgtgctgttcggccaggtggtgagaggcctgagcgccggcgccagagtgttcgagtacatggccctgaacccctgcatccccctgagcggcggctgctgcgtgcccaaggagcagctgagaggcagcgtgaccttccagaacgtgtgcttcagctacccctgcagacccggcttcgaggtgctgaaggacttcaccctgaccctgccccccggcaagatcgtggccctggtgggccagagcggcggcggcaagaccaccgtggccagcctgctggagagattctacgaccccaccgccggcgtggtgatgctggacggcagagacctgagaaccctggaccccagctggctgagaggccaggtggtgggcttcatcagccaggagcccgtgctgttcggcaccaccatcatggagaacatcagattcggcaagctggaggccagcgacgaggaggtgtacaccgccgccagagaggccaacgcccacgagttcatcaccagcttccccgagggctacaacaccgtggtgggcgagagaggcaccaccctgagcggcggccagaagcagagactggccatcgccagagccctgatcaagcagcccaccgtgctgatcctggacgaggccaccagcgccctggacgccgagagcgagagagtggtgcaggaggccctggacagagccagcgccggcagaaccgtgctggtgatcgcccacagactgagcaccgtgagaggcgcccactgcatcgtggtgatggccgacggcagagtgtgggaggccggcacccacgaggagctgctgaagaagggcggcctgtacgccgagctgatcagaagacaggccctggacgcccccagaaccgccgcccccccccccaagaagcccgagggccccagaagccaccagcacaagagctag

SEQ ID NO: 170836 - DNA, 2106 bp, Artificial Sequence
  derived and/or modified sequence
atgctggtgcacctgttcagagtgggcatcagaggcggccccttccccggcagactgctgccccccctgagattccagaccttcagcgccgtgagatacagcgacggctacagaagcagcagcctgctgagagccgtggcccacctgagaagccagctgtgggcccacctgcccagagccctgctgggccccatggtgctgagcaagcacccccacctgtgcctggtggccctgtgcgaggccgaggaggccccccccgccagcagcaccccccacgtggtgggcagcagattcaactggaagctgttctggcagttcctgcacccccacctgctggtgctgggcgtggccgtggtgctggccctgggcgccgccctggtgaacgtgcagatccccctgctgctgggccagctggtggaggtggtggccaagtacaccagagaccacgtgggcagcttcatgaccgagagccagaacctgagcacccacctgctgatcctgtacggcgtgcagggcctgctgaccttcggctacctggtgctgctgagccacgtgggcgagagaatggccgtggacatgagaagagccctgttcagcagcctgctgagacaggacatcaccttcttcgacgccaacaagaccggccagctggtgagcagactgaccaccgacgtgcaggagttcaagagcagcttcaagctggtgatcagccagggcctgagaagctgcacccaggtggccggctgcctggtgagcctgagcatgctgagcaccagactgaccctgctgctgatggtggccacccccgccctgatgggcgtgggcaccctgatgggcagcggcctgagaaagctgagcagacagtgccaggagcagatcgccagagccatgggcgtggccgacgaggccctgggcaacgtgagaaccgtgagagccttcgccatggagcagagagaggaggagagatacggcgccgagctggaggcctgcagatgcagagccgaggagctgggcagaggcatcgccctgttccagggcctgagcaacatcgccttcaactgcatggtgctgggcaccctgttcatcggcggcagcctggtggccggccagcagctgaccggcggcgacctgatgagcttcctggtggccagccagaccgtgcagagaagcatggccaacctgagcgtgctgttcggccaggtggtgagaggcctgagcgccggcgccagagtgttcgagtacatggccctgaacccctgcatccccctgagcggcggctgctgcgtgcccaaggagcagctgagaggcagcgtgaccttccagaacgtgtgcttcagctacccctgcagacccggcttcgaggtgctgaaggacttcaccctgaccctgccccccggcaagatcgtggccctggtgggccagagcggcggcggcaagaccaccgtggccagcctgctggagagattctacgaccccaccgccggcgtggtgatgctggacggcagagacctgagaaccctggaccccagctggctgagaggccaggtggtgggcttcatcagccaggagcccgtgctgttcggcaccaccatcatggagaacatcagattcggcaagctggaggccagcgacgaggaggtgtacaccgccgccagagaggccaacgcccacgagttcatcaccagcttccccgagggctacaacaccgtggtgggcgagagaggcaccaccctgagcggcggccagaagcagagactggccatcgccagagccctgatcaagcagcccaccgtgctgatcctggacgaggccaccagcgccctggacgccgagagcgagagagtggtgcaggaggccctggacagagccagcgccggcagaaccgtgctggtgatcgcccacagactgagcaccgtgagaggcgcccactgcatcgtggtgatggccgacggcagagtgtgggaggccggcacccacgaggagctgctgaagaagggcggcctgtacgccgagctgatcagaagacaggccctggacgcccccagaaccgccgcccccccccccaagaagcccgagggccccagaagccaccagcacaagagctag

SEQ ID NO: 170837 - protein, 623 aa, Artificial Sequence
  derived and/or modified sequence
MPSDLAKKKAAKKKEAAKARQRPRKGHEENGDVVTEPQVAEKNEANGRETTEVDLLTKELEDFEMKKAAARAVTGVLASHPNSTDVHIINLSLTFHGQELLSDTKLELNSGRRYGLIGLNGIGKSMLLSAIGKREVPIPEHIDIYHLTREMPPSDKTPLHCVMEVDTERAMLEKEAERLAHEDAECEKLMELYERLEELDADKAEMRASRILHGLGFTPAMQRKKLKDFSGGWRMRVALARALFIRPFMLLLDEPTNHLDLDACVWLEEELKTFKRILVLVSHSQDFLNGVCTNIIHMHNKKLKYYTGNYDQYVKTRLELEENQMKRFHWEQDQIAHMKNYIARFGHGSAKLARQAQSKEKTLQKMMASGLTERVVSDKTLSFYFPPCGKIPPPVIMVQNVSFKYTKDGPCIYNNLEFGIDLDTRVALVGPNGAGKSTLLKLLTGELLPTDGMIRKHSHVKIGRYHQHLQEQLDLDLSPLEYMMKCYPEIKEKEEMRKIIGRYGLTGKQQVSPIRNLSDGQKCRVCLAWLAWQNPHMLFLDEPTNHLDIETIDALADAINEFEGGMMLVSHDFRLIQQVAQEIWVCEKQTITKWPGDILAYKEHLKSKLVDEEPQLTKRTHNV

SEQ ID NO: 170838 - protein, 240 aa, Artificial Sequence
  derived and/or modified sequence
MPSDLAKKKAAKKKEAAKARQRPRKGHEENGDVVTEPQVAEKNEANGRETTEVDLLTKELEDFEMKKAAARAVTGVLASHPNSTDVHIINLSLTFHGQELLSDTKLELNSGRRYGLIGLNGIGKSMLLSAIGKREVPIPEHIDIYHLTREMPPSDKTPLHCVMEVDTERAMLEKEAERLAHEDAECEKLMELYERLEELDADKAEMRASRILHGLGFTPAMQRKKLKDFSGGWRMRVALA

SEQ ID NO: 170839 - protein, 288 aa, Artificial Sequence
  derived and/or modified sequence
MPSDLAKKKAAKKKEAAKARQRPRKGHEENGDVVTEPQVAEKNEANGRETTEVDLLTKELEDFEMKKAAARAVTGVLASHPNSTDVHIINLSLTFHGQELLSDTKLELNSGRRYGLIGLNGIGKSMLLSAIGKREVPIPEHIDIYHLTREMPPSDKTPLHCVMEVDTERAMLEKEAERLAHEDAECEKLMELYERLEELDADKAEMRASRILHGLGFTPAMQRKKLKDFSGGWRMRVALARALFIRPFMLLLDEPTNHLDLDACVWLEEELKTFKRILVLVSHSQDFL

SEQ ID NO: 170840 - DNA, 1872 bp, Artificial Sequence
  derived and/or modified sequence
atgccgtctgatctcgctaagaagaaagctgcgaaaaaaaaggaagccgctaaagccagacagcggcccagaaaaggacatgaggagaatggcgacgttgtgacagaaccgcaagtcgccgagaaaaatgaggcaaacggacgcgaaaccactgaagtcgatcttctgacaaaagaactggaggatttcgagatgaagaaagcagccgctagagccgtcaccggagtgcttgctagtcaccccaacagtaccgatgttcacataattaatctttctctaacattccacgggcaggagctgctgtctgacacgaagctcgagctgaacagcggcaggaggtacggattaatagggctaaacgggatcggcaagtccatgttgctgagtgcaattgggaagagagaggtccctatccctgagcacattgacatataccacctaactagggaaatgccgccatccgataagacacctctgcattgcgttatggaggtcgacactgagagagccatgctggagaaggaggccgaacgcctcgcacacgaggacgctgagtgtgagaaactcatggagctgtacgaaaggttggaagagctagatgccgacaaggcggaaatgagggcctcccgtattctgcacggcctcggattcaccccagccatgcaacgcaaaaagctgaaggacttttcaggaggatggcgcatgcgcgtggccctggcacgcgctctgttcatcaggccattcatgttacttctcgacgagcctactaatcatctggacctcgacgcctgtgtgtggctggaagaggagctcaagactttcaagagaatcctagttctagtgtcccatagccaagattttctgaacggagtatgcaccaatatcatccatatgcataacaagaaactgaagtactatacagggaactacgaccaatatgtcaagacacgacttgagctggaagaaaatcagatgaagcgattccactgggagcaagatcagattgcccacatgaagaattatatcgctcgtttcggtcacgggtccgcaaagcttgcgaggcaggcacagagcaaggagaaaaccctgcagaaaatgatggcgtctggcctcaccgaaagggtcgtgagcgataagacactgagcttttatttcccaccttgtggcaagatcccccctcctgtgattatggtgcagaacgtatcgtttaaatacacaaaagacggtccttgcatctataacaacctcgaatttggtattgatctggacactcgggtggccctggtcggccccaatggggccggcaaatctacacttcttaagctgcttaccggagaactcctgcccacagacggcatgatacggaagcatagtcacgttaaaatcggccggtatcatcaacacctgcaggaacagttggacctcgacctgtcacccctcgagtatatgatgaagtgttacccagagattaaggagaaggaggagatgcgcaagatcatcggaaggtacggtttgaccgggaaacaacaggtcagcccgattcgcaacttatccgatgggcagaaatgcagagtgtgtctggcttggctggcttggcagaacccacatatgctctttctggacgagccaactaatcacctggatatcgagactattgacgcattggcagatgctatcaatgaattcgaagggggcatgatgctggtgtcccacgacttccgcctgattcagcaagtggcacaagaaatctgggtgtgcgaaaagcagacaataaccaagtggcctggcgatattctggcctataaggagcacctaaagagcaaactggtcgacgaggagccccagctgaccaagcggacacacaatgtgtag

SEQ ID NO: 170841 - DNA, 723 bp, Artificial Sequence
  derived and/or modified sequence
atgcctagtgatctcgccaaaaaaaaagccgccaagaagaaagaggccgcaaaggccaggcagcgcccaaggaaagggcacgaggagaacggcgacgtggtgacagaaccgcaagtggcggagaaaaatgaagctaacgggcgtgaaacaactgaggtggaccttcttacaaaagagctcgaagatttcgagatgaaaaaagctgccgctagagcagtgaccggggttttagcaagccatcctaattctactgatgtccatattatcaacctttcccttaccttccacggacaggaactcttgtctgacaccaaacttgagttgaatagcggcagacgttacggacttatcggtctgaacggcattgggaaaagcatgctgctgtccgcaataggtaaacgcgaggtccctattccagaacacattgatatttatcacctgacccgcgaaatgccaccatcggataagactcccctccactgtgtgatggaggtggacaccgaacgagccatgctcgaaaaggaggctgagcggctggcccacgaagatgccgagtgcgaaaaactcatggaactttatgagagactggaagagctggacgctgacaaggctgagatgagagcctcaagaattcttcacgggctggggttcactcctgctatgcagcgaaaaaagcttaaggacttctcaggtggctggcgtatgcgagtggcccttgcatag

SEQ ID NO: 170842 - DNA, 867 bp, Artificial Sequence
  derived and/or modified sequence
atgcctagcgatctcgcaaaaaagaaagccgctaaaaagaaggaggcagcaaaagcccggcagcgtcctcgcaagggacacgaagaaaacggggacgtcgtgacagaaccacaagtcgcagagaagaatgaggccaatggacgcgaaactaccgaggtggacttgctgacaaaggaactcgaagactttgaaatgaaaaaggccgctgccagggctgtgaccggtgtacttgcttcccaccctaattccacggacgtccatattattaatctcagtctgaccttccacggacaggagctactctccgatactaaactggagctgaactccggcaggcgatatgggctgatcggcctgaacggaatcggtaaatctatgttattatctgccattggtaaaagagaagtgcccataccggaacacatcgacatttatcatctcacaagggagatgcctccatcagacaaaacgcccttgcactgcgtgatggaggttgacacggaaagagcaatgctagagaaggaggccgagaggttggctcatgaggatgcagagtgcgaaaagctcatggagctgtacgagaggctggaagagctcgacgccgacaaagccgagatgagggctagccgcatactgcatggattgggatttacaccagctatgcaacgtaagaagctcaaggacttttccggcggttggcgtatgagggtggcattagcccgcgcactattcatacgtccgttcatgctgttacttgatgaacccaccaaccatttggatttggatgcctgtgtctggctggaggaagaactgaaaacgttcaagaggatcctcgtgctggttagtcattcacaagatttcctgtag

SEQ ID NO: 170843 - DNA, 1872 bp, Artificial Sequence
  derived and/or modified sequence
atgcccagcgacctggccaagaagaaggccgccaagaagaaggaggccgccaaggcccggcagaggcccaggaaaggacatgaagaaaatggagatgtggtgacagagccccaggtggccgagaagaatgaggccaacggccgggagaccacagaggtggacctgctgaccaaggagctggaggactttgagatgaagaaggctgctgcccgggctgtgactggagtgctggccagccaccccaacagcacagatgtgcacatcatcaacctgagcctgaccttccacggccaggagctgctgagtgacaccaagctggagctgaacagcggccgccgctatggcctgattggcctgaatggcatcggcaagtccatgctgctgagcgccatcggcaagcgggaggtgcccatccctgagcacatcgacatctaccacctgacccgggagatgccacccagcgacaagacccccctgcactgtgtgatggaggtggacacagagcgggccatgctggagaaggaggccgagcggctggcccatgaagatgctgaatgtgagaagctgatggagctgtatgagcggctggaggagctggatgctgacaaggccgagatgagggccagccgcatcctgcacggcctgggcttcaccccagccatgcagaggaagaagctgaaggacttcagcggcggctggaggatgagggtggccctggcccgggccctcttcatccggcccttcatgctgctgctggatgagcccaccaaccacctggacctggatgcctgtgtgtggctggaggaggagctgaagaccttcaagaggatcctggtgctggtgagccacagccaggacttcctgaatggagtgtgcaccaacatcatccacatgcacaacaagaagctgaagtactacacaggcaactatgaccagtatgtgaagacccggctggagctggaggagaaccagatgaagcgcttccactgggagcaggaccagatcgcccacatgaagaactacatcgccaggtttggacatggcagcgccaagctggcccggcaggcccagagcaaggagaagaccctgcagaagatgatggccagcggcctgacagagcgggtggtgtctgacaagaccctgtccttctacttccccccctgtgggaagatccccccacctgtgatcatggtgcagaatgtgtccttcaagtacaccaaggatggcccctgcatctacaacaacctggagtttggcatcgacctggacaccagggtggccctggtgggccccaacggggccggcaagagcaccctgctgaagctgctgaccggggagctgctgcccacagatggcatgatcaggaagcacagccacgtgaagattggccgctaccaccagcacctgcaggagcagctggacctggacctgagccccctggagtacatgatgaagtgctacccagagatcaaggagaaggaggagatgaggaagatcatcggccgctatggcctgaccgggaagcagcaggtgagccccatccggaacctgagtgatggccagaagtgccgggtgtgcctggcctggctggcctggcagaacccccacatgctgttcctggatgagcccaccaaccacctggacatcgagaccattgatgccctggctgatgccatcaatgaatttgagggcggcatgatgctggtgtcccatgacttccgcctcatccagcaggtggcccaggagatctgggtgtgtgagaagcagaccatcaccaagtggccaggggacatcctggcctacaaggagcacctgaagagcaagctggtggatgaggagccccagctgaccaagaggacccacaacgtgtag

SEQ ID NO: 170844 - DNA, 723 bp, Artificial Sequence
  derived and/or modified sequence
atgcccagcgacctggccaagaagaaggccgccaagaagaaggaggccgccaaggcccggcagaggcccaggaaaggacatgaagaaaatggagatgtggtgacagagccccaggtggccgagaagaatgaggccaacggccgggagaccacagaggtggacctgctgaccaaggagctggaggactttgagatgaagaaggctgctgcccgggctgtgactggagtgctggccagccaccccaacagcacagatgtgcacatcatcaacctgagcctgaccttccacggccaggagctgctgagtgacaccaagctggagctgaacagcggccgccgctatggcctgattggcctgaatggcatcggcaagtccatgctgctgagcgccatcggcaagcgggaggtgcccatccctgagcacatcgacatctaccacctgacccgggagatgccacccagcgacaagacccccctgcactgtgtgatggaggtggacacagagcgggccatgctggagaaggaggccgagcggctggcccatgaagatgctgaatgtgagaagctgatggagctgtatgagcggctggaggagctggatgctgacaaggccgagatgagggccagccgcatcctgcacggcctgggcttcaccccagccatgcagaggaagaagctgaaggacttcagcggcggctggaggatgagggtggccctggcctag

SEQ ID NO: 170845 - DNA, 867 bp, Artificial Sequence
  derived and/or modified sequence
atgcccagcgacctggccaagaagaaggccgccaagaagaaggaggccgccaaggcccggcagaggcccaggaaaggacatgaagaaaatggagatgtggtgacagagccccaggtggccgagaagaatgaggccaacggccgggagaccacagaggtggacctgctgaccaaggagctggaggactttgagatgaagaaggctgctgcccgggctgtgactggagtgctggccagccaccccaacagcacagatgtgcacatcatcaacctgagcctgaccttccacggccaggagctgctgagtgacaccaagctggagctgaacagcggccgccgctatggcctgattggcctgaatggcatcggcaagtccatgctgctgagcgccatcggcaagcgggaggtgcccatccctgagcacatcgacatctaccacctgacccgggagatgccacccagcgacaagacccccctgcactgtgtgatggaggtggacacagagcgggccatgctggagaaggaggccgagcggctggcccatgaagatgctgaatgtgagaagctgatggagctgtatgagcggctggaggagctggatgctgacaaggccgagatgagggccagccgcatcctgcacggcctgggcttcaccccagccatgcagaggaagaagctgaaggacttcagcggcggctggaggatgagggtggccctggcccgggccctcttcatccggcccttcatgctgctgctggatgagcccaccaaccacctggacctggatgcctgtgtgtggctggaggaggagctgaagaccttcaagaggatcctggtgctggtgagccacagccaggacttcctgtag

SEQ ID NO: 170846 - DNA, 1872 bp, Artificial Sequence
  derived and/or modified sequence
atgcccagcgacctggccaagaagaaggccgccaagaagaaggaggctgctaaggcacgccagcgaccaaggaaggggcatgaggagaacggagatgtggtaacggagccacaagtggcagaaaaaaacgaggccaacgggcgcgagactacagaggtggacctcctgaccaaggagctggaagacttcgaaatgaagaaggccgctgctagagccgtgaccggggttttggccagccaccctaatagcaccgatgtacacattataaatctttccttaaccttccacggtcaagagctgttgtcggacaccaagctggagttgaattcaggaaggaggtatggcctcattggtctaaatggaattggcaaatccatgctgttgtccgccataggaaaaagagaggtgcctattccagaacacattgacatataccatctgacgcgagaaatgccaccctcagataagactcctctgcactgtgtcatggaagtggacacggaacgcgccatgctcgaaaaagaggccgagaggctggcccatgaagatgctgaatgcgagaagctcatggaactgtatgagcgcctggaagaattggacgccgataaggctgaaatgcgtgctagtcgcatcctgcatggtctgggatttaccccagccatgcagcgtaagaaactgaaggacttcagcggaggttggaggatgcgcgtggctctggcccgtgccttgttcattagacctttcatgttgctcctcgatgagccaaccaaccacctggacctggatgcttgcgtgtggttagaggaagagctcaagaccttcaaaagaatactggtgttagtgtcgcactctcaggactttttgaatggggtctgtacgaacattattcatatgcacaacaagaagctgaaatattatactggcaactatgaccaatatgttaaaacgcgactcgaacttgaggaaaaccagatgaagaggttccactgggagcaggatcaaattgcccacatgaagaactatatcgccagattcgggcatggttcagccaaactggcaagacaagcccagagcaaagaaaaaacacttcagaagatgatggcgtccggactgaccgagagagttgtgtccgataagactctgagcttctacttccccccttgcggcaagattcccccccctgtgataatggtgcagaatgtttccttcaaatacacaaaggatggcccctgtatatacaacaacctggagttcggcattgatctcgacaccagggtggcactggtaggacctaatggcgccgggaaatcaacactgcttaagctcctgacaggagaactactacccacagacggcatgattcgtaagcattctcacgtgaaaatagggcgctaccaccaacatctgcaggagcagttggatttagacctgtctcccctcgaatatatgatgaaatgctatccggaaattaaagaaaaggaagagatgcgcaaaattattggccgatacggtttgacagggaagcagcaagtgagtcccatacgcaatctgagtgacggccagaagtgtcgggtgtgcctcgcctggctggcatggcagaatccacatatgctgttcctggacgagccaacaaaccacctcgacatcgagactatcgacgctctggcagacgcaatcaatgagtttgagggcggaatgatgctggtcagtcatgattttcgcttgatccagcaggtggcccaagagatctgggtctgtgagaagcagactatcaccaagtggcccggcgatatactggcgtacaaggagcacctgaaaagtaagctggtcgacgaagaacctcagctcactaaacggacccacaatgtttag

SEQ ID NO: 170847 - DNA, 723 bp, Artificial Sequence
  derived and/or modified sequence
atgcccagcgacctggccaagaagaaggccgccaagaagaaggaggccgccaaagcgagacagaggcctcgaaagggccatgaggagaacggagacgtcgtgaccgagccacaggtcgctgagaagaacgaggccaacggaagggaaaccactgaagtcgacctgctgacaaaagagcttgaagactttgaaatgaagaaagctgccgcaagggctgttacaggggtccttgcctcccaccccaacagtaccgacgtgcacatcattaacctgtcgctgaccttccatggacaggaactcctgtccgacacgaagttggagttgaactcaggacggcggtacggactcatcgggttgaatggcattggcaaatcaatgctgctgtctgccatagggaagagagaagtcccgattccagagcatattgacatctaccacttgaccagggagatgccccccagcgacaaaaccccgctgcattgtgttatggaggtggatacggagagagctatgctcgaaaaggaagctgagcggctcgcgcatgaagacgctgagtgcgagaaactgatggaactctatgaacgcttagaggagctcgatgccgataaagctgagatgagagcgtctagaatcctacacggcttgggctttacaccagcaatgcagcggaaaaagctaaaagacttcagtgggggttggcggatgagagtggccctggcctag

SEQ ID NO: 170848 - DNA, 867 bp, Artificial Sequence
  derived and/or modified sequence
atgcccagcgacctggccaagaagaaggccgccaagaagaaggaggcggccaaggcgcgccagcgtcctcgcaaggggcatgaggagaacggggacgtggtgacagagccccaggtggccgagaagaacgaagccaatggccgggagaccacggaggttgacctgctcaccaaagaactggaagacttcgagatgaagaaggcagcagcacgagccgtgaccggagtgctcgcgtcgcaccctaactcaacagatgtccacataattaatttgtctctcactttccacggccaagagttacttagcgacacaaagctcgaactcaatagcggccggaggtacggactgatcggtcttaacggcattgggaagtctatgctgctgagcgccattggaaagcgtgaagtccctatacctgagcatatcgatatctaccacctcactcgcgagatgcccccaagcgataagacgccactccactgcgtgatggaagttgacaccgagcgagcaatgttagagaaggaggctgagcggttggctcacgaggatgctgaatgtgaaaaactgatggaactctatgagcggctcgaggagctagacgcagacaaggccgagatgcgcgccagcaggatacttcacggactcgggttcaccccagccatgcaaagaaaaaagctgaaagacttttcagggggatggcgaatgagggtcgcgctggcacgagcgctcttcatacgccccttcatgctgctgcttgacgagccaactaaccatttggaccttgatgcgtgtgtatggcttgaggaggaattgaagaccttcaaaagaatactcgttttggtttcccattcccaggatttcctgtag

SEQ ID NO: 170849 - DNA, 1872 bp, Artificial Sequence
  derived and/or modified sequence
atgccttcagatttagcgaagaagaaggccgcaaaaaagaaagaggccgcaaaagcccgtcaaaggccccgaaagggtcatgaagagaacggagacgtggtgacggaacctcaagtcgcagaaaagaacgaagcaaacggaagggaaacaacagaggtggatctgctaaccaaggaacttgaagatttcgagatgaaaaaagcagcggctagggcggtgaccggcgtcctcgcaagccatccgaactccacagatgtacacattatcaacttgtctctgacttttcacgggcaggaactgttatctgacaccaagcttgagctgaattctggtagacggtacggcctcatcgggcttaacggcatagggaaatccatgctgctgagcgccatcggaaagcgcgaagtcccaatacccgagcacatagatatctaccatctaacgagagagatgcctccctccgacaaaacaccactccattgtgtgatggaggtggatactgagcgggcaatgctcgaaaaggaggccgagcggctggcccacgaggatgccgagtgtgaaaagctcatggaattgtatgagaggctagaggaactcgacgctgataaggccgaaatgcgcgctagtcgtatcctccatggcttgggcttcacccccgctatgcagcggaagaaacttaaggacttttccgggggttggcggatgagggttgcattagctcgagccctgttcatccggcctttcatgttgctgctggatgagccaacaaaccatctggacctggacgcctgcgtgtggttagaggaggagttgaaaactttcaaacgtatcctagtactggtgtctcatagtcaagattttctcaatggagtctgcactaatatcatacacatgcataacaaaaaactaaaatactacacaggcaactacgaccagtacgtgaaaacacgactggagttggaggagaaccaaatgaagaggtttcactgggagcaggaccaaatagcccatatgaagaactatatcgccaggttcggccacggcagcgccaaactcgcaagacaggcccagtccaaagaaaaaactctgcagaaaatgatggcctccggactgacggagagggttgtatccgataaaaccctctccttttatttccccccatgcggaaagatccctcctccggttatcatggtccaaaacgtatccttcaagtacaccaaagacggcccttgcatctacaacaacctcgagttcggcatcgacctcgacacacgggtggcactggtcggtccaaatggagccggaaaatccaccctcctcaaactgctaacaggtgaattattacctaccgacgggatgatccgcaagcactcacatgtaaaaattggacgctaccatcagcatctccaggagcaattggacctggacctaagccccctggagtatatgatgaaatgttatcctgaaatcaaagagaaggaggagatgaggaagatcattggcagatatggcctgacggggaagcaacaggtttctccgattaggaatctgtcggacgggcagaaatgtcgcgtctgcctggcatggctggcctggcagaacccacatatgctattcctggatgaacccactaaccatctggacatcgaaaccattgatgcgctggctgacgccattaatgagttcgaaggtgggatgatgctcgtgagtcacgatttccgcttgattcaacaagtggcacaggaaatttgggtatgtgagaaacagaccattaccaaatggcctggcgacattctagcctacaaggaacatcttaagagcaagctagttgacgaagagccccagcttacaaaaaggacccataacgtatag

SEQ ID NO: 170850 - DNA, 723 bp, Artificial Sequence
  derived and/or modified sequence
atgccctctgatctggcaaagaagaaagctgccaaaaagaaggaagctgcaaaagcgcgacagagacctcgcaaaggccacgaggaaaacggggatgtggtgaccgaaccccaggtggccgaaaagaatgaggcaaatggccgagaaactactgaagtcgacctgttgacaaaggagttggaagattttgaaatgaagaaggctgcggcacgcgctgtgaccggtgtgttggcttctcacccgaattctacagacgtccacatcataaacctgtcattaacttttcatggccaggaactgctcagcgataccaagctcgagctgaactccgggaggcggtatggtttaattgggctgaacggaatcgggaaaagcatgctgctctccgctatcgggaaaagagaggtacccattccagaacacatcgacatctatcacttgacgcgggaaatgccgccatcagataagacgcccctccactgcgttatggaagtggatacagagagagctatgctagaaaaagaagccgagagattggcacatgaggatgctgagtgtgagaagctgatggagctctatgaaaggttggaagagctggacgctgacaaggcggaaatgcgcgcttctcgcattctgcatggcctgggattcacaccagcaatgcagagaaagaagctcaaagatttcagcggagggtggagaatgagagttgccttggcttag

SEQ ID NO: 170851 - DNA, 867 bp, Artificial Sequence
  derived and/or modified sequence
atgccaagcgatctggcaaagaaaaaggcagccaagaagaaggaggcagcaaaggccagacagcgccctcggaagggccatgaagaaaacggtgacgtcgttacagagccccaggtggcggagaagaacgaagcaaatgggagagagactaccgaggttgatttattgaccaaagagttagaggactttgaaatgaagaaagctgccgcacgcgctgttaccggagtccttgcaagccatcctaactccactgatgtacacataataaacctctctctgaccttccatgggcaagagctcctgtctgatacaaaattggagctgaattcaggacgtcgctacggcctgatcgggttgaacggtattggaaagtcgatgttactttccgctattggaaaacgcgaagtgccaattcctgaacatatcgacatctatcatttgactcgcgaaatgccaccttccgacaagacacctttgcactgtgtgatggaggtcgacaccgaacgggcaatgctagagaaggaggcggagcggctggcccatgaggacgccgagtgtgaaaaattaatggagctgtatgagcggcttgaggagctggatgcagacaaggccgagatgcgcgcatcgagaatcctgcatggactcggattcactccggcaatgcagcggaaaaagctgaaggacttttctggcggatggcgaatgcgcgttgcactggccagggccttgttcatacgaccattcatgctgctgctggacgagccaaccaatcatctggacctggacgcctgcgtctggttagaggaggagcttaagacatttaaacggatactggtcctggtgtctcactcccaggactttttatag

SEQ ID NO: 170852 - DNA, 941 bp, Artificial Sequence
  derived and/or modified sequence
gagaagctgacgggcggggtgggggaggacccgggggtgacgagcgtggagactcggaggggactcacgcgggcgaggacgagtgcgtcccggcaagaggctgggctcgacggccgggtgatgtggagagggacgatcgagaagaggcccgagacggacgggaggaggaagcccggaaagctccctgaaacaacagtaacctacccctgtgggtcatcatcatgccctccgacctggccaagaagaaggcagccaaaaagaaggaggctgccaaagctcgacagcggcccagaaaaggacatgaagaaaatggagatgttgtcacagaaccacaggtggcagagaagaatgaggccaatggcagagagaccacagaagtagatttgctgaccaaggagctagaggactttgagatgaagaaagctgctgctcgagctgtcactggcgtcctggcctctcaccccaacagtactgatgttcacatcatcaacctctcacttacctttcatggtcaagagctgctcagtgacaccaaactggaattaaactcaggccgtcgttatggcctcattggtttaaatggaattggaaagtccatgctgctctctgctattgggaagcgtgaagtgcccatccctgagcacatcgacatctaccatctgactcgagagatgccccctagtgacaagacacccttgcattgtgtgatggaagtcgacacagagcgggccatgctggagaaagaggcagagcggctggctcatgaggatgcggagtgtgagaagctcatggagctctacgagcgcctggaggagctggatgccgacaaggcagagatgagggcctcgcggatcttgcatggactgggtttcacacctgccatgcagcgcaagaagctaaaagacttcagtgggggctggaggatgagggttgcccttgcc

SEQ ID NO: 170853 - DNA, 1031 bp, Artificial Sequence
  derived and/or modified sequence
gcgggggcaggccagggcatcagaggcttgatgttgatacgaagattcctgagagggatggagcagggcccaggcattcttactagtaagtttagggtttgggggtatctgtttgccttccttcaggctccctgaaacaacagtaacctacccctgtgggtcatcatcatgccctccgacctggccaagaagaaggcagccaaaaagaaggaggctgccaaagctcgacagcggcccagaaaaggacatgaagaaaatggagatgttgtcacagaaccacaggtggcagagaagaatgaggccaatggcagagagaccacagaagtagatttgctgaccaaggagctagaggactttgagatgaagaaagctgctgctcgagctgtcactggcgtcctggcctctcaccccaacagtactgatgttcacatcatcaacctctcacttacctttcatggtcaagagctgctcagtgacaccaaactggaattaaactcaggccgtcgttatggcctcattggtttaaatggaattggaaagtccatgctgctctctgctattgggaagcgtgaagtgcccatccctgagcacatcgacatctaccatctgactcgagagatgccccctagtgacaagacacccttgcattgtgtgatggaagtcgacacagagcgggccatgctggagaaagaggcagagcggctggctcatgaggatgcggagtgtgagaagctcatggagctctacgagcgcctggaggagctggatgccgacaaggcagagatgagggcctcgcggatcttgcatggactgggtttcacacctgccatgcagcgcaagaagctaaaagacttcagtgggggctggaggatgagggttgcccttgccagagccctctttattcggcccttcatgctgctcctggatgagcctaccaaccacctggacctagatgcttgcgtgtggttggaagaagaactaaaaacttttaagcgcatcttggtcctcgtctcccattcccaggattttct

SEQ ID NO: 170854 - DNA, 1872 bp, Artificial Sequence
  derived and/or modified sequence
atgcccagcgacctggccaagaagaaggccgccaagaagaaggaggccgccaaggccagacagagacccagaaagggccacgaggagaacggcgacgtggtgaccgagccccaggtggccgagaagaacgaggccaacggcagagagaccaccgaggtggacctgctgaccaaggagctggaggacttcgagatgaagaaggccgccgccagagccgtgaccggcgtgctggccagccaccccaacagcaccgacgtgcacatcatcaacctgagcctgaccttccacggccaggagctgctgagcgacaccaagctggagctgaacagcggcagaagatacggcctgatcggcctgaacggcatcggcaagagcatgctgctgagcgccatcggcaagagagaggtgcccatccccgagcacatcgacatctaccacctgaccagagagatgccccccagcgacaagacccccctgcactgcgtgatggaggtggacaccgagagagccatgctggagaaggaggccgagagactggcccacgaggacgccgagtgcgagaagctgatggagctgtacgagagactggaggagctggacgccgacaaggccgagatgagagccagcagaatcctgcacggcctgggcttcacccccgccatgcagagaaagaagctgaaggacttcagcggcggctggagaatgagagtggccctggccagagccctgttcatcagacccttcatgctgctgctggacgagcccaccaaccacctggacctggacgcctgcgtgtggctggaggaggagctgaagaccttcaagagaatcctggtgctggtgagccacagccaggacttcctgaacggcgtgtgcaccaacatcatccacatgcacaacaagaagctgaagtactacaccggcaactacgaccagtacgtgaagaccagactggagctggaggagaaccagatgaagagattccactgggagcaggaccagatcgcccacatgaagaactacatcgccagattcggccacggcagcgccaagctggccagacaggcccagagcaaggagaagaccctgcagaagatgatggccagcggcctgaccgagagagtggtgagcgacaagaccctgagcttctacttccccccctgcggcaagatccccccccccgtgatcatggtgcagaacgtgagcttcaagtacaccaaggacggcccctgcatctacaacaacctggagttcggcatcgacctggacaccagagtggccctggtgggccccaacggcgccggcaagagcaccctgctgaagctgctgaccggcgagctgctgcccaccgacggcatgatcagaaagcacagccacgtgaagatcggcagataccaccagcacctgcaggagcagctggacctggacctgagccccctggagtacatgatgaagtgctaccccgagatcaaggagaaggaggagatgagaaagatcatcggcagatacggcctgaccggcaagcagcaggtgagccccatcagaaacctgagcgacggccagaagtgcagagtgtgcctggcctggctggcctggcagaacccccacatgctgttcctggacgagcccaccaaccacctggacatcgagaccatcgacgccctggccgacgccatcaacgagttcgagggcggcatgatgctggtgagccacgacttcagactgatccagcaggtggcccaggagatctgggtgtgcgagaagcagaccatcaccaagtggcccggcgacatcctggcctacaaggagcacctgaagagcaagctggtggacgaggagccccagctgaccaagagaacccacaacgtgtag

SEQ ID NO: 170855 - DNA, 723 bp, Artificial Sequence
  derived and/or modified sequence
atgcccagcgacctggccaagaagaaggccgccaagaagaaggaggccgccaaggccagacagagacccagaaagggccacgaggagaacggcgacgtggtgaccgagccccaggtggccgagaagaacgaggccaacggcagagagaccaccgaggtggacctgctgaccaaggagctggaggacttcgagatgaagaaggccgccgccagagccgtgaccggcgtgctggccagccaccccaacagcaccgacgtgcacatcatcaacctgagcctgaccttccacggccaggagctgctgagcgacaccaagctggagctgaacagcggcagaagatacggcctgatcggcctgaacggcatcggcaagagcatgctgctgagcgccatcggcaagagagaggtgcccatccccgagcacatcgacatctaccacctgaccagagagatgccccccagcgacaagacccccctgcactgcgtgatggaggtggacaccgagagagccatgctggagaaggaggccgagagactggcccacgaggacgccgagtgcgagaagctgatggagctgtacgagagactggaggagctggacgccgacaaggccgagatgagagccagcagaatcctgcacggcctgggcttcacccccgccatgcagagaaagaagctgaaggacttcagcggcggctggagaatgagagtggccctggcctag

SEQ ID NO: 170856 - DNA, 867 bp, Artificial Sequence
  derived and/or modified sequence
atgcccagcgacctggccaagaagaaggccgccaagaagaaggaggccgccaaggccagacagagacccagaaagggccacgaggagaacggcgacgtggtgaccgagccccaggtggccgagaagaacgaggccaacggcagagagaccaccgaggtggacctgctgaccaaggagctggaggacttcgagatgaagaaggccgccgccagagccgtgaccggcgtgctggccagccaccccaacagcaccgacgtgcacatcatcaacctgagcctgaccttccacggccaggagctgctgagcgacaccaagctggagctgaacagcggcagaagatacggcctgatcggcctgaacggcatcggcaagagcatgctgctgagcgccatcggcaagagagaggtgcccatccccgagcacatcgacatctaccacctgaccagagagatgccccccagcgacaagacccccctgcactgcgtgatggaggtggacaccgagagagccatgctggagaaggaggccgagagactggcccacgaggacgccgagtgcgagaagctgatggagctgtacgagagactggaggagctggacgccgacaaggccgagatgagagccagcagaatcctgcacggcctgggcttcacccccgccatgcagagaaagaagctgaaggacttcagcggcggctggagaatgagagtggccctggccagagccctgttcatcagacccttcatgctgctgctggacgagcccaccaaccacctggacctggacgcctgcgtgtggctggaggaggagctgaagaccttcaagagaatcctggtgctggtgagccacagccaggacttcctgtag

SEQ ID NO: 170857 - protein, 1000 aa, Artificial Sequence
  derived and/or modified sequence
MAERKPNGGSGGASTSSSGTNLLFSSSATEFSFNVPFIPVTQASASPASLLLPGEDSTDVGEEDSFLGQTSIHTSAPQTFSYFSQVSSSSDPFGNIGQSPLTTAATSVGQSGFPKPLTALPFTTGSQDVSNAFSPSISKAQPGAPPSSLMGINSYLPSQPSSLPPSYFGNQPQGIPQPGYNPYRHTPGSSRANPYIAPPQLQQCQTPGPPAHPPPSGPPVQMYQMPPGSLPPVPSSVQSPAQQQVPARPGAPSVQVPSPFLLQNQYEPVQPHWFYCKEVEYKQLWMPFSVFDSLNLEEIYNSVQPDPESVVLGTDGGRYDVYLYDRIRKAAYWEEEPAEVRRCTWFYKGDTDSRFIPYTEEFSEKLEAEYKKAVTTNQWHRRLEFPSGETIVMHNPKVIVQFQPSSVPDEWGTTQDGQTRPRVVKRGIDDNLDEIPDGEMPQVDHLVFVVHGIGPVCDLRFRSIIECVDDFRVVSLKLLRTHFKKSLDDGKVSRVEFLPVHWHSSLGGDATGVDRNIKKITLPSIGRFRHFTNETLLDILFYNSPTYCQTIVEKVGMEINHLHALFMSRNPDFKGGVSVAGHSLGSLILFDILSNQKDLNLSKCPGPLAVANGVVKQLHFQEKQMPEEPKLTLDESYDLVVENKEVLTLQETLEALSLSEYFSTFEKEKIDMESLLMCTVDDLKEMGIPLGPRKKIANFVEHKAAKLKKAASEKKAVAATSTKGQEQSAQKTKDMASLPSESNEPKRKLPVGACVSSVCVNYESFEVGAGQVSVAYNSLDFEPEIFFALGSPIAMFLTIRGVDRIDENYSLPTCKGFFNIYHPLDPVAYRLEPMIVPDLDLKAVLIPHHKGRKRLHLELKESLSRMGSDLKQGFISSLKSAWQTLNEFARAHTSSTQLQEELEKVANQIKEEEEKQVVEAEKVVESPDFSKDEDYLGKVGMLNGGRRIDYVLQEKPIESFNEYLFALQSHLCYWESEDTALLLLKEIYRTMNISPEQPQH

SEQ ID NO: 170858 - protein, 153 aa, Artificial Sequence
  derived and/or modified sequence
  misc_feature (1)..(1): Xaa can be any naturally occurring amino acid
XSVQSPAQQQVPARPGAPSVQVPSPFLLQNQYEPVQPHWFYCKEVEYKQLWMPFSVFDSLNLEEIYNSVQPDPESVVLGTDGGRYDVYLYDRIRKAAYWEEEPAEVRRCTWFYKGDTDSRFIPYTEEFSEKLEVRVLYFFMSFFKKCRSYIHW

SEQ ID NO: 170859 - protein, 789 aa, Artificial Sequence
  derived and/or modified sequence
MCPSSQSPRPPLLRPPCSYREVPSSVQSPAQQQVPARPGAPSVQVPSPFLLQNQYEPVQPHWFYCKEVEYKQLWMPFSVFDSLNLEEIYNSVQPDPESVVLGTDGGRYDVYLYDRIRKAAYWEEEPAEVRRCTWFYKGDTDSRFIPYTEEFSEKLEAEYKKAVTTNQWHRRLEFPSGETIVMHNPKVIVQFQPSSVPDEWGTTQDGQTRPRVVKRGIDDNLDEIPDGEMPQVDHLVFVVHGIGPVCDLRFRSIIECVDDFRVVSLKLLRTHFKKSLDDGKVSRVEFLPVHWHSSLGGDATGVDRNIKKITLPSIGRFRHFTNETLLDILFYNSPTYCQTIVEKVGMEINHLHALFMSRNPDFKGGVSVAGHSLGSLILFDILSNQKDLNLSKCPGPLAVANGVVKQLHFQEKQMPEEPKLTLDESYDLVVENKEVLTLQETLEALSLSEYFSTFEKEKIDMESLLMCTVDDLKEMGIPLGPRKKIANFVEHKAAKLKKAASEKKAVAATSTKGQEQSAQKTKDMASLPSESNEPKRKLPVGACVSSVCVNYESFEVGAGQVSVAYNSLDFEPEIFFALGSPIAMFLTIRGVDRIDENYSLPTCKGFFNIYHPLDPVAYRLEPMIVPDLDLKAVLIPHHKGRKRLHLELKESLSRMGSDLKQGFISSLKSAWQTLNEFARAHTSSTQLQEELEKVANQIKEEEEKQVVEAEKVVESPDFSKDEDYLGKVGMLNGGRRIDYVLQEKPIESFNEYLFALQSHLCYWESEDTALLLLKEIYRTMNISPEQPQH

SEQ ID NO: 170860 - DNA, 3003 bp, Artificial Sequence
  derived and/or modified sequence
atggccgagagaaagcccaacggcggcagcggcggcgccagcaccagcagcagcggcaccaacctgctgttcagcagcagcgccaccgagttcagcttcaacgtgcccttcatccccgtgacccaggccagcgccagccccgccagcctgctgctgcccggcgaggacagcaccgacgtgggcgaggaggacagcttcctgggccagaccagcatccacaccagcgccccccagaccttcagctacttcagccaggtgagcagcagcagcgaccccttcggcaacatcggccagagccccctgaccaccgccgccaccagcgtgggccagagcggcttccccaagcccctgaccgccctgcccttcaccaccggcagccaggacgtgagcaacgccttcagccccagcatcagcaaggcccagcccggcgccccccccagcagcctgatgggcatcaacagctacctgcccagccagcccagcagcctgccccccagctacttcggcaaccagccccagggcatcccccagcccggctacaacccctacagacacacccccggcagcagcagagccaacccctacatcgcccccccccagctgcagcagtgccagacccccggcccccccgcccaccccccccccagcggcccccccgtgcagatgtaccagatgccccccggcagcctgccccccgtgcccagcagcgtgcagagccccgcccagcagcaggtgcccgccagacccggcgcccccagcgtgcaggtgcccagccccttcctgctgcagaaccagtacgagcccgtgcagccccactggttctactgcaaggaggtggagtacaagcagctgtggatgcccttcagcgtgttcgacagcctgaacctggaggagatctacaacagcgtgcagcccgaccccgagagcgtggtgctgggcaccgacggcggcagatacgacgtgtacctgtacgacagaatcagaaaggccgcctactgggaggaggagcccgccgaggtgagaagatgcacctggttctacaagggcgacaccgacagcagattcatcccctacaccgaggagttcagcgagaagctggaggccgagtacaagaaggccgtgaccaccaaccagtggcacagaagactggagttccccagcggcgagaccatcgtgatgcacaaccccaaggtgatcgtgcagttccagcccagcagcgtgcccgacgagtggggcaccacccaggacggccagaccagacccagagtggtgaagagaggcatcgacgacaacctggacgagatccccgacggcgagatgccccaggtggaccacctggtgttcgtggtgcacggcatcggccccgtgtgcgacctgagattcagaagcatcatcgagtgcgtggacgacttcagagtggtgagcctgaagctgctgagaacccacttcaagaagagcctggacgacggcaaggtgagcagagtggagttcctgcccgtgcactggcacagcagcctgggcggcgacgccaccggcgtggacagaaacatcaagaagatcaccctgcccagcatcggcagattcagacacttcaccaacgagaccctgctggacatcctgttctacaacagccccacctactgccagaccatcgtggagaaggtgggcatggagatcaaccacctgcacgccctgttcatgagcagaaaccccgacttcaagggcggcgtgagcgtggccggccacagcctgggcagcctgatcctgttcgacatcctgagcaaccagaaggacctgaacctgagcaagtgccccggccccctggccgtggccaacggcgtggtgaagcagctgcacttccaggagaagcagatgcccgaggagcccaagctgaccctggacgagagctacgacctggtggtggagaacaaggaggtgctgaccctgcaggagaccctggaggccctgagcctgagcgagtacttcagcaccttcgagaaggagaagatcgacatggagagcctgctgatgtgcaccgtggacgacctgaaggagatgggcatccccctgggccccagaaagaagatcgccaacttcgtggagcacaaggccgccaagctgaagaaggccgccagcgagaagaaggccgtggccgccaccagcaccaagggccaggagcagagcgcccagaagaccaaggacatggccagcctgcccagcgagagcaacgagcccaagagaaagctgcccgtgggcgcctgcgtgagcagcgtgtgcgtgaactacgagagcttcgaggtgggcgccggccaggtgagcgtggcctacaacagcctggacttcgagcccgagatcttcttcgccctgggcagccccatcgccatgttcctgaccatcagaggcgtggacagaatcgacgagaactacagcctgcccacctgcaagggcttcttcaacatctaccaccccctggaccccgtggcctacagactggagcccatgatcgtgcccgacctggacctgaaggccgtgctgatcccccaccacaagggcagaaagagactgcacctggagctgaaggagagcctgagcagaatgggcagcgacctgaagcagggcttcatcagcagcctgaagagcgcctggcagaccctgaacgagttcgccagagcccacaccagcagcacccagctgcaggaggagctggagaaggtggccaaccagatcaaggaggaggaggagaagcaggtggtggaggccgagaaggtggtggagagccccgacttcagcaaggacgaggactacctgggcaaggtgggcatgctgaacggcggcagaagaatcgactacgtgctgcaggagaagcccatcgagagcttcaacgagtacctgttcgccctgcagagccacctgtgctactgggagagcgaggacaccgccctgctgctgctgaaggagatctacagaaccatgaacatcagccccgagcagccccagcactag

SEQ ID NO: 170861 - DNA, 2370 bp, Artificial Sequence
  derived and/or modified sequence
atgtgccccagcagccagagccccagaccccccctgctgagacccccctgcagctacagagaggtgcccagcagcgtgcagagccccgcccagcagcaggtgcccgccagacccggcgcccccagcgtgcaggtgcccagccccttcctgctgcagaaccagtacgagcccgtgcagccccactggttctactgcaaggaggtggagtacaagcagctgtggatgcccttcagcgtgttcgacagcctgaacctggaggagatctacaacagcgtgcagcccgaccccgagagcgtggtgctgggcaccgacggcggcagatacgacgtgtacctgtacgacagaatcagaaaggccgcctactgggaggaggagcccgccgaggtgagaagatgcacctggttctacaagggcgacaccgacagcagattcatcccctacaccgaggagttcagcgagaagctggaggccgagtacaagaaggccgtgaccaccaaccagtggcacagaagactggagttccccagcggcgagaccatcgtgatgcacaaccccaaggtgatcgtgcagttccagcccagcagcgtgcccgacgagtggggcaccacccaggacggccagaccagacccagagtggtgaagagaggcatcgacgacaacctggacgagatccccgacggcgagatgccccaggtggaccacctggtgttcgtggtgcacggcatcggccccgtgtgcgacctgagattcagaagcatcatcgagtgcgtggacgacttcagagtggtgagcctgaagctgctgagaacccacttcaagaagagcctggacgacggcaaggtgagcagagtggagttcctgcccgtgcactggcacagcagcctgggcggcgacgccaccggcgtggacagaaacatcaagaagatcaccctgcccagcatcggcagattcagacacttcaccaacgagaccctgctggacatcctgttctacaacagccccacctactgccagaccatcgtggagaaggtgggcatggagatcaaccacctgcacgccctgttcatgagcagaaaccccgacttcaagggcggcgtgagcgtggccggccacagcctgggcagcctgatcctgttcgacatcctgagcaaccagaaggacctgaacctgagcaagtgccccggccccctggccgtggccaacggcgtggtgaagcagctgcacttccaggagaagcagatgcccgaggagcccaagctgaccctggacgagagctacgacctggtggtggagaacaaggaggtgctgaccctgcaggagaccctggaggccctgagcctgagcgagtacttcagcaccttcgagaaggagaagatcgacatggagagcctgctgatgtgcaccgtggacgacctgaaggagatgggcatccccctgggccccagaaagaagatcgccaacttcgtggagcacaaggccgccaagctgaagaaggccgccagcgagaagaaggccgtggccgccaccagcaccaagggccaggagcagagcgcccagaagaccaaggacatggccagcctgcccagcgagagcaacgagcccaagagaaagctgcccgtgggcgcctgcgtgagcagcgtgtgcgtgaactacgagagcttcgaggtgggcgccggccaggtgagcgtggcctacaacagcctggacttcgagcccgagatcttcttcgccctgggcagccccatcgccatgttcctgaccatcagaggcgtggacagaatcgacgagaactacagcctgcccacctgcaagggcttcttcaacatctaccaccccctggaccccgtggcctacagactggagcccatgatcgtgcccgacctggacctgaaggccgtgctgatcccccaccacaagggcagaaagagactgcacctggagctgaaggagagcctgagcagaatgggcagcgacctgaagcagggcttcatcagcagcctgaagagcgcctggcagaccctgaacgagttcgccagagcccacaccagcagcacccagctgcaggaggagctggagaaggtggccaaccagatcaaggaggaggaggagaagcaggtggtggaggccgagaaggtggtggagagccccgacttcagcaaggacgaggactacctgggcaaggtgggcatgctgaacggcggcagaagaatcgactacgtgctgcaggagaagcccatcgagagcttcaacgagtacctgttcgccctgcagagccacctgtgctactgggagagcgaggacaccgccctgctgctgctgaaggagatctacagaaccatgaacatcagccccgagcagccccagcactag

SEQ ID NO: 170862 - DNA, 3003 bp, Artificial Sequence
  derived and/or modified sequence
atggccgagcgaaagccaaacggggggagcggaggggctagcacatcttcctcaggcaccaatttgctgttctcaagctcagctacagaattttcgttcaatgtacctttcattcccgtaacgcaggctagcgcctcccccgccagcctccttcttccaggggaagactctaccgatgtgggtgaggaagattcatttcttggtcagacatccatccacacttctgccccccagacattctcctacttcagtcaggtgagcagtagctctgaccccttcggtaacattggtcagtcgcccttaaccacggcagctactagcgtcggccagtctggatttcccaagccactgaccgcactcccatttacaaccgggagccaagacgtttccaacgctttctcccctagtatatcaaaggcgcaacccggggcacctccttctagccttatggggatcaatagttatctgccttcccagccgtcgagtctgcccccatcctattttggtaaccagcctcagggcatcccacagcctgggtacaacccctataggcacacccccggcagcagtcgggctaatccttacattgcccctccccagttgcagcaatgccaaacgcccggcccccctgcacacccacccccatcaggcccccccgtacaaatgtaccaaatgccccctggatcacttccccctgtccctagctcagtgcaaagcccagctcagcagcaggtgcctgctcgtcccggcgcaccatcggtccaggtcccgtccccgtttctcctgcagaaccaatacgagcctgtgcagccccactggttttattgcaaggaagtcgagtataagcaactctggatgcctttctccgtattcgactcactcaatctggaagagatttacaacagcgtccaacctgatcctgaatccgtggtcctggggaccgacggaggtcgatatgatgtgtatttgtacgaccggattaggaaggcagcctactgggaggaggagccggcagaagtgcgccgctgtacatggttttacaaaggcgacaccgacagccggtttatcccctatacagaggagttctccgagaaactggaagcagagtataaaaaagcagtcactacaaaccaatggcaccggaggctagaattcccatccggcgagacgatcgttatgcacaacccgaaagtgattgttcagtttcaaccttctagcgtgccagatgagtggggaacaactcaagatggacaaacaaggcctcgtgttgttaaaagagggattgatgacaacttggacgaaatcccagacggggaaatgccgcaggtggaccacctcgtctttgttgtgcacggaatcgggcctgtttgcgatctacggttcagatctattattgagtgtgtggatgatttcagagtcgtctccctcaaattgttaagaacacacttcaagaaatcgctggacgatgggaaggttagccgagtggaattcctgcctgtgcactggcattcctctttaggaggagatgctactggcgtcgaccgaaatatcaaaaagattacactaccgagcattgggcgcttccgccactttacaaatgagacgctgctggacattttattttataactcccctacttactgtcagacgattgttgaaaaggtaggtatggagattaatcacctgcatgccctgtttatgtcgcggaaccccgattttaagggtggggttagtgtcgcaggtcactccctgggttcactgatcttatttgacattctctctaatcagaaggacctgaacctcagcaagtgccctgggccactcgccgtggcgaatggcgtggtaaagcagctccacttccaggagaaacagatgccagaagaacccaagcttacactcgacgagagttacgatctggtcgtggagaataaagaggtgctgactctgcaggaaaccctggaagccttgtctttaagcgagtatttctctacattcgagaaagaaaagattgatatggagtctctgttgatgtgcaccgtggacgatctgaaggagatggggatccctcttggcccccgaaagaaaatcgcaaattttgtggagcataaggcagccaagctgaaaaaagccgcgtctgagaaaaaggccgtcgcagctactagcacgaaagggcaggagcagtccgcgcagaagaccaaggacatggcttcactacctagcgagtcaaacgaacccaagagaaagcttccagtcggggcttgcgtgagtagcgtgtgtgtgaattacgagtcgtttgaggtgggcgccggacaagtctccgtggcctataatagcctcgacttcgagcctgagatattttttgcactcggtagcccaatcgccatgtttctgacaataaggggtgtcgataggatcgacgaaaactacagcctccctacttgtaaagggttttttaacatctaccaccctctcgatcctgtagcttaccggctagagcctatgatcgtgcccgacctcgatcttaaagcagtgctgatcccccaccacaagggccgcaagcggctgcacttggagctcaaggaatcacttagcaggatgggcagcgatctcaagcagggcttcatctcttctctcaaatccgcttggcaaaccctaaatgaattcgcgagggcacacacgtccagcacccaattacaagaagaactagagaaagttgctaatcaaatcaaagaggaagaggagaagcaggtcgtcgaagcagagaaggtcgtggagtcacccgatttcagcaaggacgaagattacctagggaaggtcgggatgctcaatggcggcaggcggatagactatgtactacaggagaagccaatcgagtccttcaacgagtacttgtttgcacttcagagtcacttgtgttattgggaaagtgaggacaccgctctgttgctgttgaaggagatctaccggacgatgaacatctcacctgaacagccgcagcactag

SEQ ID NO: 170863 - DNA, 4656 bp, Artificial Sequence
  derived and/or modified sequence
gcgtgatcggtttccggtcagtggtgtggtaccgggtacccggagacgtgtatcggacggtgggccgcagccatggccgagagaaaacctaacggtggcagcggcggcgcctccacttcctcatcgggcactaacttacttttctcctcctcggccacggagttcagcttcaatgtgcccttcatcccagtcacccaggcctccgcttctccggcctccctgctcttaccgggagaggattccacagatgttggtgaggaggacagcttccttggtcagacttctattcacacatctgccccacagacatttagttacttctctcaggtatcaagcagcagtgatccttttgggaatattggacagtcaccattaacaactgcagcaacctcagttggacaatcaggattccccaagcccctgactgctctcccttttacaactggatcccaagatgtctcgaatgcattttcaccatccatttcgaaggctcaacctggtgctccaccttcctcactgatgggaataaattcttatctgccttctcagccaagtagtctccctccttcatattttgggaaccaaccccaaggaattccccaaccaggatacaatccatatcgccatacccctggcagcagcagggctaatccttacattgcaccaccccagctgcagcagtgccaaacaccaggccctcctgctcatcctccaccttctggaccccctgttcagatgtaccagatgcctccaggatctttgccaccggttccttcttcagtgcagtcaccggcacagcagcaggtacctgccagacctggggctccctctgttcaagtgccatctccttttctacttcaaaaccaatatgagcctgttcagccccactggttttactgcaaggaggtagaatacaaacaactgtggatgccttttagtgtgttcgactctttgaatcttgaagaaatctataattcagttcagccagatccggagagcgtggttcttggcacggatggagggcgctacgatgtttacctctatgaccgaataaggaaggctgcctactgggaagaggagccagccgaagtgagacgctgtacttggttttacaagggggacacagatagtcgatttattccctatactgaggagttcagtgaaaaactagaggctgaatataaaaaagctgtaaccactaatcagtggcaccgaagattagagtttccaagtggagagacaattgttatgcacaatccaaaggttattgttcagttccagccctcctcagtgccagatgaatggggcaccacgcaagatggacagacaaggcccagggttgtaaagcgtggaattgatgataaccttgatgaaattcccgacggggagatgcctcaagttgaccatttggtgtttgtggtgcatggcattggacctgtgtgtgacttacgctttaggagcattattgagtgtgtggatgattttagggtggtttctctcaaattgctgcggacacatttcaagaaatctttagatgacgggaaagtaagcagagtggagttccttccagttcattggcatagttctttgggtggggacgccacaggtgtggacaggaatattaagaaaatcactttgccaagtattggtcgatttcgtcactttaccaatgaaactttgctagatattttattttataacagccccacctactgtcagacaattgtggaaaaagtaggaatggagataaaccatctgcatgcactctttatgagtcggaacccagacttcaaaggaggtgtctctgttgctggtcacagtttaggttctttaatattgtttgacatcctgtctaatcaaaaagatttgaatttatcaaagtgccctggacctcttgctgttgctaatggagttgtgaagcagctacattttcaggaaaagcagatgcctgaagagccaaagctgactttggatgagtcgtatgaccttgttgttgaaaataaagaagtcctaactttgcaagaaactctggaagcacttagcctctctgaatattttagcacttttgaaaaggaaaagattgatatggagtccctgcttatgtgtacagttgatgacctgaaggaaatggggataccccttggacccagaaagaagatagctaactttgtagaacataaagcagccaaactgaaaaaagcagcgtcagaaaagaaggcagtggcggccacttctacaaaaggacaagagcaaagtgcccagaagactaaagacatggcttccctcccctcagaatccaatgagccaaagaggaaacttccagttggtgcttgcgtgtcttctgtgtgtgtgaattatgaatcttttgaagttggcgccggacaggtttctgttgcttacaactcattagattttgaaccagagatattctttgccttggggtctccaattgctatgtttctcactattcgaggagttgataggatagatgagaattacagccttcctacctgtaaagggttcttcaatatttatcatccgcttgatccagtggcatatagattagaacctatgattgttccagatttggacctaaaagctgttctcattccacatcacaaaggcagaaaaagacttcatttagaattgaaagagagtctctctcgtatgggatctgatttgaagcagggttttattagctctctcaaaagtgcttggcagacattaaatgagtttgcccgtgctcatacgtcttcaacccagttgcaagaagaattggagaaggtggccaatcagatcaaagaagaagaagaaaagcaagtagttgaagcagaaaaggttgttgaaagtccagatttttccaaggatgaggactacttaggaaaggttggaatgttaaatggaggccgccgaattgactacgttctccaagaaaaaccaatagagagttttaatgaataccttttcgctcttcagagtcacttatgctattgggaatctgaagatactgctctgttactacttaaagaaatttatcgaacaatgaacattagtccagaacagccccagcattgatcaaacttcagttttactgtactttcttgtctgcacagaaagtcccagtacaacttccattgctgagaaaatcctcagaggactttcccacttcgctcctgtgatggatgacagaagagtgattcattaacaattgctcagccacaattctcggatatagggattcaaaagacaggacacagaactaacacagtgaaaaaaatcagtaccacatttggacagtataggtgagaaaacataattataaaaatgatgccatgaaaaattccacagatcagtttagttgtatagttgtcaaagttatatgtgatatcaatgaagaaatatttgtagcatgtaaacggttatttctgtttcttaaaaagtattgttagtgggctattaaacttggatttttctttttattaatgcagtatgttctttttattcaagtatgaacttgttgagaaactatagtaatatgatttttaagagatttatgttctacttaaaatgtgaattgtacttctgagctgccttaatgcaaggtcatttatatttgttaagaggaaataatcaagatcactcatatcccaactgaatctgaggttttataaatccctcaaacgattgctgagagcctgattgtggaaagaagtgagatgcaccttattttcaagaagtcctgggaagcgctctcctagcacgtccatttccaggaggagaagcaagcagatgagaggttttccattttgtcatccaaggtagctgtgcacttgccttgttgctgaagttccaataatgtgaaaaccaaagtagaggtttttttcttcttctttttgttttctattaatttcacttataccaaagtgtttgaaagtatgaaatgtgttgcttctgagttatataaggctacttcatgacaagactgctttgtaatatttcactttgttttactacaaattcagatcactttgttttactataaattcagattatccaaatattttcctaatactatgtgggaatgctgattttcttttgttacgtagtggaaacattttgcattgtttacatagttctcatggaacatggaaatttttgaaagtgatatatgatacacattttttgtgtatgtattctaattagtgtgaataaagcagtaacattaatgcattttttaagcagcaaacttatgtatttctcttgtcttccttaaaagtgtccccatgaactcagtgtttattcccttttcattttgagtacctgcttatatggtcagtatgtaacgttagcattggctcctaatggtagaattagaacagcaagattgtagagctgtaattgactccagacaacatagatttcagccacctcattctacagctgaggccaggacaataaatgcctttcccagactgggtagtggcagatctgggatggaatatggttttcttgattccctttcagccttcatttctctctctcaggactactactttttaattacttttcacttaatttcccaatactgatgaaataaagaaaaatgagggttatttatatacatttcaataaaatccaatttgatttttcaactta

SEQ ID NO: 170864 - DNA, 2370 bp, Artificial Sequence
  derived and/or modified sequence
atgtgtccaagcagccagagcccgcggcctccgctgcttcggccaccctgtagttacagggaggtcccttcttctgttcagtcaccagcccagcagcaggtgcctgcccgtccgggggcaccctccgtgcaggttccatccccttttttgttgcagaatcagtacgaacccgtgcagccccattggttttattgcaaagaagtcgaatacaagcagctgtggatgccgttctccgtgttcgatagtctgaacctcgaggaaatatacaacagtgtgcagcccgacccagagtcagtggtgctggggacagatggaggtcgatacgacgtgtatctgtacgatcgtatccggaaggcagcctactgggaggaggaacccgctgaagttcgtaggtgtacctggttctacaagggggataccgattcacggtttatcccttatacagaagaattttcagagaagttggaagccgagtacaaaaaagcagtaacaaccaatcaatggcaccggaggcttgaatttcccagcggcgaaaccatagtcatgcacaatcctaaggtgatcgtacagttccagccgtcaagcgtacctgatgaatggggcacgacccaggacgggcagacacggccgagagtggttaagcggggcattgacgataatctggacgagattccagatggcgaaatgcctcaggtggatcacctagtctttgtcgtacatggcatcggccctgtgtgcgatctccgctttaggtccattatcgagtgcgtcgatgatttccgagtggtttctcttaagctgttaaggacccactttaaaaagtctctggacgacgggaaagtgagcagggttgagtttctgcctgtgcactggcactcttccctgggaggcgatgccacgggcgtagatagaaacatcaaaaaaataacactgccctctattggtcggtttcgccactttaccaacgagacgctgctggatattcttttttataatagcccgacttattgccagacaatagtggagaaagttggtatggaaataaaccacctccatgcgctcttcatgtcccgtaatccagatttcaagggaggcgtgagcgtggccggccatagcctgggcagcctaattctatttgatatccttagcaaccaaaaggatttgaatctatccaaatgccctgggccattggcagtggcgaacggcgtggtcaagcaacttcatttccaagaaaagcagatgcccgaagagccaaagctaactttggacgagtcttatgatctcgttgtcgagaacaaggaagtgctgactctacaagaaaccctcgaagctttatcattgtctgaatatttcagtaccttcgaaaaggaaaaaattgacatggagtcactgcttatgtgcaccgtcgatgatttgaaagagatgggcatcccattaggacccagaaaaaagatcgcaaacttcgtggagcacaaagcggccaagttaaagaaagcagcctccgagaagaaggctgtagccgcaacatccaccaaaggacaagagcagagtgcccagaagactaaagatatggccagcctgccctctgagtcgaatgaacccaaacgcaaactgcctgtcggagcctgcgtatcatcagtgtgtgttaactacgaatcatttgaagtgggagcaggccaagtctcagtggcctataattctctggattttgagccagaaatcttttttgctctcggcagccccatagcaatgtttctgaccatcagaggagttgacaggattgacgagaattactccctgcccacctgcaaaggctttttcaatatatatcatccactcgacccggtcgcctaccgcctggaacctatgatcgtgcccgatcttgacctcaaggcggttctaataccccaccataagggacgcaagagactacacctcgagttgaaggaatctctgtcacgcatggggtccgacctgaagcagggcttcatcagctctctgaaaagtgcctggcaaacactgaatgagtttgcaagagcgcacacttctagcacccagctgcaggaagagctcgaaaaggtcgccaaccagattaaagaggaagaggagaagcaggttgttgaagctgagaaagtcgtggagtcacccgatttctccaaagatgaagactatctgggcaaagtcgggatgctgaatggtggtaggaggatcgactacgttctccaagaaaaaccaatcgaaagcttcaacgaatatctttttgcactccaatcccacctatgctactgggagtccgaggatacggccctgcttctcctcaaggaaatatataggaccatgaacatctccccagagcaaccgcaacattag

SEQ ID NO: 170865 - DNA, 3003 bp, Artificial Sequence
  derived and/or modified sequence
atggccgagaggaagcccaatggaggcagcggcggggccagcaccagcagcagcggcaccaacctgctcttcagcagcagcgccacagagttctccttcaacgtgcccttcatccctgtgacccaggccagcgccagccctgccagcctgctgctgcctggagaggacagcacagatgtgggggaggaggacagcttcctgggccagaccagcatccacaccagcgccccccagaccttctcctacttcagccaggtgagcagcagcagtgacccctttggaaacatcggccagagccccctgaccacagctgccacctctgtgggccagagcggcttccccaagcccctgacagccctgcccttcaccaccggcagccaggatgtgtccaatgccttcagccccagcatcagcaaggcccagcccggggccccacccagcagcctgatgggcatcaacagctacctgcccagccagcccagcagcctgccccccagctacttcggcaaccagccccagggcatcccccagcccggctacaacccctaccgccacaccccaggcagcagccgggccaacccctacatcgccccaccccagctgcagcagtgccagaccccaggccccccagcccaccccccacccagcggcccccctgtgcagatgtaccagatgcctcctggcagcctgccccctgtgcccagctctgtgcagagccctgcccagcagcaggtgcctgcccggcctggggcccccagcgtgcaggtgcccagccccttcctgctgcagaaccagtatgagcctgtgcagccccactggttctactgcaaggaggtggagtacaagcagctgtggatgcccttctctgtgtttgacagcctgaacctggaggagatctacaacagcgtgcagcctgaccctgagagcgtggtgctgggcacagatggcggccgctatgatgtgtacctgtatgaccgcatcaggaaggccgcctactgggaggaggagcctgctgaggtgcggcgctgcacctggttctacaagggggacacagacagccgcttcatcccctacacagaggagttcagcgagaagctggaggccgagtacaagaaggctgtgaccaccaaccagtggcaccggcggctggagttccccagcggggagaccatcgtgatgcacaaccccaaggtgattgtgcagttccagcccagctctgtgcctgatgagtggggcaccacccaggacggccagacccggccccgggtggtgaagaggggcattgatgacaacctggatgagatcccagatggagagatgccccaggtggaccacctggtgtttgtggtgcatggaattggccctgtgtgtgacctgcgcttccgcagcatcattgaatgtgtggatgacttccgggtggtgtccctgaagctgctgcggacccacttcaagaagagcctggatgatggcaaggtgtcccgggtggagttcctgcctgtgcactggcacagcagcctgggcggagatgccactggagtggacaggaacatcaagaagatcaccctgcccagcatcggccgcttccgccacttcaccaatgagaccctgctggacatcctcttctacaacagccccacctactgccagaccatcgtggagaaggtgggcatggagatcaaccacctgcacgccctcttcatgagcagaaatccagacttcaagggcggcgtgtctgtggccggccacagcctgggcagcctcatcctgtttgacatcctgagcaaccagaaggacctgaacctgagcaaatgtcctggccccctggccgtggccaacggggtggtgaagcagctgcacttccaggagaagcagatgcctgaggagcccaagctgaccctggatgagagctatgacctggtggtggagaacaaggaggtgctgaccctgcaggagaccctggaggccctgagcctgtctgagtacttcagcacctttgagaaggagaagattgacatggagagcctgctgatgtgcaccgtggatgacctgaaggagatgggcatccccctgggccccaggaagaagatcgccaactttgtggagcacaaggccgccaagctgaagaaggccgccagcgagaagaaggctgtggccgccaccagcaccaagggccaggagcagagcgcccagaagaccaaggacatggccagcctgcccagcgagagcaatgagcccaagaggaagctgcctgtgggcgcctgtgtgtcctctgtgtgtgtgaactatgagagctttgaggtgggcgccggccaggtgtctgtggcctacaacagcctggactttgagcctgagatcttctttgccctgggcagccccatcgccatgttcctgaccatccggggcgtggacagaattgatgagaactacagcctgcccacctgcaagggcttcttcaacatctaccaccccctggaccctgtggcctaccgcctggagcccatgattgtgcctgacctggacctgaaggctgtgctgatcccccaccacaagggcaggaagaggctgcacctggagctgaaggagagcctgagcaggatgggcagtgacctgaagcagggcttcatcagcagcctgaagagcgcctggcagaccctgaatgaatttgcccgggcccacaccagcagcacccagctgcaggaggagctggagaaggtggccaaccagatcaaggaggaggaggagaagcaggtggtggaggccgagaaggtggtggagagcccagacttcagcaaggatgaggactacctgggcaaggtgggcatgctgaatggaggaagaagaattgattatgtgctgcaggagaagcccatcgagagcttcaatgagtacctgtttgccctgcagagccacctgtgctactgggagagcgaggacacagccctgctgctgctgaaggagatctaccgcaccatgaacatcagccctgagcagccccagcactag

SEQ ID NO: 170866 - DNA, 2370 bp, Artificial Sequence
  derived and/or modified sequence
atgtgccccagcagccagagcccccggccccccctgctgcggcccccctgcagctaccgggaggtgcccagctctgtgcagagccctgcccagcagcaggtgcctgcccggcctggggcccccagcgtgcaggtgcccagccccttcctgctgcagaaccagtatgagcctgtgcagccccactggttctactgcaaggaggtggagtacaagcagctgtggatgcccttctctgtgtttgacagcctgaacctggaggagatctacaacagcgtgcagcctgaccctgagagcgtggtgctgggcacagatggcggccgctatgatgtgtacctgtatgaccgcatcaggaaggccgcctactgggaggaggagcctgctgaggtgcggcgctgcacctggttctacaagggggacacagacagccgcttcatcccctacacagaggagttcagcgagaagctggaggccgagtacaagaaggctgtgaccaccaaccagtggcaccggcggctggagttccccagcggggagaccatcgtgatgcacaaccccaaggtgattgtgcagttccagcccagctctgtgcctgatgagtggggcaccacccaggacggccagacccggccccgggtggtgaagaggggcattgatgacaacctggatgagatcccagatggagagatgccccaggtggaccacctggtgtttgtggtgcacggcatcggccctgtgtgtgacctgcgcttccgcagcatcattgaatgtgtggatgacttccgggtggtgtccctgaagctgctgcggacccacttcaagaagagcctggatgatggcaaggtgtcccgggtggagttcctgcctgtgcactggcacagcagcctgggcggagatgccaccggggtggacaggaacatcaagaagatcaccctgcccagcatcggccgcttccgccacttcaccaatgagaccctgctggacatcctcttctacaacagccccacctactgccagaccatcgtggagaaggtgggcatggagatcaaccacctgcacgccctcttcatgagcaggaacccagacttcaagggcggcgtgtctgtggccggccacagcctgggcagcctcatcctgtttgacatcctgagcaaccagaaggacctgaacctgagcaagtgccccggccccctggccgtggccaatggagtggtgaagcagctgcacttccaggagaagcagatgcctgaggagcccaagctgaccctggatgagagctatgacctggtggtggagaacaaggaggtgctgaccctgcaggagaccctggaggccctgagcctgtctgagtacttcagcacctttgagaaggagaagattgacatggagagcctgctgatgtgcaccgtggatgacctgaaggagatgggcatccccctgggccccaggaagaagatcgccaactttgtggagcacaaggccgccaagctgaagaaggccgccagcgagaagaaggctgtggccgccaccagcaccaagggccaggagcagagcgcccagaagaccaaggacatggccagcctgcccagcgagagcaatgagcccaagaggaagctgcctgtgggcgcctgtgtgtcctctgtgtgtgtgaactatgagagctttgaggtgggcgccggccaggtgtctgtggcctacaacagcctggactttgagcctgagatcttctttgccctgggcagccccatcgccatgttcctgaccatccggggcgtggacagaattgatgagaactacagcctgcccacctgcaagggcttcttcaacatctaccaccccctggaccctgtggcctaccgcctggagcccatgattgtgcctgacctggacctgaaggctgtgctgatcccccaccacaagggcaggaagaggctgcacctggagctgaaggagagcctgagcaggatgggcagtgacctgaagcagggcttcatcagcagcctgaagagcgcctggcagaccctgaatgaatttgcccgggcccacaccagcagcacccagctgcaggaggagctggagaaggtggccaaccagatcaaggaggaggaggagaagcaggtggtggaggccgagaaggtggtggagagcccagacttcagcaaggatgaggactacctgggcaaggtgggcatgctgaatggaggaagaagaattgattatgtgctgcaggagaagcccatcgagagcttcaatgagtacctgtttgccctgcagagccacctgtgctactgggagagcgaggacacagccctgctgctgctgaaggagatctaccgcaccatgaacatcagccctgagcagccccagcactag

SEQ ID NO: 170867 - DNA, 3003 bp, Artificial Sequence
  derived and/or modified sequence
atggccgagcggaagcccaacggcggcagcggcggcgccagcacctccagctctggaaccaacctcctttttagcagttctgctaccgaattctcctttaacgttcccttcatccccgtgacacaggcctcggctagccctgcctcccttctgttaccaggcgaagactctacggatgtgggggaggaagattcttttttgggtcagacctccatccatacctccgcaccccagactttttcctatttctcccaggtgagctcttcaagcgacccatttggaaacattggccagtcccccctgacgaccgcggccacaagtgtggggcagagcgggttcccaaaacctcttacagccctgccattcaccactggctctcaagacgtgagtaatgcattcagtccaagtatttccaaagctcagccaggagccccgcctagctccctgatgggcattaactcctacctcccctcgcagccgtcatccctccccccttcctactttgggaaccagccgcagggcattcctcaacccggctataacccctaccggcacacccccggatcttccagggccaacccctacatcgccccgcctcagttgcaacaatgtcagacccctggtccaccggcgcaccccccacccagcggccctccagtccagatgtaccagatgccaccggggagtctgcccccagtgccctctagtgtgcagagccccgcgcagcaacaagtccccgcacgaccaggcgctccttccgtgcaggtgccaagccctttcctgcttcagaaccaatatgaacctgtacagcctcactggttctattgcaaagaagtggagtacaagcagctgtggatgccattttctgttttcgatagtctaaatctggaggagatatataatagcgtgcagcccgaccctgagtcagtcgtgttaggaaccgatggcggccgctatgatgtgtacttatacgacagaatccggaaggctgcctactgggaggaggagccggcagaggtacgccggtgtacctggttctacaagggggatactgacagtcgtttcatcccttacacggaggagttttccgaaaaacttgaagcagaatacaagaaagcggtgaccacaaaccagtggcaccgcagactagagttcccctcaggagagaccattgtaatgcataatcctaaagttatcgttcagtttcagccaagcagcgtacccgacgaatggggcaccactcaggacggtcagacacgcccacgcgtcgtcaaaaggggcatcgatgataacctcgacgagatacctgacggcgaaatgccacaggtggaccacctggtatttgttgtccatgggattggccctgtgtgtgaccttcgatttaggtctattatagagtgcgttgacgactttagagtggtgagcttaaaacttctacgtacacactttaagaaaagcttagacgacgggaaggtctctcgggtggaatttctgcctgtgcattggcactcatccctcgggggggatgccacaggagtcgatagaaatatcaaaaaaataaccctgccctctattggccggttccggcattttacaaacgagacactgctggatatcttattctacaacagcccaacatactgccagaccattgtagaaaaagtcggtatggagatcaaccatctgcacgcgctcttcatgagtaggaaccccgacttcaaagggggcgtgagcgtggccggacactccctggggtccttaatcttatttgacatcctgtctaatcagaaggacctcaacctttctaagtgccccggccccttggctgtagcgaacggggtggtaaaacagcttcactttcaggaaaagcagatgcctgaggagcctaaactcacgctcgacgaaagctatgatctggttgttgaaaataaggaggtgctgacccttcaggaaacattggaagcactgtctctttccgagtacttttcaacttttgaaaaagaaaaaattgacatggagtccctgcttatgtgtaccgtggacgacttaaaggaaatgggcattcctttggggccccgcaagaagatcgccaattttgtcgagcacaaagctgctaagttgaagaaggctgcttctgagaaaaaggctgtggccgctaccagtactaagggacaagaacaatctgctcaaaaaactaaagacatggccagcctcccttctgagtccaacgaaccgaagcggaaactgcctgtcggcgcatgcgtgtcttccgtttgcgtgaattatgagtccttcgaagttggggcagggcaggtcagcgtcgcgtataattccctagactttgaaccggaaattttcttcgccctggggagccctatcgctatgttcttaacaatccggggagtggatagaatcgacgagaactactccctccccacatgtaaaggcttcttcaatatttatcatcccctcgatcccgtggcctacagattggaacccatgatcgtgcccgatttagacctcaaagcggtcctgattccacaccacaaaggccgcaagcggctacatctggagctgaaggagagtctgagccgaatgggctctgacctgaagcagggatttatcagctctcttaaaagtgcctggcagacactgaatgagtttgcaagagctcatacatcttctacccaactccaggaggagttggaaaaggttgcgaaccaaattaaagaagaggaggagaagcaagttgtggaggctgagaaggtggttgagagcccagatttcagcaaggatgaagattatctcggcaaagtcgggatgctgaatggcggtaggagaatcgactacgtcctccaggagaaacctatcgaatccttcaatgaatacttgtttgcattgcaatcgcacctctgctattgggagtctgaggacacagcccttctgctgctgaaggagatctatcggacaatgaatatctctccggagcaaccgcaacattag

SEQ ID NO: 170868 - DNA, 2370 bp, Artificial Sequence
  derived and/or modified sequence
atgtgccccagcagccagagcccccggccccccctgctgcggcccccttgcagctaccgggaagtaccttcatccgtccagtccccagcacagcagcaagtgccggcgcgccctggagcgccctcggtacaggtgccttccccatttctgcttcagaatcagtatgaacccgtccagcctcattggttttattgcaaggaagtggagtataagcaactgtggatgccctttagcgtgttcgactccctgaatcttgaggaaatctataattctgtgcagcccgaccccgagtcagtcgtgctcggcacggatggaggcaggtacgacgtgtacctctatgaccggattcgcaaggccgcttactgggaggaggagccagccgaggtgaggcgctgtacttggttttacaagggggataccgacagtaggttcatcccctacacagaagaattttctgaaaaacttgaagccgagtataagaaggctgtgacaacaaaccaatggcacaggcgcctcgaatttccctcaggagagaccattgtgatgcacaacccgaaggttatagtgcagtttcagccgtctagtgtgcccgacgagtggggtaccacccaggacggacagactcgccctagagtcgttaagagagggattgatgacaatctggatgagatcccagacggggaaatgcctcaagtggaccatctcgtgttcgtcgtacacggcattggcccagtttgcgatcttcggttcaggtccatcattgaatgcgtagatgacttccgggtggtttccttaaagctgctgcggacccatttcaagaaatcgcttgacgacgggaaggttagccgggtggagtttctccctgtacactggcattcctctctgggcggcgatgccactggtgtggacagaaacataaaaaaaatcacccttcccagcattggccggttcaggcattttacaaatgagacgctgctggacatactgttttacaattcccctacctattgccagacaattgtggagaaggtcggcatggagattaaccacctccatgctctgtttatgtccaggaatcccgactttaagggaggggtgtccgtggcggggcattctctcggctcccttatcctttttgatatcctgagcaatcagaaggatctcaaccttagcaagtgccccggccctcttgccgttgctaatggagttgtgaagcaactacactttcaggagaaacaaatgcccgaggagcccaagcttacgttagatgagtcttacgacctggtcgtcgagaataaggaggtcctgacactacaggagacacttgaggctttgtccttgtccgagtatttctccacattcgagaaagagaagattgacatggagagcctcctgatgtgtaccgttgatgatttgaaggaaatgggcatccccttgggtcccagaaagaagattgctaatttcgtggaacataaagcagctaaactaaagaaggctgcctccgagaagaaagccgtggctgcgacctcaacgaagggtcaagaacagagtgcgcagaaaacaaaagacatggcctccctgccaagtgagtccaatgaaccgaagcgcaaactcccagtgggtgcctgtgtgagctctgtttgcgtcaactacgaaagtttcgaagtgggggcggggcaagtgagcgtagcctacaactcactggattttgagccagagatcttcttcgcgctggggtcaccaatcgccatgtttttgacgattcggggcgttgaccggattgatgaaaactattctctgccaacgtgtaagggctttttcaatatatatcatccactggatccggtggcttacaggctcgagccgatgattgtccccgatctcgatctaaaggccgtgctgattccgcatcataagggtaggaagcgactgcacctggagctgaaggaaagcttgagccgaatggggtcagacctgaaacagggctttatttcaagtcttaaatccgcatggcagactctgaatgagtttgccagggcccatacgtcctccacacaattacaggaagaactggagaaagtcgcgaaccagatcaaagaagaagaggaaaagcaggtggtagaggccgaaaaagtggtggagtcgcccgacttctctaaggacgaggattacctaggaaaggtaggaatgcttaatggtggccgcagaatcgattacgtattgcaggaaaagccgatcgagtcatttaatgaatacttgttcgccttgcagtcccacctgtgctactgggaatctgaggacacagcattactgctattaaaagagatttaccgaaccatgaacatatcacccgaacagccacagcactag

SEQ ID NO: 170869 - DNA, 3003 bp, Artificial Sequence
  derived and/or modified sequence
atggccgagcgcaagcccaacggcggatcaggcggagcttccacctcatcaagcgggactaatctgttgtttagcagcagtgcgacggagtttagcttcaacgtccctttcatacctgtgacacaggcctctgccagccctgcatccctgctgctgccaggggaagacagtacagacgtgggcgaggaggatagttttctggggcaaacttccattcatacttccgctccccagaccttttcttactttagccaggtcagttcttcctcagacccattcggaaacattggacagtcgccccttactactgccgcaacatctgtgggccagtctgggttccccaagccactcaccgcgctcccattcaccacaggcagtcaggatgtgtccaatgccttctcgccgtctataagcaaggcacaacctggcgcaccaccaagctctttaatgggcataaactcctatctgccatcgcaacctagttccctgcccccatcttatttcggcaaccagccccaggggatcccgcagcctggatacaatccataccgccatacaccagggtccagccgggctaacccctatatcgctcctcctcagctccagcagtgccagactcccggtccccctgcccaccctcctccctccggccctcctgtgcaaatgtatcaaatgcctcctggaagtctcccacccgtccctagctctgtgcaaagccccgctcagcaacaggttcctgcaaggccgggtgccccttcagtacaggtcccctcaccctttttgctgcagaaccagtacgagcccgtccagccacattggttctactgtaaggaagtagagtacaagcagctttggatgcccttcagtgtattcgattctttgaatttggaggaaatttataactcagtgcagccggaccccgagtctgttgtgttgggcaccgatggcggacgctatgatgtctatctgtatgaccggatacgcaaggcggcttactgggaggaggagcctgctgaggtacgcaggtgtacttggttctacaaaggggatacagattcccggttcatcccttatactgaagagtttagcgagaagctggaagccgaatacaaaaaagccgttacaactaaccagtggcataggaggctggaattcccaagcggagaaaccatcgtgatgcacaatcctaaagttatcgtacaattccagccttccagtgtgccagacgagtggggcactacccaggatggccagacccgcccaagagtggtgaaacgtgggatagacgacaacctcgacgaaatcccagacggcgaaatgccccaggtcgatcatctggtctttgttgtacatggaatcggcccagtatgcgacctgcggtttagatctatcattgagtgtgtcgatgactttagggtcgtgtcgctgaaactcctgcgcacgcactttaagaaatctctcgatgatgggaaggtatctcgcgtagagtttctacctgtgcactggcacagcagcctaggtggggacgctaccggagtcgacaggaacatcaagaaaatcacccttccttccattggccgtttcaggcatttcacaaatgagaccctacttgatattctgttttacaatagcccaacttactgccagaccatcgtggaaaaggtgggaatggagataaaccacctgcatgccttattcatgtcccgaaatcctgatttcaagggtggagtgtccgtcgctggccactctctcggaagtctgattctgtttgacatactctccaatcagaaggatctgaatttgtccaagtgtcccggaccactagcagtggccaatggcgtcgtgaagcagctgcacttccaggagaagcaaatgcctgaagagcccaaattaaccctggatgaatcatatgatttggtggttgagaacaaagaggtcctcaccctgcaggagaccttagaggcgcttagcctcagtgagtacttcagcacctttgagaaggaaaaaatagatatggagtcgctgcttatgtgtaccgtcgacgatcttaaggagatgggtatccctttaggacccagaaagaagattgccaacttcgtagaacacaaggccgctaagcttaagaaggccgcatccgaaaagaaggctgtggctgccaccagcaccaaggggcaagagcagtctgcccagaagactaaggacatggccagtctaccatccgagtccaacgaaccgaagcgtaaactgccggtgggcgcttgcgtgtcgtcggtgtgtgtcaattatgaaagttttgaggtgggggctggacaggtgagcgtggcgtacaattcactggatttcgagcctgaaatcttcttcgccctgggatctcccatcgcaatgttcctgacaataagaggggttgacaggatcgacgaaaattattcgctgccaacctgtaaaggattttttaatatctaccaccccctagacccggtggcctatcgcctggaaccaatgatcgtgcctgatctggatctcaaagccgtgctgattccccaccataaaggtaggaagaggctgcatctggagctaaaggaatctcttagtcggatggggagcgatctgaaacagggatttatctcatccctgaagtcagcgtggcaaactctgaacgaatttgctcgtgcgcacacctcttctactcagcttcaggaagaactggagaaggtagccaaccaaataaaagaagaggaagaaaaacaagtggtcgaggccgagaaggtggtcgaaagccctgatttctccaaggatgaggactacctcgggaaggtgggaatgttaaacggtgggaggcgcattgattatgtactccaggagaaaccaattgagtcctttaacgaatacttatttgctctgcagagtcatctgtgttattgggagtccgaagataccgccctcctgctgctgaaagagatttacagaaccatgaatatctctcctgagcagccccagcactag

SEQ ID NO: 170870 - DNA, 2370 bp, Artificial Sequence
  derived and/or modified sequence
atgtgtcctagtagtcagtcccccaggcctccactgctgcgtcctccgtgcagttaccgagaggtcccttcatctgtacagtcccccgcacagcagcaggtgccggctcggcctggagctcctagcgtgcaagttccctcaccatttcttctccagaaccagtatgagccagtgcaacctcactggttttactgcaaagaggtggagtacaagcaactgtggatgcccttctcagtctttgatagcctcaacctggaggaaatttataactccgttcaaccggatcccgagagtgtggtcctggggaccgatggaggtaggtatgacgtgtacctgtacgacagaatacggaaagccgcatactgggaggaggagcccgcagaggtgcgcagatgcacttggttttacaagggggacacagactctcgcttcatcccctacacggaagagttctcagagaagttggaagcggagtataagaaggccgttaccacaaatcaatggcaccgccgactggaattccctagtggggaaacaatcgtcatgcacaatcccaaggtgatagtccaatttcagcctagttcggtacccgatgaatggggcacaacccaggatggccagacaagacccagagtggtcaaacggggtatagacgataacctcgatgagatcccagacggggagatgccgcaggtcgatcatctagttttcgtggtgcacgggatcggtcccgtttgtgacctgcgattccgctctattattgaatgcgtggatgattttcgcgtagtatccctcaagttgctgagaacccacttcaaaaaatctttggacgatggcaaagtgagcagggtggagttcctgcctgttcattggcattcttctctggggggagacgcgaccggggtagacaggaatataaaaaaaattactctgccgtccatcgggcgattccgccacttcacgaatgagacactattagacatactattttacaactcccctacatactgccaaacaattgtggaaaaggtgggtatggagatcaatcatctgcacgctctgttcatgagtagaaaccctgacttcaaggggggagtatccgtggctggccactctctggggagcctcatactgtttgatattctttctaaccagaaagacctaaacctaagcaagtgcccagggcctttagcagtggctaacggagttgtgaaacagttgcatttccaagagaagcagatgcctgaggagccaaaactgacacttgatgaatcttatgacctagttgtcgaaaacaaagaggtgctgactctacaggaaacactcgaagcattgtccctgtcggaatatttttcaacctttgaaaaggagaagatcgatatggagtccctgctgatgtgtacagtggatgacctgaaagagatgggcatacctctaggaccgagaaagaaaattgctaatttcgtcgaacacaaagcagccaaattaaaaaaagccgcatctgagaagaaagccgtcgcagctacgtccaccaaggggcaggagcaatcagcccagaaaacaaaggacatggcctcgctgccatctgaaagcaacgaacccaaaagaaagctacccgtgggagcatgcgtgtcgtccgtgtgtgtgaactacgagagctttgaggtgggcgctggccaggtttctgttgcatacaacagtcttgactttgaacctgagatcttcttcgcgctgggctcacccattgcaatgttcctcaccatacgcggtgtagaccgaatagatgaaaattattccctgccaacttgcaaaggcttctttaacatttatcatcctttggatcctgtggcttataggctggagccgatgatcgtcccggatctggatctgaaagcagtgctgatcccacaccacaaaggcagaaaaagacttcacctggagttgaaggaatccctgtctcgcatgggatctgatctgaaacaaggcttcatctcttcactgaaaagcgcgtggcagacactgaatgaatttgctagagctcataccagcagcacccagctccaggaggaattggaaaaggtcgccaatcagatcaaggaggaagaggagaaacaggttgtggaagccgagaaggtcgtggagtcccctgatttctcaaaggatgaggactacctggggaaagtcggcatgctgaatggtggccgtcgtattgattatgtactgcaggaaaaaccaattgagagctttaacgagtacttatttgcccttcagagccacctgtgttactgggaaagtgaagacactgcacttcttttgctgaaggaaatttatcgtactatgaacatcagccccgaacagccccagcactag

SEQ ID NO: 170871 - DNA, 2692 bp, Artificial Sequence
  derived and/or modified sequence
agtggtgtggtaccgggtacccggagacgtgtatcggacggtgggccgcagccatggccgagagaaaacctaacggtggcagcggcggcgcctccacttcctcatcgggcactaacttacttttctcctcctcggccacggagttcagcttcaatgtgcccttcatcccagtcacccaggcctccgcttctccggcctccctgctcttaccgggaggttccttcttcagtgcagtcaccggcacagcagcaggtacctgccagacctggggctccctctgttcaagtgccatctccttttctacttcaaaaccaatatgagcctgttcagccccactggttttactgcaaggaggtagaatacaaacaactgtggatgccttttagtgtgttcgactctttgaatcttgaagaaatctataattcagttcagccagatccggagagcgtggttcttggcacggatggagggcgctacgatgtttacctctatgaccgaataaggaaggctgcctactgggaagaggagccagccgaagtgagacgctgtacttggttttacaagggggacacagatagtcgatttattccctatactgaggagttcagtgaaaaactagaggctgaatataaaaaagctgtaaccactaatcagtggcaccgaagattagagtttccaagtggagagacaattgttatgcacaatccaaaggttattgttcagttccagccctcctcagtgccagatgaatggggcaccacgcaagatggacagacaaggcccagggttgtaaagcgtggaattgatgataaccttgatgaaattcccgacggggagatgcctcaagttgaccatttggtgtttgtggtgcatggcattggacctgtgtgtgacttacgctttaggagcattattgagtgtgtggatgattttagggtggtttctctcaaattgctgcggacacatttcaagaaatctttagatgacgggaaagtaagcagagtggagttccttccagttcattggcatagttctttgggtggggacgccacaggtgtggacaggaatattaagaaaatcactttgccaagtattggtcgatttcgtcactttaccaatgaaactttgctagatattttattttataacagccccacctactgtcagacaattgtggaaaaagtaggaatggagataaaccatctgcatgcactctttatgagtcggaacccagacttcaaaggaggtgtctctgttgctggtcacagtttaggttctttaatattgtttgacatcctgtctaatcaaaaagatttgaatttatcaaagtgccctggacctcttgctgttgctaatggagttgtgaagcagctacattttcaggaaaagcagatgcctgaagagccaaagctgactttggatgagtcgtatgaccttgttgttgaaaataaagaagtcctaactttgcaagaaactctggaagcacttagcctctctgaatattttagcacttttgaaaaggaaaagattgatatggagtccctgcttatgtgtacagttgatgacctgaaggaaatggggataccccttggacccagaaagaagatagctaactttgtagaacataaagcagccaaactgaaaaaagcagcgtcagaaaagaaggcagtggcggccacttctacaaaaggacaagagcaaagtgcccagaagactaaagacatggcttccctcccctcagaatccaatgagccaaagaggaaacttccagttggtgcttgcgtgtcttctgtgtgtgtgaattatgaatcttttgaagttggcgccggacaggtttctgttgcttacaactcattagattttgaaccagagatattctttgccttggggtctccaattgctatgtttctcactattcgaggagttgataggatagatgagaattacagccttcctacctgtaaagggttcttcaatatttatcatccgcttgatccagtggcatatagattagaacctatgattgttccagatttggacctaaaagctgttctcattccacatcacaaaggcagaaaaagacttcatttagaattgaaagagagtctctctcgtatgggatctgatttgaagcagggttttattagctctctcaaaagtgcttggcagacattaaatgagtttgcccgtgctcatacgtcttcaacccagttgcaagaagaattggagaaggtggccaatcagatcaaagaagaagaagaaaagcaagtagttgaagcagaaaaggttgttgaaagtccagatttttccaaggatgaggactacttaggaaaggttggaatgttaaatggaggccgccgaattgactacgttctccaagaaaaaccaatagagagttttaatgaataccttttcgctcttcagagtcacttatgctattgggaatctgaagatactgctctgttactacttaaagaaatttatcgaacaatgaacattagtccagaacagccccagcattgatcaaacttcagttttactgtactttcttgtctgcacagaaagtcccagtacaacttccattgctgagaaaatcctcagaggactttcccacttcgctcctgtgatggatgacagaagagtgattcattaacaattgctcagccacaattctcggatatagggattcaaa

SEQ ID NO: 170872 - protein, 379 aa, Artificial Sequence
  derived and/or modified sequence
MARRSAFPAAALWLWSILLCLLALRAEAGPPQEESLYLWIDAHQARVLIGFEEDILIVSEGKMAPFTHDFRKAQQRMPAIPVNIHSMNFTWQAAGQAEYFYEFLSLRSLDKGIMADPTVNVPLLGTVPHKASVVQVGFPCLGKQDGVAAFEVDVIVMNSEGNTILQTPQNAIFFKTCQQAECPGGCRNGGFCNERRICECPDGFHGPHCEKALCTPRCMNGGLCVTPGFCICPPGFYGVNCDKANCSTTCFNGGTCFYPGKCICPPGLEGEQCEISKCPQPCRNGGKCIGKSKCKCSKGYQGDLCSKPVCEPGCGAHGTCHEPNKCQCQEGWHGRHCNKRYEASLIHALRPAGAQLRQHTPSLKKAEERRDPPESNYIW

SEQ ID NO: 170873 - DNA, 1140 bp, Artificial Sequence
  derived and/or modified sequence
atggccagaagaagcgccttccccgccgccgccctgtggctgtggagcatcctgctgtgcctgctggccctgagagccgaggccggccccccccaggaggagagcctgtacctgtggatcgacgcccaccaggccagagtgctgatcggcttcgaggaggacatcctgatcgtgagcgagggcaagatggcccccttcacccacgacttcagaaaggcccagcagagaatgcccgccatccccgtgaacatccacagcatgaacttcacctggcaggccgccggccaggccgagtacttctacgagttcctgagcctgagaagcctggacaagggcatcatggccgaccccaccgtgaacgtgcccctgctgggcaccgtgccccacaaggccagcgtggtgcaggtgggcttcccctgcctgggcaagcaggacggcgtggccgccttcgaggtggacgtgatcgtgatgaacagcgagggcaacaccatcctgcagaccccccagaacgccatcttcttcaagacctgccagcaggccgagtgccccggcggctgcagaaacggcggcttctgcaacgagagaagaatctgcgagtgccccgacggcttccacggcccccactgcgagaaggccctgtgcacccccagatgcatgaacggcggcctgtgcgtgacccccggcttctgcatctgcccccccggcttctacggcgtgaactgcgacaaggccaactgcagcaccacctgcttcaacggcggcacctgcttctaccccggcaagtgcatctgcccccccggcctggagggcgagcagtgcgagatcagcaagtgcccccagccctgcagaaacggcggcaagtgcatcggcaagagcaagtgcaagtgcagcaagggctaccagggcgacctgtgcagcaagcccgtgtgcgagcccggctgcggcgcccacggcacctgccacgagcccaacaagtgccagtgccaggagggctggcacggcagacactgcaacaagagatacgaggccagcctgatccacgccctgagacccgccggcgcccagctgagacagcacacccccagcctgaagaaggccgaggagagaagagacccccccgagagcaactacatctggtag

SEQ ID NO: 170874 - DNA, 120 bp, Artificial Sequence
  derived and/or modified sequence
aagaagagaaaggagaagaagagagagaagagaagaggcaaggagagaaaggagctgttcaagctggtgagccacgtgctggagaacagaatgggctggcagcacctgaagtggatgtag

SEQ ID NO: 170875 - DNA, 1140 bp, Artificial Sequence
  derived and/or modified sequence
atggccagacgctccgcctttccggcagccgctctatggttgtggagcattctcctgtgtctcctagctttgcgcgcggaagccggtccccctcaggaggagtcgctgtatctgtggatcgacgcacaccaggccagggtactgataggattcgaagaggacatcctcattgtatccgagggcaagatggctccattcactcacgatttccgaaaggcccagcagaggatgccagcaatccccgtcaacatccatagtatgaattttacatggcaagctgccggtcaggccgagtatttctatgaatttctgtcactgcgatctctggataagggaataatggccgaccccaccgtaaatgttccgctcctggggacagtaccccacaaggcctcggtggtgcaggttggatttccgtgcctggggaagcaagatggagtagctgccttcgaagtagacgtgatcgtcatgaattccgagggtaacacaatcctgcaaaccccacagaatgctatctttttcaagacttgccagcaggccgaatgtcctggcgggtgtaggaacggcggcttctgcaacgaaaggagaatttgcgaatgccctgacggctttcatgggcctcattgtgagaaagcactttgcacgcctcgttgtatgaatggtgggctttgcgtgaccccaggcttctgtatctgccccccaggcttttacggagtgaattgcgataaagctaactgtagtaccacatgtttcaatgggggtacctgtttctatccaggtaagtgcatatgccctcctggactggagggagaacagtgtgaaatctccaagtgcccacagccctgcagaaacggggggaaatgcatcgggaagagcaaatgtaagtgtagcaaggggtatcagggggatttgtgcagtaagccagtgtgtgagcccggatgtggcgcccacggaacctgccatgagcccaacaagtgccagtgtcaagaagggtggcatggccggcactgcaacaaacgctacgaagcttccctcattcatgctctccggcccgccggagctcaacttagacaacacaccccttctctaaagaaggctgaggaaagacgcgaccctccagagtccaattacatctggtag

SEQ ID NO: 170876 - DNA, 1140 bp, Artificial Sequence
  derived and/or modified sequence
atggccaggagaagtgccttccctgctgctgccctgtggctgtggagcatcctgctgtgcctgctggccctgcgggcagaggccggccccccccaggaggagagcctgtacctgtggattgatgcccaccaggcccgggtgctgattggatttgaggaggacatcctgattgtgtctgagggcaagatggcccccttcacccatgacttcaggaaggcccagcagaggatgcctgccatccctgtgaacatccacagcatgaacttcacctggcaggccgccggccaggccgagtacttctatgagttcctgagcctgcggagcctggacaagggcatcatggctgaccccaccgtgaatgtgcccctgctgggcaccgtgccccacaaggcctctgtggtgcaggtgggcttcccctgcctgggcaagcaggatggagtggccgcctttgaggtggatgtgattgtgatgaacagcgagggcaacaccatcctgcagaccccccagaatgccatcttcttcaagacctgccagcaggctgaatgtcctgggggctgcagaaatggaggcttctgcaatgaaagacgcatctgtgaatgtccagatggcttccacggcccccactgtgagaaggccctgtgcaccccccgctgcatgaatggaggcctgtgtgtgaccccaggcttctgcatctgccccccaggcttctatggagtgaactgtgacaaggccaactgcagcaccacctgcttcaacggcggcacctgcttctacccaggcaagtgcatctgccccccaggcctggagggggagcagtgtgagatcagcaaatgtccccagccctgcagaaatggaggaaaatgtattggcaagagcaagtgcaagtgcagcaagggctaccagggcgacctgtgcagcaagcctgtgtgtgagcccggctgtggggcccacggcacctgccacgagcccaacaagtgccagtgccaggagggctggcacggccgccactgcaacaagagatatgaggccagcctcatccacgccctgcggcctgctggggcccagctgcggcagcacacccccagcctgaagaaggccgaggagcggcgggaccccccagagagcaactacatctggtag

SEQ ID NO: 170877 - DNA, 120 bp, Artificial Sequence
  derived and/or modified sequence
aagaagaggaaggagaagaagcgggagaagagaagaggcaaggagaggaaggagctgttcaagctggtgagccacgtgctggagaacaggatgggctggcagcacctgaagtggatgtag

SEQ ID NO: 170878 - DNA, 1140 bp, Artificial Sequence
  derived and/or modified sequence
atggcccggcggagcgccttccccgccgccgccctgtggctgtggtctatcctcctgtgcttgctcgccctgagggccgaagctggacctcctcaagaggagagtctctatctgtggatagacgctcaccaagcccgcgtccttattggcttcgaagaagatatcctgattgtgtccgaggggaaaatggccccatttacccacgatttcagaaaagcccagcaaaggatgcccgcaatacctgtcaatatacacagcatgaacttcacctggcaggccgccggtcaggctgagtatttctatgaatttttgagcttacggtctctcgataaagggattatggccgaccccaccgtgaatgttccccttcttgggaccgtgcctcacaaggcctccgtggtgcaggtaggctttccctgcctgggcaaacaggacggggtcgcagccttcgaggtcgatgtcattgtcatgaactccgaagggaataccatcctgcagacacctcaaaatgcaatattttttaaaacatgtcagcaggcagagtgcccaggaggatgtcgaaatggaggcttctgtaatgaaaggcggatctgtgagtgtccagacggctttcatggcccccactgtgagaaagccttgtgcacccctagatgtatgaacggcgggctgtgtgtaaccccaggcttttgtatatgccctcctggcttttatggggttaactgcgacaaagctaactgctccacgacctgcttcaacgggggtacctgtttttatccaggcaagtgcatttgccctcccggtttggagggagagcagtgtgaaatcagcaagtgcccgcaaccctgcagaaacggtggcaaatgtatcggcaaatccaagtgcaagtgcagtaagggttaccagggcgatctttgttctaaacccgtttgcgagcccggttgtggagcacatgggacatgtcacgaacctaacaaatgtcagtgccaagaaggctggcatggacgccattgtaacaagcggtacgaggcgtcactcatccacgcactccggccagcgggcgcacaattgaggcagcacaccccaagtctgaaaaaagccgaggagagaagggacccccccgagagtaattatatctggtag

SEQ ID NO: 170879 - DNA, 1140 bp, Artificial Sequence
  derived and/or modified sequence
atggctcgacgcagcgccttcccagcagccgcactgtggctctggagtatcctgttatgccttttggccttgcgcgcagaggctgggccacctcaggaagagtcgctgtacctgtggatcgacgcccatcaagcgagggtgttgatagggtttgaggaagatattttgatcgtgtcggagggaaagatggctcctttcacccacgacttcaggaaggctcaacagagaatgcccgcaattccagtaaatatccactctatgaacttcacatggcaggctgctggccaggctgagtacttttacgaatttctctcactgaggtccttggacaagggaattatggccgatccgacagtgaatgtgccactgctcggaaccgtgccccacaaagcgtcagtcgtccaggtaggatttccctgcctagggaaacaagacggggtcgccgcttttgaggtggatgtcattgtcatgaatagcgagggtaacacgatactgcagacaccacagaacgcgattttcttcaagacttgtcaacaagccgagtgccccggagggtgcagaaacggtggattttgcaacgaaaggcggatttgcgaatgccccgacgggttccacggccctcactgcgagaaggcactgtgtacaccgagatgcatgaatggaggtctgtgcgtgaccccaggattttgcatatgtccgccagggttctacggcgtgaactgcgataaagccaattgctccactacatgctttaacgggggaacttgtttttaccctggaaaatgcatttgccccccaggcctcgagggtgaacagtgcgagatcagcaagtgcccccagccttgcagaaatggtggaaagtgtataggtaagagtaagtgcaagtgctcaaagggctatcagggcgacttatgttctaagcctgtctgcgaaccaggttgtggcgctcacggcacatgccacgaacccaataaatgtcagtgccaagagggatggcacggccgacattgtaataaaagatatgaagcctctctaatccatgccctgcggcctgccggagcacagctgcggcagcacaccccctccctgaagaaggctgaggaacgccgtgacccacctgagtccaactacatttggtag

SEQ ID NO: 170880 - DNA, 2238 bp, Artificial Sequence
  derived and/or modified sequence
gccccactcctcgctcgcacctcgctcgcgccagcccttcccgctcttctgttctcgctctatttgccccgctgactgctggcctcgccagctttgccagtcttacgtctctgccgcccccactcccgcccgcgccccatcttcttgcgcgactcgcgcccgctggtccccccctcctcctcccgcgtcctgcctgccccctcctcctgctctcgcaggctccttggcacccaggccgggaggcgacgcgcccagccgtctaaacgggaacagccctggctgagggagctgcagcgcagcagagtatctgacggcgccaggttgcgtaggtgcggcacgaggagttttcccggcagcgaggaggtcctgagcagcatggcccggaggagcgccttccctgccgccgcgctctggctctggagcatcctcctgtgcctgctggcactgcgggcggaggccgggccgccgcaggaggagagcctgtacctatggatcgatgctcaccaggcaagagtactcataggatttgaagaagatatcctgattgtttcagaggggaaaatggcaccttttacacatgatttcagaaaagcacaacagagaatgccagctattcctgtcaatatccattccatgaattttacctggcaagctgcagggcaggcagaatacttctatgaattcctgtccttgcgctccctggataaaggcatcatggcagatccaaccgtcaatgtccctctgctgggaacagtgcctcacaaggcatcagttgttcaagttggtttcccatgtcttggaaaacaggatggggtggcagcatttgaagtggatgtgattgttatgaattctgaaggcaacaccattctccaaacacctcaaaatgctatcttctttaaaacatgtcaacaagctgagtgcccaggcgggtgccgaaatggaggcttttgtaatgaaagacgcatctgcgagtgtcctgatgggttccacggacctcactgtgagaaagccctttgtaccccacgatgtatgaatggtggactttgtgtgactcctggtttctgcatctgcccacctggattctatggagtgaactgtgacaaagcaaactgctcaaccacctgctttaatggagggacctgtttctaccctggaaaatgtatttgccctccaggactagagggagagcagtgtgaaatcagcaaatgcccacaaccctgtcgaaatggaggtaaatgcattggtaaaagcaaatgtaagtgttccaaaggttaccagggagacctctgttcaaagcctgtctgcgagcctggctgtggtgcacatggaacctgccatgaacccaacaaatgccaatgtcaagaaggttggcatggaagacactgcaataaaaggtacgaagccagcctcatacatgccctgaggccagcaggcgcccagctcaggcagcacacgccttcacttaaaaaggccgaggagcggcgggatccacctgaatccaattacatctggtgaactccgacatctgaaacgttttaagttacaccaagttcatagcctttgttaacctttcatgtgttgaatgttcaaataatgttcattacacttaagaatactggcctgaattttattagcttcattataaatcactgagctgatatttactcttccttttaagttttctaagtacgtctgtagcatgatggtatagattttcttgtttcagtgctttgggacagattttatattatgtcaattgatcaggttaaaattttcagtgtgtagttggcagatattttcaaaattacaatgcatttatggtgtctgggggcaggggaacatcagaaaggttaaattgggcaaaaatgcgtaagtcacaagaatttggatggtgcagttaatgttgaagttacagcatttcagattttattgtcagatatttagatgtttgttacatttttaaaaattgctcttaatttttaaactctcaatacaatatattttgaccttaccattattccagagattcagtattaaaaaaaaaaaaattacactgtggtagtggcatttaaacaatataatatattctaaacacaatgaaatagggaatataatgtatgaactttttgcattggcttgaagcaatataatatattgtaaacaaaacacagctcttacctaataaacattttatactgtttgtatgtataaaataaaggtgctgctttagttttctga

SEQ ID NO: 170881 - DNA, 120 bp, Artificial Sequence
  derived and/or modified sequence
aagaaaagaaaagaaaagaaaagagaaaagaggagaggaaaggaaaggaaagagttgttcaagttggtttcccatgtcttggaaaacaggatggggtggcagcatttgaagtggatgtga

SEQ ID NO: 170882 - protein, 324 aa, Artificial Sequence
  derived and/or modified sequence
MFCGDYVQGTIFPAPNFNPIMDAQMLGGALQGFDCDKDMLINILTQRCNAQRMMIAEAYQSMYGRDLIGDMREQLSDHFKDVMAGLMYPPPLYDAHELWHAMKGVGTDENCLIEILASRTNGEIFQMREAYCLQYSNNLQEDIYSETSGHFRDTLMNLVQGTREEGYTDPAMAAQDAMVLWEACQQKTGEHKTMLQMILCNKSYQQLRLVFQEFQNISGQDMVDAINECYDGYFQELLVAIVLCVRDKPAYFAYRLYSAIHDFGFHNKTVIRILIARSEIDLLTIRKRYKERYGKSLFHDIRNFASGHYKKALLAICAGDAEDY

SEQ ID NO: 170883 - protein, 324 aa, Artificial Sequence
  derived and/or modified sequence
MFCSNLVQGTIFPAPNFNPIMDAQMLGGALQGFDCDKDMLINILTQRCNAQRMMIAEAYQSMYGRDLIGDMREQLSDHFKDVMAGLMYPPPLYDAHELWHAMKGVGTDENCLIEILASRTNGEIFQMREAYCLQYSNNLQEDIYSETSGHFRDTLMNLVQGTREEGYTDPAMAAQDAMVLWEACQQKTGEHKTMLQMILCNKSYQQLRLVFQEFQNISGQDMVDAINECYDGYFQELLVAIVLCVRDKPAYFAYRLYSAIHDFGFHNKTVIRILIARSEIDLLTIRKRYKERYGKSLFHDIRNFASGHYKKALLAICAGDAEDY

SEQ ID NO: 170884 - DNA, 975 bp, Artificial Sequence
  derived and/or modified sequence
atgttttgtggcgactacgttcagggaaccatattcccagcacctaacttcaaccctataatggatgctcagatgctgggtggcgccctccagggctttgattgcgacaaggacatgttaatcaacatcctgacccagcgatgtaatgcccagcggatgatgatcgctgaagcttatcagagtatgtacgggcgcgatctaattggtgacatgagggagcagttatctgatcattttaaagacgtgatggccggccttatgtatcctccgccgctttatgatgcccacgagctctggcatgccatgaaaggggtgggcactgatgagaattgtctcattgagattttggcctctcgcacaaacggtgagatttttcagatgagggaagcgtactgcctacagtacagtaataatctgcaggaagatatatactcagaaacctctggccatttccgcgataccctgatgaacctggtccagggcactagggaggaaggatacactgatcccgcaatggccgcacaggatgccatggtgctttgggaggcttgccagcagaagaccggcgagcataagacaatgcttcaaatgattttgtgtaacaagtcataccagcagctcaggctagtgtttcaggaattccagaatatttctggccaggatatggtggacgctataaacgagtgctacgatggctatttccaggagctgctggttgctatcgtgctgtgcgttcgagacaaacctgcgtacttcgcctatcggctttacagcgccatccacgactttggatttcataacaaaaccgtgatccgaatccttatagctcggtccgagattgatcttctaactataaggaaacggtataaggaacgctacggcaagtcgttgtttcacgatatccggaacttcgccagcgggcactacaagaaggcacttttggcgatctgcgcgggagacgcagaagattactag

SEQ ID NO: 170885 - DNA, 975 bp, Artificial Sequence
  derived and/or modified sequence
atgttctgcagtaatctggtacagggtaccattttccccgctcctaactttaaccctatcatggatgcgcagatgttgggcggggccctgcaaggtttcgattgtgataaagacatgctcatcaacatcctcacacagcgatgcaacgcccagcggatgatgatagcggaggcctatcagtcaatgtatgggcgagaccttattggggatatgcgagaacagctaagtgaccactttaaagatgtgatggctgggctgatgtaccctccaccgttatacgacgcgcatgagctctggcatgccatgaagggagttgggaccgacgagaactgcctgatcgaaatcctggccagccggaccaacggagagatctttcagatgcgagaggcttactgtctgcaatactcgaataatctacaagaggacatctacagcgaaacttctggccacttcagggacactctaatgaaccttgtccaggggacacgggaggagggctacacagatccggccatggcagcccaagacgcgatggtattatgggaagcctgtcagcagaaaactggggagcacaagaccatgctgcagatgatactctgcaacaaatcttaccagcaattacgactcgtctttcaggaatttcaaaacatcagcggacaagacatggttgatgcgatcaacgagtgctacgacggctactttcaggaactactggtagctatcgtgctgtgcgttcgggacaagcctgcttactttgcatataggttatacagtgccattcacgattttggcttccacaataagaccgtcattcggattcttatcgcacggtccgaaattgacttgttaacaatccgcaaacggtataaagagcgatacggcaaatcccttttccacgacatccgcaattttgcgtcaggtcattacaaaaaggccctgctggccatatgtgctggtgatgccgaggactactag

SEQ ID NO: 170886 - DNA, 975 bp, Artificial Sequence
  derived and/or modified sequence
atgttctgtggggactatgtgcagggcaccatcttccctgcccccaacttcaaccccatcatggatgcccagatgctgggcggggccctgcagggctttgactgtgacaaggacatgctgatcaacatcctgacccagcgctgcaatgcccagaggatgatgattgctgaggcctaccagagcatgtatggccgggacctgattggagacatgagggagcagctgagtgaccacttcaaggatgtgatggccggcctgatgtaccccccacccctgtatgatgcccacgagctgtggcacgccatgaagggcgtgggcacagatgagaactgcctgattgagatcctggccagcaggaccaatggagagatcttccagatgagggaggcctactgcctgcagtacagcaacaacctgcaggaggacatctacagcgagaccagcggccacttccgggacaccctgatgaacctggtgcagggcacccgggaggagggctacacagatcctgccatggccgcccaggatgccatggtgctgtgggaggcctgccagcagaagacaggagagcacaagaccatgctgcagatgatcctgtgcaacaagagctaccagcagctgcggctggtgttccaggagttccagaacatcagcggccaggacatggtggatgccatcaatgaatgttatgatggctacttccaggagctgctggtggccatcgtgctgtgtgtgcgggacaagccagcctactttgcctaccgcctgtacagcgccatccatgactttggcttccacaacaagacagtcatccgcatcctgattgcccggagtgaaattgacctgctgaccatcaggaagcgctacaaggagagatatggcaagagcctcttccatgacatccggaactttgccagcggccactacaagaaggccctgctggccatctgtgctggagatgctgaggactactag

SEQ ID NO: 170887 - DNA, 975 bp, Artificial Sequence
  derived and/or modified sequence
atgttctgcagcaacctggtgcagggcaccatcttccctgcccccaacttcaaccccatcatggatgcccagatgctgggcggggccctgcagggctttgactgtgacaaggacatgctgatcaacatcctgacccagcgctgcaatgcccagaggatgatgattgctgaggcctaccagagcatgtatggccgggacctgattggagacatgagggagcagctgagtgaccacttcaaggatgtgatggccggcctgatgtaccccccacccctgtatgatgcccacgagctgtggcacgccatgaagggcgtgggcacagatgagaactgcctgattgagatcctggccagcaggaccaatggagagatcttccagatgagggaggcctactgcctgcagtacagcaacaacctgcaggaggacatctacagcgagaccagcggccacttccgggacaccctgatgaacctggtgcagggcacccgggaggagggctacacagatcctgccatggccgcccaggatgccatggtgctgtgggaggcctgccagcagaagacaggagagcacaagaccatgctgcagatgatcctgtgcaacaagagctaccagcagctgcggctggtgttccaggagttccagaacatcagcggccaggacatggtggatgccatcaatgaatgttatgatggctacttccaggagctgctggtggccatcgtgctgtgtgtgcgggacaagccagcctactttgcctaccgcctgtacagcgccatccatgactttggcttccacaacaagacagtcatccgcatcctgattgcccggagtgaaattgacctgctgaccatcaggaagcgctacaaggagagatatggcaagagcctcttccatgacatccggaactttgccagcggccactacaagaaggccctgctggccatctgtgctggagatgctgaggactactag

SEQ ID NO: 170888 - DNA, 975 bp, Artificial Sequence
  derived and/or modified sequence
atgttctgcggcgactacgtgcagggcaccatcttccccgcccccaattttaatcctattatggatgcccagatgctggggggggctcttcagggttttgactgcgacaaagacatgctcataaatattttgacacagaggtgcaatgcccaacggatgatgatcgccgaagcttaccagagtatgtatggcagggacctgataggagatatgagggaacagctctctgatcacttcaaggacgtaatggccggactgatgtatcctcccccactatacgacgcacacgagctgtggcatgccatgaaaggtgtgggtaccgacgagaattgcttaatcgagattctcgcgagccgaacgaatggcgaaatcttccagatgcgggaggcatattgtttgcagtattctaataacctgcaggaggatatatacagcgaaactagtggccacttcagagataccctgatgaatctcgtgcagggaactcgcgaggaaggttatacagaccccgctatggccgcgcaagacgctatggtgctctgggaagcttgccagcagaagacaggagaacacaagacaatgctccagatgattctctgcaataaatcatatcaacagctgaggctggtgttccaggagttccagaacataagcggccaagatatggtggacgcaatcaatgaatgttatgacggctacttccaggaactactggtggcaatagtcctgtgtgttagagacaagcccgcgtacttcgcctatcggctctattccgctatccatgacttcggcttccacaacaagactgtcatccggatactgatcgcgcgctccgagatcgacttactcactatcaggaagcgctataaggagcgctatggaaagagtctgttccacgacattaggaacttcgcctcaggacactacaagaaagccctgcttgccatatgcgctggtgacgcagaggactactag

SEQ ID NO: 170889 - DNA, 975 bp, Artificial Sequence
  derived and/or modified sequence
atgttctgcagcaacctggtgcagggcaccatcttccccgcccccaattttaatcctattatggatgcccagatgttgggaggcgcattgcaggggtttgactgtgataaggacatgctgattaatatccttactcagagatgtaatgcccagaggatgatgatcgccgaagcttaccagagcatgtatggccgggatttgatcggcgacatgcgggagcaattgagcgatcatttcaaggacgttatggccggcctcatgtatcccccaccactgtatgacgctcatgaactgtggcatgctatgaaaggggtggggaccgatgagaattgccttattgaaattctggcttccaggacaaacggggagatctttcagatgagggaagcctattgcctgcagtattccaacaacctgcaggaggatatctactctgaaacctccggacactttcgcgacaccttaatgaatcttgtacagggaaccagggaggaaggctacaccgacccagcgatggccgcccaagacgccatggtactgtgggaagcgtgccagcagaaaaccggtgaacataaaaccatgcttcagatgattctctgtaacaagagttatcagcagctccgactagtcttccaggaatttcagaacatctccggccaggatatggtggacgccatcaacgaatgttatgacggttacttccaggagctgctcgtcgccattgtcctctgtgtcagagataaacccgcgtactttgcctaccgactgtactctgccatccacgatttcgggtttcacaacaagactgtgatccgtattcttattgccaggagcgaaatcgatctcctgaccatcaggaaacggtacaaagaacgctacggtaagagcttgttccacgacattagaaatttcgcttccgggcactataagaaggctctactggcaatatgcgccggagatgccgaggactattag

SEQ ID NO: 170890 - DNA, 1417 bp, Artificial Sequence
  derived and/or modified sequence
acagtatctcaagtcatgctgtatccagatttgcttttacattttcttgcctgagtctgaggtgaacagtgaacatatttacatttgatttaacagtgaaccttaattctttctggcttcacagtgaaacaagtttatgcaatcgatcaaatattttcatccctgaggttaacaattaccatcaaaatgttttgtggagactatgtgcaaggaaccatcttcccagctcccaatttcaatcccataatggatgcccaaatgctaggaggagcactccaaggatttgactgtgacaaagacatgctgatcaacattctgactcagcgctgcaatgcacaaaggatgatgattgcagaggcataccagagcatgtatggccgggacctgattggggatatgagggagcagctttcggatcacttcaaagatgtgatggctggcctcatgtacccaccaccactgtatgatgctcatgagctctggcatgccatgaagggagtaggcactgatgagaattgcctcattgaaatactagcttcaagaacaaatggagaaattttccagatgcgagaagcctactgcttgcaatacagcaataacctccaagaggacatttattcagagacctcaggacacttcagagatactctcatgaacttggtccaggggaccagagaggaaggatatacagaccctgcgatggctgctcaggatgcaatggtcctatgggaagcctgtcagcagaagacgggggagcacaaaaccatgctgcaaatgatcctgtgcaacaagagctaccagcagctgcggctggttttccaggaatttcaaaatatttctgggcaagatatggtagatgccattaatgaatgttatgatggatactttcaggagctgctggttgcaattgttctctgtgttcgagacaaaccagcctattttgcttatagattatatagtgcaattcatgactttggtttccataataaaactgtaatcaggattctcattgccagaagtgaaatagacctgctgaccataaggaaacgatacaaagagcgatatggaaaatccctatttcatgatatcagaaattttgcttcagggcattataagaaagcactgcttgccatctgtgctggtgatgctgaggactactaaaatgaagaggacttggagtactgtgcactcctctttctagacacttccaaatagagattttctcacaaatttgtactgttcatggcactattaacaaaactatacaatcatattttctcttctatctttgaaattattctaagccaaagaaaactatgaatgaaagtatatgatactgaatttgcctactatcctgaatttgcctactatctaatcagcaattaaataaattgtgcatgatggaataatagaaaaa

SEQ ID NO: 170891 - DNA, 1283 bp, Artificial Sequence
  derived and/or modified sequence
atgttttgtagtaatttagtgcaaggaaccatcttcccagctcccaatttcaatcccataatggatgcccaaatgctaggaggagcactccaaggatttgactgtgacaaagacatgctgatcaacattctgactcagcgctgcaatgcacaaaggatgatgattgcagaggcataccagagcatgtatggccgggacctgattggggatatgagggagcagctttcggatcacttcaaagatgtgatggctggcctcatgtacccaccaccactgtatgatgctcatgagctctggcatgccatgaagggagtaggcactgatgagaattgcctcattgaaatactagcttcaagaacaaatggagaaattttccagatgcgagaagcctactgcttgcaatacagcaataacctccaagaggacatttattcagagacctcaggacacttcagagatactctcatgaacttggtccaggggaccagagaggaaggatatacagaccctgcgatggctgctcaggatgcaatggtcctatgggaagcctgtcagcagaagacgggggagcacaaaaccatgctgcaaatgatcctgtgcaacaagagctaccagcagctgcggctggttttccaggaatttcaaaatatttctgggcaagatatggtagatgccattaatgaatgttatgatggatactttcaggagctgctggttgcaattgttctctgtgttcgagacaaaccagcctattttgcttatagattatatagtgcaattcatgactttggtttccataataaaactgtaatcaggattctcattgccagaagtgaaatagacctgctgaccataaggaaacgatacaaagagcgatatggaaaatccctatttcatgatatcagaaattttgcttcagggcattataagaaagcactgcttgccatctgtgctggtgatgctgaggactactaaaatgaagaggacttggagtactgtgcactcctctttctagacacttccaaatagagattttctcacaaatttgtactgttcatggcactattaacaaaactatacaatcatattttctcttctatctttgaaattattctaagccaaagaaaactatgaatgaaagtatatgatactgaatttgcctactatcctgaatttgcctactatctaatcagcaattaaataaattgtgcatgatggaataatagaaaaattgcattggaatagattttatttaaatgtgaaccatcaacaacctacaacaa

SEQ ID NO: 170892 - DNA, 975 bp, Artificial Sequence
  derived and/or modified sequence
atgttctgtggagactacgtgcagggcacaatttttccggcacctaatttcaatcctatcatggatgcgcagatgttgggaggagctctccagggctttgattgcgacaaggatatgcttatcaacatactgacacagcgctgcaatgctcagcggatgatgattgccgaggcatatcagtccatgtatggacgcgacctaataggggatatgcgcgagcagttaagcgaccatttcaaagacgtgatggctgggttaatgtacccccctcccctttatgacgcccacgagctgtggcacgctatgaagggggtgggaactgatgagaattgcctgatagaaattctcgcttccagaaccaatggtgaaatattccagatgcgagaagcttattgtctacaatatagcaacaacctccaggaagatatatattccgaaacgagcggtcattttagagacacgctgatgaaccttgtgcaggggactcgcgaagaaggttatactgaccctgcaatggccgctcaggatgcaatggtgctttgggaggcatgccagcagaaaaccggggagcataaaacgatgttacagatgatactctgtaacaaaagttatcagcaactacggctggtttttcaagaatttcagaatatctccggccaggacatggtagatgcaattaatgagtgctacgatgggtactttcaggagctgcttgtcgccattgtgctgtgcgtgcgcgataagcccgcatacttcgcctatagactctattcagccatacatgattttggatttcataataaaactgtgatccggatcctcattgccaggagcgagatcgacctattgaccatccggaaacgctacaaagaacgatacggcaaatctttgtttcatgacattcgaaactttgcaagcgggcactacaagaaagccctcctcgcaatatgtgctggggatgctgaggattactag

SEQ ID NO: 170893 - DNA, 975 bp, Artificial Sequence
  derived and/or modified sequence
atgttttgcagcaatctcgtacaaggcaccatattccctgcacccaattttaacccaattatggatgcacagatgctgggcggagcactacaggggttcgattgcgacaaggacatgttaatcaatatcctgactcagcgttgcaatgcgcagagaatgatgatagccgaagcctatcaatccatgtacgggagagatttaataggagacatgcgtgaacagctctccgatcactttaaggacgtgatggcgggtctaatgtatcccccacccctgtacgacgcccatgaactgtggcatgccatgaagggtgtggggaccgacgaaaattgccttatcgaaatcctggcgtcgagaaccaatggcgagatctttcaaatgagagaagcctattgtttacagtacagcaacaatctgcaggaagacatatactctgagacaagtggtcacttccgggacaccctgatgaatctggtacagggcacaagggaggaagggtacactgatcctgcgatggctgctcaggatgctatggtcctgtgggaagcgtgccagcagaaaacaggcgaacacaaaactatgctgcagatgatcctgtgcaacaagtcttaccaacaattgaggttggtgtttcaagagttccagaacatttcgggacaagacatggtagacgccatcaatgaatgctacgacggatacttccaggaattactcgtcgccatcgtactgtgcgtgcgcgacaaaccagcttacttcgcatatcgtctgtatagtgcgatacacgactttggatttcataataagacagtcattcgaattctgatcgctcggtcagaaatcgacctgctaaccattcggaaaaggtacaaagagcgatacggcaagagcctgttccacgatattcgcaacttcgcctcaggccattataagaaggcccttcttgcgatttgcgctggcgacgctgaggactactag

SEQ ID NO: 170894 - DNA, 975 bp, Artificial Sequence
  derived and/or modified sequence
atgttctgcggcgactacgtgcagggcaccatcttccccgcccccaacttcaaccccatcatggacgcccagatgctgggcggcgccctgcagggcttcgactgcgacaaggacatgctgatcaacatcctgacccagagatgcaacgcccagagaatgatgatcgccgaggcctaccagagcatgtacggcagagacctgatcggcgacatgagagagcagctgagcgaccacttcaaggacgtgatggccggcctgatgtaccccccccccctgtacgacgcccacgagctgtggcacgccatgaagggcgtgggcaccgacgagaactgcctgatcgagatcctggccagcagaaccaacggcgagatcttccagatgagagaggcctactgcctgcagtacagcaacaacctgcaggaggacatctacagcgagaccagcggccacttcagagacaccctgatgaacctggtgcagggcaccagagaggagggctacaccgaccccgccatggccgcccaggacgccatggtgctgtgggaggcctgccagcagaagaccggcgagcacaagaccatgctgcagatgatcctgtgcaacaagagctaccagcagctgagactggtgttccaggagttccagaacatcagcggccaggacatggtggacgccatcaacgagtgctacgacggctacttccaggagctgctggtggccatcgtgctgtgcgtgagagacaagcccgcctacttcgcctacagactgtacagcgccatccacgacttcggcttccacaacaagaccgtgatcagaatcctgatcgccagaagcgagatcgacctgctgaccatcagaaagagatacaaggagagatacggcaagagcctgttccacgacatcagaaacttcgccagcggccactacaagaaggccctgctggccatctgcgccggcgacgccgaggactactag

SEQ ID NO: 170895 - DNA, 975 bp, Artificial Sequence
  derived and/or modified sequence
atgttctgcagcaacctggtgcagggcaccatcttccccgcccccaacttcaaccccatcatggacgcccagatgctgggcggcgccctgcagggcttcgactgcgacaaggacatgctgatcaacatcctgacccagagatgcaacgcccagagaatgatgatcgccgaggcctaccagagcatgtacggcagagacctgatcggcgacatgagagagcagctgagcgaccacttcaaggacgtgatggccggcctgatgtaccccccccccctgtacgacgcccacgagctgtggcacgccatgaagggcgtgggcaccgacgagaactgcctgatcgagatcctggccagcagaaccaacggcgagatcttccagatgagagaggcctactgcctgcagtacagcaacaacctgcaggaggacatctacagcgagaccagcggccacttcagagacaccctgatgaacctggtgcagggcaccagagaggagggctacaccgaccccgccatggccgcccaggacgccatggtgctgtgggaggcctgccagcagaagaccggcgagcacaagaccatgctgcagatgatcctgtgcaacaagagctaccagcagctgagactggtgttccaggagttccagaacatcagcggccaggacatggtggacgccatcaacgagtgctacgacggctacttccaggagctgctggtggccatcgtgctgtgcgtgagagacaagcccgcctacttcgcctacagactgtacagcgccatccacgacttcggcttccacaacaagaccgtgatcagaatcctgatcgccagaagcgagatcgacctgctgaccatcagaaagagatacaaggagagatacggcaagagcctgttccacgacatcagaaacttcgccagcggccactacaagaaggccctgctggccatctgcgccggcgacgccgaggactactag

SEQ ID NO: 170896 - protein, 543 aa, Artificial Sequence
  derived and/or modified sequence
MSRESDVEAQQSHGSSACSQPHGSVTQSQGSSSQSQGISSSSTSTMPNSSQSSHSSSGTLSSLETVSTQELYSIPEDQEPEDQEPEEPTPAPWARLWALQDGFANLECVNDNYWFGRDKSCEYCFDEPLLKRTDKYRTYSKKHFRIFREVGPKNSYIAYIEDHSGNGTFVNTELVGKGKRRPLNNNSEIALSLSRNKVFVFFDLTVDDQSVYPKALRDEYIMSKTLGSGACGEVKLAFERKTCKKVAIKIISKRKFAIGSAREADPALNVETEIEILKKLNHPCIIKIKNFFDAEDYYIVLELMEGGELFDKVVGNKRLKEATCKLYFYQMLLAVQYLHENGIIHRDLKPENVLLSSQEEDCLIKITDFGHSKILGETSLMRTLCGTPTYLAPEVLVSVGTAGYNRAVDCWSLGVILFICLSGYPPFSEHRTQVSLKDQITSGKYNFIPEVWAEVSEKALDLVKKLLVVDPKARFTTEEALRHPWLQDEDMKRKFQDLLSEENESTALPQVLAQPSTSRKRPREGEAEGAETTKRPAVCAAVL

SEQ ID NO: 170897 - protein, 207 aa, Artificial Sequence
  derived and/or modified sequence
MSRESDVEAQQSHGSSACSQPHGSVTQSQGSSSQSQGISSSSTSTMPNSSQSSHSSSGTLSSLETVSTQELYSIPEDQEPEDQEPEEPTPAPWARLWALQDGFANLECVNDNYWFGRDKSCEYCFDEPLLKRTDKYRTYSKKHFRIFREVGPKNSYIAYIEDHSGNGTFVNTELVGKGKRRPLNNNSEIALSLSRNKEKILKIYSLS

SEQ ID NO: 170898 - DNA, 1632 bp, Artificial Sequence
  derived and/or modified sequence
atgagcagagagagcgacgtggaggcccagcagagccacggcagcagcgcctgcagccagccccacggcagcgtgacccagagccagggcagcagcagccagagccagggcatcagcagcagcagcaccagcaccatgcccaacagcagccagagcagccacagcagcagcggcaccctgagcagcctggagaccgtgagcacccaggagctgtacagcatccccgaggaccaggagcccgaggaccaggagcccgaggagcccacccccgccccctgggccagactgtgggccctgcaggacggcttcgccaacctggagtgcgtgaacgacaactactggttcggcagagacaagagctgcgagtactgcttcgacgagcccctgctgaagagaaccgacaagtacagaacctacagcaagaagcacttcagaatcttcagagaggtgggccccaagaacagctacatcgcctacatcgaggaccacagcggcaacggcaccttcgtgaacaccgagctggtgggcaagggcaagagaagacccctgaacaacaacagcgagatcgccctgagcctgagcagaaacaaggtgttcgtgttcttcgacctgaccgtggacgaccagagcgtgtaccccaaggccctgagagacgagtacatcatgagcaagaccctgggcagcggcgcctgcggcgaggtgaagctggccttcgagagaaagacctgcaagaaggtggccatcaagatcatcagcaagagaaagttcgccatcggcagcgccagagaggccgaccccgccctgaacgtggagaccgagatcgagatcctgaagaagctgaaccacccctgcatcatcaagatcaagaacttcttcgacgccgaggactactacatcgtgctggagctgatggagggcggcgagctgttcgacaaggtggtgggcaacaagagactgaaggaggccacctgcaagctgtacttctaccagatgctgctggccgtgcagtacctgcacgagaacggcatcatccacagagacctgaagcccgagaacgtgctgctgagcagccaggaggaggactgcctgatcaagatcaccgacttcggccacagcaagatcctgggcgagaccagcctgatgagaaccctgtgcggcacccccacctacctggcccccgaggtgctggtgagcgtgggcaccgccggctacaacagagccgtggactgctggagcctgggcgtgatcctgttcatctgcctgagcggctacccccccttcagcgagcacagaacccaggtgagcctgaaggaccagatcaccagcggcaagtacaacttcatccccgaggtgtgggccgaggtgagcgagaaggccctggacctggtgaagaagctgctggtggtggaccccaaggccagattcaccaccgaggaggccctgagacacccctggctgcaggacgaggacatgaagagaaagttccaggacctgctgagcgaggagaacgagagcaccgccctgccccaggtgctggcccagcccagcaccagcagaaagagacccagagagggcgaggccgagggcgccgagaccaccaagagacccgccgtgtgcgccgccgtgctgtag

SEQ ID NO: 170899 - DNA, 1359 bp, Artificial Sequence
  derived and/or modified sequence
atgagcagagagagcgacgtggaggcccagcagagccacggcagcagcgcctgcagccagccccacggcagcgtgacccagagccagggcagcagcagccagagccagggcatcagcagcagcagcaccagcaccatgcccaacagcagccagagcagccacagcagcagcggcaccctgagcagcctggagaccgtgagcacccaggagctgtacagcatccccgaggaccaggagcccgaggaccaggagcccgaggagcccacccccgccccctgggccagactgtgggccctgcaggacggcttcgccaacctggtgttcgtgttcttcgacctgaccgtggacgaccagagcgtgtaccccaaggccctgagagacgagtacatcatgagcaagaccctgggcagcggcgcctgcggcgaggtgaagctggccttcgagagaaagacctgcaagaaggtggccatcaagatcatcagcaagagaaagttcgccatcggcagcgccagagaggccgaccccgccctgaacgtggagaccgagatcgagatcctgaagaagctgaaccacccctgcatcatcaagatcaagaacttcttcgacgccgaggactactacatcgtgctggagctgatggagggcggcgagctgttcgacaaggtggtgggcaacaagagactgaaggaggccacctgcaagctgtacttctaccagatgctgctggccgtgcagtacctgcacgagaacggcatcatccacagagacctgaagcccgagaacgtgctgctgagcagccaggaggaggactgcctgatcaagatcaccgacttcggccacagcaagatcctgggcgagaccagcctgatgagaaccctgtgcggcacccccacctacctggcccccgaggtgctggtgagcgtgggcaccgccggctacaacagagccgtggactgctggagcctgggcgtgatcctgttcatctgcctgagcggctacccccccttcagcgagcacagaacccaggtgagcctgaaggaccagatcaccagcggcaagtacaacttcatccccgaggtgtgggccgaggtgagcgagaaggccctggacctggtgaagaagctgctggtggtggaccccaaggccagattcaccaccgaggaggccctgagacacccctggctgcaggacgaggacatgaagagaaagttccaggacctgctgagcgaggagaacgagagcaccgccctgccccaggtgctggcccagcccagcaccagcagaaagagacccagagagggcgaggccgagggcgccgagaccaccaagagacccgccgtgtgcgccgccgtgctgtag

SEQ ID NO: 170900 - DNA, 1867 bp, Artificial Sequence
  derived and/or modified sequence
gtttgtatctgcaggtttagcgccactctgctggctgaggctgcggagagtgtgcggctccaggtgggctcacgcggtcgtgatgtctcgggagtcggatgttgaggctcagcagtctcatggcagcagtgcctgttcacagccccatggcagcgttacccagtcccaaggctcctcctcacagtcccagggcatatccagctcctctaccagcacgatgccaaactccagccagtcctctcactccagctctgggacactgagctccttagagacagtgtccactcaggaactctattctattcctgaggaccaagaacctgaggaccaagaacctgaggagcctacccctgccccctgggctcgattatgggcccttcaggatggatttgccaatcttgaatgtgtgaatgacaactactggtttgggagggacaaaagctgtgaatattgctttgatgaaccactgctgaaaagaacagataaataccgaacatacagcaagaaacactttcggattttcagggaagtgggtcctaaaaactcttacattgcatacatagaagatcacagtggcaatggaacctttgtaaatacagagcttgtagggaaaggaaaacgccgtcctttgaataacaattctgaaattgcactgtcactaagcagaaataaagtttttgtcttttttgatctgactgtagatgatcagtcagtttatcctaaggcattaagagatgaatacatcatgtcaaaaactcttggaagtggtgcctgtggagaggtaaagctggctttcgagaggaaaacatgtaagaaagtagccataaagatcatcagcaaaaggaagtttgctattggttcagcaagagaggcagacccagctctcaatgttgaaacagaaatagaaattttgaaaaagctaaatcatccttgcatcatcaagattaaaaacttttttgatgcagaagattattatattgttttggaattgatggaagggggagagctgtttgacaaagtggtggggaataaacgcctgaaagaagctacctgcaagctctatttttaccagatgctcttggctgtgcagtaccttcatgaaaacggtattatacaccgtgacttaaagccagagaatgttttactgtcatctcaagaagaggactgtcttataaagattactgattttgggcactccaagattttgggagagacctctctcatgagaaccttatgtggaacccccacctacttggcgcctgaagttcttgtttctgttgggactgctgggtataaccgtgctgtggactgctggagtttaggagttattctttttatctgccttagtgggtatccacctttctctgagcataggactcaagtgtcactgaaggatcagatcaccagtggaaaatacaacttcattcctgaagtctgggcagaagtctcagagaaagctctggaccttgtcaagaagttgttggtagtggatccaaaggcacgttttacgacagaagaagccttaagacacccgtggcttcaggatgaagacatgaagagaaagtttcaagatcttctgtctgaggaaaatgaatccacagctctaccccaggttctagcccagccttctactagtcgaaagcggccccgtgaaggggaagccgagggtgccgagaccacaaagcgcccagctgtgtgtgctgctgtgttgtgaactccgtggtttgaacacgaaagaaatgtaccttctttcactctgtcatctttcttttctttgagtctgtttttttatagtttgtattttaattatgggaataattgctttttcacagtcactgatgtacaattaaaaacctgatggaacctg

SEQ ID NO: 170901 - DNA, 1796 bp, Artificial Sequence
  derived and/or modified sequence
gcaggtttagcgccactctgctggctgaggctgcggagagtgtgcggctccaggtgggctcacgcggtcgtgatgtctcgggagtcggatgttgaggctcagcagtctcatggcagcagtgcctgttcacagccccatggcagcgttacccagtcccaaggctcctcctcacagtcccagggcatatccagctcctctaccagcacgatgccaaactccagccagtcctctcactccagctctgggacactgagctccttagagacagtgtccactcaggaactctattctattcctgaggaccaagaacctgaggaccaagaacctgaggagcctacccctgccccctgggctcgattatgggcccttcaggatggatttgccaatcttgaatgtgtgaatgacaactactggtttgggagggacaaaagctgtgaatattgctttgatgaaccactgctgaaaagaacagataaataccgaacatacagcaagaaacactttcggattttcagggaagtgggtcctaaaaactcttacattgcatacatagaagatcacagtggcaatggaacctttgtaaatacagagcttgtagggaaaggaaaacgccgtcctttgaataacaattctgaaattgcactgtcactaagcagaaataaagtttttgtcttttttgatctgactgtagatgatcagtcagtttatcctaaggcattaagagatgaatacatcatgtcaaaaactcttggaagtggtgcctgtggagaggtaaagctggctttcgagaggaaaacatgtaagaaagtagccataaagatcatcagcaaaaggaagtttgctattggttcagcaagagaggcagacccagctctcaatgttgaaacagaaatagaaattttgaaaaagctaaatcatgatggaagggggagagctgtttgacaaagtggtggggaataaacgcctgaaagaagctacctgcaagctctatttttaccagatgctcttggctgtgcagtaccttcatgaaaacggtattatacaccgtgacttaaagccagagaatgttttactgtcatctcaagaagaggactgtcttataaagattactgattttgggcactccaagattttgggagagacctctctcatgagaaccttatgtggaacccccacctacttggcgcctgaagttcttgtttctgttgggactgctgggtataaccgtgctgtggactgctggagtttaggagttattctttttatctgccttagtgggtatccacctttctctgagcataggactcaagtgtcactgaaggatcagatcaccagtggaaaatacaacttcattcctgaagtctgggcagaagtctcagagaaagctctggaccttgtcaagaagttgttggtagtggatccaaaggcacgttttacgacagaagaagccttaagacacccgtggcttcaggatgaagacatgaagagaaagtttcaagatcttctgtctgaggaaaatgaatccacagctctaccccaggttctagcccagccttctactagtcgaaagcggccccgtgaaggggaagccgagggtgccgagaccacaaagcgcccagctgtgtgtgctgctgtgttgtgaactccgtggtttgaacacgaaagaaatgtaccttctttcactctgtcatctttcttttctttgagtctgtttttttatagtttgtattttaattatgggaataattgctttttcacagtcactgatgtacaattaaaaacctgatggaacctgg

SEQ ID NO: 170902 - DNA, 1359 bp, Artificial Sequence
  derived and/or modified sequence
atgtctcgggagtcggatgttgaggctcagcagtctcatggcagcagtgcctgttcacagccccatggcagcgttacccagtcccaaggctcctcctcacagtcccagggcatatccagctcctctaccagcacgatgccaaactccagccagtcctctcactccagctctgggacactgagctccttagagacagtgtccactcaggaactctattctattcctgaggaccaagaacctgaggaccaagaacctgaggagcctacccctgccccctgggctcgattatgggcccttcaggatggatttgccaatcttgtttttgtcttttttgatctgactgtagatgatcagtcagtttatcctaaggcattaagagatgaatacatcatgtcaaaaactcttggaagtggtgcctgtggagaggtaaagctggctttcgagaggaaaacatgtaagaaagtagccataaagatcatcagcaaaaggaagtttgctattggttcagcaagagaggcagacccagctctcaatgttgaaacagaaatagaaattttgaaaaagctaaatcatccttgcatcatcaagattaaaaacttttttgatgcagaagattattatattgttttggaattgatggaagggggagagctgtttgacaaagtggtggggaataaacgcctgaaagaagctacctgcaagctctatttttaccagatgctcttggctgtgcagtaccttcatgaaaacggtattatacaccgtgacttaaagccagagaatgttttactgtcatctcaagaagaggactgtcttataaagattactgattttgggcactccaagattttgggagagacctctctcatgagaaccttatgtggaacccccacctacttggcgcctgaagttcttgtttctgttgggactgctgggtataaccgtgctgtggactgctggagtttaggagttattctttttatctgccttagtgggtatccacctttctctgagcataggactcaagtgtcactgaaggatcagatcaccagtggaaaatacaacttcattcctgaagtctgggcagaagtctcagagaaagctctggaccttgtcaagaagttgttggtagtggatccaaaggcacgttttacgacagaagaagccttaagacacccgtggcttcaggatgaagacatgaagagaaagtttcaagatcttctgtctgaggaaaatgaatccacagctctaccccaggttctagcccagccttctactagtcgaaagcggccccgtgaaggggaagccgagggtgccgagaccacaaagcgcccagctgtgtgtgctgctgtgttgtga

SEQ ID NO: 170903 - DNA, 1785 bp, Artificial Sequence
  derived and/or modified sequence
atgtctcgggagtcggatgttgaggctcagcagtctcatggcagcagtgcctgttcacagccccatggcagcgttacccagtcccaaggctcctcctcacagtcccagggcatatccagctcctctaccagcacgatgccaaactccagccagtcctctcactccagctctgggacactgagctccttagagacagtgtccactcaggaactctattctattcctgaggaccaagaacctgaggaccaagaacctgaggagcctacccctgccccctgggctcgattatgggcccttcaggatggatttgccaatcttgaatgtgtgaatgacaactactggtttgggagggacaaaagctgtgaatattgctttgatgaaccactgctgaaaagaacagataaataccgaacatacagcaagaaacactttcggattttcagggaagtgggtcctaaaaactcttacattgcatacatagaagatcacagtggcaatggaacctttgtaaatacagagcttgtagggaaaggaaaacgccgtcctttgaataacaattctgaaattgcactgtcactaagcagaaataaagtttttgtcttttttgatctgactgtagatgatcagtcagtttatcctaaggcattaagagatgaatacatcatgtcaaaaactcttggaagtggtgcctgtggagaggtaaagctggctttcgagaggaaaacatgtaagaaagtagccataaagatcatcagcaaaaggaagtttgctattggttcagcaagagaggcagacccagctctcaatgttgaaacagaaatagaaattttgaaaaagctaaatcatccttgcatcatcaagattaaaaacttttttgatgcagaagattattatattgttttggaattgatggaagggggagagctgtttgacaaagtggtggggaataaacgcctgaaagaagctacctgcaagctctatttttaccagatgctcttggctgtgcagtaccttcatgaaaacggtattatacaccgtgacttaaagccagagaatgttttactgtcatctcaagaagaggactgtcttataaagattactgattttgggcactccaagattttgggagagacctctctcatgagaaccttatgtggaacccccacctacttggcgcctgaagttcttgtttctgttgggactgctgggtataaccgtgctgtggactgctggagtttaggagttattctttttatctgccttagtgggtatccacctttctctgagcataggactcaagtgtcactgaaggatcagatcaccagtggaaaatacaacttcattcctgaagtctgggcagaagtctcagagaaagctctggaccttgtcaagaagttgttggtagtggatccaaaggcacgttttacgacagaagaagccttaagacacccgtggcttcaggatgaagacatgaagagaaagtttcaagatcttctgtctgaggaaaatgaatccacagctctaccccaggttctagcccagccttctactagtcgaaagcggccccgtgaaggggaagccgagggtgccgagaccacaaagcgcccagctgtgtgtgctgctgtgttgtgaactccgtggtttgaacacgaaagaaatgtaccttctttcactctgtcatctttcttttctttgagtctgtttttttatagtttgtattttaattatgggaataattgctttttcacagtcactgatgtacaattaaaaacctgatggaacctg

SEQ ID NO: 170904 - DNA, 1959 bp, Artificial Sequence
  derived and/or modified sequence
ggagagtgtgcggctccaggtgggctcacgcgatactggatttcaccatggtgcccaggctggtcttgaattcctgggctcaagcaatctacctgcgttggcctcccaaagtgctgggattacagacatgaaccaccacacctggcagaacctttgtatcttgaaagctgtgtaaatacaatcagtgtcgtgatgtctcgggagtcggatgttgaggctcagcagtctcatggcagcagtgcctgttcacagccccatggcagcgttacccagtcccaaggctcctcctcacagtcccagggcatatccagctcctctaccagcacgatgccaaactccagccagtcctctcactccagctctgggacactgagctccttagagacagtgtccactcaggaactctattctattcctgaggaccaagaacctgaggaccaagaacctgaggagcctacccctgccccctgggctcgattatgggcccttcaggatggatttgccaatcttgaatgtgtgaatgacaactactggtttgggagggacaaaagctgtgaatattgctttgatgaaccactgctgaaaagaacagataaataccgaacatacagcaagaaacactttcggattttcagggaagtgggtcctaaaaactcttacattgcatacatagaagatcacagtggcaatggaacctttgtaaatacagagcttgtagggaaaggaaaacgccgtcctttgaataacaattctgaaattgcactgtcactaagcagaaataaagtttttgtcttttttgatctgactgtagatgatcagtcagtttatcctaaggcattaagagatgaatacatcatgtcaaaaactcttggaagtggtgcctgtggagaggtaaagctggctttcgagaggaaaacatgtaagaaagtagccataaagatcatcagcaaaaggaagtttgctattggttcagcaagagaggcagacccagctctcaatgttgaaacagaaatagaaattttgaaaaagctaaatcatccttgcatcatcaagattaaaaacttttttgatgcagaagattattatattgttttggaattgatggaagggggagagctgtttgacaaagtggtggggaataaacgcctgaaagaagctacctgcaagctctatttttaccagatgctcttggctgtgcagtaccttcatgaaaacggtattatacaccgtgacttaaagccagagaatgttttactgtcatctcaagaagaggactgtcttataaagattactgattttgggcactccaagattttgggagagacctctctcatgagaaccttatgtggaacccccacctacttggcgcctgaagttcttgtttctgttgggactgctgggtataaccgtgctgtggactgctggagtttaggagttattctttttatctgccttagtgggtatccacctttctctgagcataggactcaagtgtcactgaaggatcagatcaccagtggaaaatacaacttcattcctgaagtctgggcagaagtctcagagaaagctctggaccttgtcaagaagttgttggtagtggatccaaaggcacgttttacgacagaagaagccttaagacacccgtggcttcaggatgaagacatgaagagaaagtttcaagatcttctgtctgaggaaaatgaatccacagctctaccccaggttctagcccagccttctactagtcgaaagcggccccgtgaaggggaagccgagggtgccgagaccacaaagcgcccagctgtgtgtgctgctgtgttgtgaactccgtggtttgaacacgaaagaaatgtaccttctttcactctgtcatctttcttttctttgagtctgtttttttatagtttgtattttaattatgggaataattgctttttcacagtcactgatgtacaatta

SEQ ID NO: 170905 - DNA, 2560 bp, Artificial Sequence
  derived and/or modified sequence
cttccgccagccagatccgtcctcccctctcgcaggccagacctcgacgtgtctctcgcccgggcccgtttcccgaaaccgtcgctcgtaccagtccataaggctgaagtagtctcgagtggggtcaggtgcctgcagcgctcggcactgtgggcagaagaacctgtcctcccgcccggggccccatgggccgccgcagttccaacagcggggataattgcttcccgcctgcgacgcagcatcgcagcttagcggtctccttctgggaacccctgtcggccaaaacccccacacccggagcaaagccccggctctcccccgccacatctggccggcggcctatctagccgtggtcactcgtggggaaaagcaaagagagcgtctaaccagactaatgttgctgattggctggggagtcgagggggcgggatcacccgaggggaacccgggttctaagttccgctctcccttctaaactacaactcccaggaggcattgaggcggcgcctgacggccacatctgctgctcctcattggtccggcggcaggggagggggttttgattggctgagggtggagtttgtatctgcaggtttagcgccactctgctggctgaggctgcggagagtgtgcggctccaggtgggctcacgcggtcgtgatgtctcgggagtcggatgttgaggctcagcagtctcatggcagcagtgcctgttcacagccccatggcagcgttacccagtcccaaggctcctcctcacagtcccagggcatatccagctcctctaccagcacgatgccaaactccagccagtcctctcactccagctctgggacactgagctccttagagacagtgtccactcaggaactctattctattcctgaggaccaagaacctgaggaccaagaacctgaggagcctacccctgccccctgggctcgattatgggcccttcaggatggatttgccaatcttgaatgtgtgaatgacaactactggtttgggagggacaaaagctgtgaatattgctttgatgaaccactgctgaaaagaacagataaataccgaacatacagcaagaaacactttcggattttcagggaagtgggtcctaaaaactcttacattgcatacatagaagatcacagtggcaatggaacctttgtaaatacagagcttgtagggaaaggaaaacgccgtcctttgaataacaattctgaaattgcactgtcactaagcagaaataaagagaaaatacttaaaatctactctctcagctgattttcaaaaatacggcggggcgcggtggctcacgtctttaatcccagcactttgggaggccgaggctggcagatcacctgagtttttgtcttttttgatctgactgtagatgatcagtcagtttatcctaaggcattaagagatgaatacatcatgtcaaaaactcttggaagtggtgcctgtggagaggtaaagctggctttcgagaggaaaacatgtaagaaagtagccataaagatcatcagcaaaaggaagtttgctattggttcagcaagagaggcagacccagctctcaatgttgaaacagaaatagaaattttgaaaaagctaaatcatccttgcatcatcaagattaaaaacttttttgatgcagaagattattatattgttttggaattgatggaagggggagagctgtttgacaaagtggtggggaataaacgcctgaaagaagctacctgcaagctctatttttaccagatgctcttggctgtgcagtaccttcatgaaaacggtattatacaccgtgacttaaagccagagaatgttttactgtcatctcaagaagaggactgtcttataaagattactgattttgggcactccaagattttgggagagacctctctcatgagaaccttatgtggaacccccacctacttggcgcctgaagttcttgtttctgttgggactgctgggtataaccgtgctgtggactgctggagtttaggagttattctttttatctgccttagtgggtatccacctttctctgagcataggactcaagtgtcactgaaggatcagatcaccagtggaaaatacaacttcattcctgaagtctgggcagaagtctcagagaaagctctggaccttgtcaagaagttgttggtagtggatccaaaggcacgttttacgacagaagaagccttaagacacccgtggcttcaggatgaagacatgaagagaaagtttcaagatcttctgtctgaggaaaatgaatccacagctctaccccaggttctagcccagccttctactagtcgaaagcggccccgtgaaggggaagccgagggtgccgagaccacaaagcgcccagctgtgtgtgctgctgtgttgtgaactccgtggtttgaacacgaaagaaatgtaccttctttcactctgtcatctttcttttctttgagtctgtttttttatagtttgtattttaattatgggaataattgctttttcacagtcactgatgtacaattaaaaacctgatggaacctgg

SEQ ID NO: 170906 - DNA, 1632 bp, Artificial Sequence
  derived and/or modified sequence
atgagtagggagtccgatgttgaggctcagcagagccacggctccagcgcgtgtagccagccacatggctctgttactcagtctcaaggatcctcttcacaatcacaaggcatttcgtcatcctccacctccaccatgccgaacagctcccagagttctcactcctcttccgggaccctgagttccctggaaaccgtgtctacacaggagctgtacagtatacctgaagatcaagaacctgaagatcaagagccagaagagcctaccccagccccctgggcacgcctatgggcacttcaagacggctttgcaaatctcgagtgcgttaatgacaactactggtttgggagggataaatcttgcgagtactgctttgacgagcccctgcttaagagaactgataaatatcgaacctacagcaaaaagcactttagaatcttccgggaagtggggcccaaaaattcttatatcgcctacattgaggaccatagcggtaatggcacctttgttaacactgaattggtcgggaagggtaagcgccgccctctcaacaacaattcggaaatcgcgttgtcgctcagccgcaataaggtctttgtcttctttgatcttactgtggacgatcagtctgtatatcccaaagccctcagggacgagtacattatgtccaaaactctcggaagcggggcgtgcggcgaagtaaagttagcattcgagcggaaaacctgtaaaaaagtcgctatcaaaatcatcagcaagagaaaattcgcaatcggctcagcccgcgaagctgatcccgccctgaatgtggaaactgaaattgagatcttgaaaaagctgaaccatccctgcatcattaagattaagaacttcttcgacgcggaagattactacatcgtccttgaactgatggaagggggagaactattcgataaggtggtgggaaacaagagactgaaggaagcgacctgtaaactgtacttttaccagatgttgctcgccgtacagtatctccacgagaatgggattattcacagagatcttaaaccagagaatgtgctactgtcttctcaagaagaggattgcttgatcaaaattactgatttcggccattccaagatcctgggggaaacaagcctcatgcgtactctgtgcggtaccccgacatacctcgctccagaagtgctggtgtctgtaggtactgcaggctataacagagcggtcgattgctggtccctcggggtaattctgttcatctgcctgagtggttatcccccgtttagtgagcatcgcacccaggtttctctgaaagaccagatcacatctggaaaatacaacttcatcccggaagtttgggcagaggttagcgaaaaggcgctggatctggtgaagaaactcttggttgtcgacccgaaggctcgcttcaccaccgaagaagctctcaggcacccgtggctccaggacgaggacatgaagcgcaaattccaggatctactgtcagaagaaaacgagagcaccgcattgccgcaagtgttggctcaaccctcaaccagcagaaagagaccgcgagagggagaggccgaaggcgctgaaacaacaaaaaggccagccgtctgcgcggccgttctttag

SEQ ID NO: 170907 - DNA, 1359 bp, Artificial Sequence
  derived and/or modified sequence
atgagtcgtgaaagcgatgtggaggcacagcaatcacatgggtcctctgcctgctcccaacctcatggttccgttacgcaaagccagggctcatctagtcagagccaaggcatctcttcctcttctacatctacaatgccaaactctagtcagagttcccactcatctagtggtaccctcagcagcctggagaccgtttccacgcaagaactgtattcaatacctgaagaccaagaaccagaggaccaggagcctgaggaacctactccagccccctgggcccgcttgtgggcactacaggatggtttcgcaaatttggtcttcgtctttttcgatctgacggtggacgatcaatctgtttatcctaaggccttgcgggacgagtacattatgtccaagaccttaggtagcggcgcatgcggtgaagtaaagcttgcttttgagcgaaagacttgtaagaaagtggccataaaaatcatttcaaaaaggaaattcgcaatcggatccgccagggaagcggatcctgcccttaatgtggagactgaaatcgaaatcctgaaaaagctcaaccacccctgcataatcaagattaagaatttctttgacgcggaagattactacattgtgctcgagctcatggagggcggcgagctgttcgataaggtggtcgggaacaagcgcttgaaggaggcaacatgcaaactgtacttctatcagatgctgctggccgttcagtacttgcacgagaatggcataatccaccgagacctaaagccagaaaacgtgctgctgtcaagccaggaggaggattgtctcatcaagataaccgatttcggtcattcaaagatactaggcgaaacgtctctcatgcggacattgtgcggcacccctacctacctggctccagaagtgctggttagtgtaggcaccgccggctacaatcgggcggtggactgctggtcccttggggtgatcttgttcatttgtctctctggctatccaccctttagtgagcacaggactcaggtgtcactgaaagaccaaattacctcaggcaagtataacttcatccctgaggtctgggccgaagtaagcgaaaaagcactagatttagttaaaaaattgctagtggtggatcccaaagcgaggtttactacggaagaggctctcagacatccatggttgcaggatgaggatatgaagcggaaattccaggacctcttatcggaggagaacgaatcaaccgctttaccgcaggtgctggcccagccttccacaagtcgaaagcggccaagggaaggcgaagccgaaggcgcagaaaccacgaaacggccagctgtgtgcgcggccgtgctgtag

SEQ ID NO: 170908 - DNA, 1359 bp, Artificial Sequence
  derived and/or modified sequence
atgtcgagggaaagtgatgtggaggcccagcagtcccacggatcatcagcctgctctcagccccatggctcagttactcagtcacagggatcttcctcccaaagccaagggatttcaagttccagcacgagcaccatgcccaacagctcccaatcatctcacagcagctcaggtacattgagtagcctggagacagtctctacacaggagctatactccattcccgaggatcaggagcctgaggaccaggagcctgaagaaccaactccagctccatgggctagactctgggctctgcaggacggctttgctaatctggttttcgtattctttgatctgacagtggacgatcagtcagtatatccaaaagcacttcgggatgagtacataatgtcaaagactctcggcagcggcgcctgtggcgaggtgaagttggcgttcgagaggaaaacctgcaagaaggtggccataaagatcatctccaagagaaaattcgcgatagggtctgctcgggaagccgatcctgccctcaacgttgagaccgagattgagatacttaaaaagttaaaccatccctgcataattaaaatcaaaaacttctttgacgccgaagattattatattgtcttggagttgatggaaggaggggaattatttgataaggtagtcgggaacaagaggctgaaagaggctacctgtaagctttatttttatcaaatgctgctggctgtgcaatacctgcatgaaaatggaatcattcaccgcgatttaaagcctgagaatgtgctgctgagttcacaggaggaggactgcctgatcaaaattacagacttcggacacagtaaaatattgggggagacatccctgatgcggacactttgcggaacccctacttatttagccccggaggtgctcgtgtctgttggaacagctgggtataacagagccgtggattgctggagcctcggtgtaattctttttatttgcctgagtggttacccccctttttccgaacataggacacaagtctctctgaaagaccagataacttccgggaaatataactttattccagaggtgtgggccgaggtctcagagaaggcactggacctggtgaaaaaactgttggtcgtggaccccaaagcccgcttcactactgaggaggcactgcggcacccatggctgcaagatgaagatatgaagagaaagtttcaggacttactgagcgaagaaaacgagtcaacagcactgccccaagttcttgctcaaccatccacaagcagaaaacggcctcgagagggggaggccgagggggcggaaacaacaaagaggccagccgtttgtgctgccgttctttag

SEQ ID NO: 170909 - DNA, 1632 bp, Artificial Sequence
  derived and/or modified sequence
atgtccagggaatcagacgtggaagctcagcagtcccacggcagctctgcttgctctcagccccatgggtctgtgacacagtcccaggggagctcctctcaatctcagggtatatccagcagcagcacatctaccatgccaaacagcagtcagagttcccacagctctagcggtacactaagtagtttagaaactgtgagcacccaggagctctactcaattcccgaagatcaggagcctgaagatcaggaacctgaagagcccactcccgcaccgtgggctcgcctgtgggccttacaggacggattcgctaacctcgagtgcgtcaacgacaattattggttcgggcgggataagtcatgcgagtattgctttgacgagcctctgttgaaacgcactgacaagtataggacctatagcaaaaagcactttaggatctttcgtgaggtgggccctaaaaactcttatatagcctatattgaggaccattccgggaacgggacttttgtcaataccgagcttgttggcaaggggaagcgcaggccactgaataataattctgaaattgcactgtccctcagtcgaaataaagtcttcgttttttttgatttgacagtggacgatcaatcagtttacccgaaagcgcttagagacgaatacatcatgtctaaaactctcggcagtggggcctgtggtgaggtaaaactggcattcgaaagaaagacatgtaaaaaggtcgctatcaaaattatttccaagaggaaattcgccattggtagcgcacgtgaggcagaccctgcccttaacgtggaaaccgagattgagattctgaagaaactcaaccacccctgtataatcaagatcaagaatttcttcgacgcggaggactattatattgtgctggaactgatggagggtggcgagctttttgacaaagttgtgggcaacaagagactgaaggaggcaacctgcaaactgtatttctatcagatgctactggccgtccagtatctccacgagaatgggattatccaccgcgacctgaaacctgaaaacgtgctcctcagttcccaagaggaggattgcctgatcaagattactgatttcgggcattctaaaattctcggggaaacctcgctgatgagaacactgtgtggaacccccacctacctcgctcccgaggtgctcgtaagtgtgggaaccgccggatataatcgggcagtggattgctggagcctgggcgtgatactgtttatctgcctgagtggttatcctccattctccgaacaccgaacgcaagtctctcttaaggaccagatcacttccggtaagtataactttatccccgaggtctgggcggaagtgagcgagaaggccctggacctggtcaaaaaattattggtagttgatcccaaggcccgtttcacgacagaagaggcgctgcgtcacccctggcttcaggatgaggacatgaagagaaaatttcaggatctgctatccgaagagaatgagagcaccgccctcccccaagtgttggcccagccatcaaccagccgcaagcgtcctagagaaggagaagctgagggtgcggagactaccaagcgaccagccgtgtgcgcagctgtgctttag

SEQ ID NO: 170910 - DNA, 1632 bp, Artificial Sequence
  derived and/or modified sequence
atgagcagggagtccgacgtggaggcccagcagtcccatggcagctccgcctgcagtcaaccgcatggatctgtaacccagagccagggcagctcttcacagtcacaggggatctccagctcatctacgtcaaccatgcccaacagtagccagtcctcacactctagcagtggcacactttcttctctggaaaccgtaagcactcaggaactgtactctattccagaggatcaggaaccagaggaccaggagcctgaggaacctacacccgcaccctgggcccgcctgtgggctctccaggatggatttgcgaatttggaatgcgttaacgacaactactggttcggtagggacaagtcctgcgaatattgcttcgacgaaccgctattgaaaaggaccgacaagtaccggacctactccaagaagcactttagaatcttccgggaggtggggccaaaaaactcttacatcgcttatattgaggatcattcaggcaacgggacatttgttaacacggagttggtaggcaagggcaaaagacggccgctcaataacaactccgagatagcactttccctgagccgcaataaggtgtttgtcttttttgacctgactgtggacgatcaatctgtctacccaaaggccttaagggacgaatatatcatgtccaagacgctcgggtcgggagcttgcggagaggtcaaacttgccttcgaacgtaagacatgcaagaaggtcgccataaagatcatttcgaaaagaaaattcgctattggttctgctagggaggcagatccagctctgaacgtagagactgagattgagattctaaaaaagctcaaccacccatgcatcattaagatcaaaaatttttttgacgcagaggattattacatcgtgctggagctcatggagggtggtgagctgttcgataaggtcgtggggaataaacgtctgaaagaggctacatgtaaactctatttctatcagatgctcttagctgttcagtatctgcatgagaatggcatcatccatcgggatttaaagccggagaacgttctgctttctagccaagaggaagactgcctaattaaaataaccgatttcggccactcaaaaattttaggggaaacgtccctcatgcgcactctgtgtggaacacccacctatctggccccggaggtcctagtttctgtgggtaccgctggctataatagggcggtggattgctggagcctcggagtgattcttttcatctgcttgagtgggtatcccccattcagcgaacacagaacacaggtaagtctcaaggatcaaattacctcaggtaagtataacttcattcccgaagtgtgggccgaggtgtctgaaaaggcactagaccttgtgaagaagctgctggttgttgatccaaaagccaggttcacaaccgaagaggccctgagacacccctggcttcaggatgaagacatgaaacgtaaatttcaggacttactgagtgaggagaacgagtcaactgctctcccccaagtgctagctcaacccagcacatcaaggaagagaccacgagaaggcgaagctgaaggggcagagaccaccaagagacccgccgtgtgcgcagccgtactttag

SEQ ID NO: 170911 - DNA, 1632 bp, Artificial Sequence
  derived and/or modified sequence
atgagccgggagagtgatgtggaggcccagcagagccacggcagcagcgcctgcagccagccccacggctctgtgacccagagccagggcagcagcagccagagccagggcatcagcagcagcagcaccagcaccatgcccaacagcagccagagcagccacagcagcagcggcaccctgagcagcctggagaccgtgtccacccaggagctgtacagcatccctgaggaccaggagcctgaggaccaggagcctgaggagcccaccccagccccctgggcccggctgtgggccctgcaggacggctttgccaacctggagtgtgtgaatgacaactactggtttggccgggacaagagctgtgagtactgctttgatgagcccctgctgaagaggacagacaagtaccgcacctacagcaagaagcacttccgcatcttccgggaggtgggccccaagaacagctacatcgcctacatcgaggaccacagcggaaatggcacctttgtgaacacagagctggtgggcaagggcaagaggcggcccctgaacaacaacagcgagatcgccctgagcctgagcaggaacaaggtgtttgtgttctttgacctgactgtggatgaccagagcgtgtaccccaaggccctgagagatgagtacatcatgagcaagaccctgggcagcggggcctgtggggaggtgaagctggcctttgagaggaagacctgcaagaaggtggccatcaagatcatcagcaagaggaagtttgccatcggcagcgcccgggaggccgaccctgccctgaatgtggagacagaaattgagatcctgaagaagctgaaccacccctgcatcatcaagatcaagaacttctttgatgctgaggactactacatcgtgctggagctgatggagggcggggagctgtttgacaaggtggtgggcaacaagaggctgaaggaggccacctgcaagctgtacttctaccagatgctgctggccgtgcagtacctgcatgaaaatggcatcatccaccgggacctgaagccagaaaatgtgctgctgagcagccaggaggaggactgcctgatcaagatcacagactttggccacagcaagatcctgggggagaccagcctgatgaggaccctgtgtggcacccccacctacctggcccctgaggtgctggtgtctgtgggcacagctggctacaacagagctgtggactgctggagcctgggcgtcatcctcttcatctgcctgagcggctacccacccttcagcgagcacaggacccaggtgtccctgaaggaccagatcaccagcggcaagtacaacttcatccctgaggtgtgggccgaggtgtctgagaaggccctggacctggtgaagaagctgctggtggtggaccccaaggcccgcttcaccacagaggaggccctgcggcacccctggctgcaggatgaggacatgaagaggaagttccaggacctgctgtctgaggagaatgaaagcacagccctgccccaggtgctggcccagcccagcaccagcaggaagaggccccgggagggggaggccgagggcgctgagaccaccaagaggcctgctgtgtgtgccgctgtgctgtag

SEQ ID NO: 170912 - DNA, 1359 bp, Artificial Sequence
  derived and/or modified sequence
atgagccgggagagtgatgtggaggcccagcagagccacggcagcagcgcctgcagccagccccacggctctgtgacccagagccagggcagcagcagccagagccagggcatcagcagcagcagcaccagcaccatgcccaacagcagccagagcagccacagcagcagcggcaccctgagcagcctggagaccgtgtccacccaggagctgtacagcatccctgaggaccaggagcctgaggaccaggagcctgaggagcccaccccagccccctgggcccggctgtgggccctgcaggacggctttgccaacctggtgtttgtgttctttgacctgactgtggatgaccagagcgtgtaccccaaggccctgagagatgagtacatcatgagcaagaccctgggcagcggggcctgtggggaggtgaagctggcctttgagaggaagacctgcaagaaggtggccatcaagatcatcagcaagaggaagtttgccatcggcagcgcccgggaggccgaccctgccctgaatgtggagacagaaattgagatcctgaagaagctgaaccacccctgcatcatcaagatcaagaacttctttgatgctgaggactactacatcgtgctggagctgatggagggcggggagctgtttgacaaggtggtgggcaacaagaggctgaaggaggccacctgcaagctgtacttctaccagatgctgctggccgtgcagtacctgcatgaaaatggcatcatccaccgggacctgaagccagaaaatgtgctgctgagcagccaggaggaggactgcctgatcaagatcacagactttggccacagcaagatcctgggggagaccagcctgatgaggaccctgtgtggcacccccacctacctggcccctgaggtgctggtgtctgtgggcacagctggctacaacagagctgtggactgctggagcctgggcgtcatcctcttcatctgcctgagcggctacccacccttcagcgagcacaggacccaggtgtccctgaaggaccagatcaccagcggcaagtacaacttcatccctgaggtgtgggccgaggtgtctgagaaggccctggacctggtgaagaagctgctggtggtggaccccaaggcccgcttcaccacagaggaggccctgcggcacccctggctgcaggatgaggacatgaagaggaagttccaggacctgctgtctgaagaaaatgaaagcacagccctgccccaggtgctggcccagcccagcaccagcaggaagaggccccgggagggggaggccgagggcgctgagaccaccaagaggcctgctgtgtgtgccgctgtgctgtag

SEQ ID NO: 170913 - DNA, 1632 bp, Artificial Sequence
  derived and/or modified sequence
atgagccgggagagcgacgtggaggcccagcagagccacggcagcagtgcatgttcacagcctcatgggagcgttacacagagccagggaagcagctcacagtctcagggcatatcaagtagctccacttccacaatgcctaattcgtcccaatcatctcactctagttctgggacactttccagccttgagacggttagcacacaagaattgtattctatcccggaggatcaggagcccgaagaccaggagcctgaggagccaacgcctgcgccttgggcccggctgtgggccctgcaggacggttttgcgaacctggaatgtgttaacgataattattggtttggacgtgataaatcttgtgagtattgcttcgacgagccccttctcaaacgcaccgataagtacaggacttactctaaaaaacattttaggattttccgggaggtgggtccgaagaattcctacatcgcgtacattgaggaccacagtgggaacggaacctttgtcaacaccgagctggtggggaaaggcaaaagaaggccactgaataacaacagcgagattgccctctctctctctaggaacaaggtcttcgtcttctttgatcttactgtcgatgatcagtccgtctaccctaaagcacttagagatgagtatatcatgagcaaaacactgggttctggcgcctgcggtgaggtaaaactcgcctttgaacggaagacttgcaaaaaagttgcgatcaagattatttctaaacgtaaattcgccataggctcggcgcgggaggccgaccctgcgctaaacgtcgaaactgaaattgaaattctcaaaaaactgaatcacccatgcattattaaaatcaagaacttcttcgatgcggaggactactacatcgtgttggaactgatggaagggggagagctgttcgacaaggtcgtggggaacaaaagactcaaagaagctacctgtaaactgtacttctatcaaatgcttttggctgtgcaatatctgcatgaaaacggtataatccaccgggatcttaaaccagaaaacgttctgctgtccagtcaggaggaggactgcttaatcaagatcaccgacttcggccacagcaaaatcctgggagaaacgagtttaatgcgaaccttgtgcggaacgcctacgtatctcgctcccgaagtgctggtcagtgtaggtactgccggttacaaccgtgcagtggattgctggagcttgggagtgatcctgttcatctgtctgagcgggtatccaccattttctgaacaccgcacccaagtgagcctgaaggaccagataacaagtggtaagtacaatttcattccagaagtctgggccgaagtaagtgagaaggccctggacttggtgaaaaagttgttagtggtagacccaaaggctaggtttacaacggaggaagctctccgtcacccttggctccaggacgaggatatgaagcggaaatttcaggatcttctgagcgaagagaacgaaagcaccgctctgccccaggtgttagctcagccctcaacatccaggaaacggcctcgggagggggaggccgaaggggcagagaccactaaacgaccggcggtatgtgcagctgtgctatag

SEQ ID NO: 170914 - DNA, 1359 bp, Artificial Sequence
  derived and/or modified sequence
atgagccgggagagcgacgtggaggcccagcagagccacggcagcagcgcgtgctctcaacctcatggctccgtcacccagagtcaaggttccagctcccaaagccaaggtatcagttcctcatctacctcaacaatgccaaacagctcacaatcaagccatagcagctccggaacactgagctctctggagacagtctccacgcaggaactttactctatacctgaagaccaggaacccgaggatcaggaaccagaggaaccgaccccagctccttgggcgcgactttgggctctgcaagacggatttgcaaatctggtgttcgtgttcttcgaccttacggtcgacgatcaaagcgtctacccgaaagcattaagggacgaatacatcatgtctaagaccttgggatcaggcgcctgcggggaagttaagctggcattcgagagaaagacatgtaagaaggttgccatcaagatcatatctaagaggaagtttgctattggatcagcacgcgaggccgatcccgccctcaatgttgagacagagatagaaatcctcaaaaaactgaatcacccatgtatcattaagatcaaaaactttttcgacgccgaggactattacatcgtgctggaactgatggagggaggggagctttttgacaaagtggttgggaacaagcggctgaaggaggccacttgcaaactgtatttctaccagatgctgctggccgtccagtatctgcatgagaacggcattatccacagggacctaaaaccagagaatgtgctgctgtcttcccaagaggaggactgcctgattaaaattactgacttcggtcattccaagattttgggtgaaactagcctcatgcggactctgtgtgggacacccacgtatctggccccagaggtgttggtgtctgtcgggactgccggatacaatagagcggtggactgttggtcgctgggcgtgatcttgtttatttgtctgagtggatatccaccctttagcgagcatagaacccaggtgagccttaaggaccagattactagcggcaagtataattttattcccgaagtctgggccgaagtgtctgagaaggctcttgacctggtcaaaaagctccttgtcgtagatcccaaagcccgcttcactacggaagaagctctgaggcatccctggctccaagatgaggacatgaaacggaagtttcaggatttattgtctgaagaaaatgaatccaccgccctgccccaggtcctggcacagcctagcaccagtcggaagagacctcgtgaaggcgaagcagaaggcgctgagaccaccaaaaggcctgccgtgtgtgcagctgttttgtag

SEQ ID NO: 170915 - DNA, 1359 bp, Artificial Sequence
  derived and/or modified sequence
atgagccgggagagcgacgtggaggcccagcagagccacggcagcagcgcttgctcccagccacatggaagcgtgacacaatcacaaggaagtagttcccagagccaaggtatctcatcctcttctacctctacaatgcccaatagcagtcaaagttctcactccagctcaggaactctgtcttctctggagacagtcagcacacaggaactatattctattccggaagatcaagaacccgaggaccaggagccagaggaacctacacctgccccgtgggccagactgtgggctttgcaggatgggtttgcaaacctggtgtttgtattctttgatctaactgtggatgaccagagtgtttaccctaaggcactgagggatgagtacatcatgagcaagaccctaggctctggagcctgcggggaggtcaaactggccttcgagcggaagacctgtaaaaaggtggcaataaaaattatctcaaagcgcaagttcgccattggcagtgctcgggaggccgatcctgcacttaacgtggagactgaaatcgagatacttaaaaagcttaaccatccttgcatcatcaaaatcaagaactttttcgatgctgaagactactacatcgtgctcgagctcatggagggaggcgaactcttcgataaagttgtgggaaataagagactgaaagaggccacgtgcaaattgtatttttatcagatgcttttggccgttcagtatttacatgagaacggcattatccacagagatctgaagccggagaatgttctgctgtcctcacaggaggaagactgcctgatcaagatcactgactttggccacagtaagattttaggtgaaacctccttgatgcgcactttatgtggcacaccaacatatctagcacctgaggtgctggtgtcagtcggtaccgcagggtacaatagggccgtggattgctggtctctcggggtgattctgttcatttgcctgtcaggctacccccccttctccgaacatcgcacgcaggtcagcctcaaagatcagataactagtgggaaatacaacttcattcctgaggtttgggccgaagtgagcgaaaaggcacttgatttagtcaaaaagcttctggtggttgatcctaaggccaggtttaccacagaagaggccttgagacacccctggctccaggacgaggatatgaaaagaaaatttcaggatctgctgagtgaagaaaacgaaagtaccgccctccctcaagtactggcacagccctccacgtcacgcaagcggcctagggagggagaagctgagggagccgagacaacgaaacgacctgccgtatgcgccgcagtgttatag

SEQ ID NO: 170916 - DNA, 1632 bp, Artificial Sequence
  derived and/or modified sequence
atgagccgggagagcgacgtggaggcccagcagagccacggcagctctgcctgcagtcagccgcatggtagcgtcacgcagagtcaggggtcctcctcacagtcacaggggatctcctcatcttccacatcaacgatgcccaacagttcccagagctctcacagctccagcgggacgctctcttcactggaaacagtgtccacgcaggaactgtatagtatcccagaagatcaggaaccagaagatcaggaaccagaagagcccacgccagccccttgggccagactgtgggcactccaggatggctttgcaaacttagagtgcgttaatgataactattggttcggccgcgacaaatcctgcgaatactgcttcgacgaaccgctgctcaaacggactgataagtacaggacttactcgaagaagcactttagaatttttcgcgaggtcgggccgaaaaactcctacattgcctacatagaagaccacagcgggaacggcacctttgtcaatactgaactggtaggcaagggcaaaaggaggccactgaacaataatagcgaaatagctttgagcctctccagaaacaaagtctttgtgttcttcgatcttaccgtggacgatcagtcagtgtaccctaaggcacttcgcgatgagtacattatgtcaaaaaccctcgggagtggggcatgtggtgaggtgaagctggctttcgagcggaaaacatgtaagaaggtagccatcaagatcattagcaaacgaaaattcgcaataggtagtgcacgcgaggctgaccccgcattgaacgtggaaaccgagatcgaaattctgaaaaagttaaaccacccctgcattattaagatcaagaatttctttgacgcggaggattactatatagtattagagttgatggaaggaggcgagctattcgataaagtagtgggtaacaagaggctgaaagaagccacgtgcaagctttacttttaccagatgctcctggccgttcagtatctgcatgaaaacgggataattcatagagacttgaaacctgagaacgtactgctctccagccaggaggaggattgtctcattaaaatcaccgatttcggccacagcaaaatcctcggggagactagcctgatgaggaccctgtgtggcacgcctacctatttggcaccagaggtcttagtgtcagtgggcacagctggttataatcgggcagtggattgttggtccctaggcgtgatcctcttcatctgtctctccggctatccccccttttccgaacaccggactcaggtgtctctgaaggatcagataacttccggaaaatacaatttcatccctgaagtgtgggccgaagtgagtgagaaggctctcgacctggtaaagaagctcctcgtcgtggatccaaaagcacggttcaccaccgaagaagccttgcgacacccatggctacaggacgaagacatgaagcggaagttccaagatctgttgtcggaggagaatgagtcaactgcccttccccaagtgctagcccagcccagcacatcccggaagaggcccagagaaggcgaagcagaaggagctgagactacaaagcgacccgccgtttgtgctgctgtactatag

SEQ ID NO: 170917 - DNA, 1632 bp, Artificial Sequence
  derived and/or modified sequence
atgagccgggagagcgacgtggaggcccagcagagccacggcagcagcgcatgttctcagccacatggctctgtaacacaatcacaaggatcaagctctcagtcacagggtatttccagcagttccacaagcactatgcctaactcaagtcagagctcccattccagctcagggaccctttcctctttagagacagtttctacccaggaactatattcaattccagaggatcaagaaccagaggaccaagagcccgaggaacctacacctgccccatgggccagactttgggcgctgcaggacggcttcgcgaatctcgaatgtgttaatgacaactactggtttggccgcgacaagtcctgtgaatactgctttgacgagccgctgctgaagcgcacagataagtaccgtacctattccaagaagcattttagaatcttccgcgaggtagggcccaagaattcttatatcgcttacatcgaagaccatagcggcaatggcacttttgttaacaccgagctcgtcggcaaagggaagcggcggccactgaataacaattctgagatcgctctcagcctgtctaggaataaggtcttcgtctttttcgacctgaccgtcgacgaccagtccgtgtaccccaaggctctgcgcgatgaatacatcatgagtaaaaccctgggtagtggggcatgcggtgaggtgaagcttgctttcgaaagaaaaacatgtaaaaaagtggctatcaagattatctccaaacggaaatttgccattggatctgctagagaagctgatcctgctctaaatgtcgaaaccgagatagagatccttaagaagcttaatcatccctgcattataaaaatcaagaacttcttcgacgccgaggattattacattgtactcgaactaatggaggggggagagcttttcgacaaggtcgtggggaacaaacgtctcaaggaggcaacctgcaagctctacttttatcagatgctgctcgccgtgcagtacctgcacgagaacggcatcatacatcgcgacctcaagcccgagaacgtcttgctgtcgagccaggaggaggattgcttgatcaagattactgacttcgggcatagcaagatccttggggagacatctctgatgaggactttgtgcggcacaccaacatacctcgcccccgaggtgttggttagcgtgggcaccgccggttataaccgtgctgtagattgctggtcccttggtgtgatccttttcatctgtttatcaggttatccccccttctccgaacatcggacgcaagtgtctctgaaggaccagatcacaagcggaaagtacaacttcattccagaagtatgggcagaggtgagcgaaaaggctttagatttagtgaagaaacttctagtcgtggatcccaaggcgcgattcacgaccgaagaagccctaagacatccttggttacaggacgaagatatgaaacggaaattccaggatctcctgtctgaggagaatgaatctaccgcactgccgcaggtgcttgctcaaccttccacatcccgcaagaggcctagagagggcgaggcagaaggcgctgagacaactaagcgtccagccgtgtgtgctgccgtcttgtag

SEQ ID NO: 170918 - DNA, 1632 bp, Artificial Sequence
  derived and/or modified sequence
atgagccgcgaatcagatgttgaagcacaacaatcccacggcagctctgcatgcagccagccacacggctcagtgacccagagtcaggggtccagcagtcagtctcagggtatctcgtcctccagcacaagtactatgcccaacagctcccagagtagtcactcttcgtcagggactctgtcatcgctggagacagtgtctacgcaggagctttattcaattccagaagaccaggaacctgaagatcaagaacccgaggaaccgacccctgctccttgggcacgtctgtgggcgttgcaggatgggtttgcgaacctcgaatgtgtaaacgacaactactggttcgggagggacaaaagttgtgaatattgtttcgacgaacctctgctgaagcgtacggataaatacagaacctacagcaagaagcattttcggatttttcgcgaagtggggccaaagaactcctatatcgcatacatcgaagatcatagtggcaacggcacttttgttaacactgaactagttggcaaagggaaacgcaggcctctaaataacaattccgagatcgccctttctctgtctaggaacaaagtctttgtcttctttgatctaaccgtggacgatcagtcagtgtacccgaaggctctgcgggatgagtacatcatgagcaagactctgggctcaggtgcttgtggggaggtaaagctggccttcgaaaggaaaacttgcaagaaggtggccatcaaaataatctcgaagagaaagtttgccataggaagcgctagagaggcggacccggctctaaacgtggaaaccgagattgagatcctgaagaaactcaatcacccttgcatcatcaaaattaagaatttcttcgacgctgaggattactacattgtgctcgaacttatggaaggtggcgagttattcgacaaggtggtcggaaacaagagactgaaggaagccacttgcaagctgtatttttaccagatgctgctggcagtgcagtatttgcatgagaatgggattattcatcgggacttgaagcctgagaatgtgctactcagctctcaggaagaggattgcctgatcaaaattaccgatttcggacactctaagatccttggggaaacctccctgatgcggaccctgtgtggcacaccaacatatctggcgccagaggttctggttagcgtgggcactgccggttataaccgggctgttgactgctggtccctgggggtaatcctgttcatctgcctgtcgggctacccccctttcagcgaacacagaacccaagtctcactcaaggatcagattacatcagggaagtacaattttattcccgaagtctgggccgaggtctctgagaaagcattagacctggttaagaagctcctggtggtggatcctaaagctaggttcaccaccgaagaagccctgaggcacccatggctacaagacgaggacatgaagaggaagtttcaggacttgctgagcgaggagaacgagagcaccgccttgcctcaggtactggcccagccttctacttcccggaaacgccctcgtgagggcgaggcggagggtgcagaaactactaaacgacctgctgtctgcgcagcagtgctctag

SEQ ID NO: 170919 - DNA, 1359 bp, Artificial Sequence
  derived and/or modified sequence
atgtcccgggagtccgacgttgaagcacaacagtcccatggctcttccgcctgctcacagccacacgggagcgtgacccagtctcagggatccagctcacagagtcaggggatatcctcttcaagcacttcaaccatgcccaattcgtctcagtcttcccacagtagcagcgggacacttagtagcctcgagaccgtgagtacacaggagctctattctatccctgaagaccaagagccggaggaccaggaacccgaggagccaacccccgctccgtgggctcgcctgtgggcactgcaagacggatttgctaacttagtattcgtgttcttcgatctcacagtggatgatcagagcgtgtaccctaaggccttgagagatgaatatataatgagcaagactttgggtagcggcgcatgtggagaggtgaaattggctttcgagcgcaaaacctgtaagaaagtggcaatcaaaatcatatctaaaagaaaatttgctattggcagcgccagagaggcagatcctgctctgaatgtcgagactgaaattgaaatccttaagaaactgaaccacccatgtattatcaagataaagaactttttcgatgccgaggactattacattgtcttagagcttatggaaggtggcgagttgttcgacaaagtggtgggtaataaacggctgaaggaagccacttgtaagctgtacttctaccagatgctgcttgctgtgcagtaccttcatgagaatggaattatacacagggacctaaagcctgaaaacgtcctgctgagttctcaggaagaggactgcctgataaaaatcactgacttcggacactcaaaaatcctcggggaaacgtctctcatgaggaccctgtgcgggactccaacctacctagcccctgaagtgttggtcagcgtgggaacagcaggatacaaccgagccgtggattgctggtcccttggcgtcattctgttcatttgtctgtctggttatcccccattttctgagcaccgaacccaagtttcactaaaagatcaaatcactagcggcaagtacaattttatcccggaggtgtgggccgaagtgagtgagaaggctctcgatctggtgaaaaaacttttagtcgttgaccccaaagctcggtttaccacggaagaagctttacgacacccgtggctgcaggacgaggatatgaagaggaaatttcaagatctgcttagcgaagagaatgaatccaccgcccttcctcaggtcttggctcaaccctccacatcccgaaagaggcccagggagggtgaggcagaaggtgccgagacaaccaagcgtccagccgtctgtgctgcagtgctctag

SEQ ID NO: 170920 - DNA, 1359 bp, Artificial Sequence
  derived and/or modified sequence
atgtctcgggagtccgacgtggaagctcagcagtcgcacggttccagcgcctgttcccaaccacacggaagcgtcactcagtctcaggggtccagcagccaatcccagggtattagttcttcttccacatccactatgccaaatagttctcagagctcccattcttcatcaggcacactgtcttcccttgaaacggtgtcaacacaagagttatattccattcccgaggaccaggagcccgaagaccaggaacccgaagaaccaaccccagccccttgggcaagactgtgggcgttgcaggatggcttcgccaatttagtctttgttttcttcgatctgacagttgacgaccagtctgtgtatccgaaagcactcagagatgaatacattatgtccaaaacactgggcagtggggcatgtggcgaggtaaaactcgcctttgaaagaaagacatgcaagaaggtagcaataaaaatcatctcaaagagaaagttcgctatcggtagcgcgagggaggccgaccccgcacttaatgtggaaacggagatcgaaatcctgaaaaaactgaatcacccgtgtatcattaagataaagaatttctttgacgctgaagattactatatcgtcttagagctgatggaggggggtgaactgttcgacaaggtcgtcggcaataagcgactgaaagaagcgacttgcaagctttatttctaccaaatgttacttgctgtgcaatacctgcatgagaatggaattattcacagagacctgaaaccagaaaatgtgctgctctccagccaagaggaagactgtctgatcaaaatcaccgacttcggtcactccaagatactgggagaaactagcctgatgcgcacgctttgcgggacacctacctaccttgctccagaggtgctagtctccgtgggtactgcaggctacaatagagctgtggactgctggagcctgggagtgatactcttcatctgccttagcggttatccaccgttctcagagcataggacccaggtgtcactgaaagatcagatcactagtggaaaatacaatttcatccctgaagtctgggccgaagtgtcggaaaaagccctagacctggttaaaaagctgctggtggtggaccctaaggcccgttttactacggaggaagccctccggcatccctggcttcaagatgaggatatgaagaggaaattccaggacctgttgagtgaggaaaatgaatcaacagctttaccgcaggtcctggcacagccttcaaccagcagaaagagaccacgagaaggcgaagcagaaggtgctgaaacaaccaaacgacccgctgtttgcgctgccgtgctgtag

SEQ ID NO: 170921 - DNA, 1632 bp, Artificial Sequence
  derived and/or modified sequence
atgtcacgggaatctgacgtggaagcacagcagtcacacggttcctcagcgtgcagtcaaccacacggaagcgtgactcagtcacagggatccagcagtcagtcacaagggatatcctcctctagcacaagcaccatgccgaacagtagccagtcttcacattcatcttcaggcaccctgagctccctggaaacagtttctacacaggagctgtatagcatccccgaagatcaagaaccagaagaccaggagcctgaggaaccaactccggctccctgggcccgtctgtgggccctgcaggatggcttcgcaaacctggaatgcgtcaacgataattactggtttgggcgtgacaaaagctgcgaatactgcttcgacgagccactgcttaagcgaactgacaaatataggacatatagtaaaaagcactttcggatctttagagaagtcggacccaaaaactcctacattgcctatatcgaggaccacagtggaaacggaaccttcgtaaatacggagctcgtgggaaagggtaagcggaggcctctgaacaataacagcgaaatagccctctcactttctcgtaataaagtttttgttttttttgatctgacagtggacgatcagagcgtttatcccaaagcattgcgagacgagtacattatgtcgaaaactctcggctctggggcatgcggggaagtgaagctagcatttgaacgaaaaacctgtaaaaaagtggctattaaaatcatatctaaacgaaagtttgctattgggtccgcgcgagaggctgatcctgcattaaacgtcgaaaccgaaatagaaattctgaaaaagttaaatcatccatgcatcattaaaatcaagaatttcttcgatgcggaggattactatatcgttctagaattgatggagggcggagagttatttgacaaagtggtaggtaacaagcggctgaaggaggcaacatgcaagctttatttctaccagatgctcttagcggtccaatacttacatgagaatggcatcattcatagagacctcaaaccagagaatgtcctgctgagttcccaggaggaagattgtctcattaaaattaccgactttgggcacagcaaaatactgggcgagacatccttgatgcgtactctctgcgggactcctacttatcttgcccctgaagtgctggtgtctgtgggcacggccggttacaaccgtgccgtcgactgctggagcttgggcgttatcttgttcatttgtctttctggttacccgccattctcagagcaccgaacacaagtcagcctgaaggatcagatcacatcaggcaagtataattttataccggaggtttgggccgaggttagcgagaaggccctagatcttgttaaaaaactccttgtggttgatccaaaagctagattcacaaccgaggaggccctgcgtcatccatggctgcaagatgaagacatgaagcggaagttccaggatctgctttcagaggagaacgaatcaactgcactaccccaggtactggcacagcctagcacatcccgcaagcgaccacgcgaaggagaagccgagggagccgaaacaaccaaacgccctgctgtgtgtgcagctgtgctgtag

SEQ ID NO: 170922 - DNA, 1632 bp, Artificial Sequence
  derived and/or modified sequence
atgagcagggagagtgatgtagaggctcagcagagccacggatcttccgcttgcagtcaaccgcatggctctgtgactcagagtcaaggcagttctagtcagtcgcagggcatctctagtagttccactagcactatgcccaattccagtcaatcgtcccactctagttcaggaaccctctccagtctggagaccgtatccacacaggagttgtactcaatcccggaggaccaagagccagaggatcaggagccagaggaaccaacaccggctccgtgggccaggctttgggcgctccaggacggtttcgccaacctggagtgcgtgaatgataattactggtttggtagggacaaaagttgtgagtactgcttcgacgaaccactgctcaagagaacagacaagtatcggacctactccaaaaaacactttaggatcttccgggaggtgggtccaaagaattcttacatcgcttatattgaggatcactctgggaatgggactttcgtgaacacagaactggtgggcaaaggaaagcgcaggccactgaataataatagcgagatcgcactgtctctgtcaagaaacaaggtgtttgtttttttcgacttgaccgtggatgaccagagcgtatatcctaaagctctcagagatgaatacataatgtctaagacgttgggcagcggagcctgtggagaggtgaaactggcattcgaacgcaaaacttgtaaaaaagtggccattaaaatcattagcaaaaggaaattcgcaattggcagcgccagagaggcagacccagcacttaatgttgagaccgagatcgagattttaaagaagctcaatcatccttgcattattaagattaaaaatttctttgatgccgaagactattatatcgtactggaactgatggagggcggagagcttttcgacaaggtggttggaaacaaaaggttaaaagaagccacctgtaagttgtatttctatcagatgctgctggccgttcagtatttacatgagaatggcatcatacaccgggacctgaaacctgagaacgttttattgtcctcccaagaagaagattgtctcatcaagattacagattttggccatagcaaaatattgggcgagacctccctcatgcgaactttatgcggaacccctacctatctggcacctgaagtactggtgtcagtgggcacagctgggtataacagggcagtagattgttggagcttaggggttatcctgtttatctgccttagcgggtatcctcctttttcagaacatcgtacccaggtgtcactcaaggatcagatcacatctggcaagtacaacttcattcctgaagtgtgggcagaggtcagtgagaaagccttggatctggtgaagaagctgctagtcgttgatccaaaagcccgtttcacgacagaagaagccctgcgacacccgtggctgcaggacgaagatatgaagcggaaattccaggatctgctgagcgaagagaacgaaagcaccgctttgccccaagtcctggctcagccatcaacatccaggaagcgtcctcgagagggcgaggccgagggcgcagagaccaccaaacgaccagccgtctgtgctgccgtcctgtag

SEQ ID NO: 170923 - protein, 740 aa, Artificial Sequence
  derived and/or modified sequence
MEKLGVEPEEEGGGDDDEEDAEAWAMELADVGAAASSQGVHDQVLPTPNASSRVIVHVDLDCFYAQVEMISNPELKDKPLGVQQKYLVVTCNYEARKLGVKKLMNVRDAKEKCPQLVLVNGEDLTRYREMSYKVTELLEEFSPVVERLGFDENFVDLTEMVEKRLQQLQSDELSAVTVSGHVYNNQSINLLDVLHIRLLVGSQIAAEMREAMYNQLGLTGCAGVASNKLLAKLVSGVFKPNQQTVLLPESCQHLIHSLNHIKEIPGIGYKTAKCLEALGINSVRDLQTFSPKILEKELGISVAQRIQKLSFGEDNSPVILSGPPQSFSEEDSFKKCSSEVEAKNKIEELLASLLNRVCQDGRKPHTVRLIIRRYSSEKHYGRESRQCPIPSHVIQKLGTGNYDVMTPMVDILMKLFRNMVNVKMPFHLTLLSVCFCNLKALNTAKKGLIDYYLMPSLSTTSRSGKHSFKMKDTHMEDFPKDKETNRDFLPSGRIESTRTRESPLDTTNFSKEKDINEFPLCSLPEGVDQEVFKQLPVDIQEEILSGKSREKFQGKGSVSCPLHASRGVLSFFSKKQMQDIPINPRDHLSSSKQVSSVSPCEPGTSGFNSSSSSYMSSQKDYSYYLDNRLKDERISQGPKEPQGFHFTNSNPAVSAFHSFPNLQSEQLFSRNHTTDSHKQTVATDSHEGLTENREPDSVDEKITFPSDIDPQVFYELPEAVQKELLAEWKRAGSDFHIGHK

SEQ ID NO: 170924 - protein, 661 aa, Artificial Sequence
  derived and/or modified sequence
MEKLGVEPEEEGGGDDDEEDAEAWAMELADVGAAASSQGVHDQVLPTPNASSRVIVHVDLDCFYAQVEMISNPELKDKPLGVQQKYLVVTCNYEARKLGVKKLMNVRDAKEKCPQLVLVNGEDLTRYREMSYKVTELLEEFSPVVERLGFDENFVDLTEMVEKRLQQLQSDELSAVTVSGHVYNNQCIGYKTAKCLEALGINSVRDLQTFSPKILEKELGISVAQRIQKLSFGEDNSPVILSGPPQSFSEEDSFKKCSSEVEAKNKIEELLASLLNRVCQDGRKPHTVRLIIRRYSSEKHYGRESRQCPIPSHVIQKLGTGNYDVMTPMVDILMKLFRNMVNVKMPFHLTLLSVCFCNLKALNTAKKGLIDYYLMPSLSTTSRSGKHSFKMKDTHMEDFPKDKETNRDFLPSGRIESTRTRESPLDTTNFSKEKDINEFPLCSLPEGVDQEVFKQLPVDIQEEILSGKSREKFQGKGSVSCPLHASRGVLSFFSKKQMQDIPINPRDHLSSSKQVSSVSPCEPGTSGFNSSSSSYMSSQKDYSYYLDNRLKDERISQGPKEPQGFHFTNSNPAVSAFHSFPNLQSEQLFSRNHTTDSHKQTVATDSHEGLTENREPDSVDEKITFPSDIDPQVFYELPEAVQKELLAEWKRAGSDFHIGHK

SEQ ID NO: 170925 - DNA, 2223 bp, Artificial Sequence
  derived and/or modified sequence
atggagaaacttggggtggagcctgaagaagagggcggtggggatgacgatgaggaagatgctgaggcctgggctatggagttggccgacgtcggagctgcagcctcctcacaaggtgtgcacgaccaggtactgcccaccccaaatgcttcctctagagtaatagttcatgttgacctggactgcttctatgcacaggtggaaatgatctcaaaccccgagctcaaagataaaccattaggcgtgcagcaaaagtatctcgtggtgacctgtaattacgaggcccgcaagctgggcgtgaaaaaactcatgaatgtgcgggacgccaaagaaaaatgcccacagttggttctcgttaacggcgaagacctgacccggtacagagagatgtcatataaagtcacagagctgttggaagagttttctcctgttgtggagaggctcggttttgacgagaattttgtggacctgacagagatggtagagaagcgtttacagcaattacagtctgacgagctctccgcggtgacagtcagcggccatgtgtataacaaccaatcaattaatttactggatgttctgcatataagactgctagtcggcagccaaatcgcagctgagatgagagaagccatgtacaaccagctgggtctgacaggttgtgccggggtggccagcaataagctattagctaaattggttagcggtgtcttcaaacccaatcagcaaacggtgctcttgcccgaatcatgtcagcacctcatacactccctgaatcatataaaagagatcccaggtatcgggtataaaactgctaaatgcctggaggctctgggcatcaactccgtcagagacttgcagacatttagcccaaaaatactcgagaaggaactcggtatatccgtagctcagcgcattcagaaacttagctttggcgaggataattcccccgtgatattatcaggccctcctcaaagcttctcagaggaggactcttttaaaaaatgttccagcgaggtggaggctaaaaataagatcgaagagctgctggccagccttttaaaccgcgtttgccaggatggaagaaaaccccatactgtccggttgataatccggcgatactcctctgagaaacactacgggcgagagtctagacaatgtcccatcccatcccatgtcatccaaaagctgggaacgggaaactacgacgtgatgaccccaatggtcgatatcctgatgaagctcttcaggaacatggttaacgtgaagatgcccttccatcttaccttgctgtccgtttgcttctgcaatctcaaagccctgaacacagccaaaaagggcctgatagactattacctgatgccttcgttgtctactacatcaaggtctggaaaacacagttttaagatgaaagatacgcacatggaagatttcccgaaagacaaagagactaatcgggacttcctcccctccggccgcatcgagtctactcgcacgagagaatcacccttggacaccaccaacttcagcaaggagaaggatattaatgagtttccgctctgctcactacctgagggcgtggaccaagaggttttcaaacagcttccggttgacatacaagaggagattctgtcggggaagagcagggagaaattccagggtaaaggaagtgtttcatgtcccctgcatgctagtaggggcgtgctcagctttttcagcaaaaaacagatgcaggacatcccaattaacccaagggatcatctttctagctcaaagcaggtttccagcgtgtctccctgcgaacccggaacctctggctttaacagcagttcctccagctacatgtctagccagaaggattattcctactatctcgacaaccgactgaaggatgaacgcatttctcaaggacccaaggagccgcagggtttccactttaccaatagtaaccccgccgtgtccgctttccacagctttccaaatcttcagagtgaacaattattcagcaggaaccataccacagattcacacaagcagacagtagcgaccgattcccacgaaggactgaccgagaacagggagccagattccgtggacgaaaaaataacgttcccgtctgacattgacccacaggttttctacgaacttcctgaagccgtccagaaggagttgctcgccgaatggaagcgtgctggcagcgattttcacatcggacacaaatag

SEQ ID NO: 170926 - DNA, 1986 bp, Artificial Sequence
  derived and/or modified sequence
atggagaaacttggcgtggagcccgaggaggaaggcggaggggacgacgacgaggaagacgccgaggcttgggctatggagcttgctgatgtgggggctgctgctagtagtcagggggtgcatgatcaggtccttccaacacccaatgcgtcttctcgggtgattgtgcacgtggacctggactgtttttatgcgcaggtggagatgattagcaacccagagctgaaagacaaaccgctgggagtacagcagaaatatttagtggtgacatgtaattacgaagcaagaaagctcggggtgaagaaattgatgaatgtcagagatgctaaggaaaagtgtcctcagctggtcctggtgaacggggaagatttgacaagataccgagagatgagctataaagtcacggaattgctggaagagttcagccccgtggtggagcggttgggtttcgacgagaattttgtggatctcacagagatggtggagaaaaggctgcaacagctgcaatcagacgagctgtcagcagtgaccgttagcggccacgtgtacaacaaccagtgcatcggctacaaaaccgccaaatgccttgaggccctcggaatcaatagcgttagagatttgcagacgttctcacctaagatcttagagaaggagttgggcatttctgtggctcaacgtattcaaaaactgtccttcggagaagacaactctcccgtgatattgtcaggtccaccccagagcttttcggaagaggattcatttaaaaagtgctccagcgaggtagaggctaagaataagattgaagagctgctggctagtttgttgaatagggtctgtcaagatggtcgcaaacctcatactgtacgactaatcattaggaggtattcctccgagaaacactatggaagagagagcaggcagtgcccaataccatcacatgtcatccaaaaactcgggacaggcaactacgacgtgatgaccccaatggtggatatcctgatgaagctgtttagaaatatggtgaacgttaagatgccatttcacctgacactgctatcagtgtgcttctgcaatctgaaggcgttgaatacggccaagaaaggattaattgactattatctgatgccttccctgtcaacaacctctagatctggtaaacactcatttaaaatgaaggacactcacatggaggactttccgaaagacaaggaaacgaaccgggactttctcccgtcaggaaggattgagagcacccgaacgcgcgagtctccccttgacaccacgaacttttccaaggaaaaggacattaacgaatttcctctgtgctccctacctgagggcgttgatcaggaagtgtttaagcaattgcctgtggacattcaagaagagatcttaagcggcaagtctagagaaaaattccagggtaaggggtctgtgtcttgtccactccacgcgtctcgaggtgttctgtccttcttttctaaaaagcagatgcaagacattccaatcaatcccagggatcacctctcctcctctaaacaggtgtcctccgttagtccatgcgagccggggacctcgggcttcaattccagcagcagtagttatatgagttcacagaaggattattcatactacttggacaacagacttaaagacgagcgaatttcacagggccccaaggaaccacaaggctttcacttcactaacagtaatcccgccgtttcagcatttcatagcttcccaaatttgcagtcagagcagttgtttagcaggaaccacaccacagacagccacaaacaaacagtggccactgacagccacgaggggctgacagagaatcgagagcctgatagtgtcgacgaaaaaataaccttcccgtctgatattgatccacaggtgttttacgaactacccgaggccgttcaaaaggagctcctcgccgagtggaagagggctggttccgattttcatatcggtcataagtag

SEQ ID NO: 170927 - DNA, 2223 bp, Artificial Sequence
  derived and/or modified sequence
atggagaagcttggcgtggagccagaagaggaaggcggcggggacgatgacgaagaagacgctgaggcttgggccatggaactggccgacgtaggcgccgcagcttcgtctcagggggtgcacgaccaggtccttccaacgccaaacgcatcctcacgggtgattgtgcacgtcgacctggactgcttttatgcccaagtggagatgatctccaatcccgagctgaaggacaagcctcttggagtccagcaaaaatacctcgtggtgacatgcaattacgaggctaggaaattaggcgtcaaaaagctgatgaacgtgagagatgcaaaagaaaagtgtcctcagctggtcttagtgaacggtgaggacttgacccgctaccgggagatgtcatacaaagtgactgagctccttgaggaattctccccagtggtcgagaggcttgggtttgacgaaaatttcgttgatctgaccgaaatggttgaaaagaggctccagcaattgcagagcgacgagctcagcgcagtgactgtttcgggccatgtgtataataatcagtcaatcaacctccttgatgtgctgcatatcagactgctggtcggatcccagatcgcagccgagatgcgtgaagccatgtataaccagctgggccttacgggttgtgctggagtcgcaagcaataaattactggccaaattggtttctggagtgtttaaaccaaatcagcagaccgtgctcctaccagagtcgtgccaacacttaatccactcactcaatcacatcaaagagattccaggcattggctacaagacggccaagtgtctagaagcactcgggattaactccgtccgggatctgcaaaccttctcaccaaagatcctggagaaggaacttggcatcagcgtggctcaacggattcagaagcttagtttcggtgaggataattcaccggtgatcctgagcggccccccccagtccttctcagaggaagactcttttaagaaatgtagttcggaggtcgaagccaaaaacaagatcgaagagctgctcgctagcctcctaaaccgagtatgccaggacgggaggaagcctcacacagtaaggttaatcattcgccgatacagcagcgaaaaacactacggccgcgaaagccgccagtgtcctatccctagtcatgtgatccagaaactcggcactggaaactacgacgtgatgacaccaatggtggatatcctgatgaaactcttccgtaatatggtgaacgtcaagatgcccttccaccttacgttgttatccgtctgtttttgtaacctcaaggctctcaacaccgcaaaaaaggggttaatcgattattacctaatgccgtcattgtccaccacctccaggtcgggtaaacattcatttaagatgaaggatacacatatggaagattttcccaaggacaaagagacaaacagggactttcttccctctgggcgcattgaatcaaccagaacgcgggagagcccgctggacacaacgaacttcagcaaagagaaggatattaacgaatttccgctgtgcagccttcccgagggcgtggatcaagaggttttcaagcagcttcccgtagatatccaggaggaaattctctcaggcaaaagtagggaaaaatttcagggaaagggttctgtgagttgtccactgcatgcttccaggggagtgctgtctttcttctctaaaaagcagatgcaggacattccgatcaacccccgcgaccacttaagctcctctaagcaggttagctctgtcagtccttgtgagcctggaacaagcggcttcaacagttcttccagttcgtatatgtcctcacagaaagactattcatattaccttgataaccgtttaaaagatgagagaatctcacagggcccaaaggagccacaaggcttccattttactaactcaaacccagctgttagtgcattccatagtttccctaacctgcaatcagaacaacttttttcccggaaccatacaaccgacagtcacaagcagactgtagccacggacagccacgaggggctgactgaaaatcgggaaccggactccgtcgacgaaaaaatcacgttcccatcagatattgatccacaggtattttatgagctgccagaggcagtgcagaaagagctgctggctgaatggaagagagcgggcagcgattttcacattggacacaagtag

SEQ ID NO: 170928 - DNA, 2223 bp, Artificial Sequence
  derived and/or modified sequence
atggagaagctgggcgtggagcctgaggaggagggcggcggagatgatgatgaagaagatgctgaggcctgggccatggagctggctgatgtgggcgccgccgccagcagccagggcgtgcatgaccaggtgctgcccaccccaaatgccagcagccgggtgattgtgcacgtggacctggactgcttctacgcccaggtggagatgatcagcaaccctgagctgaaggacaagcccctgggcgtgcagcagaagtacctggtggtgacctgcaactatgaggccaggaagctgggcgtgaagaagctgatgaatgtgagagatgccaaggagaagtgcccccagctggtgctggtgaatggagaggacctgacccgctaccgggagatgagctacaaggtgacagagctgctggaggagttcagccctgtggtggagcggctgggctttgatgagaactttgtggacctgacagagatggtggagaagaggctgcagcagctgcagagtgatgagctgtctgctgtgacagtgtctggccacgtgtacaacaaccagagcatcaacctgctggatgtgctgcacatccggctgctggtgggcagccagattgctgctgagatgagggaggccatgtacaaccagctgggcctgaccggctgtgccggcgtggccagcaacaagctgctggccaagctggtgtctggagtcttcaagcccaaccagcagacagtgctgctgcctgagagctgccagcacctgatccacagcctgaaccacatcaaggagatccctggcatcggctacaagacagccaagtgcctggaggccctgggcatcaacagcgtgcgggacctgcagaccttcagccccaagatcctggagaaggagctgggcatctctgtggcccagaggatccagaagctgagctttggagaggacaacagccctgtgatcctgagcggccccccccagagcttcagcgaggaggacagcttcaagaagtgcagcagcgaggtggaggccaagaacaagattgaggagctgctggccagcctgctgaacagagtgtgccaggacggcaggaagccccacacagtgcggctcatcatccgccgctacagcagcgagaagcactacggccgggagagccggcagtgccccatccccagccacgtgatccagaagctgggcactggaaattatgatgtgatgacccccatggtggacatcctgatgaagctgttcaggaacatggtgaatgtgaagatgcccttccacctgaccctgctgtctgtgtgcttctgcaacctgaaggccctgaacacagccaagaagggcctgattgactactacctgatgcccagcctgagcaccaccagccgcagcggcaagcacagcttcaagatgaaggacacccacatggaggacttccccaaggacaaggagaccaacagagacttcctgcccagcggccgcatcgagagcaccaggacccgggagagccccctggacaccaccaacttcagcaaggagaaggacatcaatgagttccccctgtgcagcctgcctgagggcgtggaccaggaggtgttcaagcagctgcctgtggacatccaggaggagatcctgagcggcaagagccgggagaagttccagggcaaaggatctgtgtcctgccccctgcacgccagcagaggagtgctgtccttcttcagcaagaagcagatgcaggacatccccatcaacccccgggaccacctgagcagcagcaagcaggtgtcctctgtgagcccctgtgagcccggcaccagcggcttcaacagcagcagcagcagctacatgagcagccagaaggactacagctactacctggacaaccggctgaaggatgagcgcatcagccagggccccaaggagccccagggcttccacttcaccaacagcaacccagctgtgtctgccttccacagcttccccaacctgcagagcgagcagctgttcagcaggaaccacaccacagacagccacaagcagacagtggccacagacagccatgagggcctgacagaaaatcgggagccagattctgtggatgagaagatcaccttccccagcgacatcgacccccaggtgttctatgagctgcctgaggccgtgcagaaggagctgctggccgagtggaagagagctggcagtgacttccacatcggccacaagtag

SEQ ID NO: 170929 - DNA, 1986 bp, Artificial Sequence
  derived and/or modified sequence
atggagaagctgggcgtggagcctgaggaggagggcggcggagatgatgatgaagaagatgctgaggcctgggccatggagctggctgatgtgggcgccgccgccagcagccagggcgtgcatgaccaggtgctgcccaccccaaatgccagcagccgggtgattgtgcacgtggacctggactgcttctacgcccaggtggagatgatcagcaaccctgagctgaaggacaagcccctgggcgtgcagcagaagtacctggtggtgacctgcaactatgaggccaggaagctgggcgtgaagaagctgatgaatgtgagagatgccaaggagaagtgcccccagctggtgctggtgaatggagaggacctgacccgctaccgggagatgagctacaaggtgacagagctgctggaggagttcagccctgtggtggagcggctgggctttgatgagaactttgtggacctgacagagatggtggagaagaggctgcagcagctgcagagtgatgagctgtctgctgtgacagtgtctggccacgtgtacaacaaccagtgcatcggctacaagacagccaagtgcctggaggccctgggcatcaacagcgtgcgggacctgcagaccttcagccccaagatcctggagaaggagctgggcatctctgtggcccagaggatccagaagctgagctttggagaggacaacagccctgtgatcctgagcggccccccccagagcttctctgaagaagattccttcaagaagtgcagcagcgaggtggaggccaagaacaagattgaggagctgctggccagcctgctgaacagagtgtgccaggacggcaggaagccccacacagtgcggctcatcatccgccgctacagcagcgagaagcactacggccgggagagccggcagtgccccatccccagccacgtgatccagaagctgggcaccggcaactatgatgtgatgacccccatggtggacatcctgatgaagctgttcaggaacatggtgaatgtgaagatgcccttccacctgaccctgctgtctgtgtgcttctgcaacctgaaggccctgaacacagccaagaagggcctgattgactactacctgatgcccagcctgagcaccaccagccgcagcggcaagcacagcttcaagatgaaggacacccacatggaggacttccccaaggacaaggagaccaacagagacttcctgcccagcggcagaattgagagcaccaggacccgggagagccccctggacaccaccaacttcagcaaggagaaggacatcaatgagttccccctgtgcagcctgcctgagggcgtggaccaggaggtgttcaagcagctgcctgtggacatccaggaggagatcctgagcggcaagagccgggagaagttccagggcaagggctctgtgtcctgccccctgcacgccagccggggcgtgctgtccttcttcagcaagaagcagatgcaggacatccccatcaacccccgggaccacctgagcagcagcaagcaggtgtcctctgtgagcccctgtgagcccggcaccagcggcttcaacagcagcagcagcagctacatgagcagccagaaggactacagctactacctggacaaccggctgaaggatgagcgcatcagccagggccccaaggagccccagggcttccacttcaccaacagcaacccagctgtgtctgccttccacagcttccccaacctgcagagcgagcagctgttcagcaggaaccacaccacagacagccacaagcagacagtggccacagacagccatgagggcctgacagagaaccgggagccagacagcgtggatgagaagatcaccttccccagcgacatcgacccccaggtgttctatgagctgcctgaggccgtgcagaaggagctgctggccgagtggaagagagctggcagtgacttccacatcggccacaagtag

SEQ ID NO: 170930 - DNA, 2223 bp, Artificial Sequence
  derived and/or modified sequence
atggagaagctgggcgtggagcccgaggaggagggcggcggcgacgacgacgaggaagatgccgaggcttgggccatggagctagcagatgttggagccgccgcaagtagccaaggtgtgcacgaccaggtcctgcccaccccaaacgcttctagccgggttatcgtgcatgtggatctggattgcttctacgctcaggtggagatgattagtaatcctgagctaaaggacaagccacttggggtccagcagaagtacttggtcgtcacgtgtaattacgaggcgaggaagctgggcgtaaagaaattgatgaacgtccgcgacgccaaagaaaagtgccctcagttggtactcgttaatggcgaagacctcacaaggtacagagagatgagttacaaagtgactgagttactggaggagttctctcccgtagtggagaggctaggctttgatgaaaatttcgtggacctgactgagatggtagagaagagactacaacaactgcagagtgacgagttaagcgcagtgacagtgagcggtcacgtgtacaacaatcagtccattaatctgctggacgtcctccatatccgtctattggtgggctcccagatagcggctgaaatgagggaggcaatgtacaatcagttgggtttgacaggatgtgccggcgtggcttctaacaaattgttggcaaaattggtgagcggtgtgttcaaacccaatcagcagaccgtgctgctacctgaatcttgtcaacatctgatccattctctgaatcacataaaggaaattccggggatcggatacaaaaccgccaagtgcttggaggccttaggcattaattccgtgcgagatctgcagacctttagccccaagattctagaaaaggagctgggaataagtgtggcccagcgcatacaaaagctgtcttttggggaagacaactcgcccgtcatcttgagcggccccccccagtccttctccgaagaagactctttcaaaaagtgttccagcgaggtcgaggccaagaacaagatcgaggagctgttggcgtccttgctaaatcgtgtatgccaggacggacgtaagccccataccgtgaggttgattatcaggcgctattctagcgagaaacactacggcagggaatcgagacaatgtcctataccctcacatgtgattcagaaacttgggaccgggaactatgacgtcatgactcctatggtggacattctcatgaagctgtttcggaatatggtgaacgtcaaaatgccttttcacctcaccttgctatctgtgtgcttttgcaatttaaaggccctcaatacagcaaagaaaggattgattgactattatcttatgccatcactctccaccacctcccggtcaggcaaacactcttttaagatgaaagacacccacatggaggattttcctaaggacaaggagactaacagagacttcctgccctcaggcagaatcgaatccacacgaacacgcgaatcgccactggataccaccaatttttctaaagagaaggacatcaatgaattcccgctgtgtagcctgcccgaaggagtggatcaggaagtgtttaaacagctgcccgtcgatatacaagaagaaatcctgtccgggaagtcacgagaaaagtttcagggcaagggctcagtgagctgtcctttacacgcaagtcggggcgttctgagcttttttagcaaaaaacagatgcaagacattccgatcaaccccagagatcacctgtcaagctcaaaacaggtgtcaagcgtttcaccttgcgaaccagggacgtccggtttcaacagcagcagcagcagctatatgtctagccaaaaggactattcttattatttggacaatcgcctgaaggacgagagaatttcccagggccccaaggagccacaaggcttccactttacgaattcgaacccagccgtgagtgctttccattcgtttcccaaccttcaaagcgaacagctattttcaaggaatcacactacggactcccacaagcaaacagttgccacggattcccatgagggcctaaccgagaacagagaacccgactctgttgatgagaagataacgttccctagcgatatagatccccaagtcttttacgaactgcccgaggcggtacagaaggaattgctggctgaatggaaacgcgccgggtcagattttcatatcgggcataaatag

SEQ ID NO: 170931 - DNA, 1986 bp, Artificial Sequence
  derived and/or modified sequence
atggagaagctgggcgtggagcccgaggaggagggcggcggcgacgacgacgaagaagatgccgaggcttgggcgatggagcttgctgatgtgggcgcagccgcctcgtcacaaggcgtacatgatcaggtccttccgacccctaatgcctctagccgtgtcatcgtgcacgttgatctggactgcttctacgctcaggtggagatgatatccaacccagaacttaaggataagccccttggagtgcagcagaaatacctggttgtgacatgcaattacgaagccagaaagctcggagtgaagaagcttatgaatgtccgtgatgccaaggaaaagtgcccccagctggttctggtcaacggagaagatctcacccgatacagggagatgagctacaaagtaaccgaactactcgaggagttctcacctgtggtagaacgcttaggctttgacgaaaattttgtggacctaacagagatggtcgagaaaaggctgcagcaactgcagtctgatgaactcagcgctgtcaccgtttctggacacgtgtataataaccagtgtatcgggtacaagactgctaagtgcctggaagctttgggcatcaatagcgtccgggatcttcagactttttctcctaagatcctggaaaaagagctgggcatcagcgtggcccagagaatccagaaactgagctttggggaagacaacagcccggtcatattgtcaggaccaccacagtccttttcagaagaagactcattcaaaaagtgcagttccgaagtggaggctaagaataagatcgaggagctattagccagcctactgaatcgtgtatgtcaagacggtaggaagccccatactgtgcgcctgattatcagacgatattccagcgagaaacactacgggcgcgagtctcgccagtgtcccatcccctctcacgtcattcagaaactcggtaccggcaactacgatgtgatgacccctatggtggatattctcatgaagttattccgcaacatggtgaatgtgaagatgccttttcatctgaccctgctgagcgtatgtttctgtaacctcaaggctctgaataccgcaaaaaaagggctcattgattattacctaatgcccagtctgtcaaccacgtctcgaagcggcaaacacagcttcaagatgaaagacactcacatggaggactttcccaaggacaaggaaacaaatagagacttcttaccctccggtaggatcgaatccacacgtacgcgcgagagccccctggacactactaatttttccaaggaaaaggacatcaacgagttccccttgtgcagcctgccagagggcgttgaccaagaagtgttcaaacagctgcctgtggatatccaggaagaaatcctcagtggtaaatcacgagagaagtttcaagggaaaggatccgtatcgtgtcctttacatgcctccagaggtgttctgtctttcttttctaaaaaacagatgcaggacatccccatcaaccctagagatcacctctcctcctcaaagcaggtcagcagcgtaagtccttgcgagcccggaacatcgggcttcaattcctctagtagcagctacatgtcgtctcagaaagattacagctattaccttgataatagactgaaagatgagagaatcagccagggccctaaggagccacagggttttcacttcaccaatagcaaccccgcagtttctgccttccattcatttcccaatctgcagtctgagcagctgttttcccgaaatcataccaccgactctcacaaacagaccgtggctactgactctcacgaggggcttaccgaaaatagagagccagacagcgtggatgagaagatcacattcccctctgatatcgatccacaggtgttctacgaactgccagaggccgtgcagaaggagctgctggcagagtggaaaagggctgggtccgactttcatataggccacaaatag

SEQ ID NO: 170932 - DNA, 2223 bp, Artificial Sequence
  derived and/or modified sequence
atggagaagctgggcgtggagcccgaggaggagggcggcggcgacgacgacgaggaggatgcagaggcgtgggccatggaattagccgacgtcggcgctgctgcctcctcgcagggggtgcacgatcaggttttaccaacacccaatgctagctcacgcgttattgttcacgtggacctggattgcttttacgcgcaggtggagatgatctcaaaccccgagttaaaggacaagcctttaggcgtgcaacaaaaatatctggtcgtcacctgtaactatgaagcccgcaaactgggggtaaagaaactgatgaatgtgcgtgacgcaaaggaaaaatgccctcagctggtgctggttaacggcgaggacctgacaaggtaccgagaaatgtcttataaggtgacagagttgctcgaagaatttagccccgttgtggagcgcctgggctttgatgaaaatttcgttgatcttactgagatggtggaaaagaggttgcagcagctgcagtccgacgaactgtccgcggtcactgttagcgggcacgtctataacaaccagagcattaatcttctggatgtgttacacatacgtctgctggttgggtcccaaatcgccgccgagatgcgcgaggcgatgtataaccagcttgggcttactggatgtgccggcgtggctagcaataagctcctcgccaagcttgtttctggggtgttcaagcccaaccagcagacggtgttgctcccagaatcatgtcagcacttgatccacagcctcaaccacataaaggagatcccaggcattgggtacaaaacagccaagtgcttagaagcactgggaataaactccgtgcgagatctgcagacattctctcccaagatcctggaaaaggagctcgggataagcgtggcccagcgaattcagaagctgagcttcggggaggacaattctcctgttattctatccggtccgcctcagagtttttccgaggaggactccttcaaaaagtgtagcagtgaggtagaggcgaaaaacaagattgaggaattactggcttcgttgttgaatagggtgtgtcaggacggacgtaagcctcacactgttcgcctgatcatcaggaggtattcttctgaaaagcactatgggcgtgagtctcggcaatgccccataccctcccacgttatccagaagctggggaccggaaattacgacgtcatgacaccgatggttgacatcctgatgaagcttttccggaatatggtgaacgtcaaaatgccttttcatttgaccctactttccgtgtgtttctgtaacctgaaggcattgaatactgccaagaagggtctgatcgactattatcttatgcctagcctgagtaccacaagcaggtctggtaagcactcctttaagatgaaagacactcatatggaggacttcccaaaagataaagaaaccaatagggatttcctgccttctgggcggatcgagagtacccgcacacgagagtcaccgctggatacgacaaactttagcaaggaaaaggacattaatgaattccccctctgttcgctgcccgaaggcgtggaccaggaagtattcaagcagctgcccgttgatatccaagaagaaatactgagtgggaagtcacgcgaaaaatttcaaggaaagggtagcgtcagttgtccacttcatgcctccaggggcgtcttatcattttttagcaaaaaacagatgcaagacattcctattaatcctagagaccatctttccagctcaaagcaggtgagcagtgtgagcccctgcgaacccggaacttccggtttcaactccagttctagctcctatatgtcatcacagaaagactattcctactacttggacaatcgtctgaaggatgagcgaataagtcaggggcccaaggaaccccagggattccattttacgaattctaatccagctgtcagtgcatttcattcgttcccaaatctgcaatccgaacagctgtttagccggaatcacactacagactcacacaagcagactgttgctacagatagccatgaaggcttgactgaaaatagggagcccgactccgtcgacgagaagataacattccctagcgacatcgatcctcaggtattttatgagttgcccgaggccgtacagaaggagttactggcggaatggaagcgggccgggtctgacttccacatcgggcataaatag

SEQ ID NO: 170933 - DNA, 2511 bp, Artificial Sequence
  derived and/or modified sequence
agcgctgcggttggcagcggcgggatggagaagctgggggtggagccggaggaggaaggcggcggcgacgacgacgaggaagacgccgaggcctgggccatggaactggcggacgtgggggcggcagccagctcgcagggagttcatgatcaagtgttgcccacaccaaatgcttcatccagagtcatagtacatgtggatctggattgcttttatgcacaagtagaaatgatctcaaatccagagctaaaagacaaacctttaggggttcaacagaaatatttggtggttacctgcaactatgaagctaggaaacttggagttaagaaacttatgaatgtcagagatgcaaaagaaaagtgtccacagttggtattagttaatggagaagacctgacccgctacagagaaatgtcttataaggttacagaattactggaagaatttagtccagttgttgagagacttggatttgatgaaaattttgtggatctaacagaaatggttgagaagagactacagcagctgcaaagtgatgaactttctgcggtgactgtgtcgggtcatgtatacaataatcagtctataaacctgcttgacgtcttgcacatcagactacttgttggatctcagattgcagcagagatgcgggaagccatgtataatcagttggggctcactggctgtgctggagtggcttctaataaactgttggcaaaattagtttctggtgtctttaaaccaaatcaacaaacagtcttattacctgaaagttgtcaacatcttattcatagtttgaatcacataaaggaaatacctggtattggctataaaactgccaaatgtcttgaagcactgggtatcaatagtgtgcgtgatctccaaaccttttcacccaaaattttagaaaaagaattaggaatttcagttgctcagcgtatccaaaagctcagttttggagaggataactcccctgtgatactctcaggaccacctcagtcctttagtgaagaagattcatttaaaaaatgttcatctgaagttgaagctaaaaataagattgaagaactacttgctagtcttttaaacagagtatgccaagatggaaggaagcctcatacagtgagattaataatccgtcggtattcctctgagaagcactatggtcgtgagagtcgtcagtgccctattccttcacatgtaattcagaaattagggacaggaaattatgatgtgatgaccccaatggttgatatacttatgaaactttttcgaaatatggtgaatgtgaagatgccatttcaccttacccttctaagtgtgtgcttctgcaaccttaaagcactaaatactgctaagaaagggcttattgattattatttaatgccatcattatcaactacttcacgctctggcaagcacagttttaaaatgaaagacactcatatggaagattttcccaaagacaaagaaacaaaccgggatttcctaccaagtggaagaattgaaagtacaagaactagggagtctccactagataccacaaatttttctaaagaaaaagacattaatgaattcccactctgttcacttcctgaaggtgttgaccaagaagtcttcaagcagcttccagtagatattcaagaagaaatcctttctggaaaatctagggaaaaatttcaagggaaaggaagtgtgagttgtccattacatgcctctagaggagtattatctttcttttctaaaaaacaaatgcaagatattcccataaatcctagagatcatttatccagtagcaaacaggtatcctctgtatctccttgtgaaccgggaacatcaggctttaatagcagtagttcttcttacatgtctagccaaaaggattattcatattatttagataatagattaaaagatgaacgaataagtcaaggacctaaagaacctcaaggattccactttacaaattcaaaccctgctgtgtctgcttttcattcatttccaaacttgcagagtgagcaacttttctccagaaaccacactacagatagccataagcaaacagtagcaacagactctcatgaaggacttacagaaaatagagagccagattctgttgatgagaaaattactttcccttctgacattgatcctcaagttttctatgaactaccagaagcagtacaaaaggaactgctggcagagtggaagagagcaggatcagatttccacattggacataaataagcatattcagcaaaaaggtctgaaaagcaagggaataccattattttcggattagcggtttattaagctcttctatattaaacactaatagatattcaataacggagtaaactgttccagataaagcaagaatagttgcaagaagtaaattctggcacaaagcgtaaaaatataacagaagaaataatgtaaaatactatcttttatgtctaaagccattttatattacttttcaataaaaagaatatcatggtcaacatagaa

SEQ ID NO: 170934 - DNA, 2025 bp, Artificial Sequence
  derived and/or modified sequence
aagtagcgctgcggttggcagcggcgggatggagaagctgggggtggagccggaggaggaaggcggcggcgacgacgacgaggaagacgccgaggcctgggccatggaactggcggacgtgggggcggcagccagctcgcagggagttcatgatcaagtgttgcccacaccaaatgcttcatccagagtcatagtacatgtggatctggattgcttttatgcacaagtagaaatgatctcaaatccagagctaaaagacaaacctttaggggttcaacagaaatatttggtggttacctgcaactatgaagctaggaaacttggagttaagaaacttatgaatgtcagagatgcaaaagaaaagtgtccacagttggtattagttaatggagaagacctgacccgctacagagaaatgtcttataaggttacagaattactggaagaatttagtccagttgttgagagacttggatttgatgaaaattttgtggatctaacagaaatggttgagaagagactacagcagctgcaaagtgatgaactttctgcggtgactgtgtcgggtcatgtatacaataatcagtgtattggctataaaactgccaaatgtcttgaagcactgggtatcaatagtgtgcgtgatctccaaaccttttcacccaaaattttagaaaaagaattaggaatttcagttgctcagcgtatccaaaagctcagttttggagaggataactcccctgtgatactctcaggaccacctcagtcctttagtgaagaagattcatttaaaaaatgttcatctgaagttgaagctaaaaataagattgaagaactacttgctagtcttttaaacagagtatgccaagatggaaggaagcctcatacagtgagattaataatccgtcggtattcctctgagaagcactatggtcgtgagagtcgtcagtgccctattccttcacatgtaattcagaaattagggacaggaaattatgatgtgatgaccccaatggttgatatacttatgaaactttttcgaaatatggtgaatgtgaagatgccatttcaccttacccttctaagtgtgtgcttctgcaaccttaaagcactaaatactgctaagaaagggcttattgattattatttaatgccatcattatcaactacttcacgctctggcaagcacagttttaaaatgaaagacactcatatggaagattttcccaaagacaaagaaacaaaccgggatttcctaccaagtggaagaattgaaagtacaagaactagggagtctccactagataccacaaatttttctaaagaaaaagacattaatgaattcccactctgttcacttcctgaaggtgttgaccaagaagtcttcaagcagcttccagtagatattcaagaagaaatcctttctggaaaatctagggaaaaatttcaagggaaaggaagtgtgagttgtccattacatgcctctagaggagtattatctttcttttctaaaaaacaaatgcaagatattcccataaatcctagagatcatttatccagtagcaaacaggtatcctctgtatctccttgtgaaccgggaacatcaggctttaatagcagtagttcttcttacatgtctagccaaaaggattattcatattatttagataatagattaaaagatgaacgaataagtcaaggacctaaagaacctcaaggattccactttacaaattcaaaccctgctgtgtctgcttttcattcatttccaaacttgcagagtgagcaacttttctccagaaaccacactacagatagccataagcaaacagtagcaacagactctcatgaaggacttacagaaaatagagagccagattctgttgatgagaaaattactttcccttctgacattgatcctcaagttttctatgaactaccagaagcagtacaaaaggaactgctggcagagtggaagagagcaggatcagatttccacattggacataaataagcatattcagc

SEQ ID NO: 170935 - DNA, 6131 bp, Artificial Sequence
  derived and/or modified sequence
atgcgtgtcactctgggcaacaggctggtcggccacgactgcgcaggcgagaggcacagagcgactggagactgtagtcccccggtttccctggagaccaggcggaagcggccggaagtagcgctgcggttggcagcggcgggatggagaagctgggggtggagccggaggaggaaggcggcggcgacgacgacgaggaagacgccgaggcctgggccatggaactggcggacgtgggggcggcagccagctcgcagggagttcatgatcaagtgttgcccacaccaaatgcttcatccagagtcatagtacatgtggatctggattgcttttatgcacaagtagaaatgatctcaaatccagagctaaaagacaaacctttaggggttcaacagaaatatttggtggttacctgcaactatgaagctaggaaacttggagttaagaaacttatgaatgtcagagatgcaaaagaaaagtgtccacagttggtattagttaatggagaagacctgacccgctacagagaaatgtcttataaggttacagaattactggaagaatttagtccagttgttgagagacttggatttgatgaaaattttgtggatctaacagaaatggttgagaagagactacagcagctgcaaagtgatgaactttctgcggtgactgtgtcgggtcatgtatacaataatcagtctataaacctgcttgacgtcttgcacatcagactacttgttggatctcagattgcagcagagatgcgggaagccatgtataatcagttggggctcactggctgtgctggagtggcttctaataaactgttggcaaaattagtttctggtgtctttaaaccaaatcaacaaacagtcttattacctgaaagttgtcaacatcttattcatagtttgaatcacataaaggaaatacctggtattggctataaaactgccaaatgtcttgaagcactgggtatcaatagtgtgcgtgatctccaaaccttttcacccaaaattttagaaaaagaattaggaatttcagttgctcagcgtatccaaaagctcagttttggagaggataactcccctgtgatactctcaggaccacctcagtcctttagtgaagaagattcatttaaaaaatgttcatctgaagttgaagctaaaaataagattgaagaactacttgctagtcttttaaacagagtatgccaagatggaaggaagcctcatacagtgagattaataatccgtcggtattcctctgagaagcactatggtcgtgagagtcgtcagtgccctattccttcacatgtaattcagaaattagggacaggaaattatgatgtgatgaccccaatggttgatatacttatgaaactttttcgaaatatggtgaatgtgaagatgccatttcaccttacccttctaagtgtgtgcttctgcaaccttaaagcactaaatactgctaagaaagggcttattgattattatttaatgccatcattatcaactacttcacgctctggcaagcacagttttaaaatgaaagacactcatatggaagattttcccaaagacaaagaaacaaaccgggatttcctaccaagtggaagaattgaaagtacaagaactagggagtctccactagataccacaaatttttctaaagaaaaagacattaatgaattcccactctgttcacttcctgaaggtgttgaccaagaagtcttcaagcagcttccagtagatattcaagaagaaatcctttctggaaaatctagggaaaaatttcaagggaaaggaagtgtgagttgtccattacatgcctctagaggagtattatctttcttttctaaaaaacaaatgcaagatattcccataaatcctagagatcatttatccagtagcaaacaggtatcctctgtatctccttgtgaaccgggaacatcaggctttaatagcagtagttcttcttacatgtctagccaaaaggattattcatattatttagataatagattaaaagatgaacgaataagtcaaggacctaaagaacctcaaggattccactttacaaattcaaaccctgctgtgtctgcttttcattcatttccaaacttgcagagtgagcaacttttctccagaaaccacactacagatagccataagcaaacagtagcaacagactctcatgaaggacttacagaaaatagagagccagattctgttgatgagaaaattactttcccttctgacattgatcctcaagttttctatgaactaccagaagcagtacaaaaggaactgctggcagagtggaagagagcaggatcagatttccacattggacataaataagcatattcagcaaaaaggtctgaaaagcaagggaataccattattttcggattagcggtttattaagctcttctatattaaacactaatagatattcaataacggagtaaactgttccagataaagcaagaatagttgcaagaagtaaattctggcacaaagcgtaaaaatataacagaagaaataatgtaaaatactatcttttatgtctaaagccattttatattacttttcaataaaaagaatatcatggtcaacatagaatatttttcatgaattggtggggagatgtatatgtttatatataaaaaatagccaaatcgttgcaatgatatggtaaaggacacattttttttttttttttcctgtgaaatgtggaatatctcaaattcagcctcttaggctgaatagcaaatcctactgccaactaacctattaaaaatatagatagttttgactaaagtactacattacatttagtatgttgacttttaaaataccaaagcaatttatattcaattaatgcttcttcatacaccaagaatctaccacaatacacagcacacaaaggccgttcaataaacattgaatgaatgaatggtttggctagggccagggtggggagttaaagtgagaggagggtatatgttatagagaacagtggtagaaggaactctccgtgcaagtaaattaagggaaagatggacaccagaaaggcaaggtgatgggcctataagcatactggataatggaagaagtccatttctttctagctagtttgaagggcctaaaagcactgagatgtttttgtatcttccctacatttggagatgatattaggttgtcataacaaccacaaatatagaccattactaaattggtggatgtcctctttctcccattgttattgccttcctcttttgcctgctaaactaaaaattggatataagattgagaatgtattatataatttgcaagacatagaggatgtttatagaatatactaaagtatccctcagcaccaatatgggagtatcctggtctcaagtttataatttttgcacatataatctaaagaagagactttaaaaataaagtacacaaatatgaaccaaagagtagcttaaaaatactttcttctaggtctgaaattttcttttctttctttttttgttttggagacagagtctcactctgtcgcccagggtggagtacagtggcgcaatcccagctcactacaacctccgcctcccaggttcaagcaattctcctgcctcagcctcctgagtagctgggattacacgcatgccctaccacacccagcaaatttttgtatttttagtagagatgacatttcaccatattggccaggctggtctcgaactcctggtctcaggtgatcctccaccttggcctcccaaagtgctgggattacaggtgtgagccattgctcctggccccagctctgaaattttaacttagttttggattccttggaatttgaaaatatgctaacacgaaggattgtaaataggtagtttgaggttatcaggaacagtaacttgaagcaagaacatcagaaattgttcaccatgcaaatatttagtactctgaatcaaggaacatagtattttttacatgagtattccagtaaggtaattaaacttatgaaaagggtatataactttttgtaaatcattaaaacattttatagtccttgtaatgatttcaggaccttggacagctagaaggggcttaagaaaaaatggctaagaaaacaaagtaaatggttttggccagcttaaaaagagaaagcaaaatagttaaaaatacatttcatagattgagaatgtacgggctatgtcacagttacgctacttattttgtggttttaagttagtctcaacatctttgggcctcagaatcaacttttttatgggatcttttttctctgtttttaagattatctcttttttctttggtgctttgcaggtttactgtattatttggaagtgcgaatttatttttattcttagtatatactggcttcttcctgtatcttttaattcatgttctgtaaaattctcaaccactagctcttcaaatatttcttctctattctaggactgtatacaaatgatagactttcttactgtatccttcatgtctcttaatttctcatatttttcatcctcttgtttctctttactgcattttgggtaatttcatcagctctatctttctgtttactagttcatttttcagtagcatctcacctgctatttaaaacaatgatggttttaatttcaataaatatatttttcatttgattctttttaacttcccgtttactcattacagtcccttgtaagtctgtttctaatttttaaaagtcaaatatatgatatttttgataatttcaatattttaagtctttataagtctacatttaaggttattattgcatatcattgtgacttatttccttgagtatgtgttaatctgcgagaagacagagggcctaaattgtgtatgttttccttcagtatgatttgagttcgttgcttctctgggtgaggtggtacaaactccttggcatactctattcacctttgtggatcctgattgaatgccttgtcttaagtgtaagctccctgacccttactactagccgaaggttttgtctctgcaggtcaattccaaactaacaggcagatgctgttagctatctgcctccagggataaaccccatctttcaagcttgcttcttgcttgatgctttctgctgctttcttgcttttgtttcagctcgagtttgttgttgttttttttttttcctgtttctgtcttgaatgtagagggtatttttatttttattttttctgtttctctcttgagtgtatagtgtagagggggtttctgtcttgagtgtaggcctggagatttcccttatatggtacaaaccagcaatgaattaagaggtctcttttctccaagatctagtgttttgtactaggagaactctaaaaagtatctattccactgtagtgccaaagtacaaatttatttggatttattttttgccatcttattttttaatatatttctttttctatgttgtgcttctttcccacctttatctctcctcctatcttttgggatcagttgggttttctatttaatcatatattttccctttactgatttggaatgtgaatgttacaagtccttttgattatccttaaacatctaaaaatgctaccctctttccaaacaacacaaaggtattgaaataacattaattctaattaaattccacaagttctttattaaatctccaaattggatattattagtattttatatagtcaatgtttatttttttgatgggacatggtgggggcttaccttttttcttgtgtgtcagatgttccttctaggtagaattctttataccttctgaaattatgtccttagagctgtagatttagaactgacatctcttgagctgttctaagataatatcttttactttggagatacgcagtttttattatatgtctagctatagatttatcatggatttaggttcattatgaatctgcagatttgtgtcttccatcaaatctggattgttttcaatattaaaaaaacttctattttaaaatctgtatatagaaaggtacataaacataaatgaacatgttaatgagtaattgtaacaactatgtaactgtccaagtcaagaaataaaacatatcaagt

SEQ ID NO: 170936 - DNA, 2223 bp, Artificial Sequence
  derived and/or modified sequence
atggaaaagctgggtgtcgaacccgaggaggagggaggtggtgacgatgacgaagaagacgctgaggcttgggccatggagttagccgatgtgggtgccgcagccagtagccagggagtccacgatcaggtccttcccacgccaaatgcctcaagccgagtaatcgtgcacgttgatttggattgcttctatgcacaggtggagatgatctctaaccctgagctgaaggacaagcccctaggcgtccagcagaaatacctggtggttacttgtaattatgaggccagaaaactcggtgtgaaaaagctcatgaacgtgagagatgctaaagaaaagtgcccacaactcgtgttagttaacggggaagacctcacacgctaccgtgagatgtcctacaaggtcacagagttactcgaagagtttagtcccgtcgtggagcgcttggggttcgatgaaaatttcgtcgacctgaccgagatggtggagaagcggctccagcagttgcagtctgacgagctttctgccgtcacagtgtctggacacgtctataacaaccagtccattaaccttttagatgtgctccatatccggctgctggtggggtcccagatcgctgccgagatgagagaggctatgtacaatcagctaggactgaccgggtgtgctggggttgctagtaataaactgctggcgaaactggtcagtggggttttcaaaccaaatcagcaaacagtgcttttaccagaatcgtgccagcacctgattcattcgttgaaccacataaaggagatcccaggcataggctataagaccgcaaagtgtttggaagccctgggaatcaattctgtcagggatctacagactttttctcccaaaattttagaaaaggaacttggcatctccgtggcccagaggattcagaagctatccttcggcgaagataactcccctgtcattctttccggaccgcctcagagcttttcagaggaggatagttttaaaaagtgctctagtgaagttgaggctaaaaacaaaatcgaggagctgctggcctcactgcttaaccgggtttgccaggatggcagaaagccacatactgtgcggttgatcatccgtcgatactcctccgaaaagcactatggaagagagtcacggcagtgtcccatccctagtcacgtcatccagaaactcggtacaggaaactacgacgtgatgacccctatggtcgacattctgatgaagcttttcagaaatatggtaaacgtcaagatgccatttcacttgacattgttgagcgtctgtttctgtaatctgaaggcactgaacacagcaaagaaaggtctgattgattattatctgatgccttccctgagcacaacaagtaggtcaggaaaacactctttcaagatgaaggatacacacatggaagatttcccaaaagacaaggagacaaacagggattttttgccatccggcagaatcgagtcaactagaacccgagagagcccgctggacaccacaaattttagtaaggagaaggacatcaatgaattcccgctttgttcccttccagagggagtcgaccaagaagtctttaaacagctgccagtcgatatacaggaggagatcctgagtggaaagagtcgcgagaagttccagggaaaggggagcgtgtcttgccccctgcatgcctcgagaggcgtcttatcatttttcagtaaaaaacagatgcaggacattcctattaacccgcgagaccaccttagcagcagcaagcaggtgtccagcgtgagcccctgcgagccgggtacctccggcttcaattcctcaagctcctcctatatgtccagtcagaaggattatagctactatctcgataaccgcctgaaggatgaacgcatcagccaggggccaaaggaaccccaaggcttccactttacgaatagcaatcccgctgtgagcgcctttcactcatttcctaaccttcagtccgagcaactttttagcagaaaccatactaccgattcacacaagcagacagttgccacagactcccacgagggactaacagagaaccgggaacccgactcagtcgatgaaaagataacctttccatccgatatagacccacaggtgttctacgaacttccagaagctgttcaaaaagagctactcgccgagtggaaaagagcgggatctgatttccatatcggtcacaaatag

SEQ ID NO: 170937 - DNA, 1986 bp, Artificial Sequence
  derived and/or modified sequence
atggaaaaactgggagtggaacctgaggaagaggggggaggcgatgatgacgaagaggacgcggaagcatgggctatggaactcgccgacgttggcgctgctgcttcttcccaaggggtgcacgatcaggtcttacctacgcccaatgcatcctctcgcgtaatcgttcacgtggatctggattgtttctacgcccaggtggagatgatttcgaatcccgaactcaaagacaaacccctgggagtccagcagaaatatctggtcgtaacttgtaactacgaggctagaaaactgggggtcaagaaattaatgaatgtgagagacgcaaaagagaagtgtccccagctcgtactcgtcaatggcgaggatctcaccaggtatcgggagatgtcatacaaggtgacggagctgctcgaggagtttagcccagttgtggaacgcttaggctttgacgagaactttgtggacctcaccgagatggtcgaaaagcgcctccaacagcttcaatctgatgaattgagcgcggtcactgtcagtggacacgtgtataacaaccagtgtatcggctataaaaccgccaaatgtctggaggcactggggatcaacagcgttcgcgacctgcagacgttctctccgaaaattcttgagaaggaattggggatcagcgtagcccaacgcatccagaaactctcctttggcgaggacaatagccctgtcattttaagcggtccaccccaaagttttagcgaggaggattcctttaaaaagtgctcttccgaggtagaggcaaaaaataaaattgaggagttactggcctctctgctaaaccgcgtgtgccaagatgggaggaaaccacataccgtgagactgatcatccgcaggtacagcagcgagaaacattatggcagagagtcccgacaatgcccaatccctagccacgtgatacagaaattgggcactggcaactatgatgttatgactccgatggttgacattctgatgaaactcttccggaatatggtgaacgttaagatgccatttcatctgactttgctatccgtttgcttctgcaaccttaaagccctcaatacggcaaagaaagggctgattgattattacctgatgccatccctctccaccaccagcaggtccgggaagcattcatttaagatgaaggacacacatatggaggactttccaaaggataaggagactaacagagatttcttgcccagcggccgaattgagtctacccgcactagggaatcccctctggacaccaccaatttctctaaagaaaaggatatcaatgagtttcccctgtgcagccttcctgaaggcgtagaccaggaagtcttcaagcagctgcccgtggatattcaggaagaaattctcagtggtaagagcagagagaagttccagggcaagggctctgtgtcctgcccactccacgccagccgcggagtgctcagcttcttctctaagaagcagatgcaggacattcctattaatccacgggaccacctgtcctcatccaagcaagtgtcttctgtaagcccctgtgagcctgggacttctggtttcaactcctcaagtagttcctatatgtcttcccaaaaggactattcctactaccttgacaatcggcttaaggacgagagaatatcacaggggccaaaagaaccacaaggctttcattttaccaattccaacccagcagtctccgccttccattcattccccaatttacagtctgagcagctgttttctcggaatcatacaactgactcccataagcagaccgtggcgacggattctcatgaaggtttaacggagaaccgcgagcccgatagtgtcgatgagaaaatcaccttcccatcagacattgatcctcaagttttctatgagctgcctgaagccgtgcagaaggagctcctggcagaatggaaacgggcaggttccgactttcatattgggcataagtag

SEQ ID NO: 170938 - DNA, 2223 bp, Artificial Sequence
  derived and/or modified sequence
atggaaaagctgggggtggagccagaggaggagggcggaggtgatgatgatgaggaggatgctgaggcctgggccatggaactggcagatgtaggagccgctgcttccagccagggagtccacgaccaggtcctccccacacccaatgcctcctcgcgtgtgattgtgcacgtggacctggattgtttttacgcccaagtcgagatgatcagcaaccccgaacttaaggacaagcccctgggggtgcagcaaaaatacctggtggtgacttgtaattacgaggccaggaagctaggcgtcaaaaaacttatgaacgtgagagacgccaaagagaagtgtcctcagcttgtactggttaacggcgaagacctgactaggtacagagagatgtcctataaggtgactgagctactcgaggagttttcacctgtggtcgagagattgggattcgatgaaaacttcgtggatctgaccgaaatggtggaaaaacggctccagcagctgcaatcagacgaactctctgcggtgaccgtgtccggacatgtgtataacaaccagtcaattaatctactcgacgtgctccatatccggctcttggtcggatctcagatcgccgctgaaatgagagaggcaatgtacaatcagctgggtctcaccggatgtgctggcgttgcttccaataagcttctggctaaattagtgtcaggagttttcaagcccaaccaacagactgtcctgcttccagagtcttgccagcatctgatccattctctcaaccacatcaaagaaattcctggtatcgggtacaagacggcgaaatgtctggaagccctcggaattaacagcgtgagggatctgcaaactttttcacccaaaatcttagaaaaggaactcggcatttcagtagctcaacggatccaaaagctctctttcggagaagacaactcccccgttattctgtcagggccaccacagtccttttcagaagaagactccttcaaaaagtgttcttctgaagtcgaggcaaagaataaaattgaagagcttctggcgtcactgttaaatcgcgtgtgccaggatgggaggaaacctcacaccgtgcggctgataatccgaagatactcatccgaaaaacactatgggagagagtctcgacaatgccctatcccttcccacgtcatacaaaagctgggaactgggaattatgacgttatgacgccaatggtggacatcctgatgaagttgtttaggaatatggttaacgtgaagatgccattccatctgactctgctcagcgtgtgcttttgcaacctcaaggctctcaacacagccaagaaggggcttatcgactactacctgatgccttccctatctactaccagccgctcaggaaagcatagtttcaagatgaaggatacacacatggaggattttccaaaagacaaggaaaccaacagagactttctcccgtcaggcaggatcgagtctactagaactcgagaatctcccctcgatacaacgaactttagcaaagaaaaagacattaatgagtttccgctgtgttccctgcctgaaggggtcgaccaggaagtcttcaagcagttaccagtggacatccaggaagaaatcctctctgggaaatctcgcgaaaaatttcaggggaagggctctgtgagctgtcctctgcatgcatcaaggggagtcttgagctttttttccaagaagcagatgcaggacatcccgataaatccacgagaccacctcagcagttctaaacaggtgtcatcagtatctccgtgcgaacctggtaccagtgggtttaacagctcctcttcaagctatatgtcctctcagaaggattacagttactatctggataaccgactcaaggacgagcgcatatctcaggggcctaaggagccacagggattccactttaccaacagcaacccggctgttagtgcgttccactccttccctaacctgcaatctgagcagctcttctctagaaatcatactaccgattcacacaaacaaaccgttgcaactgattcacatgagggtttgaccgaaaatagagaaccagactccgtggatgagaagattacattccccagcgatatcgacccacaagtgttctacgagctgccagaggccgttcagaaggagctgctcgcagaatggaagcgtgccggatcagactttcatataggccataaatag

SEQ ID NO: 170939 - DNA, 2223 bp, Artificial Sequence
  derived and/or modified sequence
atggagaagctgggcgtggagcccgaggaggagggcggcggcgacgacgacgaggaggacgccgaggcctgggccatggagctggccgacgtgggcgccgccgccagcagccagggcgtgcacgaccaggtgctgcccacccccaacgccagcagcagagtgatcgtgcacgtggacctggactgcttctacgcccaggtggagatgatcagcaaccccgagctgaaggacaagcccctgggcgtgcagcagaagtacctggtggtgacctgcaactacgaggccagaaagctgggcgtgaagaagctgatgaacgtgagagacgccaaggagaagtgcccccagctggtgctggtgaacggcgaggacctgaccagatacagagagatgagctacaaggtgaccgagctgctggaggagttcagccccgtggtggagagactgggcttcgacgagaacttcgtggacctgaccgagatggtggagaagagactgcagcagctgcagagcgacgagctgagcgccgtgaccgtgagcggccacgtgtacaacaaccagagcatcaacctgctggacgtgctgcacatcagactgctggtgggcagccagatcgccgccgagatgagagaggccatgtacaaccagctgggcctgaccggctgcgccggcgtggccagcaacaagctgctggccaagctggtgagcggcgtgttcaagcccaaccagcagaccgtgctgctgcccgagagctgccagcacctgatccacagcctgaaccacatcaaggagatccccggcatcggctacaagaccgccaagtgcctggaggccctgggcatcaacagcgtgagagacctgcagaccttcagccccaagatcctggagaaggagctgggcatcagcgtggcccagagaatccagaagctgagcttcggcgaggacaacagccccgtgatcctgagcggccccccccagagcttcagcgaggaggacagcttcaagaagtgcagcagcgaggtggaggccaagaacaagatcgaggagctgctggccagcctgctgaacagagtgtgccaggacggcagaaagccccacaccgtgagactgatcatcagaagatacagcagcgagaagcactacggcagagagagcagacagtgccccatccccagccacgtgatccagaagctgggcaccggcaactacgacgtgatgacccccatggtggacatcctgatgaagctgttcagaaacatggtgaacgtgaagatgcccttccacctgaccctgctgagcgtgtgcttctgcaacctgaaggccctgaacaccgccaagaagggcctgatcgactactacctgatgcccagcctgagcaccaccagcagaagcggcaagcacagcttcaagatgaaggacacccacatggaggacttccccaaggacaaggagaccaacagagacttcctgcccagcggcagaatcgagagcaccagaaccagagagagccccctggacaccaccaacttcagcaaggagaaggacatcaacgagttccccctgtgcagcctgcccgagggcgtggaccaggaggtgttcaagcagctgcccgtggacatccaggaggagatcctgagcggcaagagcagagagaagttccagggcaagggcagcgtgagctgccccctgcacgccagcagaggcgtgctgagcttcttcagcaagaagcagatgcaggacatccccatcaaccccagagaccacctgagcagcagcaagcaggtgagcagcgtgagcccctgcgagcccggcaccagcggcttcaacagcagcagcagcagctacatgagcagccagaaggactacagctactacctggacaacagactgaaggacgagagaatcagccagggccccaaggagccccagggcttccacttcaccaacagcaaccccgccgtgagcgccttccacagcttccccaacctgcagagcgagcagctgttcagcagaaaccacaccaccgacagccacaagcagaccgtggccaccgacagccacgagggcctgaccgagaacagagagcccgacagcgtggacgagaagatcaccttccccagcgacatcgacccccaggtgttctacgagctgcccgaggccgtgcagaaggagctgctggccgagtggaagagagccggcagcgacttccacatcggccacaagtag

SEQ ID NO: 170940 - DNA, 1986 bp, Artificial Sequence
  derived and/or modified sequence
atggagaagctgggcgtggagcccgaggaggagggcggcggcgacgacgacgaggaggacgccgaggcctgggccatggagctggccgacgtgggcgccgccgccagcagccagggcgtgcacgaccaggtgctgcccacccccaacgccagcagcagagtgatcgtgcacgtggacctggactgcttctacgcccaggtggagatgatcagcaaccccgagctgaaggacaagcccctgggcgtgcagcagaagtacctggtggtgacctgcaactacgaggccagaaagctgggcgtgaagaagctgatgaacgtgagagacgccaaggagaagtgcccccagctggtgctggtgaacggcgaggacctgaccagatacagagagatgagctacaaggtgaccgagctgctggaggagttcagccccgtggtggagagactgggcttcgacgagaacttcgtggacctgaccgagatggtggagaagagactgcagcagctgcagagcgacgagctgagcgccgtgaccgtgagcggccacgtgtacaacaaccagtgcatcggctacaagaccgccaagtgcctggaggccctgggcatcaacagcgtgagagacctgcagaccttcagccccaagatcctggagaaggagctgggcatcagcgtggcccagagaatccagaagctgagcttcggcgaggacaacagccccgtgatcctgagcggccccccccagagcttcagcgaggaggacagcttcaagaagtgcagcagcgaggtggaggccaagaacaagatcgaggagctgctggccagcctgctgaacagagtgtgccaggacggcagaaagccccacaccgtgagactgatcatcagaagatacagcagcgagaagcactacggcagagagagcagacagtgccccatccccagccacgtgatccagaagctgggcaccggcaactacgacgtgatgacccccatggtggacatcctgatgaagctgttcagaaacatggtgaacgtgaagatgcccttccacctgaccctgctgagcgtgtgcttctgcaacctgaaggccctgaacaccgccaagaagggcctgatcgactactacctgatgcccagcctgagcaccaccagcagaagcggcaagcacagcttcaagatgaaggacacccacatggaggacttccccaaggacaaggagaccaacagagacttcctgcccagcggcagaatcgagagcaccagaaccagagagagccccctggacaccaccaacttcagcaaggagaaggacatcaacgagttccccctgtgcagcctgcccgagggcgtggaccaggaggtgttcaagcagctgcccgtggacatccaggaggagatcctgagcggcaagagcagagagaagttccagggcaagggcagcgtgagctgccccctgcacgccagcagaggcgtgctgagcttcttcagcaagaagcagatgcaggacatccccatcaaccccagagaccacctgagcagcagcaagcaggtgagcagcgtgagcccctgcgagcccggcaccagcggcttcaacagcagcagcagcagctacatgagcagccagaaggactacagctactacctggacaacagactgaaggacgagagaatcagccagggccccaaggagccccagggcttccacttcaccaacagcaaccccgccgtgagcgccttccacagcttccccaacctgcagagcgagcagctgttcagcagaaaccacaccaccgacagccacaagcagaccgtggccaccgacagccacgagggcctgaccgagaacagagagcccgacagcgtggacgagaagatcaccttccccagcgacatcgacccccaggtgttctacgagctgcccgaggccgtgcagaaggagctgctggccgagtggaagagagccggcagcgacttccacatcggccacaagtag

SEQ ID NO: 170941 - protein, 260 aa, Artificial Sequence
  derived and/or modified sequence
MGRPRPRAAKTWMFLLLLGGAWAGHSRAQEDKVLGGHECQPHSQPWQAALFQGQQLLCGGVLVGGNWVLTAAHCKKPKYTVRLGDHSLQNKDGPEQEIPVVQSIPHPCYNSSDVEDHNHDLMLLQLRDQASLGSKVKPISLADHCTQPGQKCTVSGWGTVTSPRENFPDTLNCAEVKIFPQKKCEDAYPGQITDGMVCAGSSKGADTCQGDSGGPLVCDGALQGITSWGSDPCGRSDKPGVYTNICRYLDWIKKIIGSKG

SEQ ID NO: 170942 - DNA, 783 bp, Artificial Sequence
  derived and/or modified sequence
atgggccgacccaggcctcgcgccgcaaaaacctggatgttcctgctcctgctgggcggcgcctgggctgggcactcccgcgcgcaagaggacaaagtcttgggaggtcacgagtgccagccgcactcacagccatggcaggccgctctgtttcagggccagcagctgttatgtgggggagtcttggtcggaggcaactgggtgttgaccgccgcccattgcaagaagcccaagtacacagtgaggctaggagaccacagcctccagaacaaggacggtccggagcaggagattcctgtcgttcagagcataccccatccctgctacaactccagtgatgttgaggaccacaaccacgatttgatgctgttacagttacgggatcaagcctccctgggctctaaggtgaagccgatctccctggccgaccactgcactcagcctggacaaaaatgcacagtcagtgggtgggggactgtgacctctcctcgggagaattttcccgatacactgaactgtgccgaggtcaagatttttccgcagaaaaagtgtgaagacgcctatcccgggcaaataaccgatgggatggtgtgcgctggcagttctaagggcgctgacacatgtcagggcgacagtggcggtccccttgtttgcgacggtgccctccaagggatcacgagctggggatccgatccctgtggacgatccgacaaacctggggtctataccaacatctgcagataccttgattggatcaagaagatcatcggttcaaagggctag

SEQ ID NO: 170943 - DNA, 783 bp, Artificial Sequence
  derived and/or modified sequence
atgggtagaccaaggccccgagcggccaaaacatggatgttccttctgttgctcggcggcgcttgggctggtcactctcgggcacaggaggacaaggttctgggcggccacgagtgtcagccccactcccagccttggcaggctgcactctttcagggacagcaactgctgtgtggcggggttctggtcggaggcaattgggtcttaacagctgcccattgtaaaaagcctaaatatacagtgagactcggagaccattcccttcaaaataaggacggaccagagcaggaaattcccgttgttcagtctataccccacccatgttacaacagtagtgacgtggaggatcacaatcatgacttgatgcttctgcagctgcgggaccaagctagcctaggctctaaggtcaagcctatcagcttggctgatcactgtacacagcccggacagaagtgtactgtgtccggctggggaaccgtcacctcccctcgcgagaatttcccagacactctcaactgtgctgaagttaaaatcttcccccagaagaagtgcgaggacgcctaccccggtcagatcactgatggaatggtgtgcgccgggagctccaaaggcgctgatacctgtcagggcgactcgggtgggccactggtgtgtgatggcgctctacagggcatcacttcttggggaagcgatccttgcgggagatctgataagcctggagtgtacacgaatatatgcaggtacttggactggattaagaaaatcataggatctaaagggtag

SEQ ID NO: 170944 - DNA, 1013 bp, Artificial Sequence
  derived and/or modified sequence
gttcccagaagctccccaggctctagtgcaggaggagaaggaggaggagcaggaggtggagattcccagttaaaaggctccagaatcgtgtaccaggcagagaactgaagtactggggcctcctccactgggtccgaatcagtaggtgaccccgcccctggattctggaagacctcaccatgggacgcccccgacctcgtgcggccaagacgtggatgttcctgctcttgctggggggagcctgggcaggacactccagggcacaggaggacaaggtgctggggggtcatgagtgccaaccccattcgcagccttggcaggcggccttgttccagggccagcaactactctgtggcggtgtccttgtaggtggcaactgggtccttacagctgcccactgtaaaaaaccgaaatacacagtacgcctgggagaccacagcctacagaataaagatggcccagagcaagaaatacctgtggttcagtccatcccacacccctgctacaacagcagcgatgtggaggaccacaaccatgatctgatgcttcttcaactgcgtgaccaggcatccctggggtccaaagtgaagcccatcagcctggcagatcattgcacccagcctggccagaagtgcaccgtctcaggctggggcactgtcaccagtccccgagagaattttcctgacactctcaactgtgcagaagtaaaaatctttccccagaagaagtgtgaggatgcttacccggggcagatcacagatggcatggtctgtgcaggcagcagcaaaggggctgacacgtgccagggcgattctggaggccccctggtgtgtgatggtgcactccagggcatcacatcctggggctcagacccctgtgggaggtccgacaaacctggcgtctataccaacatctgccgctacctggactggatcaagaagatcataggcagcaagggctgattctaggataagcactagatctcccttaataaactcacaactctctggttc

SEQ ID NO: 170945 - DNA, 1324 bp, Artificial Sequence
  derived and/or modified sequence
cgcccctcgtgatgtcaggggcgcagtagctccgcccacgtggagctcgggcggtgtagagctcagccccttgtggccccgtcctgggcgtgtgctgggtttgaatcctggcggagacctggggggaaattgagggagggtctggatacctttagagccaatgcaacggatgatttttcagtaaacgcgggaaacctcaccttctttctgcctgagctgtgagatgagtggagagcaaacgggtgggcggtgaagggcagatgagggaaccggtaccgccttgcaactcccccttaaacccctatgttccagttcccagaagctccccaggctctagtgcaggaggagaaggaggaggagcaggaggtggagattcccagttaaaaggctccagaatcgtgtaccaggcagagaactgaagtactggggcctcctccactgggtccgaatcagtaggtgaccccgcccctggattctggaagacctcaccatgggacgcccccgacctcgtgcggccaagacgtggatgttcctgctcttgctggggggagcctgggcaggacactccagggcacaggaggacaaggtgctggggggtcatgagtgccaaccccattcgcagccttggcaggcggccttgttccagggccagcaactactctgtggcggtgtccttgtaggtggcaactgggtccttacagctgcccactgtaaaaaaccgaaatacacagtacgcctgggagaccacagcctacagaataaagatggcccagagcaagaaatacctgtggttcagtccatcccacacccctgctacaacagcagcgatgtggaggaccacaaccatgatctgatgcttcttcaactgcgtgaccaggcatccctggggtccaaagtgaagcccatcagcctggcagatcattgcacccagcctggccagaagtgcaccgtctcaggctggggcactgtcaccagtccccgagagaattttcctgacactctcaactgtgcagaagtaaaaatctttccccagaagaagtgtgaggatgcttacccggggcagatcacagatggcatggtctgtgcaggcagcagcaaaggggctgacacgtgccagggcgattctggaggccccctggtgtgtgatggtgcactccagggcatcacatcctggggctcagacccctgtgggaggtccgacaaacctggcgtctataccaacatctgccgctacctggactggatcaagaagatcataggcagcaagggctgattctaggataagcactagatctcccttaataaactcacaactctctggttc

SEQ ID NO: 170946 - DNA, 783 bp, Artificial Sequence
  derived and/or modified sequence
atgggccggccccggccccgggccgccaagacctggatgttcctgctgctgctgggcggggcctgggccggccacagccgggcccaggaggacaaggtgctgggcggccacgagtgccagccccacagccagccctggcaggccgccctcttccagggccagcagctgctgtgtggcggcgtgctggtgggcggcaactgggtgctgacagctgcccactgcaagaagcccaagtacacagtgcggctgggggaccacagcctgcagaacaaggatggccctgagcaggagatccctgtggtgcagagcatcccccacccctgctacaacagcagtgatgtggaggaccacaaccacgacctgatgctgctgcagctgcgggaccaggccagcctgggcagcaaggtgaagcccatcagcctggccgaccactgcacccagcccggccagaagtgcaccgtgtctggctggggcaccgtgaccagcccccgggagaacttcccagacaccctgaactgtgccgaggtgaagatcttcccccagaagaagtgtgaagatgcctacccaggccagatcacagatggcatggtgtgtgccggcagcagcaaaggagctgacacctgccagggcgacagcggcggccccctggtgtgtgatggagccctgcagggcatcacctcctggggcagtgacccctgtggccgcagtgacaagccaggagtgtacaccaacatctgccgctacctggactggatcaagaagatcatcggcagcaaaggatag

SEQ ID NO: 170947 - DNA, 783 bp, Artificial Sequence
  derived and/or modified sequence
atgggccggccccggccccgggccgccaagacctggatgttcctgttgttgttggggggcgcatgggctggacactctcgagcccaggaggacaaggtgctggggggacacgaatgccaaccccactcccagccttggcaggcagctctgttccaggggcagcaactcctctgtgggggtgtgttggtcggcggcaactgggtgctgaccgctgcccattgcaagaagcccaagtatacagttcgtctcggtgatcacagcctgcagaacaaagatggacctgaacaggagattccggtcgtccagtcaattccgcatccttgttacaatagttctgatgtcgaggaccacaaccatgatttgatgttgcttcagctgagggatcaggcatccctgggatctaaggtcaaaccgatttctctggcagaccactgtacccagcctggccagaagtgcacggtgtccggttggggcaccgtgaccagcccacgcgagaacttcccagacaccctgaattgcgctgaagtgaagatctttccgcagaagaaatgtgaagacgcgtaccccggccaaatcaccgacggaatggtttgcgccggaagtagtaagggcgctgacacgtgccagggagacagcggtggccccttagtgtgcgatggcgccttgcagggaatcacttcgtggggctccgacccctgcggtcgaagtgacaaaccgggtgtgtatacaaatatatgtaggtatctggattggattaaaaaaataattggaagtaaggggtag

SEQ ID NO: 170948 - DNA, 783 bp, Artificial Sequence
  derived and/or modified sequence
atgggccggccccggccccgggccgccaagacctggatgttcctgttattgcttggcggggcgtgggccggccatagtagagcacaagaagacaaggttttgggcgggcacgaatgtcaaccacatagccagccctggcaagcggccctcttccagggccagcagttattatgtggcggcgtgctagttggaggcaattgggttctcactgccgcccattgtaagaagccgaagtacactgttaggctgggggaccatagcttgcagaacaaagacggccccgagcaggagattcctgtcgtgcagtctatccctcacccttgctataactcctctgacgtagaggaccataaccatgatctcatgctgttacagctgagggatcaggcaagtttgggttccaaggtgaagccaattagcctcgccgaccactgcacccagcctggacagaaatgcaccgtgtctggatggggcacagtgactagtcctagagaaaatttccccgacacgctgaactgcgcagaggtgaagatttttccacagaaaaagtgtgaagatgcataccccggtcagattaccgacggcatggtgtgcgctggcagttctaaaggtgccgacacctgtcaaggagacagtggggggccattagtttgcgatggagcactgcaggggattactagttggggaagcgacccctgcggtcgatctgataaacccggggtgtataccaatatatgccgatacttggactggatcaagaagattatcggatctaagggctag

SEQ ID NO: 170949 - DNA, 783 bp, Artificial Sequence
  derived and/or modified sequence
atggggcgtcctaggcccagggccgcaaaaacctggatgtttctcttgctacttggaggcgcttgggccggtcactctcgcgctcaagaagacaaggttctcgggggacacgagtgtcagccccattcacaaccatggcaagccgctctctttcagggccagcagttactttgtggaggggtgctcgtgggcggaaactgggtgctcactgctgcacattgcaaaaagcccaagtatacggtacgactcggcgaccactcattgcagaacaaggacggacccgagcaggagatcccagttgtgcagagcattccccacccctgctataattcttccgatgtagaagaccataaccacgacctgatgcttttgcagctgcgcgatcaggccagtctaggcagtaaagtaaaacccatctctctggccgatcactgcacccagccaggtcagaagtgtaccgtgtccggctgggggactgtcacgtccccgagagagaattttccagatactctcaattgcgcagaggtcaaaatcttcccacaaaaaaaatgcgaggacgcgtaccccggacagataacagacgggatggtgtgcgccggaagctctaagggcgctgacacatgccagggcgatagcggcggacctctcgtttgtgatggcgcactgcaaggcattacatcatggggctcggacccatgcgggagaagcgacaagcccggagtgtacactaatatctgccgatacctggactggatcaaaaaaattattggctccaagggctag

SEQ ID NO: 170950 - DNA, 783 bp, Artificial Sequence
  derived and/or modified sequence
atgggtagacccagaccacgtgccgcaaagacatggatgttcttgctactattggggggagcctgggccggacattcgcgggctcaagaggacaaggtcctcggagggcacgaatgccagccccacagtcagccctggcaggcggctcttttccagggccaacaactgctctgcggcggtgttctcgtcggaggcaattgggtgctcaccgccgcacattgtaagaagccaaagtacacagtaaggctgggggatcacagtctccaaaataaagacgggcctgagcaggagattcctgtggtccagtccatcccccacccctgctataatagtagcgacgtggaagatcataaccatgacctgatgctgctacaactccgggatcaggctagcctcggaagcaaggtaaagcccattagtttagccgatcactgcactcagcctggtcagaagtgcaccgtctctggttggggcaccgtcacatctcctcgtgagaacttccccgacaccctgaattgcgcggaagttaagatcttccctcaaaaaaagtgcgaagatgcctatccgggtcagatcacagacggtatggtgtgcgccggttcatctaagggggcagatacctgtcaaggcgactccgggggacccttggtctgcgatggcgcattacagggtataacatcatgggggagcgacccatgtggtagatccgacaaacctggggtatatacaaacatttgccggtacctagattggataaaaaagatcatagggtctaagggctag

SEQ ID NO: 170951 - DNA, 783 bp, Artificial Sequence
  derived and/or modified sequence
atgggcagacccagacccagagccgccaagacctggatgttcctgctgctgctgggcggcgcctgggccggccacagcagagcccaggaggacaaggtgctgggcggccacgagtgccagccccacagccagccctggcaggccgccctgttccagggccagcagctgctgtgcggcggcgtgctggtgggcggcaactgggtgctgaccgccgcccactgcaagaagcccaagtacaccgtgagactgggcgaccacagcctgcagaacaaggacggccccgagcaggagatccccgtggtgcagagcatcccccacccctgctacaacagcagcgacgtggaggaccacaaccacgacctgatgctgctgcagctgagagaccaggccagcctgggcagcaaggtgaagcccatcagcctggccgaccactgcacccagcccggccagaagtgcaccgtgagcggctggggcaccgtgaccagccccagagagaacttccccgacaccctgaactgcgccgaggtgaagatcttcccccagaagaagtgcgaggacgcctaccccggccagatcaccgacggcatggtgtgcgccggcagcagcaagggcgccgacacctgccagggcgacagcggcggccccctggtgtgcgacggcgccctgcagggcatcaccagctggggcagcgacccctgcggcagaagcgacaagcccggcgtgtacaccaacatctgcagatacctggactggatcaagaagatcatcggcagcaagggctag

SEQ ID NO: 170952 - protein, 581 aa, Artificial Sequence
  derived and/or modified sequence
MQRPGPRLWLVLQVMGSCAAISSMDMERPGDGKCQPIEIPMCKDIGYNMTRMPNLMGHENQREAAIQLHEFAPLVEYGCHGHLRFFLCSLYAPMCTEQVSTPIPACRVMCEQARLKCSPIMEQFNFKWPDSLDCRKLPNKNDPNYLCMEAPNNGSDEPTRGSGLFPPLFRPQRPHSAQEHPLKDGGPGRGGCDNPGKFHHVEKSASCAPLCTPGVDVYWSREDKRFAVVWLAIWAVLCFFSSAFTVLTFLIDPARFRYPERPIIFLSMCYCVYSVGYLIRLFAGAESIACDRDSGQLYVIQEGLESTGCTLVFLVLYYFGMASSLWWVVLTLTWFLAAGKKWGHEAIEANSSYFHLAAWAIPAVKTILILVMRRVAGDELTGVCYVGSMDVNALTGFVLIPLACYLVIGTSFILSGFVALFHIRRVMKTGGENTDKLEKLMVRIGLFSVLYTVPATCVIACYFYERLNMDYWKILAAQHKCKMNNQTKTLDCLMAASIPAVEIFMVKIFMLLVVGITSGMWIWTSKTLQSWQQVCSRRLKKKSRRKPASVITSGGIYKKAQHPQKTHHGKYEIPAQSPTCV

SEQ ID NO: 170953 - DNA, 3281 bp, Artificial Sequence
  derived and/or modified sequence
cgagtcttctcatcccgggacgcaaacctcgaaacagctgccggctggtcccggccgaggccggcgcagggagggaggagccgcccgggctgtgggggcgccgcgagctgggccggcctcggtgtgcccgcgccgccagcccgctccagacgcgccacctgggcgctccaagaagaggccgaagtttgccgcggccgtgagttggagctcgcgccgggccgctgcgccgggagctccgggggcttccctcgcttcccggtattgtttgcaaactttgctgctctccgccgcggcccccaactcggcggacgccgggcgcggagagccgagccgggggcgctgtgcgcagcgctcgggccaggccgggcgggcatgggcgggggcccgagcaggggtggagagccggggccagcagcagcccgtgcccgggagcggcggcgctgaggggcgcggagctccccgcgaggacacgtccaacgccagcatgcagcgcccgggcccccgcctgtggctggtcctgcaggtgatgggctcgtgcgccgccatcagctccatggacatggagcgcccgggcgacggcaaatgccagcccatcgagatcccgatgtgcaaggacatcggctacaacatgactcgtatgcccaacctgatgggccacgagaaccagcgcgaggcagccatccagttgcacgagttcgcgccgctggtggagtacggctgccacggccacctccgcttcttcctgtgctcgctgtacgcgccgatgtgcaccgagcaggtctctacccccatccccgcctgccgggtcatgtgcgagcaggcccggctcaagtgctccccgattatggagcagttcaacttcaagtggcccgactccctggactgccggaaactccccaacaagaacgaccccaactacctgtgcatggaggcgcccaacaacggctcggacgagcccacccggggctcgggcctgttcccgccgctgttccggccgcagcggccccacagcgcgcaggagcacccgctgaaggacgggggccccgggcgcggcggctgcgacaacccgggcaagttccaccacgtggagaagagcgcgtcgtgcgcgccgctctgcacgcccggcgtggacgtgtactggagccgcgaggacaagcgcttcgcagtggtctggctggccatctgggcggtgctgtgcttcttctccagcgccttcaccgtgctcaccttcctcatcgacccggcccgcttccgctaccccgagcgccccatcatcttcctctccatgtgctactgcgtctactccgtgggctacctcatccgcctcttcgccggcgccgagagcatcgcctgcgaccgggacagcggccagctctatgtcatccaggagggactggagagcaccggctgcacgctggtcttcctggtcctctactacttcggcatggccagctcgctgtggtgggtggtcctcacgctcacctggttcctggccgccggcaagaagtggggccacgaggccatcgaagccaacagcagctacttccacctggcagcctgggccatcccggcggtgaagaccatcctgatcctggtcatgcgcagggtggcgggggacgagctcaccggggtctgctacgtgggcagcatggacgtcaacgcgctcaccggcttcgtgctcattcccctggcctgctacctggtcatcggcacgtccttcatcctctcgggcttcgtggccctgttccacatccggagggtgatgaagacgggcggcgagaacacggacaagctggagaagctcatggtgcgtatcgggctcttctctgtgctgtacaccgtgccggccacctgtgtgatcgcctgctacttttacgaacgcctcaacatggattactggaagatcctggcggcgcagcacaagtgcaaaatgaacaaccagactaaaacgctggactgcctgatggccgcctccatccccgccgtggagatcttcatggtgaagatctttatgctgctggtggtggggatcaccagcgggatgtggatttggacctccaagactctgcagtcctggcagcaggtgtgcagccgtaggttaaagaagaagagccggagaaaaccggccagcgtgatcaccagcggtgggatttacaaaaaagcccagcatccccagaaaactcaccacgggaaatatgagatccctgcccagtcgcccacctgcgtgtgaacagggctggagggaagggcacaggggcgcccggagctaagatgtggtgcttttcttggttgtgtttttctttcttcttcttctttttttttttttataaaagcaaaagagaaatacataaaaaagtgtttaccctgaaattcaggatgctgtgatacactgaaaggaaaaatgtacttaaagggttttgttttgttttggttttccagcgaagggaagctcctccagtgaagtagcctcttgtgtaactaatttgtggtaaagtagttgattcagccctcagaagaaaacttttgtttagagccctccctaaatatacatctgtgtatttgagttggctttgctacccatttacaaataagaggacagataactgctttgcaaattcaagagcctcccctgggttaacaaatgagccatccccagggcccacccccaggaaggccacagtgctgggcggcatccctgcagaggaaagacaggacccggggcccgcctcacaccccagtggatttggagttgcttaaaatagactccggccttcaccaatagtctctctgcaagacagaaacctccatcaaacctcacatttgtgaactcaaacgatgtgcaatacatttttttctctttccttgaaaataaaaagagaaacaagtattttgctatatataaagacaacaaaagaaatctcctaacaaaagaactaagaggcccagccctcagaaacccttcagtgctacattttgtggctttttaatggaaaccaagccaatgttatagacgtttggactgatttgtggaaaggaggggggaagagggagaaggatcattcaaaagttacccaaagggcttattgactctttctattgttaaacaaatgatttccacaaacagatcaggaagcactaggttggcagagacactttgtctagtgtattctcttcacagtgccaggaaagagtggtttctgcgtgtgtatatttgtaatatatgatatttttcatgctccactattttattaaaaataaaatatgttctttagtttgctgct

SEQ ID NO: 170954 - DNA, 3282 bp, Artificial Sequence
  derived and/or modified sequence
cgagtcttctcatcccgggacgcaaacctcgaaacagctgccggctggtcccggccgaggccggcgcagggagggaggagccgcccgggctgtgggggcgccgcgagctgggccggcctcggtgtgcccgcgccgccagcccgctccagacgcgccacctgggcgctccaagaagaggccgaagtttgccgcggccgtgagttggagctcgcgccgggccgctgcgccgggagctccgggggcttccctcgcttcccggtattgtttgcaaactttgctgctctccgccgcggcccccaactcggcggacgccgggcgcggagagccgagccgggggcgctgtgcgcagcgctcgggccaggccgggcgggcatgggcgggggcccgagcaggggtggagagccggggccagcagcagcccgtgcccgggagcggcggcgctgaggggcgcggagctccccgcgaggacacgtccaacgccagcatgcagcgcccgggcccccgcctgtggctggtcctgcaggtgatgggctcgtgcgccgccatcagctccatggacatggagcgcccgggcgacggcaaatgccagcccatcgagatcccgatgtgcaaggacatcggctacaacatgactcgtatgcccaacctgatgggccacgagaaccagcgcgaggcagccatccagttgcacgagttcgcgccgctggtggagtacggctgccacggccacctccgcttcttcctgtgctcgctgtacgcgccgatgtgcaccgagcaggtctctacccccatccccgcctgccgggtcatgtgcgagcaggcccggctcaagtgctccccgattatggagcagttcaacttcaagtggcccgactccctggactgccggaaactccccaacaagaacgaccccaactacctgtgcatggaggcgcccaacaacggctcggacgagcccacccggggctcgggcctgttcccgccgctgttccggccgcagcggccccacagcgcgcaggagcacccgctgaaggacgggggccccgggcgcggcggctgcgacaacccgggcaagttccaccacgtggagaagagcgcgtcgtgcgcgccgctctgcacgcccggcgtggacgtgtactggagccgcgaggacaagcgcttcgcagtggtctggctggccatctgggcggtgctgtgcttcttctccagcgccttcaccgtgctcaccttcctcatcgacccggcccgcttccgctaccccgagcgccccatcatcttcctctccatgtgctactgcgtctactccgtgggctacctcatccgcctcttcgccggcgccgagagcatcgcctgcgaccgggacagcggccagctctatgtcatccaggagggactggagagcaccggctgcacgctggtcttcctggtcctctactacttcggcatggccagctcgctgtggtgggtggtcctcacgctcacctggttcctggccgccggcaagaagtggggccacgaggccatcgaagccaacagcagctacttccacctggcagcctgggccatcccggcggtgaagaccatcctgatcctggtcatgcgcagggtggcgggggacgagctcaccggggtctgctacgtgggcagcatggacgtcaacgcgctcaccggcttcgtgctcattcccctggcctgctacctggtcatcggcacgtccttcatcctctcgggcttcgtggccctgttccacatccggagggtgatgaagacgggcggcgagaacacggacaagctggagaagctcatggtgcgtatcgggctcttctctgtgctgtacaccgtgccggccacctgtgtgatcgcctgctacttttacgaacgcctcaacatggattactggaagatcctggcggcgcagcacaagtgcaaaatgaacaaccagactaaaacgctggactgcctgatggccgcctccatccccgccgtggagatcttcatggtgaagatctttatgctgctggtggtggggatcaccagcgggatgtggatttggacctccaagactctgcagtcctggcagcaggtgtgcagccgtaggttaaagaagaagagccggagaaaaccggccagcgtgatcaccagcggtgggatttacaaaaaagcccagcatccccagaaaactcaccacgggaaatatgagatccctgcccagtcgcccacctgcgtgtgaacagggctggagggaagggcacaggggcgcccggagctaagatgtggtgcttttcttggttgtgtttttctttcttcttcttctttttttttttttataaaagcaaaagagaaatacataaaaaagtgtttaccctgaaattcaggatgctgtgatacactgaaaggaaaaatgtacttaaagggttttgttttgttttggttttccagcgaagggaagctcctccagtgaagtagcctcttgtgtaactaatttgtggtaaagtagttgattcagccctcagaagaaaacttttgtttagagccctccctaaatatacatctgtgtatttgagttggctttgctacccatttacaaataagaggacagataactgctttgcaaattcaagagcctcccctgggttaacaaatgagccatccccagggcccacccccaggaaggccacagtgctgggcggcatccctgcagaggaaagacaggacccggggcccgcctcacaccccagtggatttggagttgcttaaaatagactccggccttcaccaatagtctctctgcaagacagaaacctccatcaaacctcacatttgtgaactcaaacgatgtgcaatacatttttttctctttccttgaaaataaaaagagaaacaagtattttgctatatataaagacaacaaaagaaatctcctaacaaaagaactaagaggcccagccctcagaaacccttcagtgctacattttgtggctttttaatggaaaccaagccaatgttatagacgtttggactgatttgtggaaaggaggggggaagagggagaaggatcattcaaaagttacccaaagggcttattgactctttctattgttaaacaaatgatttccacaaacagatcaggaagcactaggttggcagagacactttgtctagtgtattctcttcacagtgccaggaaagagtggtttctgcgtgtgtatatttgtaatatatgatatttttcatgctccactattttattaaaaataaaatatgttctttagtttgctgcta

SEQ ID NO: 170955 - DNA, 1365 bp, Artificial Sequence
  derived and/or modified sequence
atgcctgctcaccgggaccccgacgtgcaggggcatagactacagcacgacagttacgcccagcccgacggaccaagggagccagctagaggcagccacccagtcgcgagggtacgtgctgccggaggagtgagactccctcgcccgccccccctgctgcccgtacttgcagttcgagcagatgtgcatagggctggcctgtaccctcatcccagattgcctggccacgttcgagccggacccgcgcaggttctgcccgactacggcgccgtgcagctgcaggtcgcccggctccctgggctgccggagaccccccaacaggaaaggcctcagttgcccgtacacggaggggcacagcagcgcctcgggcgagcacatcctggcctgggccctgtccccgccgctgtgccagcagctgctgctccccagcgagctggcgcgccagcagaggggcggggacctcgtgcgcgccgattacggcagcccggccaggtaccacccagaggggaagagagagtggtgcgcgctgccctgcacgcccgccgaggtagagttctggaaccgcgtggccaggctctgcgatcaggactcgctggccacttaggcggcgcagtgcttctgctgcagcggcttcacagggcccacctcccacacagacccgggcctcttcctctgccgcgcgccccccaccatctgcccctgcacgtgcttctccgactccttagaggcctcccgcatcctccactccggagaaggcgcgaacacagactccgcccaggtcaaaggcccgccctctgccaccccggaggaacaggcgaacatagactgcacgcaggtctgcccgggccactgcttctgaggcatggacaactagcagtggtgggtgggccacacgcccatttagtccctgggaggcgccaggaggtcggtcccagaggccacaggagccagcagcagctgctccctcccggctccctgggtcaccccgggggagaagaccaccccgaccccggacacgcccagggtggcggcggcagggctcaccgcgggttactccgcggacagcacggtcgtcagagagctcatcgcttgcgagcccacagtcccgggttactgcccggtcaccggcatgtgctccatccactgggtttgcgaggccctgttcctcacccggagggcgacgaggatggaaggcgggagcacggacaggccggggaagcgcacggggcatacagggcacttctgtgcgccgtgcacagggccgggcatctttgcgacaggctactcctccttcggaccccccaacatggacttctcgaggatcccggaggagcggcacaggtccaaaacgagcagccagattag

SEQ ID NO: 170956 - DNA, 1746 bp, Artificial Sequence
  derived and/or modified sequence
atgcaaaggcctggtcctaggctgtggctcgtgctccaggttatgggaagctgcgctgctatcagcagcatggatatggaacggccaggagacgggaaatgtcagcccatcgagattccaatgtgcaaggatataggatacaatatgacacggatgcctaatctgatgggacacgagaatcaaagggaggctgccattcagctgcacgagtttgcaccactagtggagtatggttgccatggccacctgcgcttttttctctgttcactgtacgctcctatgtgtacggaacaggtgtcaacacctattcccgcgtgcagagtgatgtgtgagcaggccaggctgaagtgtagccccatcatggagcaattcaactttaaatggcccgactccttggattgccgcaagctacctaacaaaaatgaccccaattatctgtgtatggaagcacctaataacggttccgatgagcccacccggggtagcggcctgttcccacccttgtttcggcctcaacgcccacattctgcgcaagaacatccattgaaggacggaggccctgggaggggtgggtgtgataatcctgggaaatttcatcacgtcgagaaaagcgccagctgtgcccccctctgcactcccggggtggacgtgtactggagccgagaggacaaacggtttgcagttgtgtggctcgccatctgggccgtgctttgcttttttagctcagctttcacggttcttacctttctaatagaccccgcacgtttccgttaccccgaaaggccaatcatctttctgtcaatgtgctactgcgtgtattcagttggttatttgatccgcctgtttgccggcgcagaaagcatcgcctgtgaccgagacagcggacaactctatgtcattcaggaaggcttagagtccactggctgcacgctggttttcctagtactttactacttcgggatggctagtagcttatggtgggtcgtactgaccctgacgtggtttttggcagctggcaagaagtggggccacgaggcaattgaggccaatagctcctattttcatctcgctgcttgggccataccagcagtaaaaactattttaatcctggtaatgaggagggtcgctggggacgagctgaccggagtatgttacgtgggcagtatggacgttaacgcgttgaccggatttgtcctcatcccattggcctgctacctcgtcattggaacgagtttcatcctgtccggcttcgtcgctcttttccacatccgaagggtgatgaaaaccgggggcgagaatacagacaaacttgagaagctcatggttcgcatcggcctgttttccgtgttgtacaccgtacctgcgacctgtgtgattgcttgttacttctacgagcggctcaatatggactactggaagattctcgccgcgcagcacaagtgcaagatgaataatcaaaccaagactctggattgtctgatggccgcgagcatccctgctgtagagatttttatggtcaagatcttcatgcttctggtagtcgggatcacttccgggatgtggatctggacttccaagacattgcagagttggcagcaggtgtgtagtcggagattgaaaaaaaagagccggcgaaaaccagcgagtgttatcacctcaggcggaatctataaaaaagcccaacatccacagaaaacccatcacgggaaatacgagatcccggcacaatctccaacctgtgtgtag

SEQ ID NO: 170957 - DNA, 1746 bp, Artificial Sequence
  derived and/or modified sequence
atgcagaggcctggcccccggctgtggctggtgctgcaggtgatgggcagctgtgccgccatcagctccatggacatggagaggcctggagatggcaagtgccagcccatcgagatccccatgtgcaaggacatcggctacaacatgaccaggatgcccaacctgatgggccacgagaaccagcgggaggccgccatccagctgcatgaatttgcccccctggtggagtatggctgccacggccacctgcgcttcttcctgtgcagcctgtatgcccccatgtgcacagagcaggtgtccacccccatcccagcctgccgggtgatgtgtgagcaggcccggctgaagtgcagccccatcatggagcagttcaacttcaagtggccagacagcctggactgcaggaagctgcccaacaagaatgaccccaactacctgtgcatggaggcccccaacaatggaagtgatgagcccacccggggcagcggcctcttccccccactcttccggccccagaggccccacagcgcccaggagcaccccctgaaggatggcggccctggccggggcggctgtgacaaccctgggaagttccaccacgtggagaagagcgccagctgtgcccccctgtgcaccccaggagtggatgtgtactggagccgggaggacaagagatttgctgtggtgtggctggccatctgggccgtgctgtgcttcttcagcagcgccttcaccgtgctgaccttcctgattgatcctgcccgcttccgctacccagagcggcccatcatcttcctgtccatgtgctactgtgtgtacagcgtgggctacctgatccggctgtttgctggagctgagagcatcgcctgtgaccgggacagcggccagctgtatgtgatccaggagggcctggagagcacaggctgcaccctggtgttcctggtgctgtactacttcggcatggccagcagcctgtggtgggtggtgctgaccctgacctggttcctggccgccggcaagaagtggggccacgaggccatcgaggccaacagcagctacttccacctggccgcctgggccatcccagctgtgaagaccatcctgatcctggtgatgagaagagtggccggagatgagctgactggagtgtgctacgtgggctccatggatgtgaatgccctgactggatttgtgctgatccccctggcctgctacctggtgattggcaccagcttcatcctgagcggctttgtggccctcttccacatccggcgggtgatgaagacaggaggagagaacacagacaagctggagaagctgatggtgcgcatcggcctcttctctgtgctgtacacagtgcctgccacctgtgtgattgcctgctacttctatgaaaggctgaacatggactactggaagatcctggccgcccagcacaagtgcaagatgaacaaccagaccaagaccctggactgcctgatggccgccagcatcccagctgtggagatcttcatggtgaagatcttcatgctgctggtggtgggcatcaccagcggcatgtggatctggaccagcaagaccctgcagagctggcagcaggtgtgcagccggcggctgaagaagaagagcaggaggaagccagccagcgtcatcaccagcggcggcatctacaagaaggcccagcacccccagaagacccaccacggcaagtatgagatcccagcccagagccccacctgtgtgtag

SEQ ID NO: 170958 - DNA, 1365 bp, Artificial Sequence
  derived and/or modified sequence
atgcccgcccaccgggaccccgacgtgcagggccaccggctgcagcatgactcttacgcccaaccggatggacccagggagcctgcccgcgggagccatccagtggccagagtcagggcagctggcggagtacgtctgcctaggccaccgccgttgctgcccgtcctggctgtgcgcgcagacgtgcaccgcgcaggactgtatcctcatcctcgcctgccgggccacgtcagagctggacctgcccaggtgctgcccgactatggagctgtccagcttcaggtggccaggctgcccggcctgccggaaacccctcaacaggagcgaccgcagctgcccgtgcacgggggcgcccagcagcgcctcgggagggcacatccggggctcgggccagtgcccgcagcggttcccgccgctgctgcaccccagagggcaggggcccctgccgaggggagaggccctcgtgcgcggcggcttcgtcaaccgggccaggttccccctcggggcgaagagagggtcgtacgcgcagcactgcacgctagacgcgggagggtgctcgagccaaggggccaggctctgcgctctgggctggctggccacctgggtggcgccgtcctgcttttacagcggcttcatcgggcccacctcccacacagacctggccctctaccccttcccagagccccacatcacttgccactgcacgtgctgcttagacttctgcgaggccttccacatccgcctctccggcggaggagagaacataggcttcgccccggccagcgtcccgccctgtgccaccctggtgggacaggcgagcacagactgcacgccggtctcccaggcccactcttgctgcgccacggccagctcgccgtggttgggggcccacatgctcacttagttccaggtcggcggcaggaagtgggccctcgcgggcatcggtcacaacagcagcttttacccccgggatcccttggtcaccctggaggggaggatcacccagaccccgggcatgcccagggtggcggcgggcgtgctcaccggggcttgttaagggggcagcatggcaggcagcgtgcacatcgtctccgagcacacagtcctggccttctgcccgggcacagacatgtattgcacccgttagggttacgcggacccgtccctcacccagaaggcgacgaggatggacgacgcgagcacggacaggctggcgaggcgcatggagcatatcgagctctgttatgcgcggtgcaccgcgcagggcatctgtgtgacaggctcctactgcttaggaccccccagcatggtctcctggaggatcccggaggggccgcacaagtccagaatgaacagccagactag

SEQ ID NO: 170959 - DNA, 1746 bp, Artificial Sequence
  derived and/or modified sequence
atgcagcggcccggcccccggctgtggctggtgctgcaggtgatgggcagctgcgccgccatcagtagtatggatatggaacggccaggggatggaaaatgtcagcctattgagatccctatgtgtaaggatattggatacaacatgactcggatgccaaacctcatgggacacgagaatcagagggaagccgcaatccagctccacgagttcgcacctctggtggaatatggctgtcatggccatctcaggttcttcttgtgtagtttatatgccccaatgtgcactgagcaggttagtacaccgatccccgcttgtcgggtcatgtgtgagcaagctcgcttaaaatgctcgcctattatggagcaatttaacttcaagtggcccgacagcctcgattgcaggaagctcccgaataagaatgaccctaactatctgtgcatggaagctcctaacaacggaagcgacgagcctaccagggggagcggactgttccctcccctgttcagaccacagcgtccacacagtgcccaagagcacccacttaaggacggaggacccggccgagggggctgcgacaacccagggaaatttcatcatgtggagaagtctgcctcctgtgcccctctctgtaccccgggggtcgacgtatactggagtcgcgaggataagcgtttcgctgtggtctggctcgccatttgggccgtgttgtgcttctttagctcagcctttaccgtcctcacttttcttatagatccagctcggtttagataccccgagcggcccatcattttcctttccatgtgctattgcgtgtattcggtaggctatctcatcagactcttcgccggcgctgaatctatcgcttgcgacagagattccgggcaactgtatgtaattcaggaggggctcgagagcaccggttgcactttagtgtttctggtgctttactacttcgggatggcctccagcctatggtgggttgtgctgacccttacctggtttttggctgcaggaaaaaaatggggtcacgaggccatcgaagcaaattcttcctactttcacctggctgcttgggcaattccagccgtgaagaccatactcatactggtaatgcgccgggtggcgggggatgagttaactggagtctgctatgtcgggtccatggatgtgaatgcattgaccggctttgtcttgatccccctggcgtgctatctagtgatcggcacgtccttcatcctgagcggattcgtggcactgttccatatccggagggttatgaagaccggtggcgagaacactgataagcttgagaagttgatggtacggattggactttttagtgtgctgtataccgtgccagctacctgcgtaattgcttgctatttttacgagaggctgaacatggactactggaagatacttgccgcgcagcacaagtgcaaaatgaacaaccaaacaaagacactggactgtctaatggcagctagcatacctgcggtggagatattcatggtgaagatttttatgctgctcgtagtcggcatcacgtccggaatgtggatctggacatctaagacactgcaatcttggcagcaggtgtgctcaaggaggctgaaaaagaagtcgagacgcaaacctgcatccgtgattacctccggaggaatctataaaaaggctcaacacccacagaagactcaccacggcaaatacgagatcccagcccaatctccaacatgtgtgtag

SEQ ID NO: 170960 - DNA, 1365 bp, Artificial Sequence
  derived and/or modified sequence
atgccagcccatagggatcctgacgttcaaggccatagattgcagcatgacagctacgctcagccagatgggccacgcgaacctgcacgaggatcccatcctgtggcccgtgtgcgggctgccggtggcgtccggcttcctcgtcctcctcccctgctgcctgtgctggcagttcgcgcagacgtgcatcgggcagggctctatccccatccacggctccctgggcacgtgcgcgcaggtccggctcaggtgctcccagactatggagcagtgcagctgcaggttgctcggctccctggcctccccgagacacctcagcaagagagaccacagctacccgttcacggaggtgctcagcagcggctcggcagggctcacccagggcttggacctgtgccagccgctgtgccggcagccgcagccccacagcgggcaggtgcgccagccgaagggaggggcccacgcgcaaggcggctgcgccagccaggacaggtcccaccccgaggagaagaaagagtggtgcgggctgctctgcacgccaggcgcggacgtgtgctggaaccacgtgggcaggcgctgcgctccggactggccggacacttgggcggagccgtgttactgctacaaaggctgcatcgggcacatctgccacacaggcccggacccttaccactgccgcgagccccacatcatctgcccttgcatgttctgctgcgcttgctccgaggcctccctcaccccccattacggaggcgcagggagcatcggcttagacctggccagcggccagctctgtgtcatcctggtggcactggcgaacaccgcttgcatgcaggcctccccggacctctcctacttcgtcatggacagctggccgtggtgggtgggccacacgcccacttggtacctggacggagacaagaagtaggccctcgtggtcataggagccagcagcaactgctgccccctgggtccttgggtcacccaggcggtgaagaccaccccgatcctggccacgcccaaggcggaggcggaagagcacacaggggactgctgcgcggacagcacggtcggcaacgggctcataggctgagggcacactcgcctgggctgctgccaggacataggcatgtcctgcacccccttggtctccgcggacctgtcccacaccctgaaggcgacgaagatggcagacgggaacacgggcaggccggagaagcgcatggggcatacagagccttactgtgcgccgtacaccgggcaggacatttgtgtgaccggctgctgctgctacggacaccacaacacggcctcctggaggatcctggcggtgcagctcaggtgcagaatgagcagccagattag

SEQ ID NO: 170961 - DNA, 1746 bp, Artificial Sequence
  derived and/or modified sequence
atgcagagaccaggccctcgcctgtggctagtgctgcaggttatgggatcttgcgctgccatttcttcaatggacatggagaggcctggcgatggtaagtgccagccaatcgagatacctatgtgtaaagatattggctacaatatgactagaatgccgaatctgatgggccatgaaaatcagagagaagctgccatacaactgcacgagtttgcccctctcgtcgaatacgggtgtcatggtcacttacgctttttcctgtgttccctctatgctccgatgtgcacggagcaggtgtctaccccgatccccgcatgtcgggttatgtgcgaacaggcccgacttaagtgctcccccatcatggagcaattcaatttcaaatggccggattctcttgactgcagaaaacttccaaacaagaacgacccaaactacttgtgcatggaggctcccaataatggctccgatgagccgacacgcggatcaggtctgtttccccctctgttccgcccacaacgcccacactctgcacaggagcaccccctcaaagatggtgggcctggcagagggggatgcgacaatcctggcaagtttcaccacgtggaaaaatctgcttcctgtgccccactatgcacacctggggttgacgtttactggtcacgcgaagacaaacgattcgccgtggtctggctggctatatgggccgtactgtgttttttcagttcagctttcacagtgctaacatttctgatagatccggctagatttcgttacccagagcgccctatcatcttcctatctatgtgttattgcgtatacagtgtggggtaccttattagactgtttgccggtgccgagagcatcgcctgcgacagggatagcggccagctgtatgttattcaagaggggttagagtcaacgggatgtacgctcgtgttcctagtgctttactacttcggcatggccagctccctgtggtgggtagttctcacactaacctggttcctcgcagctggcaagaaatgggggcatgaagccattgaagctaacagcagctactttcacctcgctgcctgggccatccctgccgtaaagacaatcttgattctggtgatgcgaagagtggcgggagacgagctaactggcgtgtgctacgtaggctccatggatgtcaatgcactcaccgggtttgtgctcatcccgctagcatgctacctggtcataggtactagttttattttatccggctttgtggctctctttcacataagaagagtgatgaagacagggggagaaaacacagacaagcttgagaagctaatggtgaggatcggattgttttcagtactgtataccgtgcctgccacttgtgtcattgcttgctatttctatgaaagactgaatatggattactggaaaatccttgccgctcagcacaagtgcaagatgaataatcagacaaagacgctcgattgcctgatggcggctagcatccccgctgtggagatattcatggttaagatctttatgcttctggtggtcggcatcactagcggcatgtggatatggacttcaaaaacactacagtcttggcagcaagtgtgctcaaggaggctgaaaaagaaatcacgtcgtaaacccgctagcgtcatcacaagcggcggtatctataagaaggcccagcatccacaaaaaacacatcacggcaagtacgagatccccgctcagagcccgacctgcgtttag

SEQ ID NO: 170962 - DNA, 1746 bp, Artificial Sequence
  derived and/or modified sequence
atgcagagacccggccccagactgtggctggtgctgcaggtgatgggcagctgcgccgccatcagcagcatggacatggagagacccggcgacggcaagtgccagcccatcgagatccccatgtgcaaggacatcggctacaacatgaccagaatgcccaacctgatgggccacgagaaccagagagaggccgccatccagctgcacgagttcgcccccctggtggagtacggctgccacggccacctgagattcttcctgtgcagcctgtacgcccccatgtgcaccgagcaggtgagcacccccatccccgcctgcagagtgatgtgcgagcaggccagactgaagtgcagccccatcatggagcagttcaacttcaagtggcccgacagcctggactgcagaaagctgcccaacaagaacgaccccaactacctgtgcatggaggcccccaacaacggcagcgacgagcccaccagaggcagcggcctgttcccccccctgttcagaccccagagaccccacagcgcccaggagcaccccctgaaggacggcggccccggcagaggcggctgcgacaaccccggcaagttccaccacgtggagaagagcgccagctgcgcccccctgtgcacccccggcgtggacgtgtactggagcagagaggacaagagattcgccgtggtgtggctggccatctgggccgtgctgtgcttcttcagcagcgccttcaccgtgctgaccttcctgatcgaccccgccagattcagataccccgagagacccatcatcttcctgagcatgtgctactgcgtgtacagcgtgggctacctgatcagactgttcgccggcgccgagagcatcgcctgcgacagagacagcggccagctgtacgtgatccaggagggcctggagagcaccggctgcaccctggtgttcctggtgctgtactacttcggcatggccagcagcctgtggtgggtggtgctgaccctgacctggttcctggccgccggcaagaagtggggccacgaggccatcgaggccaacagcagctacttccacctggccgcctgggccatccccgccgtgaagaccatcctgatcctggtgatgagaagagtggccggcgacgagctgaccggcgtgtgctacgtgggcagcatggacgtgaacgccctgaccggcttcgtgctgatccccctggcctgctacctggtgatcggcaccagcttcatcctgagcggcttcgtggccctgttccacatcagaagagtgatgaagaccggcggcgagaacaccgacaagctggagaagctgatggtgagaatcggcctgttcagcgtgctgtacaccgtgcccgccacctgcgtgatcgcctgctacttctacgagagactgaacatggactactggaagatcctggccgcccagcacaagtgcaagatgaacaaccagaccaagaccctggactgcctgatggccgccagcatccccgccgtggagatcttcatggtgaagatcttcatgctgctggtggtgggcatcaccagcggcatgtggatctggaccagcaagaccctgcagagctggcagcaggtgtgcagcagaagactgaagaagaagagcagaagaaagcccgccagcgtgatcaccagcggcggcatctacaagaaggcccagcacccccagaagacccaccacggcaagtacgagatccccgcccagagccccacctgcgtgtag

SEQ ID NO: 170963 - protein, 596 aa, Artificial Sequence
  derived and/or modified sequence
MAGNCGARGALSAHTLLFDLPPALLGELCAVLDSCDGALGWRGLAERLSSSWLDVRHIEKYVDQGKSGTRELLWSWAQKNKTIGDLLQVLQEMGHRRAIHLITNYGAVLSPSEKSYQEGGFPNILFKETANVTVDNVLIPEHNEKGILLKSSISFQNIIEGTRNFHKDFLIGEGEIFEVYRVEIQNLTYAVKLFKQEKKMQCKKHWKRFLSELEVLLLFHHPNILELAAYFTETEKFCLIYPYMRNGTLFDRLQCVGDTAPLPWHIRIGILIGISKAIHYLHNVQPCSVICGSISSANILLDDQFQPKLTDFAMAHFRSHLEHQSCTINMTSSSSKHLWYMPEEYIRQGKLSIKTDVYSFGIVIMEVLTGCRVVLDDPKHIQLRDLLRELMEKRGLDSCLSFLDKKVPPCPRNFSAKLFCLAGRCAATRAKLRPSMDEVLNTLESTQASLYFAEDPPTSLKSFRCPSPLFLENVPSIPVEDDESQNNNLLPSDEGLRIDRMTQKTPFECSQSEVMFLSLDKKPESKRNEEACNMPSSSCEESWFPKYIVPSQDLRPYKVNIDPSSEAPGHSCRSRPVESSCSSKFSWDEYEQYKKE

SEQ ID NO: 170964 - DNA, 1791 bp, Artificial Sequence
  derived and/or modified sequence
atggccggaaactgtggcgccagaggtgcccttagcgcccacaccctcctgtttgatctgccccctgccctcttgggcgagttgtgcgcggttctggactcctgtgacggtgcactggggtggagagggctggcggagagactgtcaagtagctggcttgatgtgaggcatatcgagaagtacgtagatcaaggtaagtctggtacacgcgagctgttatggagttgggcacagaagaacaaaacaattggcgatctcctccaggtgttgcaagagatgggacaccgcagggccatccatctcatcaccaattacggcgctgtgttgtctcctagcgagaagtcttatcaggaggggggttttcccaatattctttttaaggagactgctaacgtcaccgtggacaatgtgctgattcccgaacataatgaaaagggcattctcctgaagtcctcgatctcttttcagaacatcatcgaggggactcgcaactttcataaagattttttgatcggcgaaggggagattttcgaggtatacagggttgagatccagaacctcacatacgctgttaaactgtttaagcaagaaaagaaaatgcaatgcaagaaacactggaagagattcctgagcgagttggaggttctgcttcttttccaccacccgaacatcctggagttagctgcgtattttaccgaaaccgaaaaattctgcctgatttacccgtatatgaggaacgggactttattcgaccgcctgcaatgtgtgggggacaccgccccacttccatggcacattcggattggcatcctgattggaatcagtaaagccatccattatctccacaatgttcagccgtgctcagttatatgtggcagcatctcaagtgcaaatatcctgctggatgaccagtttcagcccaaattgacagattttgccatggcacactttcgctcacaccttgaacatcagagctgcaccattaacatgaccagctcctcatcgaagcacctctggtacatgcctgaggaatatattcgccagggcaaactctcaattaaaacagatgtgtactctttcggcattgttatcatggaagtactgaccggctgccgggtcgtgctggacgatcccaagcacatccagctgagggacctgctccgagaattgatggagaaaagaggcttggacagttgtctgtcttttctcgacaagaaggtgccaccatgtccacgtaatttcagcgcgaaattgttctgcctggccggtcggtgtgccgcgacccgggctaagctgcgcccgagcatggatgaagttctcaacactctcgaatccacgcaagctagcttgtactttgccgaggacccccccacaagcttgaagtcattccgttgcccatccccactgttcctcgagaatgtacctagtatacctgttgaagatgacgaatcacagaacaataacctcctccccagcgacgaggggctgcgcattgaccggatgacacaaaagactcctttcgaatgcagccagagtgaagtaatgttcctatcgctggataagaagcccgaaagtaagcgcaatgaagaggcctgcaacatgccatcctcatcctgtgaagagagttggttcccaaagtatatcgtgccgagtcaggaccttaggccatataaggtgaacatagaccccagttccgaagcccccggccactcttgtcggagtcgtccagtagagtcgtcttgcagcagtaagttcagctgggatgaatatgaacaatataaaaaggagtag

SEQ ID NO: 170965 - DNA, 8663 bp, Artificial Sequence
  derived and/or modified sequence
gctttcaaaaataaacttttgtaagaagtaatgacaccgctagccgtccacaccaggagaccgcctagccgtggggcacggtgggctcctgggagctctgagctctgggctttctccagttcgcactctgcttgtctcggcagctccgtccccaccgcagaggtgtgaaggggcgcaaagccagcgaagggagaacccgggtcgggtaacccccaggcctggccaggcggacgcaggggcatctcgggcgaggcgcgccttgcgtcacgtgggcaccgcccctgcagtgaccggagaacggcgtgttcctagggctctgctgccgtcgtggaagcaggatttccgcggttgtgtaacggcctgtcgcaggcgtgcagggacctggactccgcctcgtccccggggctcgggcagccgagccatggcggggaactgtggggcccgcggcgcgctgtcggcgcacacgctgctgttcgacctgccgcccgcgctgctcggagagctctgcgctgttctggacagctgcgacggcgcgctgggctggcgcggcctggcagagagactttcaagcagctggctggatgttcgtcatattgaaaagtatgtagaccaaggtaaaagtggaacaagagaattactttggtcctgggcacagaaaaacaagaccatcggtgaccttttacaggtcctccaggagatgggacatcgtcgagctattcatttaattacaaactatggagcagtgttgagtccttcagagaagagttatcaggaaggtggatttccaaatatattattcaaggaaacagccaatgtcaccgtggataatgttcttattcctgaacataatgaaaaaggaatactgcttaaatcttccatcagctttcaaaatatcatagaaggaactagaaatttccacaaagacttcctaattggagaaggagagatttttgaggtatacagagtggagattcaaaacctaacatatgctgtcaaattatttaaacaggagaaaaaaatgcagtgtaagaagcattggaagaggtttttatctgagcttgaagttttactactgtttcatcacccaaacatactagagttggctgcatattttacagagactgagaagttctgtctgatttatccatacatgagaaatggaacactttttgacagattgcagtgtgtaggtgacacggccccactcccttggcacattcgaatcggtatattaataggaatatccaaagccattcactacctgcacaacgttcaaccatgctcggtcatctgtggcagtatatcaagtgcaaacatccttttggatgatcagtttcaacccaaactaactgattttgccatggcacacttccggtcccacctagaacatcagagttgtaccataaatatgaccagcagcagcagtaaacatctgtggtacatgccagaagagtacatcagacaggggaaactttccattaaaacagatgtctacagctttggaattgtaataatggaagttctaacaggatgtagagtagtgttagatgatccaaaacatatccagctgcgggatctccttagagaattgatggagaagagaggcctggattcatgtctctcatttctagataagaaagtgcctccctgccctcggaatttctctgccaagctcttctgtttggcaggccggtgtgctgcaacgcgggcaaagttaagaccatcaatggatgaagttttaaatactcttgaaagtactcaagccagcttgtattttgctgaagatcctcccacatcactaaagtccttcaggtgtccttctcctctattcctggagaatgtaccaagtattccagtggaagatgatgaaagccagaataacaatttactaccttctgatgaaggcctgaggatagacagaatgactcagaaaactccttttgaatgcagccagtctgaggttatgtttctgagcttggacaaaaagccagagagcaagagaaatgaggaagcttgcaacatgcccagttcttcttgtgaagaaagttggttcccaaagtatatagttccatcccaggacttaaggccctataaggtaaatatagatccttcttcagaagctccagggcattcttgcaggagcaggccagtggagagcagctgttcctccaaattttcctgggatgaatatgaacagtacaaaaaagaataaattctaccagaagataaagaaaaaagcaagtattgcataggcacctgagcataggtatgaccttgggaagacattggctccataagcaatgccaagagaatgatcaatagtgagtttgggtgatgcagataaacaatctggataattccatttcttttttcccaaaccctcaaacagagtgccttaaaaaattgttttatcaggataattgtctcatgaccaaatccacgctcaattagagccattcaaaattccttaagatcatgggttctgacttcagccaaacaaaacaatcaaaacctaccaaaaagggactggattgtaatgtcctctccatcatcctcagtgtgagtcctcagagcctccatctgccaagaacattcagttggattccatcgtttggtttagcttgcttgcacgggttgtaggaaatgtctaatttgtaaatgttaatagatacctttggaaagaatcaccttgttattctgattgacccctcttgttttttggttaatccctgactagcctgcttgtctgaaaatgagccaggttcacccttagctacggcatgctctgggttgaaaggggatttcttcccaagatctatcctaaactcttaggacagtttatcctgtattgactattattacagctttttaaaaacagacttagtgacctattatatcttaaggagactatgtgaaatgtccatcaagtaatttttattcctgagaaaatggctggtcaagggcctaggtcagctttttgtttaatctacacctttcaactctgggccttcattcctgctgtttcttggatctccctcttttgaaatcctaccaatcatcagagctctacaaaacagccacctcctggaagcttccctaatctctacaaccagaagtactccctttatcagtatttccacagcaatttctttgtatttctattttatatttatcactttctgaattatatcaaagctgcttgtcttatctctttttttttttgagacggagtctcgctctgtcatccaggctggagtgcagtggcacaatctcggctcaccgcaaggtctgcctcccgggttcacgccattctcctgcctcagcctcccgagtaaaggtgggactacaggcgcccgccactacgcccggctaattttttgtatttttagtagagacggggtttcaccatgttaggcaggatggtctcgatctcctgacctcatgatccgcctgcctggcctcccaaagtgctgggattacaggcgtgagccaccgcgcccagccttcatctcttttactaggttgtaaactccctatattagttttctattgtttttgtaacacattatcacaaatttagtgacttaaagtaacataaattaattattttgcagttctggaggtcagaattccttagcattctttctggaggctgttggggagaactcactgccttgccttttccagcttctagaggccacctgccttctttggctcatggcctcttcctccgtcttcaaagccagcaacgtgacatttcagatctccctctctctgtctgtctcaccgcatctcttcactaccctcttcctctcattctggcccttctgcatgtcttttataaagacctttgtgatttcactgggcccactcatataagccaggaaaatctctgtgtctcagatccttaatttaattacacctgcaaagtccgttttctcgtgtaaagtaacatattcacaggtttctggaattgggacgtggacatcttcgggggaccattactctgtctgtcatactccctgagtgtgtaagggccatctcttcagagcctaatgtgtcatcctacacagagcaggtgtttccttataaattaagttgaattaaattacccctatgaagccacataatcaataattcagctataataaacattgccgaataaattaacaaagggaggataatgactccttatgatgatggatagaaacactgaagaaaaccattttcagaggatttactgaattttcctctccaaggagcttgtaatagaagggtaaacctctagtttcttgtccagcagaggaataggctcatgtcttttgttttattttatttttttggtgagtcagtatggttgggttaatcatattcacattagattccatgttgaagaacaactaatcaaagaagaaaatcatcaggaatcagggtgagattaacagaccaaggtcagaaacatggagttacaattttccaaaaaagcacgaagtgagattaaaaccacagtaagtcttagtctgactgacaggctttatacaggccctcggtaagcagttgggagaacccatgcccaccactgctctgtacggtatctggctgctcagagctctctgattcacaaaagagatcatcaagaattgactctgtgttaaactgtttttcacttagaatatggacccccaccaatacattcaatgaagggtcattaaggaagctctgattaacaccaggcccatgcagttactccgcacatataatctgtgggtattatgttgatttgaacttgcttagctgacttaaagcagggtttctcaaactgtagtatgcatcagaatgacttggaaagctggttaaaaacgcagattgctgggtccacccagcttctgatgcaataggtctggggttagaaattttgctttctaatgagttcccaggtgatgctgatgccaatgatgtgaagcccgctcttcacatccgtgaaaatcgctgccttaaggtgctcttaaattgttatagattggtagatcctacctttccatcactggtatgttttttgagaaaaggatcctttcttttcattctgttatattcatcctattacataggatgttggttagcacagagtgggagctctagaaagattgttgaccaatcatcttattgactagaccatctttctagagtataactattttggacacctcaaagatgaagtcagataagctggcagtgacctgattaacgttgtggtaagcagatgccactgtggctgggaagtaccaaatcttctgttgagtgattcagtcttcctgactagatttgccttctagtgggtgtattaataagcgttagttgatatgaattaaatgttgcaactttctatgggtaataagaggatacctttatagtttcatgatgtggagaccaagatacataagaaagcaagaatgagtctccgggtgttccctctgatcagcaaacatgaattcataatttcatttactctcatttttgtaatgcactctgagcaatcctccaggcagatcctatttactaagcttcaggcttttgtcccattttataatgcccaaacacatggagaaaacattttgttgtttttaaaaacaggtatgggatttctgatataatcaattttattgacttcttgggagttgtaatgatctgtgactcactgcataatattgtagttttatagggtggcacatcaccctgtgtaaaacaactttaatgacctgaggactgatgagtacaggaagtgaggtttatcatgagtagcatttattaagcatctgctagaatcaaagcactgcattagctactaaggtacaaagtaagacacagtttaataaggaagacagggcatctacccaagtcaacagttcagtgacatctgttatttgaaccacacaccaatgcaaccgaagtaaatgctgaaagggtgagaagaaggaatagattactatgcatttttgagaggatgaagaaggcttcttggagaaggtttctgaaaagagatacggaattaagagaaatagaaaagagcactgacgaagcactcaggatggctattcaaggaattggggatccacagcagctgtgcacaaccatccctaatgccagaaaaatggggtaagggtgaagggaactgggtctagagctttgcatgtttttttctggttaacccttagagtcaccctgaaggtgtggatcccatcttataataaggtgaggacactgagtcaggaaactaacttgctaaaatcaagtcctcccagtcctcccatcaggtccttccagatctggaggagccaggatttgaactcacatttgtctgacttcaaaatccatgctttttcttgtgttccaaattgcacaatggagtcactgccagttcaagctcctatgaaaagggatggatgtgaaaagtcatttgttgattccacagatttttagtaggtaccatgtctcctgcctttatcactatcctactcctctgctacaacttctctgctacaggcacccactgcagttacttgatatgagttaaatgaatccatccatccaaacttccattcattgaataaatacttagcaatggcttcctttgtatcaggcactattctaggagctggggctacagtgcagatggaaaccagcaaagctcactgccctcatggagcttatatgtaagtgaataaatctcagggtggttctcctgtcataggtcctggctcctctgccagctcttccaaatgggttcagagaggttttctccttgtcctgttgtgtaactgataatcccatggtggacctcactttgctattcatatgcactaagtagtttatggtgtgctttgtggctggcaattgtgacagattctattcttctattggtatgtggtttctttggggcatttgtttggatactgatggcatcttccgggggtctgaggcacctacacaaacctcaggtcactatcacgtgatactggagttgcctgttaaattatatttcttcttccacaaaactgcaggttccctgagggaaaggtctatgtcctgctcatttttggatccctaatggctggcacagtacctggtgcataatatggttcaacaaatatttgtaaaatgaatgaatcaaatagtccttcaaagcatcttcagaatcaagattgtcatctagattgcacccgaagtttatctttctagtattcagaatataatcaatcattgcttaaattattccatttcatcattcttgaataaaagctactaattttaaatactaatatctgagatatcttcgaaaagaagattagtcgttgtatgtgttgcttataaattttctctatggtggaaaatattcccaaaccatgtctaagcaatgaaaaaccagtgttctggcaggaaataaactgatgtttgttgtgttttgtatctgtcttcccgttccaaatcatttatatatacttgatggtctgtgggcttgacttgcaagtattttcctgggagacatttttattcaaaagacctgtattgcctgccaaaccttcatttaagagactcattatggatgtcatctgcatcattgcaaacttttctggtcgtctctataaatagcaagataatatttacagagttttacattggctcttgaattttaaaatattcttatagacaaacattaattggaatggggggtaaggaggtaggaatggcttacttgcggaaatgcaggctcattgttgtgtctagtaggtgctaggtgcattcacacatctcttaagctttaaacaacctattgagccggtttccatttccttgatctattagatttaaaaaaatgaagcataaaggagttggctcttgccctaagtcatactactgatggaatgagaatacaaaccaaaaacactttattcaagtccaggaaatatctgccttgaaaaagaataacttaaaaattaaaagtgtcctctatttgaacatgaaaacagctaataaagatgtgttattttattttattattattaattttgtcctcccatattggcaaagataaagcaattgacaaaaatggaattcttgttcaatactggcaggagtgaaaattggtagaacctttctagaaggcaatttggcaacatgtatgaaaacctaaatgttgatacacctttacccagcagtttgtttaggaatttatcctaatgaataaaagttgtccaagtcttcaaacatgagcccaaaggtatatttcatgatgtttatgatattaaaacattggaaacaactgaaacatccttcagtaaaagatggattaaataaattccatgcagttgtcatttaaaaatatttagatatatgtttattgctatggatatatgttcccaaaatattattgaatcaaaaagtagactacaggatatatgttgaatatgagctcatttataacattgaatattttaagataatgtatgtttcatagagagatcttcaccaaatgttaaggatttttttttctgggctgtggtatttgggtgatctttacattcttcagactcatgtgtgtttgaaactttttataatgaacatatatcatttttattagaaaagaataaagtttttgaaaaaaaaaa

SEQ ID NO: 170966 - DNA, 1791 bp, Artificial Sequence
  derived and/or modified sequence
atggccggcaactgtggggcccggggggccctgagcgcccacaccctgctgtttgacctgcccccagccctgctgggggagctgtgtgctgtgctggacagctgtgatggagccctgggctggaggggcctggccgagcggctgagcagctcctggctggatgtgcgccacatcgagaagtatgtggaccagggcaagagcggcacccgggagctgctgtggagctgggcccagaagaacaagaccatcggggacctgctgcaggtgctgcaggagatgggccaccggcgggccatccacctgatcaccaactatggagctgtgctgagccccagcgagaagagctaccaggagggcggcttccccaacatcctcttcaaggagacagccaacgtgacagtggacaacgtgctgatccctgagcacaatgagaagggcatcctgctgaagagcagcatctccttccagaacatcatcgagggcaccaggaacttccacaaggacttcctgattggagagggggagatctttgaggtgtacagagtggagatccagaacctgacctatgctgtgaagctgttcaagcaggagaagaagatgcagtgcaagaagcactggaagcgcttcctgtctgagctggaggtgctgctgctcttccaccaccccaacatcctggagctggccgcctacttcacagaaacagagaagttctgcctgatctacccctacatgagaaatggcaccctgtttgaccggctgcagtgtgtgggggacacagcccccctgccctggcacatccgcatcggcatcctgattggcatcagcaaggccatccactacctgcacaacgtgcagccctgcagcgtcatctgtggcagcatcagcagcgccaacatcctgctggatgaccagttccagcccaagctgacagactttgccatggcccacttccgcagccacctggagcaccagagctgcaccatcaacatgaccagcagcagcagcaagcacctgtggtacatgcctgaggagtacatccggcagggcaagctgagcatcaagacagatgtgtacagctttggcatcgtcatcatggaggtgctgaccggctgccgggtggtgctggatgaccccaagcacatccagctgcgggacctgctgcgggagctgatggagaagaggggcctggacagctgcctgtccttcctggacaagaaggtgcccccctgccccaggaacttcagcgccaagctgttctgcctggccggccgctgtgccgccacccgggccaagctgcggcccagcatggatgaggtgctgaacaccctggagagcacccaggccagcctgtactttgctgaggacccccccaccagcctgaagagcttccgctgccccagccccctcttcctggagaatgtgcccagcatccctgtggaggatgatgagagccagaacaacaacctgctgcccagtgatgagggcctgagaattgacaggatgacccagaagaccccatttgagtgcagccagagcgaggtgatgttcctgagcctggacaagaagccagagagcaagagaaatgaggaggcctgcaacatgcccagcagcagctgtgaggagagctggttccccaagtacatcgtgcccagccaggacctgcggccctacaaggtgaacatcgaccccagcagcgaggcccctggccacagctgccgcagcaggcctgtggagagcagctgcagcagcaagttctcctgggatgaatatgagcagtacaagaaggagtag

SEQ ID NO: 170967 - DNA, 1791 bp, Artificial Sequence
  derived and/or modified sequence
atggccggcaactgcggcgcccggggcgccctgagcgcccacaccctgctcttcgatctgccaccagctctgctcggggagctctgtgctgtgctggactcttgcgatggtgctctaggctggaggggactcgctgagcgactgagttcatcatggctggatgtacgacatatagaaaaatacgtcgatcaaggcaagagtggtaccagggaacttctgtggtcttgggcacagaaaaacaaaaccattggggacttgctacaggttctgcaggagatgggccaccgacgcgccatccacctgataaccaactatggcgccgtcctatccccttctgagaaaagctaccaagagggaggatttcccaacatcttgtttaaagagacggctaacgtcaccgtcgacaatgtcctgattcccgagcataatgagaagggcatactcctaaagtcctcaatttcattccagaacatcattgagggaacccggaattttcacaaggacttcctaattggtgagggcgagatctttgaagtgtaccgcgtcgagattcagaacctgacctacgcagtcaagctattcaagcaagaaaagaaaatgcagtgtaaaaagcattggaaaagatttcttagcgagctcgaggtgcttctgcttttccaccaccccaacatccttgaactggcagcctactttaccgaaacggagaagttctgtctgatttatccctatatgcggaacggcactttattcgacagactgcagtgtgtaggcgacaccgcgcccctcccttggcatatcaggataggcatcttgataggcatttccaaggctatccattatcttcataatgtccaaccatgctcagtgatctgtggtagtatttcatctgccaatatactgctcgatgaccagttccaacctaaactaaccgatttcgctatggcacacttcaggtcacatttggagcaccagtcatgcaccattaatatgacctcctcatcatctaaacacctttggtacatgcccgaggagtacatccgccaggggaaactatcaattaaaactgatgtgtatagctttggtattgtgatcatggaagtgcttactggctgccgcgtggtgctcgatgaccccaagcatatccagttgagggacctgcttcgggaactgatggaaaaacgaggcctggattcttgcctttctttcttagataagaaggtccctccctgccctcggaatttctcagctaaattgttttgcctggccggtcggtgtgccgcaacccgggctaaactgcgccccagtatggatgaagttctgaacactctggaaagtacacaggctagtctctatttcgcagaggatccaccaacctctctcaaatctttccgctgcccctcgcccttgttcctcgagaatgtgccctcaatacccgtggaagacgatgagtctcagaataacaaccttctgccatccgacgaaggacttcgaatcgacaggatgacccaaaagacgccgttcgagtgtagtcagtccgaggttatgtttctgtcactcgacaaaaagccagagtctaaaaggaatgaggaggcttgtaatatgccaagcagcagctgcgaagagagttggtttccaaagtacatcgtgccttctcaggaccttcgaccttacaaggttaatatcgatccttcgtcggaggcacctggacactcatgtcgaagcaggcctgtagagagcagttgttcttctaagttcagctgggatgagtacgaacagtacaaaaaagagtag

SEQ ID NO: 170968 - DNA, 1791 bp, Artificial Sequence
  derived and/or modified sequence
atggccggaaactgcggggctcggggagccctgagcgcccatactctactattcgacctgcctccagccctactgggggagctgtgtgccgtgctggactcatgcgacggcgcattgggctggaggggcctggctgaacgcctgagcagctcctggcttgatgtccgccacattgagaagtatgtcgatcagggcaaatccggcacccgggagttattatggtcctgggctcagaagaacaaaacgatcggagacctcctccaagtgctgcaggagatggggcataggcgtgccattcatctgattaccaactacggcgcagtgctgtctcccagtgagaagagctatcaggagggtggctttccgaatattctcttcaaggagactgcaaatgttaccgtggataacgttctgattcctgagcacaacgaaaaaggcattctgctgaagagctcaatctcatttcaaaacatcattgagggtacccgcaattttcacaaggacttcctcatcggcgagggcgagatattcgaggtttaccgggtcgagatccagaacctgacttatgccgtgaaacttttcaagcaggagaagaagatgcaatgcaaaaaacactggaagcgttttctaagcgaactggaggtcctcctgctcttccaccatcctaacatactcgagctcgccgcttacttcaccgaaactgagaaattctgtctgatatacccttatatgcgcaatgggacactgtttgaccggctccagtgtgtcggagatacagcccctctgccctggcacatcaggattgggatactcattggaatttcaaaagccatacactatttacataacgtccaaccctgttccgtcatctgtggcagcatcagtagtgctaatatccttctggacgaccagttccagcccaaactgactgattttgccatggctcacttccgctctcatctggagcaccaatcatgcacgatcaacatgacttcctccagctccaagcacttgtggtacatgccggaggagtacatcagacagggtaaattgtctattaagacggatgtgtactctttcggaatcgtgattatggaggtcttaactggatgcagagttgtccttgatgatcctaagcacatccagctacgtgatttgctgagagagctaatggaaaagcgaggtttggacagctgcctctcctttctggacaagaaagtgcctccttgccccagaaacttctctgccaagctcttctgtctggccggtaggtgcgcggctactagagccaagctgaggcccagcatggacgaggtcctgaacactctcgagtcgacacaagcctctttatacttcgccgaagacccacctaccagcctaaagagttttcggtgtcccagtcccctgtttctcgagaacgtgccctctatcccagtcgaggacgatgagtcgcaaaacaacaacttactaccatccgacgaggggctgagaatcgaccgtatgacgcagaaaacgccctttgagtgttcccagtctgaagtgatgtttctatctctcgataagaagcccgagagcaagcgtaacgaagaagcatgtaacatgccctcttcatcatgcgaagagtcttggtttcccaaatacatcgtgccctcccaggatttgcggccttacaaggtgaatatcgatccgagcagcgaggctcctggtcacagttgccggagccgccctgtcgagagcagctgctcaagtaaatttagctgggatgagtatgagcagtacaaaaaggaatag

SEQ ID NO: 170969 - DNA, 1791 bp, Artificial Sequence
  derived and/or modified sequence
atggccggcaactgcggcgccagaggcgccctgagcgcccacaccctgctgttcgacctgccccccgccctgctgggcgagctgtgcgccgtgctggacagctgcgacggcgccctgggctggagaggcctggccgagagactgagcagcagctggctggacgtgagacacatcgagaagtacgtggaccagggcaagagcggcaccagagagctgctgtggagctgggcccagaagaacaagaccatcggcgacctgctgcaggtgctgcaggagatgggccacagaagagccatccacctgatcaccaactacggcgccgtgctgagccccagcgagaagagctaccaggagggcggcttccccaacatcctgttcaaggagaccgccaacgtgaccgtggacaacgtgctgatccccgagcacaacgagaagggcatcctgctgaagagcagcatcagcttccagaacatcatcgagggcaccagaaacttccacaaggacttcctgatcggcgagggcgagatcttcgaggtgtacagagtggagatccagaacctgacctacgccgtgaagctgttcaagcaggagaagaagatgcagtgcaagaagcactggaagagattcctgagcgagctggaggtgctgctgctgttccaccaccccaacatcctggagctggccgcctacttcaccgagaccgagaagttctgcctgatctacccctacatgagaaacggcaccctgttcgacagactgcagtgcgtgggcgacaccgcccccctgccctggcacatcagaatcggcatcctgatcggcatcagcaaggccatccactacctgcacaacgtgcagccctgcagcgtgatctgcggcagcatcagcagcgccaacatcctgctggacgaccagttccagcccaagctgaccgacttcgccatggcccacttcagaagccacctggagcaccagagctgcaccatcaacatgaccagcagcagcagcaagcacctgtggtacatgcccgaggagtacatcagacagggcaagctgagcatcaagaccgacgtgtacagcttcggcatcgtgatcatggaggtgctgaccggctgcagagtggtgctggacgaccccaagcacatccagctgagagacctgctgagagagctgatggagaagagaggcctggacagctgcctgagcttcctggacaagaaggtgcccccctgccccagaaacttcagcgccaagctgttctgcctggccggcagatgcgccgccaccagagccaagctgagacccagcatggacgaggtgctgaacaccctggagagcacccaggccagcctgtacttcgccgaggacccccccaccagcctgaagagcttcagatgccccagccccctgttcctggagaacgtgcccagcatccccgtggaggacgacgagagccagaacaacaacctgctgcccagcgacgagggcctgagaatcgacagaatgacccagaagacccccttcgagtgcagccagagcgaggtgatgttcctgagcctggacaagaagcccgagagcaagagaaacgaggaggcctgcaacatgcccagcagcagctgcgaggagagctggttccccaagtacatcgtgcccagccaggacctgagaccctacaaggtgaacatcgaccccagcagcgaggcccccggccacagctgcagaagcagacccgtggagagcagctgcagcagcaagttcagctgggacgagtacgagcagtacaagaaggagtag

SEQ ID NO: 170970 - protein, 2813 aa, Artificial Sequence
  derived and/or modified sequence
MKLNPQQAPLYGDCVVTVLLAEEDKAEDDVVFYLVFLGSTLRHCTSTRKVSSDTLETIAPGHDCCETVKVQLCASKEGLPVFVVAEEDFHFVQDEAYDAAQFLATSAGNQQALNFTRFLDQSGPPSGDVNSLDKKLVLAFRHLKLPTEWNVLGTDQSLHDAGPRETLMHFAVRLGLLRLTWFLLQKPGGRGALSIHNQEGATPVSLALERGYHKLHQLLTEENAGEPDSWSSLSYEIPYGDCSVRHHRELDIYTLTSESDSHHEHPFPGDGCTGPIFKLMNIQQQLMKTNLKQMDSLMPLMMTAQDPSSAPETDGQFLPCAPEPTDPQRLSSSEETESTQCCPGSPVAQTESPCDLSSIVEEENTDRSCRKKNKGVERKGEEVEPAPIVDSGTVSDQDSCLQSLPDCGVKGTEGLSSCGNRNEETGTKSSGMPTDQESLSSGDAVLQRDLVMEPGTAQYSSGGELGGISTTNVSTPDTAGEMEHGLMNPDATVWKNVLQGGESTKERFENSNIGTAGASDVHVTSKPVDKISVPNCAPAASSLDGNKPAESSLAFSNEETSTEKTAETETSRSREESADAPVDQNSVVIPAAAKDKISDGLEPYTLLAAGIGEAMSPSDLALLGLEEDVMPHQNSETNSSHAQSQKGKSSPICSTTGDDKLCADSACQQNTVTSSGDLVAKLCDNIVSESESTTARQPSSQDPPDASHCEDPQAHTVTSDPVRDTQERADFCPFKVVDNKGQRKDVKLDKPLTNMLEVVSHPHPVVPKMEKELVPDQAVISDSTFSLANSPGSESVTKDDALSFVPSQKEKGTATPELHTATDYRDGPDGNSNEPDTRPLEDRAVGLSTSSTAAELQHGMGNTSLTGLGGEHEGPAPPAIPEALNIKGNTDSSLQSVGKATLALDSVLTEEGKLLVVSESSAAQEQDKDKAVTCSSIKENALSSGTLQEEQRTPPPGQDTQQFHEKSISADCAKDKALQLSNSPGASSAFLKAETEHNKEVAPQVSLLTQGGAAQSLVPPGASLATESRQEALGAEHNSSALLPCLLPDGSDGSDALNCSQPSPLDVGVKNTQSQGKTSACEVSGDVTVDVTGVNALQGMAEPRRENISHNTQDILIPNVLLSQEKNAVLGLPVALQDKAVTDPQGVGTPEMIPLDWEKGKLEGADHSCTMGDAEEAQIDDEAHPVLLQPVAKELPTDMELSAHDDGAPAGVREVMRAPPSGRERSTPSLPCMVSAQDAPLPKGADLIEEAASRIVDAVIEQVKAAGALLTEGEACHMSLSSPELGPLTKGLESAFTEKVSTFPPGESLPMGSTPEEATGSLAGCFAGREEPEKIILPVQGPEPAAEMPDVKAEDEVDFRASSISEEVAVGSIAATLKMKQGPMTQAINRENWCTIEPCPDAASLLASKQSPECENFLDVGLGRECTSKQGVLKRESGSDSDLFHSPSDDMDSIIFPKPEEEHLACDITGSSSSTDDTASLDRHSSHGSDVSLSQILKPNRSRDRQSLDGFYSHGMGAEGRESESEPADPGDVEEEEMDSITEVPANCSVLRSSMRSLSPFRRHSWGPGKNAASDAEMNHRSSMRVLGDVVRRPPIHRRSFSLEGLTGGAGVGNKPSSSLEVSSANAEELRHPFSGEERVDSLVSLSEEDLESDQREHRMFDQQICHRSKQQGFNYCTSAISSPLTKSISLMTISHPGLDNSRPFHSTFHNTSANLTESITEENYNFLPHSPSKKDSEWKSGTKVSRTFSYIKNKMSSSKKSKEKEKEKDKIKEKEKDSKDKEKDKKTVNGHTFSSIPVVGPISCSQCMKPFTNKDAYTCANCSAFVHKGCRESLASCAKVKMKQPKGSLQAHDTSSLPTVIMRNKPSQPKERPRSAVLLVDETATTPIFANRRSQQSVSLSKSVSIQNITGVGNDENMSNTWKFLSHSTDSLNKISKVNESTESLTDEGVGTDMNEGQLLGDFEIESKQLEAESWSRIIDSKFLKQQKKDVVKRQEVIYELMQTEFHHVRTLKIMSGVYSQGMMADLLFEQQMVEKLFPCLDELISIHSQFFQRILERKKESLVDKSEKNFLIKRIGDVLVNQFSGENAERLKKTYGKFCGQHNQSVNYFKDLYAKDKRFQAFVKKKMSSSVVRRLGIPECILLVTQRITKYPVLFQRILQCTKDNEVEQEDLAQSLSLVKDVIGAVDSKVASYEKKVRLNEIYTKTDSKSIMRMKSGQMFAKEDLKRKKLVRDGSVFLKNAAGRLKEVQAVLLTDILVFLQEKDQKYIFASLDQKSTVISLKKLIVREVAHEEKGLFLISMGMTDPEMVEVHASSKEERNSWIQIIQDTINTLNRDEDEGIPSENEEEKKMLDTRARELKEQLHQKDQKILLLLEEKEMIFRDMAECSTPLPEDCSPTHSPRVLFRSNTEEALKGGPLMKSAINEVEILQGLVSGNLGGTLGPTVSSPIEQDVVGPVSLPRRAETFGGFDSHQMNASKGGEKEEGDDGQDLRRTESDSGLKKGGNANLVFMLKRNSEQVVQSVVHLYELLSALQGVVLQQDSYIEDQKLVLSERALTRSLSRPSSLIEQEKQRSLEKQRQDLANLQKQQAQYLEEKRRREREWEARERELREREALLAQREEEVQQGQQDLEKEREELQQKKGTYQYDLERLRAAQKQLEREQEQLRREAERLSQRQTERDLCQVSHPHTKLMRIPSFFPSPEEPPSPSAPSIAKSGSLDSELSVSPKRNSISRTHKDKGPFHILSSTSQTNKGPEGQSQAPASTSASTRLFGLTKPKEKKEKKKKNKTSRSQPGDGPASEVSAEGEEIFC

SEQ ID NO: 170971 - protein, 1745 aa, Artificial Sequence
  derived and/or modified sequence
MKLNPQQAPLYGDCVVTVLLAEEDKAEDDVVFYLVFLGSTLRHCTSTRKVSSDTLETIAPGHDCCETVKVQLCASKEGLPVFVVAEEDFHFVQDEAYDAAQFLATSAGNQQALNFTRFLDQSGPPSGDVNSLDKKLVLAFRHLKLPTEWNVLGTDQSLHDAGPRETLMHFAVRLGLLRLTWFLLQKPGGRGALSIHNQEGATPVSLALERGYHKLHQLLTEENAGEPDSWSSLSYEIPYGDCSVRHHRELDIYTLTSESDSHHEHPFPGDGCTGPIFKLMNIQQQLMKTNLKQMDSLMPLMMTAQDPSSAPETDGQFLPCAPEPTDPQRLSSSEETESTQCCPGSPVAQTESPCDLSSIVEEENTDRSCRKKNKGVERKGEEVEPAPIVDSGTVSDQDSCLQSLPDCGVKGTEGLSSCGNRNEETGTKSSGMPTDQESLSSGDAVLQRDLVMEPGTAQYSSGGELGGISTTNVSTPDTAGEMEHGLMNPDATVWKNVLQGGESTKERFENSNIGTAGASDVHVTSKPVDKISVPNCAPAASSLDGNKPAESSLAFSNEETSTEKTAETETSRSREESADAPVDQNSVVIPAAAKDKISDGLEPYTLLAAGIGEAMSPSDLALLGLEEDVMPHQNSETNSSHAQSQKGKSSPICSTTGDDKLCADSACQQNTVTSSGDLVAKLCDNIVSESESTTARQPSSQDPPDASHCEDPQAHTVTSDPVRDTQERADFCPFKVVDNKGQRKDVKLDKPLTNMLEVVSHPHPVVPKMEKELVPDQAVISDSTFSLANSPGSESVTKDDALSFVPSQKEKGTATPELHTATDYRDGPDGNSNEPDTRPLEDRAVGLSTSSTAAELQHGMGNTSLTGLGGEHEGPAPPAIPEALNIKGNTDSSLQSVGKATLALDSVLTEEGKLLVVSESSAAQEQDKDKAVTCSSIKENALSSGTLQEEQRTPPPGQDTQQFHEKSISADCAKDKALQLSNSPGASSAFLKAETEHNKEVAPQVSLLTQGGAAQSLVPPGASLATESRQEALGAEHNSSALLPCLLPDGSDGSDALNCSQPSPLDVGVKNTQSQGKTSACEVSGDVTVDVTGVNALQGMAEPRRENISHNTQDILIPNVLLSQEKNAVLGLPVALQDKAVTDPQGVGTPEMIPLDWEKGKLEGADHSCTMGDAEEAQIDDEAHPVLLQPVAKELPTDMELSAHDDGAPAGVREVMRAPPSGRERSTPSLPCMVSAQDAPLPKGADLIEEAASRIVDAVIEQVKAAGALLTEGEACHMSLSSPELGPLTKGLESAFTEKVSTFPPGESLPMGSTPEEATGSLAGCFAGREEPEKIILPVQGPEPAAEMPDVKAEDEVDFRASSISEEVAVGSIAATLKMKQGPMTQAINRENWCTIEPCPDAASLLASKQSPECENFLDVGLGRECTSKQGVLKRESGSDSDLFHSPSDDMDSIIFPKPEEEHLACDITGSSSSTDDTASLDRHSSHGSDVSLSQILKPNRSRDRQSLDGFYSHGMGAEGRESESEPADPGDVEEEEMDSITEVPANCSVLRSSMRSLSPFRRHSWGPGKNAASDAEMNHRSFSLEGLTGGAGVGNKPSSSLEVSSANAEELRHPFSGEERVDSLVSLSEEDLESDQREHRMFDQQICHRSKQQGFNYCTSAISSPLTKSISLMTISHPGLDNSRPFHSTFHNTSANLTESITEENYNFLPHSPSKKDSEWKSGTKVSRTFSYIKNKMSSSKKSK

SEQ ID NO: 170972 - protein, 38 aa, Artificial Sequence
  derived and/or modified sequence
MKLNPQQAPLYGDCVVTVLLAEEDKAEDDVVFYLVFLG

SEQ ID NO: 170973 - protein, 179 aa, Artificial Sequence
  derived and/or modified sequence
MKLNPQQAPLYGDCVVTVLLAEEDKAEDDVVFYLVFLGSTLRHCTSTRKVSSDTLETIAPGHDCCETVKVQLCASKEGLPVFVVAEEDFHFVQDEAYDAAQFLATSAGNQQALNFTRFLDQSGPPSGDVNSLDKKLVLAFRHLKLPTEWNVLGTDQSLHGENLYDLQTHFKFVIFLLFF

SEQ ID NO: 170974 - DNA, 3177 bp, Artificial Sequence
  derived and/or modified sequence
atgtcatcctctaagaagtcaaaggaaaaagaaaaggagaaagataagatcaaggagaaggaaaaggactctaaagacaaggagaaggacaagaaaacagtcaatgggcacacctttagttcaattccagtggtcgggcccatatcctgttcacaatgtatgaagccattcaccaataaggatgcctatacctgtgccaactgttcggcatttgtccacaagggttgcagagagtctctggccagctgcgccaaggtcaaaatgaagcagcctaagggatcattgcaggcacacgacacttctagcctccccacagtcattatgcgtaataaaccctctcagccaaaggaacggcctcgctccgccgtgctattggtcgacgaaacagccacgaccccaatctttgctaaccgacgttcgcaacaaagcgtttccctatccaagtcagtgagcattcaaaacatcaccggggtggggaacgatgaaaatatgtccaacacttggaagtttctgagccacagtaccgactcacttaataagatctccaaggtgaatgagtcgacagagagtctgaccgacgaaggcgtcggaacagacatgaatgaaggacagttattgggagactttgaaattgaaagcaaacagctcgaagccgaatcttggagccggatcatcgactcgaagttcctgaaacagcaaaaaaaagatgttgtgaaacgacaggaagttatctacgagttgatgcagacagaatttcatcatgttcgcacgctaaagatcatgtctggagtatatagtcagggcatgatggccgatctgctgtttgagcaacaaatggtagagaaactctttccctgtttagacgagttgattagtatacacagtcagttttttcaaagaatactggagaggaagaaggaatctctcgtggacaaatcagagaagaacttcctcatcaagcgcatcggcgacgtgctggtgaaccagttctctggtgagaacgccgagcgcctcaagaagacttacgggaaattttgcggccagcataaccagagcgttaattactttaaagacctttacgccaaagataaaagatttcaggcctttgtgaagaaaaagatgagcagcagcgtggtaagacggcttggaatcccggaatgtatcctcttagtaactcagagaatcacaaaatacccagtgttgttccagaggatcttacagtgtacgaaggacaacgaggtggaacaggaggacctcgcccagtccctgtccctcgtaaaggatgttataggggctgtagactcgaaggttgcctcatatgagaagaaggtgcgcctgaacgaaatttatactaaaacagattcaaagtccattatgagaatgaaatctggccagatgtttgcaaaggaggatctcaaacggaagaagctagtgagagatggctctgtctttctgaaaaatgccgccggaagactgaaagaggttcaggctgtgttgttgactgacatcctggtgttccttcaggagaaagatcagaagtacatctttgctagcctggaccagaagtctacagtaatcagccttaaaaaacttatcgtccgagaagtcgctcatgaggaaaaaggattgttcctgatctctatgggaatgactgaccctgagatggtggaagtccacgccagctcaaaggaagagcgaaattcctggatccagattatccaagatactattaacacattgaacagagacgaggatgagggtatcccgtctgagaatgaggaagaaaagaagatgttagacacacgagcccgcgaactcaaagaacagttgcaccagaaggatcagaaaattttgctcttgttggaagagaaagagatgatattccgagacatggctgagtgttcgactccccttcctgaggactgcagtcccacacatagccccagggtgctgttcagatcaaacacggaggaggccctgaagggcggtccactgatgaagtccgctatcaatgaagtagagattctgcagggacttgtgagcgggaacctcggcgggacccttgggccgacggtttcctcacccattgaacaggatgttgtcggccctgtatctcttccacgcagggctgaaacattcggtgggttcgactctcatcagatgaatgcctccaagggcggagaaaaagaggagggggatgacggccaggacctgagacggacggagagcgacagtggactgaagaagggcggcaatgcaaacctagtttttatgttgaagcgcaattctgagcaggtggtgcagtctgtagtacacctctacgaattactctcagccttacagggcgtggtcctccagcaagatagttatatagaagatcagaaactagtgctgtcagagagagccctgactcgttctctatcacgcccttcctctctcatcgaacaggagaaacagcggtccctggaaaagcagcggcaggacctggctaacctgcagaagcagcaagcgcagtacctggaagaaaaaagacggcgagagcgggagtgggaggcgcgcgaacgggagctccgggagcgagaggccttgctcgcacagagggaggaagaagtacagcaaggtcaacaggacctggaaaaagagcgggaagagcttcagcagaaaaaaggtacctaccagtacgacctggaaaggctacgggcggcccagaagcagcttgaacgagagcaggagcagctgcggagggaggccgagcggctgagccagagacagaccgaacgggatctgtgccaagtctcgcacccccacacaaagctcatgcgaatcccctccttttttcccagtcctgaggagcccccttccccaagtgcgcccagcatagccaagtccggcagtctggactcggagctgagcgtatcccccaagagaaacagcatcagcaggacacacaaggacaaggggccctttcatatactgagttccacatcccaaacaaacaaaggtcccgaaggtcagtcgcaggcgccagcaagtacctccgcttccacaagactcttcggcctgacaaagccaaaagagaagaaggaaaaaaaaaaaaagaacaaaaccagtcggtcccaacctggtgacggcccagccagtgaggtgagcgccgaaggtgaagaaattttctgctag

SEQ ID NO: 170975 - DNA, 8442 bp, Artificial Sequence
  derived and/or modified sequence
atgaagcttaatccacagcaggcaccactgtatggggactgcgtcgtcacagttcttttggctgaagaagataaggcagaagacgatgttgtgttctacctggtgtttctcgggtctacactcagacattgtaccagcactcgcaaggtcagctcagataccctggagaccattgccccagggcacgattgctgtgagactgtgaaggtgcagttgtgtgccagtaaggaaggtctgccagtattcgttgtggctgaggaggatttccactttgttcaggatgaagcctacgacgctgcacagttcctcgccacatcagccgggaaccagcaagcgctgaactttacacgattcctggaccagtcagggcccccatccggggacgtcaactccctggacaagaaacttgtgctagcgtttcggcatctgaagctgccaactgagtggaacgtcctgggaacagaccagtcactacatgacgctggtccccgcgaaaccctgatgcacttcgccgtgcggttgggattactgaggttgacttggtttctcctgcagaagcctggaggccgaggtgccctatccattcacaatcaggaaggcgcaacgccggtctcacttgccctcgagcgtggttatcacaaactgcatcagcttttaactgaggaaaacgccggagagccagactcttggtcatccctcagctacgagattccctatggagactgctccgttcggcatcaccgcgagctggacatatacacactgacctctgaatccgatagccaccatgagcaccccttcccgggggacggctgcacgggccccatattcaagctaatgaacattcagcaacagctgatgaagactaacctaaagcagatggactcactgatgcctctgatgatgacggctcaagatccctcctcagctccggaaacagatggccaatttctaccttgcgcacccgagccgactgacccgcaacgcctgagctcgtcagaggagaccgagtctacacagtgctgccccggtagcccggttgcacagaccgaaagcccatgcgacctgtctagtatcgttgaggaggagaatactgaccggtcttgcaggaaaaagaataaaggcgtggaaagaaaaggtgaagaagtcgagccagcccctattgtggattcaggcactgtctccgaccaagactcttgcctgcagtccctgcccgattgcggagttaaaggcactgaggggctatctagctgcgggaaccggaacgaagagactggaacaaagtcaagcggtatgccaaccgatcaagaatctctgtccagcggcgacgcggtcttacaacgcgacctcgtgatggaaccaggaaccgcccagtattcatctgggggggagcttggtgggataagtaccaccaatgtgtccacaccggacacagctggggagatggagcacggactgatgaatcctgatgccactgtctggaagaatgtactgcagggtggagagtccaccaaggagcgatttgaaaattctaacatcgggaccgctggggcaagtgatgtgcacgtgacatctaaaccagtcgataagatcagcgtgcctaattgtgcacccgctgccagcagcctggatggcaacaagcccgcagaaagctccttggctttcagcaacgaggaaacttccaccgagaagacagcagaaaccgaaaccagtcgatcgcgagaggaatccgcagacgccccagttgatcagaacagcgtggttattccagccgccgctaaggataaaatcagcgacggactggaaccctatactctgctcgccgccggtattggtgaggcaatgtcgccttctgacctcgccctcctggggctcgaggaagatgtgatgccacaccagaactctgagacaaatagctctcacgcacagagccagaagggcaagtcatctcctatctgctcaacaactggcgacgacaaattgtgtgccgattctgcctgtcagcagaataccgttacatccagcggcgatttggtggcaaagctgtgtgataacattgtctccgagtctgagtccacgacagctcggcaaccctctagccaggaccctcccgatgccagtcattgtgaagatccacaagctcataccgtcacaagtgacccagtgcgcgatacacaggagagagccgatttctgtccattcaaagtggttgataacaaaggtcagcgcaaggatgtgaaactggacaaacctctgacgaacatgctggaagtggtttcccacccacaccctgtcgtgcctaaaatggagaaggagctggttcccgaccaggccgtgattagtgattcaacttttagtttggctaactctcccggaagcgaatccgtgaccaaagatgacgctcttagtttcgtgccaagccagaaagagaagggaacagctacaccggaacttcatacagcaacggactatcgtgacggacccgacggcaactccaatgagccagacacccggcctctggaagatcgcgcggtgggactgagtacttccagtacagccgccgagctgcagcatgggatggggaatacttccctgaccgggctggggggggagcacgaggggcctgctccgccagctatccccgaggctctcaacatcaagggaaatacggattctagcctgcaaagcgtgggcaaggcaacgctagccctggattccgtcttgaccgaggaaggaaagctccttgtcgtgtctgagtcctccgctgctcaggagcaggataaggataaggccgtgacatgctcaagcataaaggagaatgctctgagttccgggaccctccaagaagaacagcgaaccccccctccggggcaagatacgcagcagttccacgagaaatctatctctgccgactgcgcaaaagacaaggccctccagttatccaattcacctggggcttctagcgctttcctgaaggccgaaaccgagcataataaagaggtagctccacaagtcagccttctgactcagggaggcgccgcccagagtctggtaccgcccggggcctctctcgcaaccgaatcaaggcaagaggctttgggggccgagcataacagttccgctttactaccttgcttactgccagacggctctgacggcagtgatgccctgaattgttcacagccctctcccctggatgtgggcgtcaagaatacacagtctcaaggaaagacatcagcctgcgaggtgtcaggcgacgtgaccgtggatgtgaccggagttaacgccctgcaagggatggcagaaccccggagagagaacatctcccataacacacaagacatactgatcccaaacgtgctactatcccaggaaaagaacgccgtgcttggactgccagttgcactacaggataaagccgtgaccgatccacaaggagtgggcacccccgagatgattccacttgactgggagaaaggtaagctggaaggcgccgaccactcctgcacaatgggtgatgctgaagaagcccagatcgatgatgaagcgcaccccgtgcttctccagcccgtcgccaaggaactccccaccgatatggagcttagcgcccatgatgacggggcgcccgccggcgtccgcgaggtgatgcgggctcctccctccgggagagaaaggagtactccaagtcttccttgtatggtgagcgcacaggacgcccctttgccaaagggagccgacttgattgaagaggctgccagtcgaattgttgacgcagtgatcgagcaggtgaaggctgctggcgcactattaacggaaggcgaggcctgtcacatgtccctttctagtcctgagctggggcccctcaccaagggactcgaaagcgcctttacggagaaggtgtcaacctttccccccggagagtctctcccaatgggctcaacccctgaggaggccactggcagcttggcaggctgcttcgcaggccgggaggagcccgagaagatcatcctcccagtacaaggccctgagcccgcagccgagatgcctgacgtgaaagctgaggacgaggtagattttcgagcctcatccattagtgaggaggtcgccgttggatcgatcgcagccactctgaaaatgaagcaagggcccatgacccaggctatcaaccgtgaaaattggtgtaccatagaaccgtgtcctgatgccgcatcccttctcgcgagtaagcagtctcccgagtgcgagaatttcctggacgtgggactaggtcgagaatgtacttcaaaacagggcgtcctgaagcgagaatccggaagtgacagcgacctcttccacagtccttccgatgacatggactcaattatatttcctaagccagaggaagaacacctcgcctgcgacattacaggctcttcttcttccacagatgatactgcttcactcgatagacattcaagccatgggagtgacgtcagcctgtcacagatcttgaagcccaaccgcagcagagaccggcagtctctggatgggttttactcccatggcatgggggccgagggccgcgagtccgagtctgagccagccgacccaggcgacgtggaggaggaagaaatggactccattaccgaggtgcctgcaaactgctcagtcctgcgcagctccatgaggtctttgagccccttcagaaggcactcctggggccccgggaagaatgcagcatctgacgctgagatgaatcaccgttcgtctatgagagtactgggagacgtggtacggagaccgccgatacacaggcggtcctttagtcttgaaggcttgactgggggagccggcgtgggcaataagccaagcagttctctggaagtgagtagtgctaatgcagaagagctgagacacccgttctctggggaggaaagggtcgactctcttgtgtcattgtcagaggaagacctcgagagcgaccagagagagcataggatgttcgatcagcaaatctgccatagatcgaaacagcagggcttcaattactgtacatcggccatcagctccccattaaccaaatcaattagtctcatgacaatcagccaccctgggctcgataactctcggccctttcatagcaccttccataacacctctgccaatctcaccgagtcaattacagaggaaaattacaactttctcccgcacagccctagtaagaaggactccgagtggaaaagtgggactaaggtctcacggacattctcatacatcaaaaataagatgtcttcctccaagaaatctaaagaaaaggagaaagagaaagacaaaattaaagagaaagagaaagattctaaagataaggaaaaagacaaaaaaacggttaatggccacacattcagctctattcccgtcgtggggcctatatcctgcagtcagtgtatgaagcctttcactaataaagatgcttatacttgtgctaactgctcagcattcgtccataaggggtgtagagagagtctggcatcatgcgcaaaagtcaagatgaaacagcctaagggtagcttgcaggcgcacgacacatcctccctgcccactgtgattatgagaaataagccatcccagccaaaggagagacccagatccgcagtccttctggtggatgagacagctaccacccccatatttgcgaacagacgatctcagcagagcgttagtctcagtaagtcagtcagtatacaaaatatcaccggagtcgggaacgatgaaaacatgtccaacacctggaaatttctgagccattcaacagactccctcaacaaaatcagtaaggtcaatgagtctacagagtcgctgacggacgaaggggtgggcaccgatatgaacgaaggccaacttcttggggatttcgagattgaatcaaaacagttagaagcagagtcctggtcaaggattattgattctaaattcctgaaacaacagaagaaagacgtagtcaaaagacaggaagtcatctatgagcttatgcagaccgagtttcaccatgttaggaccctcaagattatgagtggggtatattcccaggggatgatggccgatctcctgttcgagcagcagatggttgagaagctgttcccttgcctggacgaactgatttctattcactctcagttcttccagaggattctggaacgcaagaaagagtctctggtagacaagtcggagaagaactttctgatcaagcgcattggggacgtgctcgtgaaccaattcagcggcgaaaatgcagagcgtttgaaaaagacctatggcaagttctgtggccaacacaatcagtccgttaactacttcaaggatctgtatgccaaagataagaggttccaagcctttgtgaagaaaaagatgagctcctcagtcgtgaggagattgggcattccagaatgcatattgctcgtcacacagagaatcaccaagtaccctgtgctgtttcagaggatacttcagtgtacgaaagacaatgaggtcgaacaggaagacctcgcacagagcttgtccctcgtgaaagatgtaattggcgccgtggattcgaaagtggcctcctatgagaaaaaagtgaggttaaatgaaatttatacaaagacagatagtaagagcataatgaggatgaagtccggacagatgtttgctaaggaggacctcaagcgcaagaaattagtaagggatggcagtgtttttctgaagaacgcggccggtcggcttaaggaggtgcaggcggtgctgcttacagacatcctcgtgttcctccaggaaaaggaccagaagtacatcttcgcatcactcgaccaaaagtctaccgtgattagcttaaaaaaactgattgtgagggaggtggcacatgaggagaaaggcctctttctgatttcaatgggtatgaccgaccccgaaatggtagaggtgcacgcatctagtaaagaagagcggaacagttggattcaaatcattcaagacaccatcaacacattgaacagagacgaagacgaaggtatccccagcgaaaacgaggaagagaagaagatgctcgacacccgggcgagggaacttaaggagcaattacaccagaaagatcagaaaattctcctgctgctggaagaaaaggagatgatttttcgggatatggcagagtgctctactcccctccctgaagattgctcccccacgcatagtccacgcgtgctgtttcggtctaatacggaagaagctttgaaaggcgggcctcttatgaaatctgcgattaacgaggtcgagattctccagggccttgtttcaggcaacctggggggcacattaggtcccaccgtgagctccccaatagagcaggacgttgttggccccgtaagtctaccacgcagggcagaaactttcggtggatttgattctcaccagatgaacgcctccaagggaggagaaaaagaagagggagacgacgggcaggacctgcgacgcaccgagtctgactccggacttaagaagggcggcaacgctaacctagtcttcatgctgaaacggaatagtgaacaggtcgttcaaagtgtcgttcatctctacgaactgttatccgctcttcagggcgtcgttctgcagcaggacagctacatcgaagatcagaagttggtgttatctgagagggccctgactagaagcctgagccggccctcgagtctgattgaacaggaaaaacaacggtctctggaaaagcagcgccaggatctggctaacctacagaagcagcaggctcaatacctcgaagagaaacgtcgacgcgaacgggaatgggaagccagggaacgagaactgcgggagcgggaagccctgctggcacagagagaggaagaggtacagcaggggcagcaggaccttgagaaagagagggaggaactacagcagaagaaggggacctaccagtacgacctcgaacggctgcgcgctgcgcagaaacaactcgaacgagaacaggagcagttgcggagagaagcagaacgactgagtcaacggcagactgagcgcgatctttgccaggtttcccatcctcatactaaactaatgagaatacctagcttctttccgagtccagaagagcccccctcacctagcgccccgtctatagccaagtccggatccctagattctgaactttctgtgagtcccaaaaggaactctatcagcagaacacataaagacaagggtccttttcacatcctgagtagcacttcacaaaccaacaaaggtcctgagggacagtcgcaggctcctgcctctacatcagcctccacgcggctctttggactgacgaagcctaaggagaagaaggagaaaaaaaagaagaataagaccagtcggagccagccaggcgacggccccgcctctgaggtgagcgctgaaggcgaagaaattttctgctag

SEQ ID NO: 170976 - DNA, 8379 bp, Artificial Sequence
  derived and/or modified sequence
aagctgctggagaagcagccacctattgaaggtgactgtgtggtgaccgtcctgcttgccgaggaagacaaagccgaagatgacgtagtgttttacctggtcttcttaggctctacactgagacattgtacctctacccggaaagttagcagcgatacattagagaccattgcacccggccacgattgctgcgagacagtgaaggtgcagttatgtgcgtccaaggagggccttcccgtatttgtggtcgccgaggaagactttcatttcgttcaggatgaagcctacgacgctgctcagtttctcgctacctctgctggaaaccaacaggccctgaattttaccaggttcctcgaccagtccggcccgccctctggggatgtcaactcgctggacaagaaactggtgttggcttttcggcacctgaaacttcctaccgagtggaacgtgttaggtactgaccagagtctgcacgatgctggacctagggagaccctcatgcacttcgccgtaaggctggggctactgcgcctaacgtggtttttactacagaagcctggagggcggggagccctttcaatccataaccaggagggggccaccccagtttccttggccttagaacgaggttaccataaactccaccaactactgactgaagaaaacgctggagagccggactcctggtcaagcctttcctatgaaattccttacggcgactgctctgtgagacatcatagagagcttgacatctataccctaacaagcgagtctgacagccaccacgaacacccattcccgggcgatggctgcaccgggcctattttcaaacttatgaacattcaacagcagttgatgaagaccaacctgaaacaaatggacagcttgatgccattgatgatgacagcgcaagacccatccagtgcgcccgaaaccgacggtcagtttttgccttgcgctcctgaacccaccgatccccagagactctcatctagcgaagagaccgaatccacccagtgctgccctggcagtcctgtcgcccaaacggagtcaccttgtgatttaagttcgattgtggaggaagaaaataccgaccgttcatgccgtaaaaagaacaaaggagtcgagcgaaaaggcgaggaagtcgaaccagctccgatcgtggacagtggcactgtgtcggaccaagatagttgcctccagagtctccccgattgcggcgtgaagggaaccgaggggctctctagctgtggcaaccgcaacgaggagaccgggactaagtcctctggcatgcctacagatcaggagtccctgtcttcaggagatgctgtcctgcaacgcgacttggtgatggagcctgggaccgcgcaatatagctccggaggagagctgggcggaataagcacaaccaacgtttctactccggacacggccggggaaatggaacacggtttgatgaatccagacgcaactgtctggaagaacgtgctgcagggcggcgagtcgactaaggaaagatttgagaatagtaatatcggcactgcgggagccagcgatgtacacgtaacctctaagcccgtggataagatctccgtccccaactgcgcccctgccgcatcctccctggatggcaacaaaccagctgagtcgagcctcgccttcagcaacgaggaaacctcaactgaaaagaccgctgaaaccgaaacatctaggtctcgagaagaaagtgctgacgccccggttgatcagaattccgtggtaatcccagccgccgccaaagataagatcagtgatgggctcgagccttacactctccttgccgctggtataggagaagctatgtcgccgtccgatctggccctcctaggtctggaggaagatgtgatgcctcaccagaatagtgagaccaattcctctcacgctcagtcccagaaaggcaaatccagccccatttgctcaaccaccggtgacgacaagttatgcgctgattccgcctgccagcaaaacaccgttacatctagtggcgacctcgtggctaagctctgcgacaacatcgtatcagaaagtgagagtaccactgccaggcagcccagttcacaggatcccccggatgcgtcacactgcgaggatcctcaggcacatacggtcaccagcgaccctgttcgggacacccaggaacgtgccgatttctgcccttttaaggttgtggataataaaggtcagagaaaggacgtgaagctggacaagccgctgacaaacatgctggaagtagtgagtcacccgcacccagtggtgccgaaaatggaaaaagagctagtgcccgatcaggcagtcatctcagattccactttcagcctcgccaacagtccaggatcagagtcggtgaccaaggatgacgctctgagctttgtacctagccaaaaggaaaaagggaccgctacacctgagcttcatacagctacagactacagggacgggccggacggaaattctaacgagccggacactaggccgctcgaggatcgcgcggttggccttagtacttcctccaccgctgccgagcttcaacatggcatgggcaatacttcactcaccggactcggtggagaacatgaggggcctgcgccaccagcaattcccgaggcactgaacatcaagggaaataccgacagcagcctgcaatccgtaggaaaggccacacttgccctcgatagcgtgttgaccgaagagggcaaactactggtggtgtccgaaagcagtgctgcccaggagcaggataaagacaaagccgtgacatgttcatcgatcaaggaaaacgctctgtcctccgggacgttacaagaagaacagcggaccccaccacctgggcaggacacacaacagtttcacgagaagtccattagcgccgattgtgcgaaagacaaggccttacagctgtcgaattcgccaggcgcctcctcggccttcctaaaggccgaaacagagcacaataaggaggttgcccctcaggtgtcactgcttactcaagggggagccgctcagagtttggtgccacccggcgcgtctctcgctactgagagtagacaggaggcccttggagcagagcacaacagttccgcccttctgccttgtctgctgccagacggtagcgatggcagcgacgcactcaattgttctcagccatcccctttagatgtgggcgtgaaaaacacccagagccagggcaaaacttcagcgtgcgaggtgagcggcgatgtgactgtggatgtgaccggggtgaatgctctccaaggtatggccgagccccggagggagaacatcagtcacaatactcaggatatcctgatccctaatgtgttgttgagtcaggagaaaaatgcagtgttgggactgcctgtggccctgcaagataaggcagttaccgatcctcagggcgtggggaccccagaaatgatccccctggattgggaaaagggcaaactagagggcgcagatcactcctgcacaatgggggatgccgaggaggcccagattgacgatgaagcgcatcctgtgctgctacagcctgtggctaaagagctgcccactgacatggaactgtccgctcacgacgacggtgctcccgccggggtgcgagaggttatgcgagcccctccgtctgggcgggagcgcagtactccttccctcccgtgtatggtctctgcccaagatgcccctctccccaagggcgccgaccttattgaggaagcagccagcaggattgtggatgccgtgatagagcaggtcaaggcagccggagctctgctcaccgagggggaagcatgtcatatgtcactgtccagtccggaactcggccctctgaccaaggggctggagtccgccttcaccgagaaggttagcactttccctcctggagagtcactgcctatggggtccaccccagaagaagccacaggaagcctcgccggatgctttgccggacgggaggagcctgagaaaattatcttgcccgtgcaggggcctgagccggccgccgaaatgccagatgttaaagccgaggacgaagtcgactttcgcgccagtagtatctcagaggaggtggcagtcgggagtatcgcagctacactcaagatgaaacagggacctatgactcaggcgataaatcgcgagaattggtgcactattgaaccttgtcccgatgccgcctccctgctagcctctaaacaaagtcccgaatgcgaaaacttcctggacgtggggcttggtagagagtgtacgagtaagcagggggtgctgaaacgcgagagcggaagcgactctgatctgttccacagtccctctgacgatatggactctattatcttccctaagcccgaggaggaacatctagcctgcgatattactggatcgtcgtctagcacagatgacacagcgagcctggatagacactctagccacggctcagatgtgagcctctcgcagatactcaagcctaacagatccagagatagacaatctcttgacggattttattcccacgggatgggtgccgaaggtagggagagtgagtccgaaccagcagaccccggtgatgttgaagaggaggagatggacagtataactgaggtgcccgctaattgcagcgtactccgctcatccatgagatccttatctccttttcgacgacatagctgggggccggggaagaatgccgcctccgacgctgagatgaatcaccggagcttttccctcgagggactgacaggaggcgcaggggtgggtaataagccatcaagttctttagaggtatcgtcagcaaacgctgaggagcttagacatcctttttctggagaggagcgggttgattccttagtcagtttaagtgaggaagacctcgagtctgaccagcgcgaacatcgcatgttcgaccagcaaatctgtcaccgttctaaacagcagggcttcaactactgcacttctgcaatttcatcacctctcacaaagtcaatcagtctgatgactatcagccacccggggctagataacagtcggccatttcattctacctttcataacacttcagctaacctaaccgagtcaatcaccgaagagaactacaatttcctgccacatagtccctctaagaaagactcagagtggaagagtggtacgaaggtgagcagaactttctcatatatcaagaacaagatgtcgtctagtaagaaatccaaggagaaggagaaagagaaggacaaaatcaaagagaaggagaaagactcaaaagacaaggaaaaagataaaaagaccgtgaacgggcatactttttcatccatcccagtcgttggccctataagttgtagccagtgcatgaaacccttcactaataaagatgcctacacgtgcgccaactgctccgccttcgtgcataaagggtgcagggagagtcttgctagctgcgccaaagtaaagatgaagcaacccaagggaagtttgcaggcacatgatacatctagtttgcctacagtgatcatgagaaacaaacccagccaaccaaaggagaggcctaggagcgctgtgctgcttgtggacgagactgccactactccaatttttgccaaccggcgctcacagcagagtgtctctttgtccaagtcggtcagtattcagaacattactggagtgggaaatgatgagaatatgtctaacacatggaaatttctgagtcactctactgatagtttaaataagatcagtaaagtgaatgaatccactgaatctctcaccgacgagggcactgacatgaacgagggacagctgctgggagatttcgagattgagagcaaacagctggaggccgaatcctggtcccgaatcatagatagcaaattcctgaagcagcagaaaaaagacgtcgttaagagacaggaggtaatctatgagcttatgcaaactgaatttcaccacgttcgtactctgaagattatgagtggagtctactctcaggggatgatggccgacctgctcttcgaacaacagatggtggagaagctgttcccttgtcttgacgagctgatatccatccactctcagttcttccaaaggatcctcgaacgcaaaaaagagtccctagttgataagtctgagaagaacttcctgatcaagcgcataggcgacgttttggtgaatcagtttagcggagagaatgccgagcgactgaagaagacttacggcaaattttgtggccaacacaatcagtctgtcaattactttaaggacctgtatgctaaggacaagcgattccaggcatttgtaaagaagaagatgtcttcttctgttgtgaggcgactaggtattccagagtgtatcttgctggtaacacagcgtataacaaaatacccagtgttgtttcagcgaattctccagtgcaccaaggataacgaggttgagcaagaggatcttgcccagtcattgtcgctggtgaaggacgtgataggagccgtggatagcaaagtggcatcttacgaaaaaaaggtgcgcctgaacgagatttacactaagacagattcaaaaagtattatgcgaatgaaatctggccagatgttcgctaaggaggacttaaaacggaaaaagcttgtcagagacggtagcgtgttcttgaagaacgccgcagggcgcctgaaggaagtgcaggcagtactgctcaccgatatcctcgtcttcttacaagaaaaagaccaaaagtatatctttgctagtctcgaccagaagtcgacagttatcagcctcaaaaagctgatagtgcgggaggtagcccatgaggaaaaaggcctgttcctaatcagtatgggaatgactgatcccgaaatggtggaagttcatgcttcctctaaagaagaaaggaactcgtggatccagattatccaagatacgatcaataccctcaacagggatgaggacgaggggatcccctcagagaacgaggaggagaaaaagatgctggacactagggcccgcgaattgaaggaacagcttcaccagaaagatcagaagatcttactgctcctcgaggagaaagagatgatctttcgagatatggctgaatgttcaacacctctccccgaagattgttcccccactcacagcccaagggttctatttagatcaaacaccgaggaagccttgaaaggaggtccactgatgaagtctgcgattaatgaagtggaaatcctgcagggactggtgtcaggtaatctaggtgggaccttgggcccaactgtgtcaagtcctatcgagcaggacgtggtcggtcccgtttctctgcctaggcgcgcagagacctttggaggcttcgactcgcaccagatgaatgcttccaaaggaggggaaaaagaggaaggggatgatggccaggacctgcggcgtaccgagagtgactctggattgaagaagggcggaaacgctaacttggtcttcatgctgaagcgaaactcagagcaggttgtgcagtcggtcgttcatctttatgaactgctgagtgctctccagggagtcgttcttcagcaagattcgtacatcgaggaccagaagctggtacttagcgagcgtgctcttacccggtcactctcaaggccgtcaagcttaatcgaacaggagaagcagcggtctttggagaaacaaagacaagacttagccaacctgcagaagcaacaggctcagtatctggaggaaaaacgcaggcgggaacgggaatgggaggctcgagaaagagagctgagagaacgagaggcactcttggcccagcgcgaggaagaggtgcagcagggccagcaagacctcgagaaggaacgggaggaattgcagcagaaaaaaggaacctatcagtacgaccttgagagactgagagcagctcagaaacaattggaacgggaacaggaacagctgaggagagaagcagagaggctttcccagcgccagaccgagcgggatttgtgtcaggtgtctcatccccacaccaaactgatgcgcatcccctctttctttccttccccggaggagccaccaagcccctctgcaccttcaattgcgaaaagcggcagcctggattccgaactgagtgtgagtccgaaacgcaacagcattagccggacacacaaagacaaggggcccttccatatcctttcttccacttcgcaaaccaataagggtcctgaaggacagtcgcaggccccagctagcacttccgcgtccacacggttatttggcctcacaaagccaaaagagaagaaggaaaagaagaaaaagaataagactagtaggtctcagcccggcgacgggcctgccagtgaggttagtgccgagggggaggaaatcttctgttag

SEQ ID NO: 170977 - DNA, 5238 bp, Artificial Sequence
  derived and/or modified sequence
atgaagctgaatcctcagcaggcacccctctacggggattgcgtggtgactgtcctgctggccgaagaagacaaggccgaagatgatgtggtgttctatctggtcttccttggatcaaccctgagacactgcacatccactcggaaggtctcctctgacaccctggagacaatcgccccaggtcacgactgctgcgaaaccgtgaaagtgcagttgtgtgcaagtaaggaagggctgcctgtgttcgttgtcgcagaggaagacttccacttcgtccaagatgaagcctatgatgccgctcaatttctagcaacatctgctggaaatcagcaagcactgaatttcacccggttcctcgaccagtcaggtccaccttccggtgatgtgaactctctggacaagaaactggtgctggcctttcgccacctgaaactcccaacagagtggaatgtgctgggcacagaccaaagccttcacgacgctgggccgcgggaaacattgatgcacttcgccgtaaggctgggcctgctgcgactgacctggttcctgctccagaaacctggagggcggggcgccctctccatccataaccaagagggagcaacaccagtgtctctggcattagagcgggggtatcataaacttcaccaattgctgaccgaagaaaacgcaggagagccagactcatggagctcgctgtcctacgagattccatacggcgactgtagtgtccgccatcacagggagctggatatctacacattaactagcgagtccgattcgcaccatgagcatcccttccccggcgacgggtgcaccgggcctatctttaaactcatgaacatccagcaacaactgatgaagactaatctgaagcagatggattcactcatgccgctaatgatgactgctcaggatccttcatccgcccccgagaccgacggtcaatttctgccttgtgcccctgagccaaccgatcctcagcgactgtcttccagcgaggagactgagagtactcagtgctgccctgggtccccagtggcccagacagaatccccctgcgaccttagctcgattgtcgaagaggaaaatacagacagatcgtgccgaaagaaaaacaagggagtggagcggaagggcgaagaggtggaacctgctccgatcgttgactccggcacagtctctgatcaggacagttgcctgcaaagtctcccggactgcggtgtgaaagggaccgaaggcttgagctcttgcggaaaccgcaacgaggagacaggcaccaaatccagtggaatgccaacagaccaggagtctcttagcagtggagatgcggtgctgcagagggatctagtcatggaacctggtaccgcacagtactcctctggcggagagctcggggggatttctaccaccaatgtgagtacccccgacacagccggagaaatggagcacggcctgatgaatccagacgccactgtctggaaaaacgtcttgcagggcggagagtctactaaggaaagattcgaaaactcgaacatcggtaccgcgggcgcctccgatgtgcacgttacttccaagccagttgacaaaatctctgtgcccaactgcgcaccagccgcttccagccttgatggaaacaaacctgcggaaagcagcctcgccttctcaaatgaagaaaccagcaccgagaagactgcagagaccgaaacatctagaagtcgggaggagagcgccgatgccccagttgaccagaactcggtggtcataccagcggcagctaaagacaaaattagtgacggcctcgaaccgtacacactgctggccgcaggcattggggaagctatgtctccttccgatctggctctgctggggttagaggaggacgtaatgccgcatcagaactcagaaaccaattcttctcacgcccagtcccagaaaggcaagagcagccctatctgttctactacgggcgacgataagctgtgcgccgacagtgcctgccagcagaatacggtcacatcatcgggcgatctcgtggccaaactctgcgataacattgtgagtgaatccgagagtacgacggcaagacagccatcctctcaagatcccccggatgcatcccactgtgaggatccccaggctcacactgttacctctgatcccgtgcgggacacacaggagagagctgacttttgtccatttaaagtggttgataacaaagggcagagaaaggacgtgaagctcgacaaaccgctgaccaacatgctggaagtggtttcgcaccctcatccagtcgtacctaaaatggagaaagagctggtccccgaccaagcagtgatcagcgactcaacattctccctggcaaattcccccggttcggagagcgtgactaaggatgacgcacttagcttcgttcccagccagaaggaaaaaggtaccgctacacccgagctgcatacagctaccgactatcgcgacggacctgacggcaattccaatgaacctgacaccaggccactggaggatcgtgcagtggggctgagcacctcttccacagctgccgagttgcaacacggcatgggtaatactagcctgacagggctgggcggggagcacgagggcccagcccccccggcaatacctgaagccctaaatattaaaggaaacaccgattcctctctgcagtcagtgggtaaggctaccttggccctggacagcgtacttactgaagaaggaaagctgctggtagtgtctgaatcaagcgcagcgcaggaacaggataaagacaaagccgtaacatgctccagcattaaagaaaatgcactgagtagcggtactctgcaggaagagcagcgaacaccaccacctggacaggatacccagcagttccacgaaaaaagcatttctgccgactgcgcaaaggataaggctctccagctatctaattcccccggtgcaagcagtgctttcctgaaagccgagacagagcataacaaggaggtcgccccgcaggtttccttgctgacgcaaggtggagcagctcaaagcctcgtgccccccggtgcgtctctggctaccgagagcaggcaggaagccttgggggctgaacataacagcagcgccctcctcccgtgtctccttcccgatggcagtgacgggagcgacgcattgaactgttcacagccttctccgctcgatgtcggtgtgaagaatacccagtcccaagggaagacatcagcctgcgaagtgtccggcgatgttaccgtcgacgttactggggtgaatgccctacagggaatggccgagcctagacgggaaaatatctctcataacactcaagacattttgatacctaatgtgttactgagccaagagaagaacgccgtgctcggactccctgtggccctgcaagacaaggccgtgacagaccctcagggcgtgggaaccccagagatgatacctttggactgggagaaggggaagctggaaggcgctgatcactcgtgtaccatgggcgacgccgaagaggcgcagatcgacgacgaggcccaccccgtccttctgcagccagtcgcaaaggagctgccgactgatatggagttgagtgcacatgacgatggagcccctgccggggtgcgggaagtgatgagggccccaccttctgggcgtgaaagatctacaccttccctgccctgcatggtgtccgcccaagatgccccactgcccaagggtgcagacctcattgaagaagctgcctcccggatcgtcgacgctgtgattgaacaggtgaaggcagccggagctctgctgaccgagggtgaggcttgtcacatgagcctgagtagtccagagctaggacccctcacaaagggtttggaatccgccttcaccgagaaagtgtccacctttccaccaggtgaaagcctgcccatgggatctacgccggaagaagcgaccggcagcctggctgggtgcttcgccggccgagaggagcccgagaagatcatcctgcctgtgcaggggcccgaaccggccgcggagatgcccgatgtgaaagcagaggacgaggtcgactttcgggccagtagcattagcgaggaagttgcagtgggcagtatcgctgcgacacttaagatgaaacaggggcctatgacgcaggcaatcaaccgcgagaattggtgcaccatcgaaccttgccccgatgcagcttccctgctggcatctaaacagagcccggaatgcgaaaatttcttggacgttggactgggcagagagtgcactagcaaacagggcgtgctgaagagagaatccggaagcgattccgacctgttccattcaccctccgacgacatggattccattatattccccaaacccgaggaagagcacttggcctgtgatatcacgggtagcagctcatctacagatgacacagctagcctcgaccgccactccagtcacgggtccgatgtgagcctgtcccagatcctgaaacccaatcgaagtcgcgatcgacagtctctggatgggttctatagtcacgggatgggtgccgaagggcgcgagtctgaaagcgaaccagcagatcccggggacgtcgaggaagaggagatggacagcattacggaagtgcctgctaattgctccgtgctacgtagctctatgcgctctctcagcccctttcggaggcactcttggggtccagggaaaaatgctgcatcagacgcagagatgaaccaccgatccttcagtctcgaaggactgacaggaggtgctggcgtgggcaataagcccagttcctctttggaagtgtcatcagccaatgcagaggaactccgacaccccttttcaggagaagaaagagtcgactcactggtcagccttagcgaagaagacctggagagtgaccagcgggagcaccgcatgttcgaccagcagatctgtcaccgatctaaacagcagggcttcaattattgtacgtctgcgatcagctcccctttgacaaagtctatttcccttatgaccatcagtcaccctggtctggacaattcccgcccattccactccacttttcacaatacgagcgctaacctgactgaatcaatcacagaggagaattataacttcctgcctcattctccttcaaagaaggattcggaatggaagtctggtaccaaggtgtctcggacattttcctatattaagaacaagatgtcaagctcaaagaagtcaaaatag

SEQ ID NO: 170978 - DNA, 3177 bp, Artificial Sequence
  derived and/or modified sequence
atgagcagcagcaagaagagcaaggagaaggagaaggagaaggacaagatcaaggagaaggagaaggacagcaaggacaaggagaaggacaagaagacagtgaatggccacaccttcagcagcatccctgtggtgggccccatcagctgcagccagtgcatgaagcccttcaccaacaaggatgcctacacctgtgccaactgcagcgcctttgtgcacaagggctgccgggagagcctggccagctgtgccaaggtgaagatgaagcagcccaagggcagcctgcaggcccatgacaccagcagcctgcccaccgtcatcatgaggaacaagcccagccagcccaaggagcggcccaggtctgctgtgctgctggtggatgaaacagccaccacccccatctttgccaacagaagaagccagcagagcgtgtccctgagcaagtctgtgtccatccagaacatcaccggggtgggcaatgatgagaacatgagcaacacctggaagttcctgagccacagcacagacagcctgaacaagatcagcaaggtgaatgaaagcacagagagcctgacagatgaaggagtgggcacagacatgaatgaaggccagctgctgggggactttgaaattgagagcaagcagctggaggccgagagctggagccgcatcatcgacagcaagttcctgaagcagcagaagaaggatgtggtgaagaggcaggaggtgatctatgagctgatgcagacagagttccaccacgtgaggaccctgaagatcatgtctggagtgtacagccagggcatgatggctgacctgctgtttgagcagcagatggtggagaagctgttcccctgcctggatgagctgatcagcatccacagccagttcttccagaggatcctggagaggaagaaggagagcctggtggacaagtctgagaagaacttcctgatcaagagaattggagatgtgctggtgaaccagttctctggagaaaatgctgagcggctgaagaagacctacggcaagttctgtggccagcacaaccagagcgtgaactacttcaaggacctgtatgccaaggacaagcgcttccaggcctttgtgaagaagaagatgagcagctctgtggtgcggcggctgggcatccctgagtgcatcctgctggtgacccagaggatcaccaagtaccctgtgctcttccagaggatcctgcagtgcaccaaggacaatgaggtggagcaggaggacctggcccagagcctgagcctggtgaaggatgtgattggagctgtggacagcaaggtggccagctatgagaagaaggtgcggctgaatgagatctacaccaagacagacagcaagagcatcatgaggatgaagagcggccagatgtttgccaaggaggacctgaagaggaagaagctggtgagagatggcagcgtcttcctgaagaatgctgctggccgcctgaaggaggtgcaggccgtgctgctgacagacatcctggtgttcctgcaggagaaggaccagaagtacatctttgccagcctggaccagaagagcaccgtcatcagcctgaagaagctgattgtgcgggaggtggcccacgaggagaagggcctcttcctgatctccatgggcatgacagatcctgagatggtggaggtgcacgccagcagcaaggaggagaggaacagctggatccagatcatccaggacaccatcaacaccctgaacagagatgaagatgagggcatccccagtgaaaatgaggaggagaagaagatgctggacacccgggcccgggagctgaaggagcagctgcaccagaaggaccagaagatcctgctgctgctggaggagaaggagatgatcttccgggacatggctgaatgttccacccccctgcctgaggactgcagccccacccacagcccccgggtgctcttccgcagcaacacagaggaggccctgaagggcggccccctgatgaagagcgccatcaatgaggtggagatcctgcagggcctggtgtctggcaacctgggcggcaccctgggccccaccgtgagcagccccatcgagcaggatgtggtgggccctgtgtccctgccccggcgggcagagacctttggaggctttgacagccaccagatgaatgccagcaaaggaggagagaaggaggagggagatgatggccaggacctgcggaggacagaaagtgacagcggcctgaagaagggcggcaatgccaacctggtgttcatgctgaagagaaattctgagcaggtggtgcagagcgtggtgcacctgtatgagctgctgagcgccctgcagggcgtggtgctgcagcaggacagctacatcgaggaccagaagctggtgctgtctgagcgggccctgaccaggagcctgagccggcccagcagcctcatcgagcaggagaagcagaggagcctggagaagcagaggcaggacctggccaacctgcagaagcagcaggcccagtacctggaggagaagagaagaagagagcgggagtgggaggcccgggagcgggagctgcgggagcgggaggccctgctggcccagcgggaggaggaggtgcagcagggccagcaggacctggagaaggagcgggaggagctgcagcagaagaagggcacctaccagtatgacctggagcggctgcgggccgcccagaagcagctggagcgggagcaggagcagctgcggcgggaggccgagcggctgagccagaggcagacagagcgggacctgtgccaggtgagccacccccacaccaagctgatgaggatccccagcttcttccccagccctgaggagccccccagccccagcgcccccagcatcgccaagagcggcagcctggacagcgagctgtctgtgagccccaagaggaacagcatcagcaggacccacaaggacaagggccccttccacatcctgagcagcaccagccagaccaacaagggccctgagggccagagccaggccccagccagcaccagcgccagcacccggctgtttggcctgaccaagcccaaggagaagaaggagaagaagaagaagaacaagaccagccgcagccagcctggagatggccctgccagcgaggtgtctgctgagggggaggagatcttctgctag

SEQ ID NO: 170979 - DNA, 8442 bp, Artificial Sequence
  derived and/or modified sequence
atgaagctgaacccccagcaggcccccctgtatggagactgtgtggtgacagtgctgctggccgaggaggacaaggcagaagatgatgtggtgttctacctggtgttcctgggcagcaccctgcggcactgcaccagcaccaggaaggtgtccagtgacaccctggagaccatcgcccctggccatgactgctgtgaaacagtgaaggtgcagctgtgtgccagcaaggagggcctgcctgtgtttgtggtggccgaggaggacttccactttgtgcaggatgaggcctatgatgctgcccagttcctggccaccagcgctggcaaccagcaggccctgaacttcacccgcttcctggaccagagcggcccccccagcggagatgtgaacagcctggacaagaagctggtgctggccttccgccacctgaagctgcccacagagtggaatgtgctgggcacagaccagagcctgcatgatgctggcccccgggagaccctgatgcactttgctgtgcggctgggcctgctgcggctgacctggttcctgctgcagaagccaggcggccgcggggccctgagcatccacaaccaggagggcgccacccctgtgtccctggccctggagcggggctaccacaagctgcaccagctgctgacagaggagaatgctggggagccagacagctggagcagcctgtcctatgagatcccctatggagactgcagcgtgcgccaccaccgggagctggacatctacaccctgaccagcgagagtgacagccaccacgagcaccccttccctggagatggctgcaccggccccatcttcaagctgatgaacatccagcagcagctgatgaagaccaacctgaagcagatggacagcctgatgcccctgatgatgacagcccaggaccccagcagcgcccctgagacagatggccagttcctgccctgtgcccctgagcccacagacccccagaggctgagcagcagcgaggagacagagagcacccagtgctgccccggcagccctgtggcccagacagagagcccctgtgacctgagcagcatcgtggaggaggagaacacagacaggagctgcaggaagaagaacaagggcgtggagaggaaaggagaggaggtggagcccgcccccatcgtggacagcggcaccgtgtctgaccaggacagctgcctgcagagcctgcctgactgtggggtgaagggcacagagggcctgagcagctgtggcaacagaaatgaggagaccggcaccaagagcagcggcatgcccacagaccaggagagcctgagcagtggagatgctgtgctgcagagggacctggtgatggagcccggcacagcccagtacagcagtggaggagagctgggcggcatcagcaccaccaacgtgtccaccccagacacagctggggagatggagcacggcctgatgaacccagatgccaccgtgtggaagaatgtgctgcagggcggggagagcaccaaggagagatttgagaacagcaacattggaacagctggggccagtgatgtgcacgtgaccagcaagcctgtggacaagatctctgtgcccaactgtgccccagctgccagcagcctggatggcaacaagccagctgagagcagcctggccttcagcaatgaggagaccagcacagagaagacagctgagacagagaccagccgcagccgggaggagagcgcagatgcccctgtggaccagaacagcgtggtgatcccagctgctgccaaggacaagatcagtgatggcctggagccctacaccctgctggccgccggcattggagaggccatgagccccagcgacctggccctgctgggcctggaggaggatgtgatgccccaccagaacagcgagaccaacagcagccacgcccagagccagaagggcaagagcagccccatctgcagcaccactggagatgacaagctgtgtgccgacagcgcctgccagcagaacacagtgaccagcagcggggacctggtggccaagctgtgtgacaacatcgtgtctgagagcgagagcaccacagcccggcagcccagcagccaggaccccccagatgccagccactgtgaggacccccaggcccacacagtgaccagtgaccctgtgcgggacacccaggagagagctgacttctgccccttcaaggtggtggacaacaagggccagaggaaggatgtgaagctggacaagcccctgaccaacatgctggaggtggtgagccacccccaccctgtggtgcccaagatggagaaggagctggtgcctgaccaggccgtcatcagtgacagcaccttcagcctggccaacagccctggcagcgagagcgtgaccaaggatgatgccctgagctttgtgcccagccagaaggagaagggcacagccaccccagagctgcacacagccacagactacagagatggcccagatggcaacagcaatgaaccagacacccggcccctggaggacagagctgtgggcctgagcaccagcagcacagctgctgagctgcagcacggcatgggcaacaccagcctgaccggcctgggcggggagcacgagggccctgcccccccagccatccctgaggccctgaacatcaagggcaacacagacagcagcctgcagagcgtgggcaaggccaccctggccctggacagcgtgctgacagaggagggcaagctgctggtggtgtctgagagcagcgctgcccaggagcaggacaaggacaaggctgtgacctgcagcagcatcaaggaaaatgccctgagcagcggcaccctgcaggaggagcagaggaccccacctcctggccaggacacccagcagttccacgagaagagcatctctgctgactgtgccaaggacaaggccctgcagctgagcaacagccctggggccagcagcgccttcctgaaggccgagacagagcacaacaaggaggtggccccccaggtgtccctgctgacccagggcggggccgcccagagcctggtgcccccaggggccagcctggccacagagagccggcaggaggccctgggcgctgagcacaacagcagcgccctgctgccctgcctgctgcctgatggcagtgatggcagtgatgccctgaactgcagccagcccagccccctggatgtgggcgtgaagaacacccagagccagggcaagaccagcgcctgtgaggtgtctggagatgtgacagtggatgtgactggagtgaatgccctgcagggcatggccgagccccggcgggagaacatcagccacaacacccaggacatcctgatccccaacgtgctgctgagccaggagaagaatgctgtgctgggcctgcctgtggccctgcaggacaaggctgtgacagacccccagggcgtgggcaccccagagatgatccccctggactgggagaagggcaagctggagggcgctgaccacagctgcaccatgggagatgctgaggaggcccagattgatgatgaggcccaccctgtgctgctgcagcctgtggccaaggagctgcccacagacatggagctgagcgcccatgatgatggagccccagctggggtgcgggaggtgatgagggcccctccttctggccgggagaggagcacccccagcctgccctgcatggtgtctgcccaggatgcccccctgcccaagggagctgacctgattgaggaggccgccagcagaattgtggatgctgtgattgagcaggtgaaggccgccggggccctgctgacagaaggagaggcctgccacatgagcctgagcagccctgagctgggccccctgaccaagggcctggagagcgccttcacagagaaggtgtccaccttccccccaggagagagcctgcccatgggcagcaccccagaggaggccaccggcagcctggccggctgctttgctggccgggaggagcctgagaagatcatcctgcctgtgcagggccctgagcctgctgctgagatgccagatgtgaaggccgaggatgaggtggacttccgggccagcagcatcagcgaggaggtggccgtgggcagcattgctgccaccctgaagatgaagcagggccccatgacccaggccatcaaccgggagaactggtgcaccatcgagccctgcccagatgctgccagcctgctggccagcaagcagagcccagaatgtgagaacttcctggatgtgggcctgggcagagaatgtaccagcaagcagggcgtgctgaagcgggagagcggcagtgacagcgacctcttccacagccccagtgatgacatggacagcatcatcttccccaagccagaggaggagcacctggcctgtgacatcaccggcagcagcagcagcacagatgacacagccagcctggacagacacagcagccacggcagtgatgtgtccctgagccagatcctgaagcccaacagaagccgggaccggcagagcctggatggcttctacagccacggcatgggcgctgagggccgggagagcgagagcgagcctgctgaccctggagatgtggaggaggaggagatggacagcatcacagaggtgcctgccaactgcagcgtgctgcggagctccatgaggagcctgagccccttccgccgccacagctggggccctgggaagaatgctgccagtgatgctgagatgaaccacaggagctccatgagggtgctgggagatgtggtgcggcggccccccatccaccggcgctccttcagcctggagggcctgactggaggagctggggtgggcaacaagcccagcagcagcctggaggtgagcagcgccaatgctgaggagctgcggcaccccttctctggagaggagcgggtggacagcctggtgtccctgtctgaggaggacctggagagtgaccagcgggagcacaggatgtttgaccagcagatctgccacaggagcaagcagcagggcttcaactactgcaccagcgccatcagcagccccctgaccaagagcatcagcctgatgaccatcagccaccctggcctggacaacagccggcccttccacagcaccttccacaacaccagcgccaacctgacagagagcatcacagaggagaactacaacttcctgccccacagccccagcaagaaggacagcgagtggaagagcggcaccaaggtgtccaggaccttctcctacatcaagaacaagatgagcagcagcaagaagagcaaggagaaggagaaggagaaggacaagatcaaggagaaggagaaggacagcaaggacaaggagaaggacaagaagacagtgaatggccacaccttcagcagcatccctgtggtgggccccatcagctgcagccagtgcatgaagcccttcaccaacaaggatgcctacacctgtgccaactgcagcgcctttgtgcacaagggctgccgggagagcctggccagctgtgccaaggtgaagatgaagcagcccaagggcagcctgcaggcccatgacaccagcagcctgcccaccgtcatcatgaggaacaagcccagccagcccaaggagcggcccaggtctgctgtgctgctggtggatgaaacagccaccacccccatctttgccaacagaagaagccagcagagcgtgtccctgagcaagtctgtgtccatccagaacatcactggagtgggcaatgatgagaacatgagcaacacctggaagttcctgagccacagcacagacagcctgaacaagatcagcaaggtgaatgaaagcacagagagcctgacagatgagggcgtgggcacagacatgaatgaaggccagctgctgggggactttgaaattgagagcaagcagctggaggccgagagctggagccgcatcatcgacagcaagttcctgaagcagcagaagaaggatgtggtgaagaggcaggaggtgatctatgagctgatgcagacagagttccaccacgtgaggaccctgaagatcatgtctggagtgtacagccagggcatgatggctgacctgctgtttgagcagcagatggtggagaagctgttcccctgcctggatgagctgatcagcatccacagccagttcttccagaggatcctggagaggaagaaggagagcctggtggacaagtctgagaagaacttcctgatcaagagaattggagatgtgctggtgaaccagttcagcggggagaatgctgagcggctgaagaagacctacggcaagttctgtggccagcacaaccagagcgtgaactacttcaaggacctgtatgccaaggacaagcgcttccaggcctttgtgaagaagaagatgagcagctctgtggtgcggcggctgggcatccctgagtgcatcctgctggtgacccagaggatcaccaagtaccctgtgctcttccagaggatcctgcagtgcaccaaggacaatgaggtggagcaggaggacctggcccagagcctgagcctggtgaaggatgtgattggagctgtggacagcaaggtggccagctatgagaagaaggtgcggctgaatgagatctacaccaagacagacagcaagagcatcatgaggatgaagagcggccagatgtttgccaaggaggacctgaagaggaagaagctggtgagagatggctctgtgttcctgaagaatgctgctggccgcctgaaggaggtgcaggccgtgctgctgacagacatcctggtgttcctgcaggagaaggaccagaagtacatctttgccagcctggaccagaagagcaccgtcatcagcctgaagaagctgattgtgcgggaggtggcccacgaggagaagggcctcttcctgatctccatgggcatgacagatcctgagatggtggaggtgcacgccagcagcaaggaggagagaaattcctggatccagatcatccaggacaccatcaacaccctgaacagagatgaagatgagggcatccccagtgaaaatgaggaggagaagaagatgctggacacccgggcccgggagctgaaggagcagctgcaccagaaggaccagaagatcctgctgctgctggaggagaaggagatgatcttccgggacatggccgagtgcagcacccccctgcctgaggactgcagccccacccacagcccccgggtgctcttccgcagcaacacagaggaggccctgaagggcggccccctgatgaagagcgccatcaatgaggtggagatcctgcagggcctggtgtctggcaacctgggcggcaccctgggccccaccgtgagcagccccatcgagcaggatgtggtgggccctgtgtccctgcccaggagagctgagaccttcggcggctttgacagccaccagatgaatgccagcaagggcggggagaaggaggagggagatgatggccaggacctgcggaggacagaaagtgacagcggcctgaagaagggcggcaatgccaacctggtgttcatgctgaagaggaacagcgagcaggtggtgcagagcgtggtgcacctgtatgagctgctgagcgccctgcagggcgtggtgctgcagcaggacagctacatcgaggaccagaagctggtgctgtctgagcgggccctgaccaggagcctgagccggcccagcagcctgattgagcaggagaagcagaggagcctggagaagcagaggcaggacctggccaacctgcagaagcagcaggcccagtacctggaggagaagagaagaagagagcgggagtgggaggcccgggagcgggagctgcgggagcgggaggccctgctggcccagcgggaggaggaggtgcagcagggccagcaggacctggagaaggagcgggaggagctgcagcagaagaagggcacctaccagtatgacctggagcggctgcgggccgcccagaagcagctggagcgggagcaggagcagctgcggcgggaggccgagcggctgagccagaggcagacagagcgggacctgtgccaggtgagccacccccacaccaagctgatgaggatccccagcttcttccccagccctgaggagccccccagccccagcgcccccagcatcgccaagagcggcagcctggacagcgagctgtctgtgagccccaagagaaattccatcagcaggacccacaaggacaagggccccttccacatcctgagcagcaccagccagaccaacaagggccctgagggccagagccaggccccagccagcaccagcgccagcacccggctgtttggcctgaccaagcccaaggagaagaaggagaagaagaagaagaacaagaccagccgcagccagcctggagatggccctgccagcgaggtgtctgctgagggggaggagatcttctgctag

SEQ ID NO: 170980 - DNA, 8379 bp, Artificial Sequence
  derived and/or modified sequence
aagctgctggagaagcagccccccattgaaggagactgtgtggtgacagtgctgctggccgaggaggacaaggccgaggatgatgtggtgttctacctggtgttcctgggcagcaccctgcggcactgcaccagcaccaggaaggtgtccagtgacaccctggagaccatcgcccctggccatgactgctgtgagaccgtgaaggtgcagctgtgtgccagcaaggagggcctgcctgtgtttgtggtggccgaggaggacttccactttgtgcaggatgaggcctatgatgctgcccagttcctggccaccagcgctggcaaccagcaggccctgaacttcacccgcttcctggaccagagcggccccccatctggagatgtgaacagcctggacaagaagctggtgctggccttccgccacctgaagctgcccacagagtggaatgtgctgggcacagaccagagcctgcatgatgctggcccccgggagaccctgatgcactttgctgtgcggctgggcctgctgcggctgacctggttcctgctgcagaagccaggcggccgcggggccctgagcatccacaaccaggagggcgccacccctgtgtccctggccctggagcggggctaccacaagctgcaccagctgctgacagaagaaaatgctggggagccagacagctggagcagcctgtcctatgagatcccctacggggactgcagcgtgcgccaccaccgggagctggacatctacaccctgaccagcgagagtgacagccaccacgagcaccccttccctggagatggctgcaccggccccatcttcaagctgatgaacatccagcagcagctgatgaagaccaacctgaagcagatggacagcctgatgcccctgatgatgacagcccaggaccccagcagcgcccctgagacagatggccagttcctgccctgtgcccctgagcccacagacccccagaggctgagcagcagcgaggagacagagagcacccagtgctgccccggcagccctgtggcccagacagagagcccctgtgacctgagcagcatcgtggaggaggagaacacagacaggagctgcaggaagaagaacaagggcgtggagaggaagggggaggaggtggagcccgcccccatcgtggacagcggcaccgtgtctgaccaggacagctgcctgcagagcctgcctgactgtggggtgaagggcacagagggcctgagcagctgtggcaacagaaatgaggagaccggcaccaagagcagcggcatgcccacagaccaggagagcctgagcagtggagatgctgtgctgcagagggacctggtgatggagcctggaacagcccagtacagcagcggcggggagctgggcggcatcagcaccaccaacgtgtccaccccagacacagctggggagatggagcacggcctgatgaacccagatgccaccgtgtggaagaatgtgctgcagggcggggagagcaccaaggagagatttgagaacagcaacatcggcacagctggggccagtgatgtgcacgtgaccagcaagcctgtggacaagatctctgtgcccaactgtgccccagctgccagcagcctggatggcaacaagccagctgagagcagcctggccttcagcaatgaggagaccagcacagagaagacagctgagacagagaccagccgcagccgggaggagagcgcagatgcccctgtggaccagaacagcgtggtgatcccagctgctgccaaggacaagatcagtgatggcctggagccctacaccctgctggccgccggcatcggggaggccatgagccccagcgacctggccctgctgggcctggaggaggatgtgatgccccaccagaacagcgagaccaacagcagccacgcccagagccagaagggcaagagcagccccatctgcagcaccactggagatgacaagctgtgtgccgacagcgcctgccagcagaacacagtgaccagcagcggggacctggtggccaagctgtgtgacaacatcgtgtctgagagcgagagcaccacagcccggcagcccagcagccaggaccccccagatgccagccactgtgaggacccccaggcccacacagtgaccagtgaccctgtgcgggacacccaggagagagctgacttctgccccttcaaggtggtggacaacaagggccagaggaaggatgtgaagctggacaagcccctgaccaacatgctggaggtggtgagccacccccaccctgtggtgcccaagatggagaaggagctggtgcctgaccaggccgtcatcagtgacagcaccttcagcctggccaacagccctggcagcgagagcgtgaccaaggatgatgccctgagctttgtgcccagccagaaggagaagggcacagccaccccagagctgcacacagccacagactacagagatggcccagatggcaacagcaatgaaccagacacccggcccctggaggacagagctgtgggcctgagcaccagcagcacagctgctgagctgcagcacggcatgggcaacaccagcctgaccggcctgggcggggagcacgagggccctgcccccccagccatccctgaggccctgaacatcaagggcaacacagacagcagcctgcagagcgtgggcaaggccaccctggccctggacagcgtgctgacagaggagggcaagctgctggtggtgtctgagagcagcgctgcccaggagcaggacaaggacaaggctgtgacctgcagcagcatcaaggaaaatgccctgagcagcggcaccctgcaggaggagcagaggaccccacctcctggccaggacacccagcagttccacgagaagagcatctctgctgactgtgccaaggacaaggccctgcagctgagcaacagccctggggccagcagcgccttcctgaaggccgagacagagcacaacaaggaggtggccccccaggtgtccctgctgacccagggcggggccgcccagagcctggtgcccccaggggccagcctggccacagagagccggcaggaggccctgggcgctgagcacaacagcagcgccctgctgccctgcctgctgcctgatggcagtgatggcagtgatgccctgaactgcagccagcccagccccctggatgtgggcgtgaagaacacccagagccagggcaagaccagcgcctgtgaggtgtctggagatgtgacagtggatgtgactggagtgaatgccctgcagggcatggccgagccccggcgggagaacatcagccacaacacccaggacatcctgatccccaacgtgctgctgagccaggagaagaatgctgtgctgggcctgcctgtggccctgcaggacaaggctgtgacagacccccagggcgtgggcaccccagagatgatccccctggactgggagaagggcaagctggagggcgctgaccacagctgcaccatgggagatgctgaggaggcccagattgatgatgaggcccaccctgtgctgctgcagcctgtggccaaggagctgcccacagacatggagctgagcgcccatgatgatggagccccagctggggtgcgggaggtgatgagggccccacccagcggccgggagaggagcacccccagcctgccctgcatggtgtctgcccaggatgcccccctgcccaagggagctgacctgattgaggaggccgccagccgcatcgtggatgctgtgattgagcaggtgaaggctgctggggccctgctgacagaaggagaggcctgccacatgagcctgagcagccctgagctgggccccctgaccaagggcctggagagcgccttcacagagaaggtgtccaccttccccccaggagagagcctgcccatgggcagcaccccagaggaggccaccggcagcctggccggctgctttgctggccgggaggagcctgagaagatcatcctgcctgtgcagggccctgagcctgctgctgagatgccagatgtgaaggcagaagatgaggtggacttccgggccagcagcatcagcgaggaggtggccgtgggcagcattgctgccaccctgaagatgaagcagggccccatgacccaggccatcaaccgggagaactggtgcaccatcgagccctgcccagatgctgccagcctgctggccagcaagcagagcccagaatgtgagaacttcctggatgtgggcctgggccgggagtgcaccagcaagcagggcgtgctgaagcgggagagcggcagtgacagcgacctcttccacagccccagtgatgacatggacagcatcatcttccccaagccagaggaggagcacctggcctgtgacatcaccggcagcagcagcagcacagatgacacagccagcctggacagacacagcagccacggcagtgatgtgtccctgagccagatcctgaagcccaacagaagccgggaccggcagagcctggatggcttctacagccacggcatgggcgctgagggccgggagagcgagagcgagcctgctgaccctggagatgtggaggaggaggagatggacagcatcacagaggtgcctgccaactgcagcgtgctgcggagctccatgaggagcctgagccccttcagaagacacagctggggccctgggaagaatgctgccagtgatgctgagatgaaccaccgctccttcagcctggagggcctgaccggcggggccggcgtgggcaacaagcccagcagcagcctggaggtgtcctctgccaatgctgaggagctgcggcaccccttcagcggggaggagcgggtggacagcctggtgtccctgtctgaggaggacctggagagtgaccagcgggagcacaggatgtttgaccagcagatctgccacaggagcaagcagcagggcttcaactactgcaccagcgccatcagcagccccctgaccaagagcatcagcctgatgaccatcagccaccctggcctggacaacagccggcccttccacagcaccttccacaacaccagcgccaacctgacagagagcatcacagaggagaactacaacttcctgccccacagccccagcaagaaggacagcgagtggaagagcggcaccaaggtgtccaggaccttctcctacatcaagaacaagatgagcagcagcaagaagagcaaggagaaggagaaggagaaggacaagatcaaggagaaggagaaggacagcaaggacaaggagaaggacaagaagacagtgaatggccacaccttcagcagcatccctgtggtgggccccatcagctgcagccagtgcatgaagcccttcaccaacaaggatgcctacacctgtgccaactgcagcgcctttgtgcacaagggctgccgggagagcctggccagctgtgccaaggtgaagatgaagcagcccaagggcagcctgcaggcccatgacaccagcagcctgcccaccgtcatcatgaggaacaagcccagccagcccaaggagcggcccaggtctgctgtgctgctggtggatgaaacagccaccacccccatctttgccaacagaagaagccagcagagcgtgtccctgagcaagtctgtgtccatccagaacatcaccggggtgggcaatgatgagaacatgagcaacacctggaagttcctgagccacagcacagacagcctgaacaagatcagcaaggtgaatgaaagcacagagagcctgacagatgagggcacagacatgaatgaaggccagctgctgggggactttgaaattgagagcaagcagctggaggccgagagctggagccgcatcatcgacagcaagttcctgaagcagcagaagaaggatgtggtgaagaggcaggaggtgatctatgagctgatgcagacagagttccaccacgtgaggaccctgaagatcatgtctggagtgtacagccagggcatgatggctgacctgctgtttgagcagcagatggtggagaagctgttcccctgcctggatgagctgatcagcatccacagccagttcttccagaggatcctggagaggaagaaggagagcctggtggacaagtctgagaagaacttcctgatcaagagaattggagatgtgctggtgaaccagttctctggagaaaatgctgagcggctgaagaagacctacggcaagttctgtggccagcacaaccagagcgtgaactacttcaaggacctgtatgccaaggacaagcgcttccaggcctttgtgaagaagaagatgagcagctctgtggtgcggcggctgggcatccctgagtgcatcctgctggtgacccagaggatcaccaagtaccctgtgctcttccagaggatcctgcagtgcaccaaggacaatgaggtggagcaggaggacctggcccagagcctgagcctggtgaaggatgtgattggagctgtggacagcaaggtggccagctatgagaagaaggtgcggctgaatgagatctacaccaagacagacagcaagagcatcatgaggatgaagagcggccagatgtttgccaaggaggacctgaagaggaagaagctggtgagagatggcagcgtcttcctgaagaatgctgctggccgcctgaaggaggtgcaggccgtgctgctgacagacatcctggtgttcctgcaggagaaggaccagaagtacatctttgccagcctggaccagaagagcaccgtcatcagcctgaagaagctgattgtgcgggaggtggcccacgaggagaagggcctcttcctgatctccatgggcatgacagatcctgagatggtggaggtgcacgccagcagcaaggaggagaggaacagctggatccagatcatccaggacaccatcaacaccctgaacagagatgaagatgagggcatccccagtgaaaatgaggaggagaagaagatgctggacacccgggcccgggagctgaaggagcagctgcaccagaaggaccagaagatcctgctgctgctggaggagaaggagatgatcttccgggacatggctgaatgttccacccccctgcctgaggactgcagccccacccacagcccccgggtgctcttccgcagcaacacagaggaggccctgaagggcggccccctgatgaagagcgccatcaatgaggtggagatcctgcagggcctggtgtctggcaacctgggcggcaccctgggccccaccgtgagcagccccatcgagcaggatgtggtgggccctgtgtccctgccccggcgggcagagacctttggaggctttgacagccaccagatgaatgccagcaaaggaggagagaaggaggagggagatgatggccaggacctgcggaggacagaaagtgacagcggcctgaagaagggcggcaatgccaacctggtgttcatgctgaagagaaattctgagcaggtggtgcagagcgtggtgcacctgtatgagctgctgagcgccctgcagggcgtggtgctgcagcaggacagctacatcgaggaccagaagctggtgctgtctgagcgggccctgaccaggagcctgagccggcccagcagcctcatcgagcaggagaagcagaggagcctggagaagcagaggcaggacctggccaacctgcagaagcagcaggcccagtacctggaggagaagagaagaagagagcgggagtgggaggcccgggagcgggagctgcgggagcgggaggccctgctggcccagcgggaggaggaggtgcagcagggccagcaggacctggagaaggagcgggaggagctgcagcagaagaagggcacctaccagtatgacctggagcggctgcgggccgcccagaagcagctggagcgggagcaggagcagctgcggcgggaggccgagcggctgagccagaggcagacagagcgggacctgtgccaggtgagccacccccacaccaagctgatgaggatccccagcttcttccccagccctgaggagccccccagccccagcgcccccagcatcgccaagagcggcagcctggacagcgagctgtctgtgagccccaagaggaacagcatcagcaggacccacaaggacaagggccccttccacatcctgagcagcaccagccagaccaacaagggccctgagggccagagccaggccccagccagcaccagcgccagcacccggctgtttggcctgaccaagcccaaggagaagaaggagaagaagaagaagaacaagaccagccgcagccagcctggagatggccctgccagcgaggtgtctgctgagggggaggagatcttctgctag

SEQ ID NO: 170981 - DNA, 5238 bp, Artificial Sequence
  derived and/or modified sequence
atgaagctgaacccccagcaggcccccctgtatggagactgtgtggtgacagtgctgctggccgaggaggacaaggcagaagatgatgtggtgttctacctggtgttcctgggcagcaccctgcggcactgcaccagcaccaggaaggtgtccagtgacaccctggagaccatcgcccctggccatgactgctgtgaaacagtgaaggtgcagctgtgtgccagcaaggagggcctgcctgtgtttgtggtggccgaggaggacttccactttgtgcaggatgaggcctatgatgctgcccagttcctggccaccagcgctggcaaccagcaggccctgaacttcacccgcttcctggaccagagcggcccccccagcggagatgtgaacagcctggacaagaagctggtgctggccttccgccacctgaagctgcccacagagtggaatgtgctgggcacagaccagagcctgcatgatgctggcccccgggagaccctgatgcactttgctgtgcggctgggcctgctgcggctgacctggttcctgctgcagaagccaggcggccgcggggccctgagcatccacaaccaggagggcgccacccctgtgtccctggccctggagcggggctaccacaagctgcaccagctgctgacagaggagaatgctggggagccagacagctggagcagcctgtcctatgagatcccctatggagactgcagcgtgcgccaccaccgggagctggacatctacaccctgaccagcgagagtgacagccaccacgagcaccccttccctggagatggctgcaccggccccatcttcaagctgatgaacatccagcagcagctgatgaagaccaacctgaagcagatggacagcctgatgcccctgatgatgacagcccaggaccccagcagcgcccctgagacagatggccagttcctgccctgtgcccctgagcccacagacccccagaggctgagcagcagcgaggagacagagagcacccagtgctgccccggcagccctgtggcccagacagagagcccctgtgacctgagcagcatcgtggaggaggagaacacagacaggagctgcaggaagaagaacaagggcgtggagaggaaaggagaggaggtggagcccgcccccatcgtggacagcggcaccgtgtctgaccaggacagctgcctgcagagcctgcctgactgtggggtgaagggcacagagggcctgagcagctgtggcaacagaaatgaggagaccggcaccaagagcagcggcatgcccacagaccaggagagcctgagcagtggagatgctgtgctgcagagggacctggtgatggagcccggcacagcccagtacagcagtggaggagagctgggcggcatcagcaccaccaacgtgtccaccccagacacagctggggagatggagcacggcctgatgaacccagatgccaccgtgtggaagaatgtgctgcagggcggggagagcaccaaggagagatttgagaacagcaacattggaacagctggggccagtgatgtgcacgtgaccagcaagcctgtggacaagatctctgtgcccaactgtgccccagctgccagcagcctggatggcaacaagccagctgagagcagcctggccttcagcaatgaggagaccagcacagagaagacagctgagacagagaccagccgcagccgggaggagagcgcagatgcccctgtggaccagaacagcgtggtgatcccagctgctgccaaggacaagatcagtgatggcctggagccctacaccctgctggccgccggcattggagaggccatgagccccagcgacctggccctgctgggcctggaggaggatgtgatgccccaccagaacagcgagaccaacagcagccacgcccagagccagaagggcaagagcagccccatctgcagcaccactggagatgacaagctgtgtgccgacagcgcctgccagcagaacacagtgaccagcagcggggacctggtggccaagctgtgtgacaacatcgtgtctgagagcgagagcaccacagcccggcagcccagcagccaggaccccccagatgccagccactgtgaggacccccaggcccacacagtgaccagtgaccctgtgcgggacacccaggagagagctgacttctgccccttcaaggtggtggacaacaagggccagaggaaggatgtgaagctggacaagcccctgaccaacatgctggaggtggtgagccacccccaccctgtggtgcccaagatggagaaggagctggtgcctgaccaggccgtcatcagtgacagcaccttcagcctggccaacagccctggcagcgagagcgtgaccaaggatgatgccctgagctttgtgcccagccagaaggagaagggcacagccaccccagagctgcacacagccacagactacagagatggcccagatggcaacagcaatgaaccagacacccggcccctggaggacagagctgtgggcctgagcaccagcagcacagctgctgagctgcagcacggcatgggcaacaccagcctgaccggcctgggcggggagcacgagggccctgcccccccagccatccctgaggccctgaacatcaagggcaacacagacagcagcctgcagagcgtgggcaaggccaccctggccctggacagcgtgctgacagaggagggcaagctgctggtggtgtctgagagcagcgctgcccaggagcaggacaaggacaaggctgtgacctgcagcagcatcaaggaaaatgccctgagcagcggcaccctgcaggaggagcagaggaccccacctcctggccaggacacccagcagttccacgagaagagcatctctgctgactgtgccaaggacaaggccctgcagctgagcaacagccctggggccagcagcgccttcctgaaggccgagacagagcacaacaaggaggtggccccccaggtgtccctgctgacccagggcggggccgcccagagcctggtgcccccaggggccagcctggccacagagagccggcaggaggccctgggcgctgagcacaacagcagcgccctgctgccctgcctgctgcctgatggcagtgatggcagtgatgccctgaactgcagccagcccagccccctggatgtgggcgtgaagaacacccagagccagggcaagaccagcgcctgtgaggtgtctggagatgtgacagtggatgtgactggagtgaatgccctgcagggcatggccgagccccggcgggagaacatcagccacaacacccaggacatcctgatccccaacgtgctgctgagccaggagaagaatgctgtgctgggcctgcctgtggccctgcaggacaaggctgtgacagacccccagggcgtgggcaccccagagatgatccccctggactgggagaagggcaagctggagggcgctgaccacagctgcaccatgggagatgctgaggaggcccagattgatgatgaggcccaccctgtgctgctgcagcctgtggccaaggagctgcccacagacatggagctgagcgcccatgatgatggagccccagctggggtgcgggaggtgatgagggcccctccttctggccgggagaggagcacccccagcctgccctgcatggtgtctgcccaggatgcccccctgcccaagggagctgacctgattgaggaggccgccagcagaattgtggatgctgtgattgagcaggtgaaggccgccggggccctgctgacagaaggagaggcctgccacatgagcctgagcagccctgagctgggccccctgaccaagggcctggagagcgccttcacagagaaggtgtccaccttccccccaggagagagcctgcccatgggcagcaccccagaggaggccaccggcagcctggccggctgctttgctggccgggaggagcctgagaagatcatcctgcctgtgcagggccctgagcctgctgctgagatgccagatgtgaaggccgaggatgaggtggacttccgggccagcagcatcagcgaggaggtggccgtgggcagcattgctgccaccctgaagatgaagcagggccccatgacccaggccatcaaccgggagaactggtgcaccatcgagccctgcccagatgctgccagcctgctggccagcaagcagagcccagaatgtgagaacttcctggatgtgggcctgggcagagaatgtaccagcaagcagggcgtgctgaagcgggagagcggcagtgacagcgacctcttccacagccccagtgatgacatggacagcatcatcttccccaagccagaggaggagcacctggcctgtgacatcaccggcagcagcagcagcacagatgacacagccagcctggacagacacagcagccacggcagtgatgtgtccctgagccagatcctgaagcccaacagaagccgggaccggcagagcctggatggcttctacagccacggcatgggcgctgagggccgggagagcgagagcgagcctgctgaccctggagatgtggaggaggaggagatggacagcatcacagaggtgcctgccaactgcagcgtgctgcggagctccatgaggagcctgagccccttccgccgccacagctggggccctgggaagaatgctgccagtgatgctgagatgaaccacaggagcttcagcctggagggcctgactggaggagctggggtgggcaacaagcccagcagcagcctggaggtgagcagcgccaatgctgaggagctgcggcaccccttctctggagaggagcgggtggacagcctggtgtccctgtctgaggaggacctggagagtgaccagcgggagcacaggatgtttgaccagcagatctgccacaggagcaagcagcagggcttcaactactgcaccagcgccatcagcagccccctgaccaagagcatcagcctgatgaccatcagccaccctggcctggacaacagccggcccttccacagcaccttccacaacaccagcgccaacctgacagagagcatcacagaggagaactacaacttcctgccccacagccccagcaagaaggacagcgagtggaagagcggcaccaaggtgtccaggaccttctcctacatcaagaacaagatgagcagcagcaagaagagcaagtag

SEQ ID NO: 170982 - DNA, 3177 bp, Artificial Sequence
  derived and/or modified sequence
atgagcagcagcaagaagagcaaggagaaggagaaggagaaggacaagattaaagaaaaggagaaggactctaaagataaagaaaaggacaagaaaactgtaaatggtcacactttttccagcattcccgttgtgggacctatatcctgctctcagtgtatgaaaccttttactaacaaggatgcctacacatgcgcaaactgctctgccttcgtacataagggatgcagagagagcctggcgtcttgtgcaaaggtgaaaatgaagcaaccgaaggggagtctgcaggcccatgacacttccagtctgcccacagttatcatgcgaaacaaaccgagtcagcctaaggagagaccgcgcagcgctgtgttgctggtcgacgaaacagccactacccccattttcgctaatcgaagatctcaacaaagcgtctccttaagcaagtctgtttcaatacagaatataactggtgtagggaacgacgaaaatatgtcgaacacctggaagttcttgagccacagtaccgacagcctgaataaaatctctaaggtcaacgagtcgacagagtctctgacagacgagggcgtgggcacagacatgaacgagggccagttgttaggcgactttgagatcgaatctaagcaattggaagcagagtcctggagccgaattatcgattcgaagttcttgaaacagcagaagaaagatgtggtgaagcggcaggaagtgatttacgagctcatgcagacagagtttcaccacgtgcgaaccctcaaaatcatgagcggggtgtattcacagggaatgatggccgacctgctgtttgaacaacagatggtagaaaaactctttccttgtctggacgagctgatctcaatacacagccagttcttccagaggatcctggagcgtaagaaggagagtttagtggacaaaagcgagaagaatttccttattaaacgaataggagatgtgttggtgaaccagttcagtggtgagaacgctgagcgcctgaaaaaaacatatggtaagttctgcggccagcacaaccagtcagttaactactttaaggacctctacgcaaaggacaagcgcttccaggcatttgttaagaagaaaatgagcagtagtgtagtcaggcgccttgggattcctgagtgtatcctgctagtgacccagcggatcaccaaatatcccgttctgttccagcgcatcctccagtgtaccaaagacaatgaggtcgagcaagaagatcttgcccagtccctttcactcgtgaaggatgtgatcggtgccgtcgatagcaaggtggcgagctacgagaaaaaggtccggctcaacgagatctatacaaagaccgatagtaagtctataatgcggatgaaatcgggacaaatgttcgcgaaggaggatcttaaacggaagaagctcgtcagagatgggtctgtgttcctcaagaatgcagccgggagactaaaggaggtacaggcagtgctgctcaccgacattctggtgttcctgcaggagaaggaccagaaatatatctttgccagcctcgatcagaaatcgaccgtgattagcctgaaaaaattgatcgttcgggaggtggcgcatgaggagaaagggttgttcttaataagtatgggaatgacggaccctgaaatggtggaagtgcacgcatccagcaaggaagagcgaaactcctggatccaaataatccaagacaccattaataccttaaatcgagatgaagatgagggcatcccttctgaaaacgaagaagaaaagaagatgcttgacactagggctagggagctgaaggagcagttgcaccagaaggaccagaaaatactcttactgctcgaggaaaaggaaatgatctttcgcgacatggccgagtgcagcaccccactgcctgaggactgctcgcctactcacagccccagagtgttgtttagatccaatacggaggaagcgcttaaggggggcccgctgatgaagtccgcaattaatgaggtagagatcctgcagggattggtgagcgggaatctggggggcacgctgggacctacggtcagttcgcccatagagcaagacgtcgtgggccccgtgtccctccctaggcgcgcagagacttttggaggattcgactcacaccagatgaacgccagcaagggcggggagaaggaagagggagatgatgggcaagatctcagacgcaccgaaagtgatagcggactgaagaaaggcgggaatgccaatcttgtcttcatgcttaagagaaattcggaacaggtggttcagtctgtggtacatctgtatgagttattgtccgcgctgcaaggtgtggtgttacagcaggacagctatattgaggatcaaaagctggtgctgagcgaacgtgctctaacaagatctctgtcaaggccgagttctctaatcgagcaggagaagcagaggtccttggagaaacagagacaagacctggctaatctgcagaagcaacaggctcagtacttggaggagaagagacgccgggaacgcgaatgggaggccagagagcgtgaattgagagaaagagaggctcttctggcccagagagaggaagaggtgcagcagggtcaacaagacctggagaaggagcgagaggaactacagcaaaaaaagggtacttaccagtacgatctcgaacgcctccgagcagcccagaagcaattagagagggagcaggagcagcttaggcgggaagccgagcgacttagccagcgtcaaacggaaagagacctttgccaagtttcacatccgcacaccaagctgatgagaattccatccttcttcccgagcccagaagaacccccctcaccgagcgccccgtctattgcaaagtcaggaagccttgacagtgaattgtcagtgtcacctaaaagaaattccatctcccgcactcataaggataagggtccatttcacatactgtcatccacaagccaaacgaacaaaggaccggagggccagtcgcaagctcccgcctctacttcagcctctacgcgactgtttggactcactaaaccaaaagaaaagaaggagaagaaaaaaaagaataaaaccagtcgttctcagcccggcgatggccctgcctctgaggtctcagctgaaggggaggagatcttttgctag

SEQ ID NO: 170983 - DNA, 8442 bp, Artificial Sequence
  derived and/or modified sequence
atgaagctgaacccccagcaggcccccctgtacggcgactgcgtggtcaccgtgctgctggctgaggaagacaaggctgaggacgacgtcgtcttctatcttgtctttctcggctcaaccctccgtcattgcaccagcacaaggaaagtgtctagtgacacgttggagacgatcgctccaggtcatgattgttgcgaaactgttaaagtgcagttatgcgccagcaaggagggcttgcccgtgttcgtagtggcggaagaggattttcactttgttcaggacgaagcatacgacgcagcacagtttctggctacttccgctggaaaccagcaggcactgaactttacacgtttcctggatcagtcagggccacccagcggggacgttaatagcctggacaaaaaacttgtgttggccttcaggcacttaaagctccccactgagtggaacgtccttggcactgatcagtccctgcacgacgccgggccccgggaaaccctgatgcatttcgcggtgcggctgggcctcctccgcctgacatggtttttgctccagaagcccggcgggaggggggcattgtcaattcataatcaggagggcgcaaccccggtgtccctggccctggagcgcggctaccataagctgcaccagctcctgaccgaagaaaacgccggggaaccagactcatggagctccttatcgtacgaaatcccgtacggggactgctcagtgaggcaccatcgggagctggatatttatactctcacttcggaatctgattcacaccacgaacatccattccccggggatggatgtaccggcccaatcttcaagcttatgaacatccagcagcagctaatgaaaacaaacctgaagcaaatggacagcctcatgcccctcatgatgaccgcacaggacccaagcagcgctcccgagaccgacgggcagtttctgccctgcgccccggagcccactgaccctcaaaggctgtcttcctccgaggagaccgaatctacccaatgctgccccggttcaccagtcgcacaaaccgaaagtccatgcgatctcagcagcattgtcgaggaggaaaatacagaccggagctgccgcaagaaaaataagggtgtcgaaagaaagggggaagaggtagagccagcccctattgtcgacagtgggaccgttagcgatcaggattcatgtctgcagtcgctcccggactgtggcgtgaaaggcacagagggtctatcctcctgcggtaaccggaacgaggagacgggtacaaagtcaagcggaatgcctaccgatcaggaaagcttgtcgagcggggacgcggtcctgcaacgggatctggttatggagcccggtaccgcccagtattcctccggcggtgagctgggcggaatcagcaccaccaatgtctctacacctgacaccgccggtgaaatggaacacggattgatgaatcccgatgccacagtgtggaagaatgttctccagggtggagagagcaccaaagaaagattcgaaaattctaatattgggacagccggagccagcgatgttcatgttaccagcaaacctgttgacaaaatctcggtgcctaattgcgcaccagcagcgtcatccctcgatggcaataagcctgcggagtctagcttagctttctcaaatgaggaaacctcaacggaaaagaccgctgaaactgagactagcaggtcgcgtgaagaatcagcagatgcgcctgtggaccagaattctgtggtgattcccgccgctgccaaagacaaaatatccgacggactggaaccctatacccttttagcagcaggaattggtgaagccatgtctccaagcgacctggcgctgttggggctggaagaggacgtcatgcctcaccagaactcagagaccaatagttcacacgcccagtctcaaaaggggaagtcatctcctatctgtagcactactggcgacgataagctttgcgccgatagcgcctgtcagcaaaatacagtgacttcaagtggggatttggtggcgaagctgtgcgacaatatagtgtctgaatcggagtctaccactgcccggcagcctagctcacaagatcctccggatgcctctcactgcgaagacccccaggcacacacagtgacatctgatcccgtccgcgatacccaggaaagggccgatttctgcccctttaaagtggtggataacaaaggtcaacgaaaagatgtgaagctggataaacctttgaccaacatgttggaagtcgtttctcacccccaccccgtggttcctaagatggagaaggaactcgtccccgatcaagcggtaatttcagattccactttttctcttgccaactctccgggcagcgaatctgttacaaaggacgatgcactcagctttgtgccatcacaaaaggagaaagggaccgctacacctgaactgcatactgctacagactacagagatggcccagacggaaactctaacgagcctgacacacgccctctcgaggatagagccgtgggtctttctaccagcagcaccgccgctgaactccagcacggaatggggaacacgagcctgaccggactgggcggcgaacatgagggccctgcacccccggccatccctgaagctctgaacatcaagggtaacaccgacagtagtctccaatccgtgggcaaggccacactggcgctggattcagtcctgaccgaggaaggtaagctgctggtggtgagcgagagttccgcagcgcaggaacaggataaggacaaggcggttacttgctcttccatcaaagaaaatgctctgtcttctggcacacttcaggaagagcagcgaacacctccacctggacaggatacccaacaattccacgaaaaatccatttccgcagattgtgcaaaagacaaggccctacagcttagtaatagccctggagcttcctccgctttcctgaaggccgaaacagaacacaataaagaggtcgccccacaagtgagcttactgacacagggcggcgctgctcaaagcctggtgccacctggggcaagtctggccaccgagtccaggcaagaagccctaggggcagaacacaatagctcagctctgctcccttgtttgctgcctgacgggtcggacggaagcgatgctcttaactgttcccagcctagtccacttgatgtaggagtcaagaatacacaaagccagggaaagacctctgcttgtgaggtgagcggtgacgttactgtagatgttacgggtgttaacgcactacagggcatggccgagcctcggcgcgagaacatcagccacaatactcaagatatactgatacctaatgttctcctctcacaggagaaaaacgcagtgctcggattaccagtcgcactgcaggataaagcagtaacggatccacagggggtggggacccccgaaatgatccccttggattgggaaaagggtaagctggaaggggcggaccactcctgcacaatgggggatgcagaagaagcccagatagatgatgaggctcaccccgtcctgctgcagccagtggccaaagaattacctacagatatggaactctccgcacacgatgatggagcccccgccggggtgagagaagtgatgcgagcccccccctctgggcgcgagagatctacaccatcgctcccctgtatggtgagtgcacaggatgctccgttacctaagggtgccgacttgattgaggaagcagcttcccggatcgtggacgccgtcatcgaacaggtgaaagccgcgggggccttattaaccgagggggaggcgtgccacatgtcactgtccagtccggagcttggcccactgactaagggcctagaaagcgcctttacagagaaagtgtccacattccccccaggtgagagcttgccaatgggttccaccccagaggaagctacggggtctctcgcgggttgctttgcaggcagagaagaaccggagaaaatcattctgcccgttcagggacctgaaccagcggccgagatgccagacgtgaaggcagaagacgaggtagactttagggccagttctatttccgaggaggtggccgtcggctcaatcgccgcaactcttaagatgaaacagggtccgatgactcaagcaatcaaccgagagaactggtgcacaatcgaaccgtgccctgatgccgcttcccttctcgcctctaaacagtcccccgagtgcgaaaattttctggatgtgggtctcggccgggagtgcacctccaagcaaggcgtgttaaagcgtgaaagtggatccgactcggacctgtttcatagcccctctgatgatatggacagtattatcttccctaaaccagaggaagagcacttggcatgcgacatcactggttcatcctcaagcaccgacgatactgctagcctcgatagacacagcagccacggcagcgatgtctctctctcccagatacttaagccaaatagatccagggaccggcagtctctggatgggttctattcacatggcatgggtgccgagggaagggaatctgaaagtgaaccagccgatcctggagacgtcgaggaggaggaaatggactccattaccgaagttccagccaattgtagtgtgttaagaagcagcatgaggtcccttagcccttttcgtcgccacagctggggacccgggaagaacgccgcttccgatgcagagatgaaccatagaagcagtatgagagttctgggcgacgtcgtgaggcgtccgccaatccataggcggtccttttcccttgaaggactgactggcggcgcaggcgttgggaacaagccttcgagcagtctggaagtcagttcggccaatgccgaggagctgcgccaccccttctccggagaagagagggtggactcgctggtttcactgtccgaagaagatctggagtccgatcagcgggaacaccgcatgttcgatcaacagatctgtcaccgtagcaagcagcaagggtttaattattgtacttctgcgatctcttctcccctgacgaagagtatatctctgatgacaatctcccatccgggtctcgacaactccagaccattccacagtaccttccataatactagcgcgaatttgaccgagagcattacggaggaaaactacaatttcctgccccactcacctagtaaaaaagattccgaatggaagtcggggactaaagtgtcccgcacgtttagctacatcaagaataaaatgagttccagcaagaagtcaaaggaaaaggagaaggagaaagacaagattaaagaaaaggagaaagacagcaaggacaaggagaaagacaaaaagacggtcaacggtcacaccttcagtagcatccccgtggtgggacctatttcctgttcgcaatgtatgaaaccatttacgaacaaggatgcatatacttgcgcgaactgctcagcttttgttcacaagggctgccgggagtctttggccagctgcgccaaggtgaagatgaagcagcccaaagggagcctgcaagcccacgatacttcctctttacccactgtcatcatgagaaacaagccttctcaacctaaagagcgacccaggtcggccgtgctgttggtcgacgaaacagctacaacgcctatcttcgcgaaccgccggtcacagcaatcagttagcctatcaaaatctgtgagcattcaaaacattactggagtgggtaatgacgagaatatgagcaacacgtggaaattcctgtctcattccactgactcacttaataaaattagcaaggtgaacgagagtaccgaaagcctgaccgacgagggggtcggcaccgacatgaacgaagggcagttgctaggtgactttgagatcgaaagcaaacagttagaggccgaatcgtggtccaggatcattgattccaagttccttaaacagcagaagaaagacgtcgtgaaaaggcaggaggttatttatgagcttatgcagaccgaatttcatcatgtccgcaccctcaagatcatgtctggggtctacagtcaggggatgatggccgaccttctttttgaacagcaaatggtggagaaattgtttccttgtcttgatgaactgattagtatccatagccagttcttccagcgaattctggaaaggaagaaagagtccctggtcgataagtctgaaaagaatttcctgatcaaacgtattggggacgtgttggtcaatcagttcagcggcgaaaatgccgagagactgaaaaagacatatggaaagttttgcggtcagcataatcaatctgtgaactactttaaggacttatacgccaaagacaagcgcttccaagcttttgttaagaaaaaaatgtcttccagcgtggtcaggcgactgggcattcctgagtgtattctgctggtgacacaaagaatcactaaatacccagtgttattccagcggatcctgcagtgcacaaaggacaacgaggtggagcaggaggatctggcgcagtctctctccctcgtcaaagacgtaattggcgccgtagacagcaaagtcgcatcctacgagaagaaagtccggttgaacgagatctataccaaaactgactccaagtcaatcatgagaatgaaaagtgggcagatgttcgccaaggaggatctgaaaaggaaaaaactggtcagggacgggtcagtattcctgaaaaacgcagccggccgactgaaagaggtccaggcagtgcttcttacagatattctggtgtttctgcaggagaaggatcagaaatacatttttgccagtctggatcagaaatccactgtcatatctttgaagaagttgatcgtccgagaggtcgcccatgaggagaaggggctcttcctgatcagcatgggtatgacagatcccgagatggtggaggtgcacgcttcaagtaaagaggagcgtaactcatggattcagattatccaggataccatcaatactctgaacagagacgaagatgagggtatcccatcggagaacgaagaagagaaaaagatgctcgatacgagggctagagagctcaaagagcagcttcatcagaaagaccaaaaaatcctcctgttactcgaagaaaaagagatgatctttcgcgacatggcagagtgcagtactccactgcctgaagactgtagtccaactcactctccaagggttctgtttcgttccaataccgaagaggccctgaaggggggtcctctgatgaaatctgcgatcaacgaagtcgaaattctgcagggccttgtcagcggcaacctgggtggcacactcggccccacagtgtcttctcccatcgaacaggatgtggtgggccccgtgtcactacctaggcgagctgaaacatttggtgggttcgactcgcaccagatgaatgccagtaagggtggcgagaaggaggaaggggatgatggacaagacctgagaagaactgaatccgacagcgggctgaaaaaggggggaaacgctaacctggtctttatgctgaagcggaatagcgagcaggtggtacagtcggtggtgcatttgtacgagctgctatcagccctgcagggagtggtccttcagcaggatagctacattgaggatcagaaactcgttttgtcggaaagggctttgacaaggtccctgtctagaccgagttccttaatcgaacaggagaagcagaggagcctggagaagcagcgtcaggacttggctaacctgcagaagcagcaggcacagtacctggaagagaagcgtcgacgtgagagagagtgggaagcccgggaaagagaactgcgcgaaagggaagctctgctagcccagcgggaagaggaggtccaacagggccagcaggatttggaaaaggaaagggaagagttacagcagaaaaaagggacttatcaatacgaccttgagcggctgcgagccgcccagaagcagctggaaagggagcaggaacagctgaggcgggaggccgaacgactctcccagcgacagacagagcgggacctgtgtcaggtgtcccatccacacacgaagttgatgcgcattccctccttcttcccatctccagaggaacccccttccccgtccgctccatctatcgccaaaagcggctcactggattcagaactgtccgtgtccccaaaacggaatagcatttcccgcacacataaagacaagggcccttttcacatcctttctagtacctcccagacaaataagggaccagagggccagagccaagctcccgctagcacctcagcctctacccgattgttcggcttgaccaagccgaaagagaagaaagaaaaaaagaaaaagaataaaacatcgcgaagccagcccggggacggtcctgcgtccgaggtttctgcagaaggcgaggagattttctgctag

SEQ ID NO: 170984 - DNA, 8379 bp, Artificial Sequence
  derived and/or modified sequence
aagctgctggagaagcagccccccatcgagggcgactgcgtggtgacagtccttctggctgaggaggataaggctgaggatgacgtcgtgttttacctggtctttctcgggtcaacccttcgacactgcaccagcacgaggaaggtctctagtgacactctggagaccatagctcctggtcatgactgttgtgagacggtcaaggtccaactctgtgcctctaaggaaggcctcccagtctttgtcgtggctgaagaggacttccacttcgtgcaggacgaagcctacgacgccgcccagtttctagctaccagcgccgggaatcagcaggcactgaattttacccgatttctggatcagagcggtcctccatcaggtgacgtaaattctctggataagaaactagtgttggccttcaggcatttgaaactcccaactgagtggaatgtgctaggcacagaccaatctctgcacgacgctggccctcgggagacgctgatgcacttcgctgtgcgtttgggacttctcaggctcacatggtttctgctccagaaaccaggcggaagaggcgcactgtcaattcataatcaggaaggcgccacacctgtttctttggcccttgaaaggggatatcacaagcttcatcagctactaaccgaggaaaacgctggcgagccggattcctggtcctcactatcttatgagatcccatacggcgattgcagcgtgaggcaccaccgggaactcgacatctacactcttacttccgaatcggattctcaccacgagcacccattcccgggggacggttgcacaggaccaatttttaagcttatgaatatccaacagcaactcatgaagactaatcttaaacagatggattcccttatgcccctgatgatgaccgcccaggacccttcctccgctcctgagaccgatggccagttcctgccatgcgctcccgagcccaccgacccccagcggttgtctagtagcgaagaaaccgagtcgacgcagtgttgcccagggagtcctgttgcacagaccgagtcaccgtgtgacctgtctagcattgtcgaggaagagaacaccgatcgcagttgccggaagaagaacaaaggagttgaacgaaagggtgaagaagttgaaccagcccccatcgtggactctggcaccgtctcagatcaggattcctgtctccagagtttgcctgattgtggcgttaaaggcacagaaggcctctcctcctgtgggaaccgtaatgaggagacggggactaagtcctcaggaatgcctactgaccaggagtccttgtccagcggggatgccgttctgcagcgggatttagtcatggaacccggcactgcccaatatagtagtggcggtgagctaggcggtatctctacgactaacgtgagtacacccgacactgccggcgaaatggaacatggattaatgaacccagatgccaccgtgtggaagaatgtgctacagggtggggagtcaacaaaggaaaggttcgagaatagcaatattggaacggccggcgctagcgatgtgcatgtgacgagtaaaccggtagataaaattagtgtccccaactgcgccccagctgcgtcttcgctggacgggaacaaaccagccgagagcagcctcgctttctctaatgaagagacatctactgagaaaacggctgagaccgagactagccgctcccgcgaggagtcggctgatgcccccgtggaccagaactcggttgtgatccccgcagctgctaaggacaaaatctccgacggcctggaaccatatactcttctagctgctggcatcggcgaggcgatgtcgcctagtgatttggccttgctggggctcgaagaggatgtaatgccacatcagaattcagaaacaaatagttcccacgctcagtcgcaaaaagggaaaagctcgcctatctgttctactaccggagacgataagttatgcgccgacagcgcgtgtcaacagaacactgttacgagctctggcgacctggtggccaagctctgtgacaacattgtgtcagaatcagaatctaccacggcacgccagccaagctctcaggaccctcccgatgcctcacattgtgaggatcctcaggctcacacggtgacctctgacccagttcgggacacgcaagagagggctgatttttgtccgttcaaggtcgtggacaacaaagggcagagaaaagacgtgaaactggataaacctttgacgaatatgcttgaagttgtaagccatccccatcctgtagtgcctaaaatggaaaaggaactggtacccgatcaggctgtcattagtgactctactttctccctggccaactccccaggctctgagtcagtgaccaaagacgatgccttgtcctttgtcccctcccagaaggaaaagggtacggccacacccgaattacatacggcaaccgactatagagacggcccagatgggaattctaatgagcctgataccagacccctggaagacagagcagtgggccttagtactagctcaactgccgccgaactccagcatgggatgggtaacacaagcctgactggcctcggcggtgagcatgagggacctgcaccccccgccattcccgaggccctgaatattaaaggcaatacagatagtagtctgcagtcagtgggcaaggctacgcttgccttggactctgtgctgacggaggaaggcaaactactggtggtgtcagagagctcggccgcccaagaacaggataaggacaaggcagtgacatgcagcagcataaaagagaatgccttatccagcggaaccttgcaggaggaacaacggacacccccacccggccaggacacacagcagtttcacgaaaaaagcatcagcgccgattgcgcaaaggataaagccctgcaactgtcaaattcccccggagcttctagtgcgttcctgaaggcggaaacggagcacaacaaggaagtcgccccacaggtcagcctactcacgcagggtggagcagctcagtccctggtgccacctggagcgtcactggctactgagtcaaggcaggaggccctgggggccgagcataacagttccgccctccttccgtgcctcttgcccgacggttccgatggctccgatgctctgaactgctctcagccatcgcccctggatgtcggagtgaagaatacacagtctcagggaaagacctccgcttgtgaggtaagcggggacgtaacagttgacgtcactggcgtgaatgcccttcaggggatggcagaaccgcgtagggagaatattagtcacaacacacaggatatattaatacctaatgttcttctctcccaggagaaaaatgccgttctaggactgccagtcgcactgcaggataaagccgttactgatccccaaggcgttggcacgcctgagatgattccgctggactgggaaaagggcaaactggaaggtgcagaccactcctgcactatgggggacgcagaggaggcccagattgatgatgaggcccatcctgtcctgctgcaacccgtagcaaaagagctccccaccgatatggagctttcggctcacgatgacggggcccccgctggggtgagggaggtcatgcgcgctcccccatcagggcgcgagcgtagcacccctagtcttccatgcatggtgagcgctcaggatgcacccctcccaaagggcgctgacttgattgaggaagcggcctctagaattgtcgatgccgtgatcgagcaggtcaaagctgctggagcacttctgaccgagggcgaggcctgccatatgtccttgagctctcccgagcttgggccgctgacgaagggcctggaaagtgccttcactgagaaggtgagcacgttccctcctggtgagagcctgcctatgggatctactcccgaggaagcgactggctcactggccggctgctttgctggccgcgaggagcctgaaaaaatcatattacctgtccaggggcctgagcctgctgctgaaatgcccgatgtgaaagcagaggatgaggttgattttcgcgcctcttccataagtgaggaggtcgccgtcggttcaattgccgcaaccctgaaaatgaaacagggacccatgacgcaggccatcaacagggaaaattggtgcacaattgaaccctgtcctgacgctgcttccctcctcgcttccaaacagtcaccagagtgcgaaaatttcctcgacgtgggtctgggaagggagtgtactagtaaacaaggcgtgcttaagagggagtcaggtagcgattccgacttgtttcattctccctcagacgacatggactccattatatttcccaaacccgaggaagagcacctcgcctgtgatataactggcagttcatcctccactgatgatacagcctccctcgaccgccattcaagccatgggagcgacgtcagtctctctcagatactcaagcctaatcggtcacgggatcgccagtcactggacgggttttactcacatggcatgggggccgagggccgagaaagtgagagtgaacctgccgaccctggggacgtcgaggaagaggagatggatagcattacggaggtgcctgccaactgcagtgtgcttcgttccagtatgcgatcactctctccctttcgccggcacagctgggggccaggcaaaaacgctgcctccgacgctgagatgaaccatagaagcttttctctggaagggcttacagggggagctggagtcgggaacaagcccagcagcagcctagaggtgagctcagcaaatgcggaggagctcaggcatcctttttcaggagaggagcgggtagactccctggtgtcattaagcgaagaggatctggagagcgaccagcgtgagcaccggatgtttgaccagcaaatctgtcatcgcagcaagcagcagggatttaattattgtacgtcagccattagttcgcctctgacgaaaagtatttcactgatgactattagtcatcctgggctggacaactcccgcccctttcacagtacttttcacaacactagcgccaatctcacagagagtatcactgaagagaactacaatttcctgccacacagcccctcgaagaaagactcagagtggaagtccggaactaaggtctccagaacgttctcttatatcaaaaacaagatgtctagttcaaagaagagcaaggaaaaagaaaaggaaaaagacaagataaaagagaaagagaaagactcaaaggataaagaaaaagataagaagactgtaaatggccacactttctcttccatccctgttgttggtcctatcagctgttcacaatgtatgaaaccatttactaacaaagatgcttacacttgtgccaattgcagtgccttcgtgcataagggttgtagagaatccttggcctcttgtgccaaagtcaaaatgaaacagcctaaaggctcactgcaggcccacgacacttccagtctgcccacggtcattatgcgaaataaaccttctcaaccaaaggagaggccacgctctgcggttctgctggtcgacgaaacagctacaacacccatcttcgcgaatcggcggagtcagcagtcggtatccctgtcaaagtcagtcagcatccagaatattactggggtgggaaatgatgagaatatgtctaacacgtggaagttcctctcccatagcaccgattcactgaacaagatctctaaagtgaacgaaagtactgaatccttaactgatgaagggactgatatgaatgagggccagctcctcggagattttgaaattgagagcaagcagctggaggctgaatcatggtcgcggatcattgattctaaatttcttaagcagcagaagaaggatgtcgttaagagacaggaggtgatctacgaactgatgcagactgagttccatcacgtgcgaacccttaagataatgagtggcgtttactcacagggtatgatggctgacctgctatttgagcagcaaatggtagaaaagctattcccatgtcttgacgagctcatcagtatccacagtcaattttttcagcgcatcctcgagaggaagaaggagtctcttgtggacaagtctgaaaaaaactttctgataaagcgtattggggacgtgctggtgaatcaattttcgggagagaatgctgagagactcaaaaagacgtatgggaaattctgcggccaacataaccagagcgtaaactattttaaggacctatatgctaaagataaaaggtttcaagcgtttgttaagaagaagatgagctcttccgtggtgcgccgcctggggatcccagagtgtatactgctcgtcacccagcgtatcacaaaataccctgtccttttccagagaatactccagtgcactaaggacaatgaagtggaacaagaggacctggcacagtcccttagcctagttaaggacgtaattggagccgtggattcaaaagttgcaagctatgagaaaaaggtgcggctgaatgagatctacactaaaaccgacagcaaaagtatcatgcggatgaaatccggacagatgttcgccaaagaggatcttaaacgaaaaaagctggttcgggatggatccgtgttcctcaaaaatgctgcgggccgcctgaaggaggtgcaggcggtcctgctcacagatatcctggtgtttctccaggagaaagatcagaagtatattttcgccagcctggaccagaagtcaactgtaataagtttgaagaagctcattgtgagggaggtagctcatgaagagaaaggcttattcttaataagtatgggtatgacagatccagagatggtggaagttcacgctagctccaaggaagaacggaatagctggattcagataatccaagacaccataaataccctaaaccgcgacgaggacgaaggcattccatccgagaatgaggaggagaagaagatgctggacacacgcgcgagagagctgaaggagcagctgcaccagaaggatcagaagatcctccttctgctagaggagaaagagatgatatttcgggacatggcagagtgcagtaccccgttgccggaggattgttccccaacgcactctccaagggtcttgtttcgatcaaatacagaggaagccttgaaaggaggccccctgatgaaatcagctattaatgaggtcgagatccttcagggcctcgtctccggaaatctgggcgggacacttggacctactgtgtcttcacctatcgagcaggatgtagtaggtcctgtgtccttgccaagacgagccgagacattcgggggatttgattctcaccagatgaacgcaagcaagggtggcgagaaagaagagggcgatgatggtcaggatctacggcgaacagaatctgacagcgggctgaaaaaaggaggaaacgctaatctcgtattcatgctgaagcgcaattctgaacaggtcgtccagagtgtggtacacctttatgaactcctttctgctctccagggcgttgtgctacagcaggatagctacatcgaggaccaaaagctggtcctaagcgagcgggcactcactcgctcactttcgcgaccttctagcctgatcgaacaggaaaaacagagatccttggaaaaacagagacaggatctcgccaacctgcagaagcagcaagcacagtacttggaggagaaacgcaggcgagaaagagaatgggaggctcgtgagagagagctcagagaacgtgaagctctcctggctcagcgcgaagaggaagtacaacaaggtcagcaagacttagagaaagagagagaagaattgcagcagaagaaagggacttaccaatacgatctggagaggttgagagcagcacagaagcagctggaaagggagcaggaacagctccggagagaggccgaacgcctgagccagaggcaaacagaacgtgatttgtgtcaggtgagtcatccgcacacaaagctaatgagaataccttcgttcttcccctcacccgaggaacccccctctccaagcgccccttctattgcaaaatcaggcagcctggactccgaactgagtgtgtctcctaagcgaaatagtatctcaagaacgcataaggacaagggaccctttcacattctctcctctacctctcaaaccaacaaagggcccgaaggccagtcacaggcccctgcatcaacgtccgcctcaacccgattatttggactgaccaagcccaaggagaaaaaggagaagaagaagaaaaataagacctctcgatcacagccaggcgacggtccagcatcagaggtttccgccgaaggggaagagattttttgttag

SEQ ID NO: 170985 - DNA, 5238 bp, Artificial Sequence
  derived and/or modified sequence
atgaagctgaacccccagcaggcccccctgtacggcgactgcgtggtaaccgttcttttggcagaggaagacaaagccgaagacgacgttgtcttttatctggtgtttctcgggtctaccctccggcactgcacatcaactaggaaggtgtcctccgatacactcgaaactattgctccaggccacgactgctgtgaaactgtgaaagtgcagctgtgcgcatccaaagaaggccttccggtttttgtggttgccgaggaggatttccattttgtgcaggacgaggcctacgacgctgcgcagttcctagcaacatccgcaggcaaccagcaggctctcaacttcacacgatttctagatcagtccgggcctccctcaggagatgtaaacagtttggataagaaactggtgctggctttcaggcaccttaaacttcctacagaatggaatgtgctggggaccgatcagtccttgcacgatgctggacctcgtgaaaccctgatgcacttcgctgttcgtctgggattgctcaggctcacctggttcctgctacagaagcctggaggcaggggcgcgctgtcaattcacaaccaggagggggctacccccgtctctctggcactggaacgtggttaccacaaattgcaccagctgctgacagaggagaatgcgggggagcctgatagctggagcagcctgtcttacgagatcccatacggagattgctcagtgcggcaccaccgtgaactcgacatctatacactgacctcagagtccgattctcatcatgagcatccattcccaggcgacggctgtactggaccaatctttaagctgatgaacattcaacagcagctcatgaagaccaatctgaagcagatggatagcctgatgcccctgatgatgactgcccaagatccctccagcgccccggagacagacggccagtttcttccctgtgcccccgagccgacggacccccagcgactgagctcctccgaagaaactgagagtacccagtgttgtccagggtctccagtcgctcagacagagtccccctgcgacctctcctctatcgtggaggaggaaaatacagatcgctcctgtcggaagaagaataaaggcgtggaaaggaaaggcgaggaggtggagccagcaccgattgtggatagtggcaccgtctctgatcaggatagctgtctgcagtcactgccggactgcggcgtcaaagggacagaagggctctcctcttgtggcaacaggaacgaggagacgggaactaagtctagtggaatgccaaccgaccaagagagtctaagcagcggtgatgcggtgttacagcgagatcttgtgatggagccaggaaccgcacaatatagcagtggtggcgagctgggaggcatctccacaactaatgtttccacccccgacactgcgggcgagatggaacacgggctgatgaaccctgacgcgacagtttggaaaaacgtactccaaggcggcgagtcaaccaaggagaggtttgaaaacagcaacatcgggacagctggtgcatctgatgtccatgtgacaagcaagcctgtcgacaaaatcagcgtgccaaactgtgctcctgcagcctctagtctggatggcaataagccagcagaatcttctctcgccttttccaacgaagagactagtacagagaaaaccgccgagaccgagacatcccgcagcagggaggagtcggcagatgctccggttgatcagaacagcgtcgtgattccagccgctgcgaaggataagatatcagacggtttagagccgtatacccttctcgccgccggtataggcgaggctatgagtcccagcgacttggctctcctaggcttagaagaggatgtcatgccccatcaaaatagcgagaccaattcctcacatgcccagtcgcagaagggcaaatcttcgccaatttgcagtactacgggggatgacaaattatgtgcagacagcgcatgccaacaaaacaccgtgacgtcttctggcgatcttgtagccaaactctgcgataacatcgtctcggaatctgagtcaaccactgctagacagcctagctcacaagatcccccagatgcaagccattgtgaagacccacaggctcataccgtcacctccgaccccgtcagggacacacaggaacgagccgatttctgcccatttaaagtagtagacaacaagggtcaacggaaggacgtgaaactggataaacccctcaccaacatgctggaggttgtcagccacccccaccctgtggtgcccaaaatggaaaaagaactcgtacccgaccaggccgtgatctcagactccactttctccctggctaactcacccggatccgagagtgtgacgaaagacgatgcactaagctttgtgccttcacagaaagagaaaggtaccgcaacacctgaattgcacaccgcaacagactaccgggacgggcctgatgggaatagcaatgagcccgatacaagaccgctggaagacagggcagttggtttgagtacgtcttccacagcggccgagcttcagcacggtatggggaacacctctctgacggggctcggaggggaacatgagggccctgctccccccgccatccctgaagctcttaacatcaaaggtaatacagactcatccctgcagtccgtcggaaaggcaacacttgccctcgactccgtgctcaccgaggaggggaagcttctggtagtgtcagaatcgtccgccgcgcaggagcaggacaaagataaagcggtcacgtgctcttctattaaggagaacgcattgagctccggcacactccaggaggagcaacgtacacccccccccggacaagacacccaacagtttcacgaaaagtccatctctgccgattgtgccaaggacaaagcccttcagcttagtaattctcccggagcttcttctgctttcctgaaggccgagactgaacacaacaaggaagttgctcctcaggtgagcctgttgacccaggggggagcggctcagtctttagtgccacccggtgcgtccttggcgacggaatcgcgacaagaagccctgggcgcggaacataatagctcagccctcttaccttgcctgctccctgatggatcagatggcagcgatgcgctgaattgtagccagccatctcccctagatgtcggggtgaagaatacccagagtcagggaaagacctctgcatgtgaggtgagcggcgacgtcacggtcgatgtgaccggtgtgaatgcactgcagggtatggctgagcctcggcgggagaacatcagccataacacccaggacatccttattccaaacgttctgctctcccaggaaaaaaatgctgtgctcggcctgccggtcgcattacaggacaaggcggtcaccgatcctcagggtgtcggcacccctgagatgatcccactggactgggaaaaaggtaagctcgagggggcggatcacagttgtaccatgggagacgccgaggaagctcagatcgacgatgaagctcatcccgtgcttctacagccggttgctaaagaacttccaacagatatggagctatccgctcacgacgacggcgctcccgccggggtgagagaggttatgcgggcaccgccttcaggcagggaaaggtcaaccccatcattaccatgtatggtgagcgcccaggacgcacccctgccgaaaggcgccgatctgatcgaggaggcagcctcccgcatcgtggatgctgttatagaacaagtcaaggcagcaggagcgctgctaacagaaggcgaggcgtgtcacatgagcctgtcttcccccgaacttggcccacttacaaagggcttggagagtgctttcacagagaaggtcagtacttttccacccggggagtctttacccatgggaagcacaccggaagaggctaccgggtccttggccgggtgcttcgccggccgtgaggagcccgagaaaatcatcctgccggtacagggccctgagccagccgcggagatgccagacgtgaaggctgaggatgaagtggattttcgcgcgagcagtatcagcgaggaagtggccgtgggctccattgctgcaaccctgaaaatgaagcagggccctatgacgcaggcaatcaatagggaaaattggtgcactatcgagccatgcccggacgcagcatcactattggcctcaaaacagagtcccgagtgcgagaacttcctggacgtcggtctgggccgcgagtgtacgtctaaacagggcgtcctcaagcgagaatcaggcagtgatagcgaccttttccacagtccttccgatgacatggattcaattatcttccctaaacctgaggaggaacatctagcttgtgacatcaccgggtccagctcctctacagacgacactgcttctctggatcggcacagttcccatgggtccgacgtaagcctatctcagatcctgaaacctaataggtcccgtgatcgtcagtctttggacggcttctactcccatggaatgggcgctgaaggcagagaatcggaatccgagcccgcagatcccggtgacgtggaagaggaagagatggattccatcacggaggtgccagccaattgcagtgtgttgaggtcgtcgatgcgttccctgtccccctttcgcaggcactcgtgggggcctgggaagaacgctgcatctgacgctgagatgaatcatcgtagcttctccctcgaagggctcactggcggagcaggcgtcggtaacaaaccctcatcttcgctggaggtcagcagcgccaatgctgaggagctaagacaccccttctccggggaagagcgggttgactctttggtctctctcagcgaagaagacctggaaagcgaccagagagaacataggatgttcgatcagcagatttgtcatcgcagcaagcagcagggatttaattactgcaccagtgcaatctcctcccctttaactaagtccattagcctgatgacaatctcacatcctgggttagataattcaagaccgttccatagcacatttcacaacacaagcgctaacctgactgaaagtatcacagaggagaattacaatttcctgccgcactccccctcaaagaaggacagtgagtggaagtctggaaccaaagtgtcacgcacttttagctacattaagaataagatgtctagcagcaagaaatcaaagtag

SEQ ID NO: 170986 - DNA, 3177 bp, Artificial Sequence
  derived and/or modified sequence
atgagctcaagcaagaaatccaaagagaaggaaaaggagaaggataagattaaagaaaaggagaaggactcaaaagacaaggaaaaggataagaaaactgtgaacgggcataccttctccagcatccccgtggtgggacctatttcttgctcgcagtgtatgaagccttttacgaataaagacgcgtacacttgtgctaactgttctgcctttgtgcacaagggatgtagggagtccctcgcctcgtgcgccaaagtgaaaatgaagcagcccaagggaagtttgcaagcccacgatacttcctcccttcccaccgtcataatgagaaataagccctcacagccaaaagagcgcccaaggagcgctgttcttctcgtggacgaaactgctacaacgcccatctttgcaaacagacgatcacaacagagtgtctctttgtctaagagcgtatctattcagaatataacaggcgtgggcaacgatgagaatatgtccaatacctggaaatttctgtctcactcaactgattctctgaataaaatatccaaagtcaacgaatccaccgagtcactgaccgatgagggggtaggaacagatatgaacgaggggcagctcctgggcgatttcgagatcgaaagcaagcagctggaggcggaaagttggtccaggataattgacagcaaatttctgaagcagcagaagaaggatgtcgtgaagagacaggaggtcatctacgagttgatgcaaactgagttccaccatgtgcggaccttgaagatcatgtctggagtttacagccaggggatgatggctgacttattgttcgagcagcagatggtggaaaagctctttccatgcctcgacgagctcatttctatacactcccagttttttcaacgtattttggagaggaaaaaggagtccctggtggataagtctgagaagaacttcctcattaaacgcataggggacgtgctcgtgaatcagttctcaggtgaaaatgcggagcgcctgaagaagacatacggaaagttttgtggccaacacaaccagagcgtgaattatttcaaagacctctatgcaaaggacaagcggttccaagccttcgtgaaaaaaaaaatgagctcttctgttgtgcgtcggttggggatcccagagtgcattctgcttgtgacacagaggattacgaagtatcccgtgctgttccagcgaatcctgcagtgcactaaggacaatgaagtcgaacaggaggacttggcccagtctttgtctttggtgaaagacgtgataggcgcagtagattctaaagttgcatcctacgaaaaaaaagtccgccttaatgagatctacaccaaaacagactcaaagagcataatgcgcatgaagtcgggccagatgtttgccaaagaggatctgaagaggaagaaactggtcagagacggtagcgtatttctcaagaatgccgcaggcagattaaaagaagtccaggctgtgctactgaccgatatactggtgttcttacaggagaaagatcaaaagtatatattcgccagccttgaccagaagtccacagtcatttcactgaagaagctcatcgtgagggaggtcgctcatgaagagaaaggactgtttctcatatccatggggatgacagacccagaaatggtcgaagttcatgccagctctaaggaggaaagaaattcttggatccagatcatccaggacacaattaacacgttgaaccgcgatgaagatgaaggtattccttccgagaatgaggaggaaaaaaaaatgttggacactagggccagggaactgaaagagcaactccatcagaaggatcagaagatactgcttctgctggaggaaaaggaaatgatctttagggatatggcagaatgttcaactcctctcccagaggattgctccccaacgcatagtcctagagtgctgttcaggagtaacacagaagaggcactgaaaggcggacctctgatgaaatcagccataaacgaagtggagattctgcaagggctggtgagtggtaatctgggcggtacgttgggccctaccgtttctagtccgatcgagcaggatgtggtcggccctgtatcgctcccaagaagagcagagacattcgggggtttcgatagccaccagatgaatgctagcaagggcggagagaaggaagaaggagatgatggacaggacttgaggcggactgagagtgactcggggctcaagaagggcggtaacgctaatttagtcttcatgcttaaaagaaattccgagcaggtggtacaatccgtggtacatttatacgaacttctgagtgcacttcaaggggtcgtgctccagcaggacagctacatcgaagaccaaaagctcgtgctcagtgagagagcgctgaccaggtcactctccagaccaagcagcttgatcgagcaggagaagcagcggagtcttgaaaaacagaggcaagatctggccaatctgcagaaacagcaggcccaatacctggaggaaaaacggcgaagggagcgggagtgggaagccagagagcgagaactgcgtgaacgggaggctctgctggcccagagggaggaagaggtgcagcagggacagcaggatttggagaaggaacgagaggaactccagcaaaaaaaaggcacttaccagtacgacctggaaaggctgagggctgcacagaaacaacttgagcgggagcaggagcagttgcgacgagaagccgagcgcctctctcaaagacagacagagagagacctctgccaggtgtcccacccccacaccaagctgatgaggatcccctcctttttccccagtccagaggaaccgccatcaccttccgctccatccatcgccaagtctggtagtttggatagcgaactgagcgtgtccccgaaacgcaatagcatttcaaggacccataaagataagggcccattccatatcttgtcttctacttcccagaccaacaagggacccgaaggccagagccaggctcctgccagcacatcagcgtctacccgcctgtttggtctgactaagccaaaggaaaagaaagagaaaaaaaagaaaaataagacatctcgaagtcaaccaggagacggaccggcaagtgaggtgtcagcagagggagaagaaatcttctgttag

SEQ ID NO: 170987 - DNA, 8441 bp, Artificial Sequence
  derived and/or modified sequence
atgaagttgaatccccagcaggcccctctttacggggattgcgtggttaccgtcctactggcagaggaggacaaagccgaagacgacgttgttttttatctggtgtttctgggaagcacgctccgacattgcacttccaccaggaaggtcagcagtgacacactggaaactatagcaccaggacacgattgttgcgagacggtcaaggtccagctgtgcgcctctaaggaggggctgcctgtgtttgttgtggccgaggaagattttcacttcgtgcaggacgaagcttacgatgccgcacagttccttgctacaagcgctggtaatcagcaggccttaaatttcacgaggtttctggaccagagcggcccacctagtggggacgtgaactctctcgataagaagctggtgttagccttccgccaccttaaattgcctaccgagtggaacgtgctgggcactgaccagtccttgcacgacgctggacccagggagaccctaatgcacttcgctgtgaggctggggcttttacgcctgacatggttcctgctccagaagcccggaggtagaggcgcactatcaattcacaatcaggagggggctacgcccgtgtccctcgctttggaacgcggataccacaagctccatcagttgctaacagaagagaatgcaggagagcccgattcttggtccagcctgtcttatgagatcccgtacggtgactgtagcgtcagacaccatcgagagcttgatatctacactctaacctccgagagtgatagccaccacgagcacccattccccggtgacggctgtacaggtcctatatttaaacttatgaacatccaacagcagcttatgaagactaatctgaagcagatggactccctcatgcctctgatgatgaccgcgcaggatccctcctccgcccctgaaactgacgggcagttcctgccttgcgcacccgagcccacagacccgcagaggctttcctcctcagaagaaactgagtcaacgcagtgttgtccaggctcacccgtcgcgcagacagaatctccatgcgacctgtcgagtattgttgaagaggagaatactgaccgctcgtgccggaaaaagaataaaggagtggaaagaaagggggaagaggtcgagccagccccaattgtcgattcgggtactgtctctgaccaggactcatgtctgcagagtcttcctgattgcggagttaaaggcacagaagggctgagtagctgcgggaacaggaatgaggagaccggcaccaagtcttccggtatgcccaccgatcaagagtccctgtcctcgggtgacgccgtattacagagagatctggtgatggagccagggacagcacagtattcctccggaggagagctcgggggtatctctactaccaatgtgtctacacccgacacagccggtgaaatggagcatggcttgatgaatccggatgccaccgtgtggaagaacgtgttacaaggcggagaatccactaaagagaggtttgaaaattctaacatcggcaccgccggtgctagtgacgtgcatgtgacatctaagcccgtggacaagatctcagttcctaactgtgcacccgctgccagcagtctggacggcaacaaacccgctgagtctagcctcgccttttcaaacgaggagaccagcaccgagaaaaccgccgagaccgagacatcccgtagtagggaggagtctgccgacgctcctgtcgatcagaactctgtggtgattccagccgcagccaaggataagatctccgacggcctggaaccgtacactctgctcgccgcaggcattggcgaggctatgtctccctcagacctggctctacttgggttagaagaagatgtaatgccacaccagaatagcgagacgaattccagccacgcccaatcgcaaaagggaaagtcctctccgatttgttctacgactggcgacgacaaactctgcgcagattccgcatgtcagcagaacaccgtcaccagctcgggagacctggtcgcaaagctatgcgataacatcgtgagcgaaagtgagtcgactacagccaggcaaccttcctcacaagatccacccgatgcaagccactgtgaggaccctcaagctcacaccgttacttctgacccagtgcgagatacccaggagagagctgacttctgtccatttaaagtggtggataataaagggcaaagaaaggacgtcaaactggacaagccactgaccaatatgctcgaagtggtatctcacccacaccccgttgtcccgaaaatggaaaaggaactcgtgcctgaccaggctgttatttctgactcaactttttcactggccaattctccaggaagcgagtccgtgaccaaggatgacgccctttcctttgtaccttcgcagaaggagaaaggaaccgctacccctgaactacatacagccaccgactaccgggatggaccagatggaaattcaaacgagcccgatactagaccacttgaggatagggcagtgggtctatcaaccagttcaactgcggctgagctccagcatggaatggggaatacctcattaaccgggctggggggagaacatgagggccctgccccacccgcaattcctgaagccctgaatattaaaggcaacacagatagttcactacaatccgtgggaaaagcgacgttagcattagactcagtgctgaccgaagagggtaaattgctggtggtttcagagtcttcagccgctcaggagcaggataaagataaagccgtaacatgcagcagtatcaaagaaaatgccctgtcttctggcactctgcaggaggaacaacgcacacctccccctggccaggatactcaacagtttcacgagaagtcaatcagcgcggactgcgcaaaagataaagcccttcaactgtctaactcccccggagccagctctgctttccttaaggctgagacagagcacaataaagaggtggcgccacaggtgagcttgctcacccagggaggggctgctcagtccttggtgccgcctggcgcttctctagcaaccgagagccgacaagaggccctgggagcggaacacaacagcagcgccctgctgccatgcctcctgccggacggaagcgatgggagcgatgcgttaaattgctcccagccatctccactcgacgttggagtgaagaatacacagtcccaagggaaaacgtctgcctgtgaggtctccggggatgtgaccgtcgacgtgaccggggtcaacgcgctgcagggaatggccgagcccagaagggaaaacatttctcataacacacaggatatcctgatccctaatgtcctgttgtcccaagagaagaacgctgtgctgggtctaccagttgcactgcaggacaaagccgttacagatccccagggggtagggactccagagatgatccctctcgattgggagaagggaaagctcgaaggggctgatcactcatgcacaatgggtgacgccgaggaggcccagatagacgacgaagctcacccagtgttgctgcagcctgtggcaaaagaactccctacagacatggagctctcggcccatgacgacggtgcacctgcaggagtgagggaggtcatgcgggcacccccatccggcagggaacgttctaccccgagccttccatgcatggtgagtgcccaggacgctcccttgcccaagggggcagacctgatcgaggaagcagccagtcgcatcgtggacgctgttatcgaacaggtgaaagctgccggtgctcttctgaccgaaggagaggcatgtcacatgagcctgtcttctccagaactggggccactaacgaagggcctggagtcagcttttactgagaaagtgtctacattcccacctggagagtccctgccgatgggatctacaccggaggaagccaccggaagcctcgctggctgctttgccggaagagaggagccggaaaagatcattctgccggtccagggacctgagccggcagctgaaatgccggatgtgaaagcagaggatgaggtcgacttcagggcgtccagtatctcagaggaggtcgctgtcgggtccatagccgcaaccctgaaaatgaaacagggtccaatgacccaggctatcaaccgggaaaactggtgcactatcgagccatgcccagacgctgccagtctgctggccagcaagcagagccctgagtgtgagaacttcttggacgtaggtctgggccgtgagtgtacttccaaacaaggagtgctgaagagagagtcaggatccgattccgacctatttcactcgccaagcgacgatatggattcaattatattccccaagccagaagaagagcacctggcatgtgacatcaccggctcctcaagcagcacagatgatacggcaagcttggataggcacagctcccatggcagcgacgtaagcctctcccagatcttgaaacccaaccgatcccgcgatcggcagtcactggacggtttctactctcacgggatgggcgcagaggggagggagagcgagagtgagcccgctgatccgggtgatgtggaggaggaggagatggacagtatcactgaggtgcccgctaactgcagcgtactgcggtctagcatgcggtcgctgagccctttccgcagacactcttggggccctggtaagaacgccgcatcagacgcagaaatgaatcaccggtcttctatgcgagttctcggcgacgtggtgcggaggccacctatccaccggaggagtttctcgctcgagggcctgacagggggagctggagttggcaataagccatcgagctctcttgaggtgtcctccgccaatgctgaagaactgcgccacccattcagtggagaagaaagggtggacagcctcgtgtccctgtcggaagaagatctggaaagcgatcagcgggaacatcggatgttcgaccagcaaatctgccatcggtctaaacagcaggggtttaactattgcactagtgccatcagcagcccccttacaaagtccatttcactgatgaccatcagtcatccaggcttagataacagccggccatttcactcaacgtttcataatacatctgccaatctgaccgagagtattaccgaagagaactacaatttcctgccgcatagccctagcaaaaaagactcggagtggaagtcgggcaccaaggtgtctcgcactttctcgtatatcaagaacaaaatgtcttcgtccaagaaaagtaaggaaaaggaaaaggaaaaagataagatcaaagagaaggaaaaggacagtaaggacaaggaaaaagacaaaaaaactgtgaacggtcacaccttttcttcgatccccgtggtgggcccaatttcatgttcccagtgtatgaaaccttttactaacaaggatgcctacacatgtgcgaattgtagtgcatttgtccataaggggtgtcgggaaagcctggcatcttgcgctaaggtcaagatgaagcagcccaagggcagcctgcaagctcacgacactagcagcttgcccacggttatcatgcgcaacaaaccatctcagcccaaggagcggcctcggtccgctgtgttgctggtggacgaaaccgccaccacaccgatcttcgctaatagaaggtcccagcagtccgtaagtttatcgaagtcggtcagcattcagaatatcactggggttggtaacgacgaaaacatgagcaatacatggaaattcctctcgcactctaccgatagtctgaataaaatcagtaaagtgaatgagtcaaccgaaagccttactgacgagggggtggggaccgacatgaatgaaggacagctcctgggggattttgagatcgagtccaagcagcttgaggcagagtcctggtcgcgcatcatagactcaaagtttctgaaacagcagaaaaaggacgtggtgaaaaggcaggaagttatttacgaacttatgcagacagaattccatcacgtgagaactctgaagatcatgtcaggagtctatagccaaggaatgatggcggatttattgttcgaacaacagatggttgaaaagctattcccttgccttgatgagcttatctccatacattcccaatttttccagcgtatcttagagcggaaaaaagagagcttagtcgataagagcgagaagaacttccttatcaagaggataggagacgtcttagtgaatcagttctctggagagaatgctgagaggctgaagaaaacttacggaaaattttgtggccagcacaatcagtctgtaaactactttaaagacttgtacgcaaaagacaagagatttcaggcgttcgttaagaaaaagatgtcttcctccgtcgtgagacgcctggggatacctgagtgcattttgttggtcacacagaggattaccaagtatcccgttctgttccagcggatcctgcagtgtactaaagacaatgaagtggaacaggaggacctggcccagagtttgtccctggttaaggacgtcattggggcagttgattccaaggtcgccagctatgaaaaaaaggttcggctgaacgaaatatataccaaaacagatagcaagtctataatgcggatgaaatccgggcaaatgttcgctaaggaggacctgaagcggaaaaagctggttagagatggcagtgtttttctgaagaatgccgctggacgactgaaggaggtgcaggctgttcttctgacagatatcttagtgtttctccaagaaaaggaccagaagtatatctttgcttcgctggaccagaagtcaaccgtcatcagtctcaagaaactcattgtgagggaagtcgctcatgaagaaaagggcttgtttctcatctcgatgggtatgacggaccctgagatggtggaggtccacgccagctccaaggaggagcggaactcatggattcagataatccaggatacgatcaacaccttaaatagagatgaggacgaaggcatcccaagcgagaatgaggaggagaaaaaaatgttggacacgcgcgcacgtgagttgaaagagcagttgcatcagaaagaccagaaaattctgctgttgctggaggaaaaagagatgattttcagagacatggccgagtgcagtacacccctgcccgaggattgcagtcccacacattcccccagggttctctttaggagcaacactgaggaggcactgaaagggggaccactaatgaagagcgccattaatgaggttgagattctacagggcctggtcagcggtaatttgggcggtaccttaggcccaacagtatcgagtccaatcgagcaggacgtggtgggcccagtatcccttcctcgccgagccgagacgtttggcggtttcgactcgcaccagatgaatgcttctaagggaggggagaaagaagagggggacgacggccaagacctcaggagaaccgagagtgatagtggactcaagaaaggagggaacgccaacctggtgttcatgctcaagcgcaatagcgagcaagttgtgcagagtgtggtccatctgtacgagttgctgagtgccctgcagggcgtggtgcttcaacaggatagctatatagaagaccagaaactagtactgtctgaaagggctctgactcgcagcttaagtcggccttcttcccttattgaacaggagaagcaacggagtctagaaaagcagcgccaagacctggcgaatctgcagaaacagcaggcccagtatctcgaggagaagcgccgaagagagcgcgagtgggaggcccgagaacgggagctgagagaacgggaggcactgctagctcagagggaagaggaggtccagcagggtcagcaagatctggagaaggaacgcgaggaactccagcagaaaaaaggtacctatcagtatgatctggagaggctcagggctgcccaaaaacaattggagcgggaacaggaacagctccgtcgtgaagctgaaagactgagtcagcggcagacagagcgggatctctgtcaggtttctcatccgcacacaaagctgatgcgaatccctagtttctttccttctcccgaggagcctccatcgcctagcgcccctagtattgctaagagtggaagtcttgattcagagctgagtgtgagccccaagcgtaacagcatcagcagaacccacaaagataaaggaccttttcacatcctgtccagcacatcccagacgaacaaaggcccagagggacagagccaagccccagcctctacctctgcgtccactcggctttttggcttaaccaaacctaaggaaaaaaaagagaagaaaaagaagaataaaacctcccgttctcagccaggggatggtccagccagtgaggtctctgcagagggagaggagatcttctgtta

SEQ ID NO: 170988 - DNA, 8378 bp, Artificial Sequence
  derived and/or modified sequence
aaattgttggagaagcagcctccaattgagggtgattgcgtggtcacagtcctgttggcagaggaggacaaggcagaggacgacgtcgtcttctatctggtgtttctgggcagtactctgcgacactgtacctctacacgcaaagtgtcttcagatacactggaaaccattgctccagggcacgattgctgtgagaccgttaaggtgcaactgtgtgcaagtaaagagggactccccgtttttgtcgtggccgaggaggacttccactttgtccaggatgaagcctatgatgccgcacagtttctcgcgacaagcgccggaaaccaacaggccctcaatttcaccaggtttctcgaccagtccggaccaccttctggagatgtcaattctctggacaaaaagctggtgcttgctttccgccacctgaagctaccaactgaatggaacgtgctaggcacagaccaatccctccacgatgccggacccagagagacgctcatgcatttcgctgtgcgacttggcctgctccgcttgacctggttcctgctccaaaagcccggtggcagaggggctctgtcaatccataaccaggaaggagccacccccgtgtctttggccctggaacgaggttatcacaaactgcatcagctgctgacagaggagaacgcgggtgaacctgattcctggtccagcttgagttatgagattccctatggggactgctccgttcggcatcatagggagcttgacatctacaccctgacctctgagtccgattcccaccatgagcaccccttcccaggcgacggctgtacaggacctatattcaaattgatgaatatccagcaacagctgatgaaaactaatcttaagcagatggattctctcatgcccttgatgatgactgcccaggacccatcctccgccccagagaccgatggccaattccttccctgtgcacctgagccaaccgatccccaacgacttagcagcagtgaggagactgaatctacgcaatgctgccccggttcacctgtcgcccagaccgagagcccgtgtgacttaagctctatcgtcgaggaggaaaatactgacaggtcgtgccggaagaagaacaagggcgtggaaagaaagggcgaagaggtcgagcccgcacccatcgtcgatagcggcacggtctcagatcaggattcttgtctgcagagcctgccggactgtggagtcaaggggactgaaggccttagctcttgcggaaaccggaatgaggaaacgggcaccaagtcctctggcatgcctacagatcaggaaagtttgtcatcaggggacgctgttttgcagagggacttggtaatggaacccggaactgcgcaatactcctcaggtggagaactcggagggatttccactaccaatgtgagcactcccgatacagccggtgagatggagcacggtctgatgaacccagatgccacagtttggaaaaacgttctgcagggtggggagagtactaaggagcgtttcgaaaactctaatatcggcactgccggagcctctgacgtgcatgtcacatccaaacccgtggacaaaatcagcgttccaaactgcgccccagctgcatcaagtctggacgggaacaagccggcagaaagctcccttgccttctccaacgaagagacttcgacagagaagacagcggagaccgaaacgtcacggtctagagaggagagcgcggatgcccctgttgaccagaacagcgtagtgatccctgcagctgccaaggataagatttctgatgggcttgagccatataccctccttgctgccggtataggggaagccatgagcccgtctgacctcgctctactgggcctggaagaagacgtaatgccacaccaaaatagtgaaacgaacagttctcatgctcagtcgcagaagggaaagtcctctccaatctgtagcacaactggtgacgataaactttgtgcggattctgcatgtcagcagaatactgtaacgtccagtggtgatttggtggccaaattgtgcgataatattgttagcgagtccgagagtaccacggcccgtcagccatcatcacaggatccacctgatgcgagtcactgcgaagacccgcaggctcatactgtcacaagcgaccccgtgcgggacacgcaggagcgggctgatttctgtcctttcaaagtggtcgataataaaggacagagaaaggacgtcaagttggacaagcctctcaccaatatgctggaggtggtcagccacccacatccagtggtcccaaagatggagaaggagctagtgcccgatcaagcggtaatttcagactccaccttttccttagcgaactctcccggttcggagtctgttaccaaagacgacgccctgagcttcgtgccaagccagaaggagaaaggtacagccactcccgagctgcacaccgctactgactaccgcgacgggcctgacggaaattcaaatgagcctgacacacggcctctcgaagaccgcgctgtgggactgtccacgtcgagtactgccgcagagctccagcatggaatgggcaataccagtttaactgggctgggcggagaacacgaggggccagctccccctgcaatccctgaggcattgaatattaaagggaataccgatagtagcctgcaaagcgtgggcaaagcaaccttggcactggatagtgtgctgacagaagaaggcaagctcctggtggtgagcgagtctagcgctgctcaggaacaagacaaagataaggccgtcacatgtagtagtattaaagaaaacgcactgtcttctggcaccctgcaggaggagcagcgcacccctccccctggccaggacacccagcagttccacgagaagagcatctcagcggattgtgccaaagacaaagcactgcaactgtctaattcaccaggcgctagcagtgcgttcctgaaggcggaaaccgaacacaacaaagaggtggcaccacaggtgagcctgctgactcaggggggtgcggcacaatccctggtgccccctggcgcaagcttagcgactgaaagtcgccaggaagccctgggagccgagcacaactcgtccgctctgttgccttgcctgctgccagatgggtccgatggttcagatgccctcaattgcagccagccgtcgccactggatgttggagtgaagaacactcagagccaagggaagacatccgcctgcgaggtgagcggggacgttacagtagacgtgacaggggtgaatgctctgcaaggtatggcggaacctcgacgggagaatatatctcacaatacacaggacattctcatacccaatgtcctgctatcacaggagaaaaacgcagtcctcgggctacccgttgctctgcaggataaggccgtaacagacccacagggagtagggactcccgagatgatcccccttgattgggaaaagggcaagctggagggagctgatcacagttgcactatgggtgatgctgaggaggcccagattgacgacgaagcccaccccgtgttactgcaacctgtcgcaaaagaattgcccactgatatggagctgtccgcccacgatgacggggcaccagcaggggtgcgtgaagtgatgagggcccctcctagtggcagggagagatcaaccccctcactgccctgcatggtaagcgcgcaagatgccccactgcccaagggggctgaccttatcgaggaggccgcttcaagaattgttgatgccgttattgaacaggttaaggccgctggggcactcttaaccgagggcgaagcatgtcatatgtcattgagtagccccgagctggggcctcttaccaaggggctggagtcagcctttaccgagaaggtttccactttcccacctggcgagtcactaccaatgggttcaacccctgaggaggctaccggcagcctcgcagggtgtttcgcagggcgagaagaacccgaaaaaatcatcctgccagtccagggacccgagcccgctgccgagatgccggatgtgaaagccgaagatgaggtggacttccgtgcaagctctatcagcgaggaggtagcagtcggtagcatagcagccacattaaaaatgaaacagggccctatgacacaagcgatcaaccgagagaactggtgcacaatagaaccatgtccggacgccgcaagtctgttggcgtccaaacaaagccccgagtgcgaaaattttcttgacgttgggctcggtagggagtgcaccagcaaacagggcgtgctgaaacgggaatctggatccgatagtgatttattccacagtcctagtgatgacatggactctataatcttccccaaaccagaagaagaacacttagcatgtgatatcactgggagcagtagcagcacagatgataccgcctcattggaccgccattctagtcacggatctgacgtctcactgagccagatcctgaaaccaaaccggagtagagataggcagtctctggatggcttctacagccacggtatgggggctgaaggacgagagtcggaaagcgaacctgccgacccaggggatgttgaggaggaagaaatggattcaatcacggaggtacctgccaactgcagtgtcctgagatccagcatgcggtctctctccccattccgaagacactcatggggaccaggaaagaacgcggcatccgacgccgagatgaaccacagaagtttctctttagagggactcaccggtggagccggagtgggaaacaaaccttcgtcctctttagaagtgagctcagcgaacgccgaagagctaaggcatcctttttctggagaagagagagtcgactctctagtgagtctcagcgaggaagacctcgaatccgaccagcgggaacaccgtatgttcgatcagcagatttgccacaggagcaagcagcagggctttaattactgtaccagcgccatttccagtcctcttactaagtctataagtctgatgactatctcgcatcctggacttgacaactccaggccattccactcaacatttcataatacttctgctaatctgacagagagcatcaccgaagagaactacaacttcttgccccatagcccaagcaaaaaggatagtgagtggaagagcgggactaaggtgagccggaccttctcatacatcaagaataagatgagttcatcaaagaagtccaaagaaaaggagaaggagaaggacaagattaaagagaaagagaaagattctaaggataaagaaaaagacaagaagactgtgaacggccatacattcagctctattccagtggtcgggccaattagttgctctcagtgcatgaaaccatttacaaataaggacgcctacacgtgcgccaattgttctgccttcgtgcacaagggctgcagggagtctctcgcctcgtgtgcaaaggtaaagatgaaacagcctaaaggctccctccaggcccatgatacatcatcattgcccacagtgatcatgcgcaataaaccaagccagccaaaggaacggcctagatcagccgttctgctagttgacgagactgccaccaccccaatattcgctaaccggagatctcagcaatctgtatctctgagtaaatcagtgagcatccagaacattaccggcgtcgggaatgacgagaacatgtctaatacatggaaattccttagccacagtacagacagcctgaataaaatcagtaaagtgaacgagagcactgagagtctgaccgacgaggggaccgacatgaacgaagggcagctgctgggggacttcgagattgagagcaagcaactggaagcagagtcttggagcagaattatcgattccaagttcctaaaacagcagaagaaagacgtggtgaaacggcaggaggtgatctatgaattaatgcagaccgagttccaccacgtgagaacactgaagataatgtccggagtttattcacagggcatgatggccgaccttctctttgaacagcaaatggtggaaaagctattcccatgcctagacgagttgatttcaattcacagccagtttttccagcgaatcttagaaagaaaaaaggagtccctcgttgacaaaagtgaaaagaactttctgatcaagcgtattggagacgtgctcgtaaatcagtttagtggggagaacgcagagcggctgaaaaagacttatggaaagttctgtggtcagcataaccagagtgtaaattactttaaggatctgtatgccaaggataagcgctttcaggcatttgtcaaaaagaagatgtcttcctcagttgtgcgccgactggggatccccgaatgtatcctgctcgtgacacagaggatcaccaagtatccagttctgttccaaaggatcctgcagtgtaccaaggacaatgaagtggaacaagaagacttggcacagtccctgagcttggtgaaggacgtgatcggggcagtggatagtaaagtggccagctatgaaaaaaaggttaggttaaacgaaatttatacgaaaacagattcaaagagcattatgcgcatgaagtcaggacaaatgttcgctaaagaggatctgaaacgcaagaagctggtgcgcgacggttccgtgtttcttaagaatgcggctggtcgtctgaaggaggtgcaagccgtacttctgactgacatactggtatttctgcaggaaaaggaccagaagtacattttcgccagtctggatcagaagtccacagtcatcagtttgaagaagctgatcgtccgggaagtggctcatgaggaaaaaggtctgtttctgatttccatggggatgacggaccccgagatggttgaagtacacgccagttccaaagaagagagaaattcttggatacagattatccaggatactattaatacgttaaatagggatgaagatgaaggcattcccagcgaaaacgaggaggaaaaaaaaatgctggataccagggctcgggagctgaaagagcagcttcatcagaaggaccagaagatcttattgctgctggaggaaaaagagatgattttccgagacatggccgagtgttccacacctcttcctgaggactgtagtccgacccattccccgcgagtactcttccgctccaacacagaagaggcactcaagggaggcccactgatgaagtccgccatcaatgaggtagagatactgcagggccttgtcagcgggaatctcggcggaacattgggaccaactgtgtctagcccaatagaacaggatgtggttggtcctgtgagcctgccacgtagggcggaaaccttcggcggattcgacagccaccagatgaatgcttccaagggaggcgagaaggaggaaggagacgatgggcaggacctgagacgcacggaaagcgattcgggccttaaaaaggggggtaatgccaatctggtgtttatgttgaagaggaactctgaacaggtcgttcagagcgttgtgcatctgtatgagctgctcagtgccctacaaggtgttgttctgcaacaggacagctatatcgaggatcagaagctggtgctcagcgaaagagcattgactaggtctctgtcaagacccagcagtctaattgagcaggaaaagcaaagaagccttgaaaaacagagacaggatttagccaaccttcagaaacagcaagcccaatatctggaagaaaaaaggcgccgtgagagggagtgggaggcgcgagagcgggaactacgcgaaagagaagccctcctcgcacagcgcgaggaggaggtgcagcagggtcagcaggacctagaaaaagagcgagaagagttgcaacagaagaagggcacttatcaatacgatcttgagcgccttcgggctgcacagaaacagctcgaacgcgaacaagagcagttgagaagagaagccgaaagactcagccaaagacaaacagagcgagacctctgccaggtgtctcatccacacaccaaattaatgcggatcccttcgttctttccaagtccggaagaaccgccaagtccctccgcgccttccattgcaaagtctgggtcactcgactccgagctgtctgtttcaccaaaacggaactcaatctctcgtacccataaagacaagggtccttttcacattttatccagcaccagccagaccaacaaaggtcccgaagggcagagccaagcccctgcttcaacaagcgcctccactaggctgttcggtcttacaaaacctaaggaaaagaaggagaaaaaaaaaaagaataagacgtctcgcagccagccgggagacgggcctgcttccgaagtaagcgccgagggggaagaaatcttctgtta

SEQ ID NO: 170989 - DNA, 5237 bp, Artificial Sequence
  derived and/or modified sequence
atgaagcttaatccacaacaggcaccgctctacggagattgtgtggttactgtccttcttgccgaggaggacaaggctgaagacgatgtggtcttctacctcgtcttcctgggcagtacactgcgccattgcaccagtaccagaaaggtgtcaagtgacacactggagacaattgcaccgggtcacgactgctgtgaaacagtaaaggtgcagctctgcgcctccaaggagggcctgcccgtcttcgtcgtcgctgaagaggacttccacttcgtacaggacgaagcatatgatgccgctcagtttcttgcaacatctgccggtaatcagcaggcactcaatttcacccgctttcttgaccagtctggtccaccgagcggagatgtgaatagcttggataaaaagttagtgctagcctttcgtcatctgaagctgcctacagagtggaacgtattgggaaccgatcagtctctacacgatgcagggcctcgcgaaacactgatgcattttgctgtacggctgggtctgttgcggctgacctggtttctccttcagaaacctggagggagaggcgctctgtccatccacaatcaagagggcgctaccccggtctctctggccctggaacgaggctatcacaagctccatcagctcttgactgaggagaacgccggagagcccgacagttggtcctccctgagttacgagatcccgtatggggattgcagcgtgcggcaccatcgggaacttgatatctatacactgacgtctgaatccgactcccatcatgaacacccttttcctggggatgggtgcactggacctattttcaaacttatgaatatccagcagcagcttatgaagaccaacctcaaacaaatggattctctgatgccattgatgatgactgcacaggacccatctagcgctcctgaaacagacggacagttcctgccgtgtgcacctgagccaaccgatccccaaagactgtcttcctccgaagaaacagagtccacgcagtgctgccctggaagccctgtggcccagaccgagagtccatgcgatctgagctccattgtggaagaagagaacaccgacagatcctgtagaaagaaaaacaagggagtggaacgtaagggggaagaggtagagccggctcctattgttgactccggaacagtcagcgaccaggactcctgccttcaaagcctgcccgattgcggcgtgaaaggtactgaaggactcagcagctgtgggaaccggaacgaagagactgggaccaagagctccggcatgcccaccgatcaggagagtctcagctctggagatgctgtgctccagcgagatctcgtgatggagcccggaacagcccagtacagcagtggaggggaattaggcggaataagtactaccaacgtgagcacaccggatacagcaggtgagatggagcatggtctgatgaatccagatgcaacagtctggaagaatgtgttgcagggaggagaaagtacaaaggagcgatttgagaactccaatatcggcacagccggagcctccgatgtccatgtaacatccaaaccggtggataagattagcgtgccaaactgcgccccagccgcaagtagtttagacgggaataaaccagcagaatcttcgctggcctttagtaacgaagaaacgagcacagagaagaccgccgaaacagagacgagccggtcaagggaggagtccgctgacgctcccgtcgatcaaaatagtgtagtaatcccggctgccgcaaaagataagatttccgacggactcgaaccttacaccctcctcgccgctggaataggggaagccatgagtccctcagatttggctctgctcggcctagaggaagatgtgatgcctcatcagaatagcgaaactaactcctctcatgctcaaagtcaaaagggcaaatcttcaccgatctgctctaccaccggagatgacaagctgtgtgccgacagcgcttgccagcagaacaccgtcacaagcagcggcgacctcgtggcaaagctctgtgacaatatcgtgagcgaaagcgagtctaccaccgcaaggcaaccatcttcccaggatccacccgacgcttctcattgcgaagatccccaggctcataccgtcacgagcgatccagtgcgcgacacacaagaaagagctgatttttgcccgttcaaagtggttgataataaggggcagcgcaaagatgtgaagttagataaacctctgaccaacatgcttgaggtggttagccatcctcatcccgttgtgccaaagatggaaaaggagctggtgcctgaccaggccgtaatctcagactcaacgtttagccttgctaatagccccggaagcgaatcggtgaccaaggacgacgctctgtctttcgttccgtcgcagaaggaaaaaggtaccgcaactccggagcttcatacagcaactgactatcgcgacggaccggatggaaactcaaacgagcccgataccaggcctctggaggacagagcagtaggcctgtcaacctcgtcaaccgcggcagagctgcagcatgggatggggaacacatccttgaccgggctaggcggagaacacgagggcccagcccctccggcaatcccagaggccttaaatattaagggcaatacggattcctctctgcagtctgtggggaaagccacacttgctctagacagcgtgcttactgaggaagggaagttgctggtggtgtcagagtcatcggccgctcaggaacaagacaaagacaaagcggtcacgtgtagctccataaaggagaatgcgctgtcctcggggaccctccaggaggagcagaggacgcctcctcctggacaggacacccaacaattccatgaaaaatccatttcagctgattgtgccaaggacaaggccctccagctcagtaatagtcctggagcctcaagcgcgtttctgaaagccgaaactgagcataataaggaagtggcacctcaggtgagcctgctgacacagggtggcgctgcacagagtctggtgccacctggcgcttctctggctactgagtccaggcaggaagccctaggagctgaacataactcaagcgccctgttgccttgtctgctgcctgatgggagcgacggcagcgacgccctgaactgctcacagccttctcctcttgatgtgggagtgaagaacacccagtctcaaggcaaaacctctgcctgcgaggtgagtggagacgtgacagtggacgtgacaggcgtgaacgctttgcaaggcatggccgaaccaaggcgcgagaatattagccataacacccaagacatcctgattccaaatgtgctgctgtcacaggagaagaacgctgtcctcggcctgcccgttgcccttcaggataaagcggtgaccgacccacagggagtggggactccagagatgatccccttagactgggagaagggcaagctagaaggggcagatcactcctgcaccatgggagatgcagaagaggctcagatagacgacgaagctcatcccgtcctgctacagccggttgcaaaggagctacccacggacatggagctcagtgctcatgacgacggcgctcctgccggtgtgagagaggttatgcgcgcacccccatccggcagggagcggtccacacccagtctgccctgcatggtgtcagctcaggatgcaccactacccaagggtgcagatttaatcgaggaggccgctagccgcattgtcgatgcggttattgaacaggtgaaggcagcaggggctctgctgacagagggcgaagcttgtcacatgagcctctctagccccgagttaggccctctgactaagggacttgaatcagctttcacagagaaggtcagtaccttcccgccaggagagtctctaccaatgggttctacaccagaggaagcaacaggcagcctggccggatgctttgctgggagagaggagcccgagaagattattctcccagtgcagggaccagaacccgctgcggagatgcccgatgtgaaggctgaagacgaggtcgatttccgggcttcttccatctccgaagaggtggccgtgggctccatcgcagctactctcaagatgaagcaaggcccaatgacgcaggcaatcaatcgtgagaactggtgcactattgaaccgtgtcctgatgctgcttcactgctggcttcaaagcagtcgcccgagtgtgagaactttcttgatgtagggttaggcagggaatgtactagcaagcagggtgtcctgaagagggagtccggctctgactcagatctcttccacagcccgtcagacgacatggatagcattatctttccaaaacccgaagaggagcatctagcatgtgacatcacgggatcctcaagctcgaccgatgataccgcaagcttagatcgccatagctcccatgggtcagacgtgtccctctctcagatcctgaagcccaataggtcacgtgataggcagtctctggacggattctacagccacggtatgggcgcagaaggaagggagtctgagagtgagcccgcagaccccggtgatgtcgaggaggaggaaatggattcgataaccgaggtgccagctaactgctccgtgcttcgaagttctatgcgttccctttctccctttcgtaggcactcttggggtcctgggaagaacgcggcaagcgacgctgagatgaaccaccgttcgttctcattggagggattgacaggtggtgcgggagtgggcaacaagccaagttcttctctcgaagtgagttctgctaacgcagaagagctccgccaccccttcagcggagaggagagggtggattcgctagtctccttatcagaagaggatcttgaatccgaccagcgagagcaccgaatgtttgatcagcagatctgtcaccggtccaagcagcagggatttaactattgcacttccgcaatctcctcccccctaaccaaatccatcagcttaatgacaatatcccatccaggtctggataactcccgacctttccatagcacctttcacaacacttctgccaatttgacagaaagtatcaccgaggagaattataactttctacctcattctccctcaaagaaggattcagaatggaagagcggcactaaagtgtctcgcaccttttcctacatcaagaataaaatgtcgtcaagcaagaagagtaagta

SEQ ID NO: 170990 - DNA, 8081 bp, Artificial Sequence
  derived and/or modified sequence
gtctaaaactctcttttctcttggctcttcttattcgagtgatgaggaggaggagttgcataattcacggcccttccacagtaccttccacaataccagtgctaatctgactgagagtataacagaagagaactataatttcctgccacatagcccctccaagaaagattctgaatggaagagtggaacaaaagtcagtcgtacattcagctacatcaagaataaaatgtctagcagcaagaagagcaaagaaaaggaaaaagaaaaagataagattaaggagaaggagaaagattctaaagacaaggagaaagataagaagactgtcaacgggcacactttcagttccattcctgttgtgggtcccatcagctgtagccagtgtatgaagcccttcaccaacaaagatgcctatacttgtgcaaattgcagtgcttttgtccacaaaggctgccgagaaagtctagcctcctgtgcaaaggtcaaaatgaagcagcccaaagggagccttcaggcacatgacacatcatcactgcccacggtcattatgagaaacaagccctcacagcccaaggagcgtcctcggtccgcagtcctcctggtggatgaaaccgctaccaccccaatatttgccaatagacgatcccagcagagtgtctcgctctccaaaagtgtctccatacagaacattactggagttggcaatgatgagaacatgtcaaacacctggaaattcctgtctcattcaacagactcactaaataaaatcagcaaggtcaatgagtcaacagaatcacttactgatgagggagtaggtacagacatgaatgaaggacaactactgggagactttgagattgagtccaaacagctggaagcagagtcttggagtcggataatagacagcaagtttctaaaacagcaaaagaaagatgtggtcaaacggcaagaagtaatatatgagttgatgcagacagagtttcatcatgtccgcactctcaagatcatgagtggtgtgtacagccaggggatgatggcggatctgctttttgagcagcagatggtagaaaagctgttcccctgtttggatgagctgatcagtatccatagccaattcttccagaggattctggagcggaagaaggagtctctggtggataaaagtgaaaagaactttctcatcaagaggataggggatgtgcttgtaaatcagttttcaggtgagaatgcagaacgtttaaagaagacatatggcaagttttgtgggcaacataaccagtctgtaaactacttcaaagacctttatgccaaggataagcgttttcaagcctttgtaaagaagaagatgagcagttcagttgttagaaggcttggaattccagagtgcatattgcttgtaactcagcggattaccaagtacccagttttattccaaagaatattgcagtgtaccaaagacaatgaagtggagcaggaagatctagcacagtccttgagcctggtgaaggatgtgattggagctgtagacagcaaagtggcaagttatgaaaagaaagtgcgtctcaatgagatttatacaaagacagatagcaagtcaatcatgaggatgaagagtggtcagatgtttgccaaggaagatttgaaacggaagaagcttgtacgtgatgggagtgtgtttctgaagaatgcagcaggaaggttgaaagaggttcaagcagttcttctcactgacattttagttttccttcaagaaaaagaccagaagtacatctttgcatcattggaccagaagtcaacagtgatctctttaaagaagctgattgtgagagaagtggcacatgaggagaaaggtttattcctgatcagcatggggatgacagatccagagatggtagaagtccatgccagctccaaagaggaacgaaacagctggattcagatcattcaggacacaatcaacaccctgaacagagatgaagatgaaggaattcctagtgagaatgaggaagaaaagaaaatgttggacaccagagcccgagaattaaaagaacaacttcaccagaaggaccaaaaaatcctactcttgttggaagagaaggagatgattttccgggacatggctgagtgcagcacccctctcccagaggattgctccccaacacatagccctagagttctcttccgctccaacacagaagaggctctcaaaggaggacctttaatgaaaagtgcaataaatgaggtggagatccttcagggtttggtgagtggaaatctgggaggcacacttgggccgactgtcagcagccccattgagcaagatgtggtcggtcccgtttccctgccccggagagcagagacctttggaggatttgacagccatcagatgaatgcttcaaaaggaggcgagaaggaagagggagatgatggccaagatcttaggagaacggaatcagatagtggcctaaaaaagggtggaaatgctaacctggtatttatgcttaaaagaaacagtgagcaggttgtccagagcgttgttcatctctacgagctcctcagcgctctgcagggtgtggtgctgcagcaggacagctacattgaggaccagaaactggtgctgagcgagagggcgctcactcgcagcttgtcccgcccgagctccctcattgagcaggagaagcagcgcagcctggagaagcagcgccaggacctggccaacctgcagaagcagcaggcccagtacctcgaggagaagcgcaggcgcgagcgtgagtgggaagctcgtgagagggagctgcgggagcgggaggccctcctggcccagcgcgaggaggaggtgcagcaggggcagcaggacctggaaaaggagcgggaggagctccagcagaagaagggcacataccagtatgacctggagcgactgcgtgctgcccagaaacagcttgagagggaacaggagcagctgcgccgggaggcagagcggctcagccagcggcagacagaacgggacctgtgtcaggtttcccatccacataccaagctgatgaggatcccatcgttcttccccagtcctgaggagcccccctcgccatctgcaccttccatagccaaatcagggtcattggactcagaactttcagtgtccccaaaaaggaacagcatctctcggacacacaaagataaggggccttttcacatactgagttcaaccagccagacaaacaaaggaccagaagggcagagccaggcccctgcgtccacctctgcctctacccgcctgtttgggttaacaaagccaaaggaaaagaaggagaaaaaaaagaagaacaaaaccagccgctctcagcccggtgatggtcccgcgtcagaagtatcagcagagggtgaagagatcttctgctgaccctcttcctctctgctgaggcagctgcctcctgatcctggccagcccacctctcctgctgtccccgcgtgcacaagtctcttacactggacgcccactgctcctcagcgtccagtcctcctgggcggccccaggtcctggacaataagcaacagatgatattgagtgtcgggtggggaaggaggcccagactctgcttcggccatgatttgtgactgcccaggactctcaggttgggctggccctactcaggattacactgaaagtaatggcctcgtaagtacaggtgatggttttggacacgtcaggaattcctaaaggctgaaagagtgtatccaagtaaggtctgaacctccgaatgccttttatttgggggaacacaaaaccaaacagcagatgttttggacttgatctgtgtacgtacatggggacctgtctgcatatacacacggggaatgccagaagaaggcccagtctgcaccaggcgtctggtcaacttagcacaagggcagtgcctggacggacccggagcccccgcatatcagcagttcacccagtactcctcagagactggtttccctctaaacccatcccgggcacataccacccgtgttttgcatgtatttctcatttcattttagggatgacaaacatttgtgaaaccagtgagagaaggcttgatgtgtataaaagacgtgatgtgcaccacctcgatctcggtgtttcaggcactaaagcaacaaaacaacccatagtatctcattctgtcatcagatccagaagaaatatcctggttttccagcatgtttacccacatgttttggccatggataaagtgaagaggcctactcaccattatccctgcagcgtgacaccttttgattgtcactgaccactcagaaggggccacggcctcctggctgtgttcctgagcccccgtcgtgcctctcccagacagcagctgtctggcccttgctgggtgagggcacaccactgccaggggtcagcctcgcacccaggccaggcagaagctgtgctctgaagctaggacagctggctgagaagtgggttcaggcgaagggtgaagccatgtgtagcagttcctgccagtgcagatctggagaggagctggcccggaaggcgtggttgtgaaagcgcccttcttatgttaggaggccttggcaaaattggatttcttcaaaaatacatgtaaaggtctgttgttgaattgtactctgcccctggaagcagatacagatggctgcctgctgctcggctttgcttttgcttttcccaccgtgttttcatctttgttcacttgaggctttccccagctggtgtgtgcaggacagttcatggtaatgttgccctctgaggccccgtacaccagaagggaggccctggaaaattttgtgcttccaacgtggccttcaattcttgcttttttgcccctcggaagcatggggcttttgagcacacttaaaaaaagaaaaatctgtaacttggtgcttattgatgaattgcaagctggccttgcagatggagatatttatctttcagtttatttgaaagaggtctggtttaaaatttgtagcctacatttgttttatttattgtatttgtgtgtttgtgtttgtttttttttaagggtgagccaggtctagcccaacagtctaaactatccagtcaataccgagtgaagtggcagccagcactgttcactctgtgtcttttgaagtgccttgaaggcccagatgaaattttaaagggagggggtccatgtccttccctcccccaccccgcctcattctttaatcaaaggatgtcttctcccttgtttgagaatgaagaaactcgccacctctgacctacctttgcctttttctgtcatggagaatactcacccttcagaaacagaccaaaggccaaaacctgctgatttttctattgaaaatatgtccccttgcaaagaccctaaacaaaaagttaagtttctttctttcacctatttgtacaactccaagttacagctgaatctgtcgtgactttcctgagatctacccggggcttggctgtctgttctgggcactggctccgagttcccctcctgggatttgcaggagggcagtactgaacctgcattcttctccttgtaaatgtaggccgggtgcccctgttctccgggtttggaacaatacgaggttggtgctgatgggatttacttgcgtacgtgctcttcacaaaaacaccgtggatgctgaagttagagcacgtcgccacagagcttgacatcaatgttagagggtctcttactccccgcccagctgtgatgtttcatctgctttggttgttttggtggtcttttttaaaaatagagatttcacatctgcccagaccccactcaaaacgatttggtcaggttctggttggacaagtttaaaatcaaagtagtgcccggaattccctcaaaccacccaacttcatccaggaatacagtctgcagtgcagcaacagaaccgcttaccaagaactgtgcttacatacctttgtcatctctcttccccccttggaagttgtcctcagggggatttgttcctgtcctggggatttacctgggatggtggctgcctgtgcttttgctcatggccttgacagtgctctagttgctggatctaatggcctgtcttggtttctatcacatgagaaggggttgtttttttggggtgactcggactgaattccccatactgtttccacgccgggacaccatgttctccatcaagctaaagaaatcacgtgcctgaaactgtgcttaagttttgggggaaagatggagttcctatccagagcccccagatttccagaatcgagtgagcttcctggaaggagactgcgtcttctctcaattccagtcatctcagtcgttgtcgttaggtgacatgtgcactttaaatgctctcatcggttggcttcattttcaagacaatcaaatgtattgactgtgttttcttcttagaaaatggagagggttaaaaacatgcaaactgccactttcaacctttgccagtattccctctacccccgtgagagctatctggggggaagaatccttaccaaggtttttttggaaaggtacgaatcttaacttttttccccttctgtgtctcagggtaatactattcagagtcgcccctttgctcattttctcccgtatttgttaccttcctgaggcctcagtattagtcgtgagcacaaagttttgagacctttggcgttgtttcttgatgtgggaggggaggtgttagtgcatgcaagggttgaactagatagaccctgccttagtagagggtgggactataaccttagaggccagaacttgatccagaagttgctgtccacagaagtgctttctatttcatcatttttgtttctagggctctttttctgtagccaggtcttcccaaggattttagtatttgcattggagttgaggtttactctaatgatggtggcccagctgtgcccagaggacagccaggcaggccctgggagggagtttagaaagacagtcctggtgaatgggcttcaagtggtcacaaagagggtggctgtgaggtgaccccagacactgcagaacgatgtgcaccctctgcgttttggatgtccttggaatgtgggagcctagaaataaccctgtggatggaattggggcagcggctgctggagatctgtgtgccttgccttccttcagcaggaccgtctaggtgcgcagccacctatggatgcgtcccagccagccccgtcgctctcgtccatcctcagagacaaagaagagggcagggagtttgggcttggttttgaactttcctttcaatgtagcaaagcattcctagttaaccagagccttggaatctactgcctgctggccaggctttaaaatgaaaagtgttttaatgctgccataaaagggaggcgggggggaggaagggaaaataaaggcatctttccaagtactcatctaatttaattgtcaaaagattgataggccatgaattacttctccatctcactaagggttaaaggcgtgcaaccccccactggctgtgtcccctgccaccgaagtgagtgacctgccctacaaccaggtgggaccacctgtgctgcagtccggaggggcttctgcaggaagcactcaccccccacaccttccccggcctgagcttcccctacctttcgtcaccacctgagggcatgagcacaggccatggggcgtgcctggtgagtctgcctgtggttcaggcttagcctgtggtctcctgtgtgctgctgcccgcatgggatgcgcaggggaggcgtggggatccgcaggagggtggttgggatacaccggatacctctgctctcattgcttgtttgcaaatgctctatggacatttgtgtgctaaatcctattaaataaaaaagacgggttaaaacccagatgctgtatattcatttgtaattatgtataaagtgaagcagttttaaactgtaaagatttttttcagtgtgttttctcgaattttgccacaacatactggcttcgtattttatttatctttctttctagttaccagcttcagacccttgtaaagtctccctcagccctttcaaaaaataataaatttcctgtgaagtt

SEQ ID NO: 170991 - DNA, 13215 bp, Artificial Sequence
  derived and/or modified sequence
gagcggccgcctattgtctttctccgcggcgaaggtgaagagttgtcccagctcggcccgcgggggagccccgggagccgcacgtgtcctgggtcatgaaacttaatccacagcaagctcccttatatggtgattgtgttgttacagtgctgcttgctgaagaggacaaagctgaagatgatgtagtgttttacttggtatttttgggttccaccctccgtcactgtacaagtactcggaaggtcagttctgatacattggagaccattgctcctggtcatgattgttgtgaaacagtgaaggtgcagctctgtgcttccaaagagggccttcccgtgtttgtggtggctgaagaagactttcatttcgtccaggatgaagcgtatgatgcagctcaattcctagcaaccagtgctggaaatcagcaggctttgaactttacccgttttcttgaccagtcaggacccccatctggggatgtgaattcccttgataagaagttggtgctggcattcaggcacctgaagctgcccacggagtggaatgtattggggacagatcagagtttgcatgatgctggcccgcgagagacattgatgcattttgctgtgcggctgggactgctgaggttgacgtggttcctgttgcagaagccaggtggccgcggagctctcagtatccacaaccaggaaggggcgacgcctgtgagcttggccttggagcgaggctatcacaagctgcaccagcttctaaccgaggagaatgctggagaaccagactcctggagcagtttatcctatgaaataccgtatggagactgttctgtgaggcatcatcgagagttggacatctatacattaacctctgagtctgattcacatcatgaacacccatttcctggagacggttgcactggaccaatttttaaacttatgaacatccaacagcaactaatgaaaacaaacctcaagcagatggacagtcttatgcccttaatgatgacagcacaggatccttccagtgccccagagacagatggccagtttcttccctgtgcaccggagcccacggaccctcagcgactttcttcttctgaagagactgagagcactcagtgctgcccagggagccctgttgcacagactgaaagtccctgtgatttgtcaagcatagttgaggaggagaatacagaccgttcctgtaggaagaaaaataaaggcgtggaaagaaaaggggaagaggtggagccagcacctattgtggactctggaactgtatctgatcaagacagctgccttcagagcttgcctgattgtggagtaaagggcacggaaggcctttcgtcctgtggaaacagaaatgaagaaactggaacaaaatcttctggaatgcccacagaccaggagtccctgagcagtggagatgctgtgcttcagagagacttggtcatggagccaggcacagcccagtattcctctggaggtgaactgggaggcatttcaacaacaaatgtcagtaccccagacactgcaggggaaatggaacatgggctcatgaacccagatgccactgtttggaagaatgtgcttcagggaggggaaagtacaaaggaaagatttgagaactctaatattggcacagctggagcctctgacgtgcacgtcacaagtaagcctgtggataaaatcagtgttccaaactgtgcccctgctgccagttccctggatggtaacaaacctgctgagtcttcacttgcatttagtaatgaagaaacctccactgaaaaaacagcagaaacggaaacttcacgaagtcgtgaggagagtgctgatgctccagtagatcagaattctgtggtgattccagctgctgcaaaagacaagatttcagatggattagaaccttatactctcttagcagcaggcataggtgaggcaatgtcaccctcagatttagcccttcttgggctggaagaagatgtaatgccacaccagaactcagaaacaaattcatctcatgctcaaagccaaaagggcaaatcctcacccatttgttctacaactggagacgataaactttgtgcagactctgcatgtcaacagaacacagtgacttctagtggcgatttggttgcaaaactgtgtgataacatagttagcgagtccgaaagcaccacagcaaggcaacccagctcacaagatccacccgatgcctcccactgtgaagacccacaggctcatacagtcacctctgaccctgtaagggatacccaggaacgtgcggatttttgtcctttcaaagtggtggataacaaaggccaacgaaaagatgtgaaactagataaacctttaacaaatatgcttgaggtggtttcacatccacatccagttgtccctaaaatggagaaagaactggtgccagaccaggcagtaatatcagacagtactttctctctggcaaacagtccaggcagtgaatcagtaaccaaggatgacgcactttcttttgtcccctcccagaaagaaaagggaacagcaactcctgaactacatacagctacagattatagagatggcccagatggaaattcgaatgagcctgatacgcggccactagaagacagggcagtaggcctgtccacatcctccactgctgcagagcttcagcacgggatggggaataccagtctcacaggacttggtggagagcatgagggtcccgcccctccagcaatcccagaagctctgaatatcaaggggaacactgactcttccctgcaaagtgtgggtaaggccactttggctttagattcagttttgactgaagaaggaaaacttctggtggtttcagaaagctctgcagctcaggaacaagataaggataaagcggtgacctgttcctctattaaggaaaatgctctctcttcaggaactttgcaggaagagcagagaacaccacctcctggacaagatactcaacaatttcatgaaaaatcaatctcagctgactgtgccaaggacaaagcacttcagctaagtaattcaccgggtgcatcctctgcctttcttaaggcagaaactgaacataacaaggaagtggccccacaagtctcactgctgactcaaggtggggctgcccagagcctggtgccaccaggagcaagtctggccacagagtcaaggcaggaagccttgggggcagagcacaacagctccgctctgttgccatgtctgttgccagatgggtctgatgggtccgatgctcttaactgcagtcagccttctcctctggatgttggagtgaagaacactcaatcccagggaaaaactagtgcctgtgaggtgagtggagatgtgacggtggatgttacaggggttaatgctctacaaggtatggctgagcccagaagagagaatatatcacacaacacccaagacatcctgattccaaacgtcttgttgagccaagagaagaatgccgttctaggtttgccagtggctctacaggacaaagctgtgactgacccacagggagttggaaccccagagatgatacctcttgattgggagaaagggaagctggagggagcagaccacagctgtaccatgggtgacgctgaggaagcccaaatagacgatgaagcacatcctgtcctactgcagcctgttgccaaggagctccccacagacatggagctctcagcccatgatgatggggccccagctggtgtgagggaagtcatgcgagccccgccttcaggcagggaaaggagcactccctctctaccttgcatggtctctgcccaggacgcacctctgcctaagggggcagacttgatagaggaggctgccagccgtatagtggatgctgtcatcgaacaagtcaaggccgctggagcactgcttactgagggggaggcctgtcacatgtcactgtccagccctgagttgggtcctctcactaaaggactagagagtgcttttacagaaaaagtgagtactttcccacctggggagagcctaccaatgggcagtactcctgaggaagccacggggagccttgcaggatgttttgctggaagggaggagccagagaagatcattttacctgtccaggggcctgagccagcagcagaaatgccagacgtgaaagctgaagatgaagtggattttagagcaagttcaatttctgaagaagtggctgtagggagcatagctgctacactgaagatgaagcaaggcccaatgacccaggcgataaaccgagaaaactggtgtacaatagagccatgccctgatgcagcatctcttctggcttccaagcagagcccagaatgtgagaacttcctggatgttggactgggcagagagtgtacctcaaaacaaggtgtacttaaaagagaatctgggagtgattctgacctctttcactcacccagtgatgacatggacagcatcatcttcccaaagccagaggaagagcatttggcctgtgatatcaccggatccagttcatccaccgatgacacggcttcactggaccgacattcttctcatggcagtgatgtgtctctctcccagattttaaagccaaacaggtcaagagatcggcaaagccttgatggattctacagccatgggatgggagctgagggtcgagaaagtgagagtgagcctgctgacccaggcgacgtggaggaggaggagatggacagtatcactgaagtgcctgcaaactgctctgtcctaaggagctccatgcgctctctttctcccttccggaggcacagctgggggcctgggaaaaatgcagccagcgatgcagaaatgaaccaccggagttcaatgcgagttcttggggatgttgtcaggagacctcccattcataggagaagtttcagtctagaaggcttgacaggaggagctggtgtcggaaacaagccatcctcatctctagaagtaagctctgcaaatgccgaagagctcagacacccattcagtggtgaggaacgggttgactctttggtgtcactttcagaagaggatctggagtcagaccagagagaacataggatgtttgatcagcagatatgtcacagatctaagcagcagggatttaattactgtacatcagccatttcctctccattgacaaaatccatctcattaatgacaatcagccatcctggattggacaattcacggcccttccacagtaccttccacaataccagtgctaatctgactgagagtataacagaagagaactataatttcctgccacatagcccctccaagaaagattctgaatggaagagtggaacaaaagtcagtcgtacattcagctacatcaagaataaaatgtctagcagcaagaagagcaaagaaaaggaaaaagaaaaagataagattaaggagaaggagaaagattctaaagacaaggagaaagataagaagactgtcaacgggcacactttcagttccattcctgttgtgggtcccatcagctgtagccagtgtatgaagcccttcaccaacaaagatgcctatacttgtgcaaattgcagtgcttttgtccacaaaggctgccgagaaagtctagcctcctgtgcaaaggtcaaaatgaagcagcccaaagggagccttcaggcacatgacacatcatcactgcccacggtcattatgagaaacaagccctcacagcccaaggagcgtcctcggtccgcagtcctcctggtggatgaaaccgctaccaccccaatatttgccaatagacgatcccagcagagtgtctcgctctccaaaagtgtctccatacagaacattactggagttggcaatgatgagaacatgtcaaacacctggaaattcctgtctcattcaacagactcactaaataaaatcagcaaggtcaatgagtcaacagaatcacttactgatgagggagtaggtacagacatgaatgaaggacaactactgggagactttgagattgagtccaaacagctggaagcagagtcttggagtcggataatagacagcaagtttctaaaacagcaaaagaaagatgtggtcaaacggcaagaagtaatatatgagttgatgcagacagagtttcatcatgtccgcactctcaagatcatgagtggtgtgtacagccaggggatgatggcggatctgctttttgagcagcagatggtagaaaagctgttcccctgtttggatgagctgatcagtatccatagccaattcttccagaggattctggagcggaagaaggagtctctggtggataaaagtgaaaagaactttctcatcaagaggataggggatgtgcttgtaaatcagttttcaggtgagaatgcagaacgtttaaagaagacatatggcaagttttgtgggcaacataaccagtctgtaaactacttcaaagacctttatgccaaggataagcgttttcaagcctttgtaaagaagaagatgagcagttcagttgttagaaggcttggaattccagagtgcatattgcttgtaactcagcggattaccaagtacccagttttattccaaagaatattgcagtgtaccaaagacaatgaagtggagcaggaagatctagcacagtccttgagcctggtgaaggatgtgattggagctgtagacagcaaagtggcaagttatgaaaagaaagtgcgtctcaatgagatttatacaaagacagatagcaagtcaatcatgaggatgaagagtggtcagatgtttgccaaggaagatttgaaacggaagaagcttgtacgtgatgggagtgtgtttctgaagaatgcagcaggaaggttgaaagaggttcaagcagttcttctcactgacattttagttttccttcaagaaaaagaccagaagtacatctttgcatcattggaccagaagtcaacagtgatctctttaaagaagctgattgtgagagaagtggcacatgaggagaaaggtttattcctgatcagcatggggatgacagatccagagatggtagaagtccatgccagctccaaagaggaacgaaacagctggattcagatcattcaggacacaatcaacaccctgaacagagatgaagatgaaggaattcctagtgagaatgaggaagaaaagaaaatgttggacaccagagcccgagaattaaaagaacaacttcaccagaaggaccaaaaaatcctactcttgttggaagagaaggagatgattttccgggacatggctgagtgcagcacccctctcccagaggattgctccccaacacatagccctagagttctcttccgctccaacacagaagaggctctcaaaggaggacctttaatgaaaagtgcaataaatgaggtggagatccttcagggtttggtgagtggaaatctgggaggcacacttgggccgactgtcagcagccccattgagcaagatgtggtcggtcccgtttccctgccccggagagcagagacctttggaggatttgacagccatcagatgaatgcttcaaaaggaggcgagaaggaagagggagatgatggccaagatcttaggagaacggaatcagatagtggcctaaaaaagggtggaaatgctaacctggtatttatgcttaaaagaaacagtgagcaggttgtccagagcgttgttcatctctacgagctcctcagcgctctgcagggtgtggtgctgcagcaggacagctacattgaggaccagaaactggtgctgagcgagagggcgctcactcgcagcttgtcccgcccgagctccctcattgagcaggagaagcagcgcagcctggagaagcagcgccaggacctggccaacctgcagaagcagcaggcccagtacctcgaggagaagcgcaggcgcgagcgtgagtgggaagctcgtgagagggagctgcgggagcgggaggccctcctggcccagcgcgaggaggaggtgcagcaggggcagcaggacctggaaaaggagcgggaggagctccagcagaagaagggcacataccagtatgacctggagcgactgcgtgctgcccagaaacagcttgagagggaacaggagcagctgcgccgggaggcagagcggctcagccagcggcagacagaacgggacctgtgtcaggtttcccatccacataccaagctgatgaggatcccatcgttcttccccagtcctgaggagcccccctcgccatctgcaccttccatagccaaatcagggtcattggactcagaactttcagtgtccccaaaaaggaacagcatctctcggacacacaaagataaggggccttttcacatactgagttcaaccagccagacaaacaaaggaccagaagggcagagccaggcccctgcgtccacctctgcctctacccgcctgtttgggttaacaaagccaaaggaaaagaaggagaaaaaaaagaagaacaaaaccagccgctctcagcccggtgatggtcccgcgtcagaagtatcagcagagggtgaagagatcttctgctgaccctcttcctctctgctgaggcagctgcctcctgatcctggccagcccacctctcctgctgtccccgcgtgcacaagtctcttacactggacgcccactgctcctcagcgtccagtcctcctgggcggccccaggtcctggacaataagcaacagatgatattgagtgtcgggtggggaaggaggcccagactctgcttcggccatgatttgtgactgcccaggactctcaggttgggctggccctactcaggattacactgaaagtaatggcctcgtaagtacaggtgatggttttggacacgtcaggaattcctaaaggctgaaagagtgtatccaagtaaggtctgaacctccgaatgccttttatttgggggaacacaaaaccaaacagcagatgttttggacttgatctgtgtacgtacatggggacctgtctgcatatacacacggggaatgccagaagaaggcccagtctgcaccaggcgtctggtcaacttagcacaagggcagtgcctggacggacccggagcccccgcatatcagcagttcacccagtactcctcagagactggtttccctctaaacccatcccgggcacataccacccgtgttttgcatgtatttctcatttcattttagggatgacaaacatttgtgaaaccagtgagagaaggcttgatgtgtataaaagacgtgatgtgcaccacctcgatctcggtgtttcaggcactaaagcaacaaaacaacccatagtatctcattctgtcatcagatccagaagaaatatcctggttttccagcatgtttacccacatgttttggccatggataaagtgaagaggcctactcaccattatccctgcagcgtgacaccttttgattgtcactgaccactcagaaggggccacggcctcctggctgtgttcctgagcccccgtcgtgcctctcccagacagcagctgtctggcccttgctgggtgagggcacaccactgccaggggtcagcctcgcacccaggccaggcagaagctgtgctctgaagctaggacagctggctgagaagtgggttcaggcgaagggtgaagccatgtgtagcagttcctgccagtgcagatctggagaggagctggcccggaaggcgtggttgtgaaagcgcccttcttatgttaggaggccttggcaaaattggatttcttcaaaaatacatgtaaaggtctgttgttgaattgtactctgcccctggaagcagatacagatggctgcctgctgctcggctttgcttttgcttttcccaccgtgttttcatctttgttcacttgaggctttccccagctggtgtgtgcaggacagttcatggtaatgttgccctctgaggccccgtacaccagaagggaggccctggaaaattttgtgcttccaacgtggccttcaattcttgcttttttgcccctcggaagcatggggcttttgagcacacttaaaaaaagaaaaatctgtaacttggtgcttattgatgaattgcaagctggccttgcagatggagatatttatctttcagtttatttgaaagaggtctggtttaaaatttgtagcctacatttgttttatttattgtatttgtgtgtttgtgtttgtttttttttaagggtgagccaggtctagcccaacagtctaaactatccagtcaataccgagtgaagtggcagccagcactgttcactctgtgtcttttgaagtgccttgaaggcccagatgaaattttaaagggagggggtccatgtccttccctcccccaccccgcctcattctttaatcaaaggatgtcttctcccttgtttgagaatgaagaaactcgccacctctgacctacctttgcctttttctgtcatggagaatactcacccttcagaaacagaccaaaggccaaaacctgctgatttttctattgaaaatatgtccccttgcaaagaccctaaacaaaaagttaagtttctttctttcacctatttgtacaactccaagttacagctgaatctgtcgtgactttcctgagatctacccggggcttggctgtctgttctgggcactggctccgagttcccctcctgggatttgcaggagggcagtactgaacctgcattcttctccttgtaaatgtaggccgggtgcccctgttctccgggtttggaacaatacgaggttggtgctgatgggatttacttgcgtacgtgctcttcacaaaaacaccgtggatgctgaagttagagcacgtcgccacagagcttgacatcaatgttagagggtctcttactccccgcccagctgtgatgtttcatctgctttggttgttttggtggtcttttttaaaaatagagatttcacatctgcccagaccccactcaaaacgatttggtcaggttctggttggacaagtttaaaatcaaagtagtgcccggaattccctcaaaccacccaacttcatccaggaatacagtctgcagtgcagcaacagaaccgcttaccaagaactgtgcttacatacctttgtcatctctcttccccccttggaagttgtcctcagggggatttgttcctgtcctggggatttacctgggatggtggctgcctgtgcttttgctcatggccttgacagtgctctagttgctggatctaatggcctgtcttggtttctatcacatgagaaggggttgtttttttggggtgactcggactgaattccccatactgtttccacgccgggacaccatgttctccatcaagctaaagaaatcacgtgcctgaaactgtgcttaagttttgggggaaagatggagttcctatccagagcccccagatttccagaatcgagtgagcttcctggaaggagactgcgtcttctctcaattccagtcatctcagtcgttgtcgttaggtgacatgtgcactttaaatgctctcatcggttggcttcattttcaagacaatcaaatgtattgactgtgttttcttcttagaaaatggagagggttaaaaacatgcaaactgccactttcaacctttgccagtattccctctacccccgtgagagctatctggggggaagaatccttaccaaggtttttttggaaaggtacgaatcttaacttttttccccttctgtgtctcagggtaatactattcagagtcgcccctttgctcattttctcccgtatttgttaccttcctgaggcctcagtattagtcgtgagcacaaagttttgagacctttggcgttgtttcttgatgtgggaggggaggtgttagtgcatgcaagggttgaactagatagaccctgccttagtagagggtgggactataaccttagaggccagaacttgatccagaagttgctgtccacagaagtgctttctatttcatcatttttgtttctagggctctttttctgtagccaggtcttcccaaggattttagtatttgcattggagttgaggtttactctaatgatggtggcccagctgtgcccagaggacagccaggcaggccctgggagggagtttagaaagacagtcctggtgaatgggcttcaagtggtcacaaagagggtggctgtgaggtgaccccagacactgcagaacgatgtgcaccctctgcgttttggatgtccttggaatgtgggagcctagaaataaccctgtggatggaattggggcagcggctgctggagatctgtgtgccttgccttccttcagcaggaccgtctaggtgcgcagccacctatggatgcgtcccagccagccccgtcgctctcgtccatcctcagagacaaagaagagggcagggagtttgggcttggttttgaactttcctttcaatgtagcaaagcattcctagttaaccagagccttggaatctactgcctgctggccaggctttaaaatgaaaagtgttttaatgctgccataaaagggaggcgggggggaggaagggaaaataaaggcatctttccaagtactcatctaatttaattgtcaaaagattgataggccatgaattacttctccatctcactaagggttaaaggcgtgcaaccccccactggctgtgtcccctgccaccgaagtgagtgacctgccctacaaccaggtgggaccacctgtgctgcagtccggaggggcttctgcaggaagcactcaccccccacaccttccccggcctgagcttcccctacctttcgtcaccacctgagggcatgagcacaggccatggggcgtgcctggtgagtctgcctgtggttcaggcttagcctgtggtctcctgtgtgctgctgcccgcatgggatgcgcaggggaggcgtggggatccgcaggagggtggttgggatacaccggatacctctgctctcattgcttgtttgcaaatgctctatggacatttgtgtgctaaatcctattaaataaaaaagacgggttaaaacccagatgctgtatattcatttgtaattatgtataaagtgaagcagttttaaactgtaaagatttttttcagtgtgttttctcgaattttgccacaacatactggcttcgtattttatttatctttctttctagttaccagcttcagacccttgtaaagtctccctcagccctttcaaaaaataataaatttcctgtgaagtt

SEQ ID NO: 170992 - DNA, 10125 bp, Artificial Sequence
  derived and/or modified sequence
gcggctaaagcggcggcaaccgaggcgagcagtgggcacggcggtctcggccgagccgagggccttcaccgctgctgctccggctccgcgacagctctgcgggagcggccgcctattgtctttctccgcggcgaaggtgaagagttgtcccagctcggcccgcgggggagccccgggagccgcacgtgtcctgggtcatgaaacttaatccacagcaagctcccttatatggtgattgtgttgttacagtgctgcttgctgaagaggacaaagctgaagatgatgtagtgttttacttggtatttttgggttccaccctccgtcactgtacaagtactcggaaggtcagttctgatacattggagaccattgctcctggtcatgattgttgtgaaacagtgaaggtgcagctctgtgcttccaaagagggccttcccgtgtttgtggtggctgaagaagactttcatttcgtccaggatgaagcgtatgatgcagctcaattcctagcaaccagtgctggaaatcagcaggctttgaactttacccgttttcttgaccagtcaggacccccatctggggatgtgaattcccttgataagaagttggtgctggcattcaggcacctgaagctgcccacggagtggaatgtattggggacagatcagagtttgcatgatgctggcccgcgagagacattgatgcattttgctgtgcggctgggactgctgaggttgacgtggttcctgttgcagaagccaggtggccgcggagctctcagtatccacaaccaggaaggggcgacgcctgtgagcttggccttggagcgaggctatcacaagctgcaccagcttctaaccgaggagaatgctggagaaccagactcctggagcagtttatcctatgaaataccgtatggagactgttctgtgaggcatcatcgagagttggacatctatacattaacctctgagtctgattcacatcatgaacacccatttcctggagacggttgcactggaccaatttttaaacttatgaacatccaacagcaactaatgaaaacaaacctcaagcagatggacagtcttatgcccttaatgatgacagcacaggatccttccagtgccccagagacagatggccagtttcttccctgtgcaccggagcccacggaccctcagcgactttcttcttctgaagagactgagagcactcagtgctgcccagggagccctgttgcacagactgaaagtccctgtgatttgtcaagcatagttgaggaggagaatacagaccgttcctgtaggaagaaaaataaaggcgtggaaagaaaaggggaagaggtggagccagcacctattgtggactctggaactgtatctgatcaagacagctgccttcagagcttgcctgattgtggagtaaagggcacggaaggcctttcgtcctgtggaaacagaaatgaagaaactggaacaaaatcttctggaatgcccacagaccaggagtccctgagcagtggagatgctgtgcttcagagagacttggtcatggagccaggcacagcccagtattcctctggaggtgaactgggaggcatttcaacaacaaatgtcagtaccccagacactgcaggggaaatggaacatgggctcatgaacccagatgccactgtttggaagaatgtgcttcagggaggggaaagtacaaaggaaagatttgagaactctaatattggcacagctggagcctctgacgtgcacgtcacaagtaagcctgtggataaaatcagtgttccaaactgtgcccctgctgccagttccctggatggtaacaaacctgctgagtcttcacttgcatttagtaatgaagaaacctccactgaaaaaacagcagaaacggaaacttcacgaagtcgtgaggagagtgctgatgctccagtagatcagaattctgtggtgattccagctgctgcaaaagacaagatttcagatggattagaaccttatactctcttagcagcaggcataggtgaggcaatgtcaccctcagatttagcccttcttgggctggaagaagatgtaatgccacaccagaactcagaaacaaattcatctcatgctcaaagccaaaagggcaaatcctcacccatttgttctacaactggagacgataaactttgtgcagactctgcatgtcaacagaacacagtgacttctagtggcgatttggttgcaaaactgtgtgataacatagttagcgagtccgaaagcaccacagcaaggcaacccagctcacaagatccacccgatgcctcccactgtgaagacccacaggctcatacagtcacctctgaccctgtaagggatacccaggaacgtgcggatttttgtcctttcaaagtggtggataacaaaggccaacgaaaagatgtgaaactagataaacctttaacaaatatgcttgaggtggtttcacatccacatccagttgtccctaaaatggagaaagaactggtgccagaccaggcagtaatatcagacagtactttctctctggcaaacagtccaggcagtgaatcagtaaccaaggatgacgcactttcttttgtcccctcccagaaagaaaagggaacagcaactcctgaactacatacagctacagattatagagatggcccagatggaaattcgaatgagcctgatacgcggccactagaagacagggcagtaggcctgtccacatcctccactgctgcagagcttcagcacgggatggggaataccagtctcacaggacttggtggagagcatgagggtcccgcccctccagcaatcccagaagctctgaatatcaaggggaacactgactcttccctgcaaagtgtgggtaaggccactttggctttagattcagttttgactgaagaaggaaaacttctggtggtttcagaaagctctgcagctcaggaacaagataaggataaagcggtgacctgttcctctattaaggaaaatgctctctcttcaggaactttgcaggaagagcagagaacaccacctcctggacaagatactcaacaatttcatgaaaaatcaatctcagctgactgtgccaaggacaaagcacttcagctaagtaattcaccgggtgcatcctctgcctttcttaaggcagaaactgaacataacaaggaagtggccccacaagtctcactgctgactcaaggtggggctgcccagagcctggtgccaccaggagcaagtctggccacagagtcaaggcaggaagccttgggggcagagcacaacagctccgctctgttgccatgtctgttgccagatgggtctgatgggtccgatgctcttaactgcagtcagccttctcctctggatgttggagtgaagaacactcaatcccagggaaaaactagtgcctgtgaggtgagtggagatgtgacggtggatgttacaggggttaatgctctacaaggtatggctgagcccagaagagagaatatatcacacaacacccaagacatcctgattccaaacgtcttgttgagccaagagaagaatgccgttctaggtttgccagtggctctacaggacaaagctgtgactgacccacagggagttggaaccccagagatgatacctcttgattgggagaaagggaagctggagggagcagaccacagctgtaccatgggtgacgctgaggaagcccaaatagacgatgaagcacatcctgtcctactgcagcctgttgccaaggagctccccacagacatggagctctcagcccatgatgatggggccccagctggtgtgagggaagtcatgcgagccccgccttcaggcagggaaaggagcactccctctctaccttgcatggtctctgcccaggacgcacctctgcctaagggggcagacttgatagaggaggctgccagccgtatagtggatgctgtcatcgaacaagtcaaggccgctggagcactgcttactgagggggaggcctgtcacatgtcactgtccagccctgagttgggtcctctcactaaaggactagagagtgcttttacagaaaaagtgagtactttcccacctggggagagcctaccaatgggcagtactcctgaggaagccacggggagccttgcaggatgttttgctggaagggaggagccagagaagatcattttacctgtccaggggcctgagccagcagcagaaatgccagacgtgaaagctgaagatgaagtggattttagagcaagttcaatttctgaagaagtggctgtagggagcatagctgctacactgaagatgaagcaaggcccaatgacccaggcgataaaccgagaaaactggtgtacaatagagccatgccctgatgcagcatctcttctggcttccaagcagagcccagaatgtgagaacttcctggatgttggactgggcagagagtgtacctcaaaacaaggtgtacttaaaagagaatctgggagtgattctgacctctttcactcacccagtgatgacatggacagcatcatcttcccaaagccagaggaagagcatttggcctgtgatatcaccggatccagttcatccaccgatgacacggcttcactggaccgacattcttctcatggcagtgatgtgtctctctcccagattttaaagccaaacaggtcaagagatcggcaaagccttgatggattctacagccatgggatgggagctgagggtcgagaaagtgagagtgagcctgctgacccaggcgacgtggaggaggaggagatggacagtatcactgaagtgcctgcaaactgctctgtcctaaggagctccatgcgctctctttctcccttccggaggcacagctgggggcctgggaaaaatgcagccagcgatgcagaaatgaaccaccggagttcaatgcgagttcttggggatgttgtcaggagacctcccattcataggagaagtttcagtctagaaggcttgacaggaggagctggtgtcggaaacaagccatcctcatctctagaagtaagctctgcaaatgccgaagagctcagacacccattcagtggtgaggaacgggttgactctttggtgtcactttcagaagaggatctggagtcagaccagagagaacataggatgtttgatcagcagatatgtcacagatctaagcagcagggatttaattactgtacatcagccatttcctctccattgacaaaatccatctcattaatgacaatcagccatcctggattggacaattcacggcccttccacagtaccttccacaataccagtgctaatctgactgagagtataacagaagagaactataatttcctgccacatagcccctccaagaaagattctgaatggaagagtggaacaaaagtcagtcgtacattcagctacatcaagaataaaatgtctagcagcaagaagagcaaagaaaaggaaaaagaaaaagataagattaaggagaaggagaaagattctaaagacaaggagaaagataagaagactgtcaacgggcacactttcagttccattcctgttgtgggtcccatcagctgtagccagtgtatgaagcccttcaccaacaaagatgcctatacttgtgcaaattgcagtgcttttgtccacaaaggctgccgagaaagtctagcctcctgtgcaaaggtcaaaatgaagcagcccaaagggagccttcaggcacatgacacatcatcactgcccacggtcattatgagaaacaagccctcacagcccaaggagcgtcctcggtccgcagtcctcctggtggatgaaaccgctaccaccccaatatttgccaatagacgatcccagcagagtgtctcgctctccaaaagtgtctccatacagaacattactggagttggcaatgatgagaacatgtcaaacacctggaaattcctgtctcattcaacagactcactaaataaaatcagcaaggtcaatgagtcaacagaatcacttactgatgagggtacagacatgaatgaaggacaactactgggagactttgagattgagtccaaacagctggaagcagagtcttggagtcggataatagacagcaagtttctaaaacagcaaaagaaagatgtggtcaaacggcaagaagtaatatatgagttgatgcagacagagtttcatcatgtccgcactctcaagatcatgagtggtgtgtacagccaggggatgatggcggatctgctttttgagcagcagatggtagaaaagctgttcccctgtttggatgagctgatcagtatccatagccaattcttccagaggattctggagcggaagaaggagtctctggtggataaaagtgaaaagaactttctcatcaagaggataggggatgtgcttgtaaatcagttttcaggtgagaatgcagaacgtttaaagaagacatatggcaagttttgtgggcaacataaccagtctgtaaactacttcaaagacctttatgccaaggataagcgttttcaagcctttgtaaagaagaagatgagcagttcagttgttagaaggcttggaattccagagtgcatattgcttgtaactcagcggattaccaagtacccagttttattccaaagaatattgcagtgtaccaaagacaatgaagtggagcaggaagatctagcacagtccttgagcctggtgaaggatgtgattggagctgtagacagcaaagtggcaagttatgaaaagaaagtgcgtctcaatgagatttatacaaagacagatagcaagtcaatcatgaggatgaagagtggtcagatgtttgccaaggaagatttgaaacggaagaagcttgtacgtgatgggagtgtgtttctgaagaatgcagcaggaaggttgaaagaggttcaagcagttcttctcactgacattttagttttccttcaagaaaaagaccagaagtacatctttgcatcattggaccagaagtcaacagtgatctctttaaagaagctgattgtgagagaagtggcacatgaggagaaaggtttattcctgatcagcatggggatgacagatccagagatggtagaagtccatgccagctccaaagaggaacgaaacagctggattcagatcattcaggacacaatcaacaccctgaacagagatgaagatgaaggaattcctagtgagaatgaggaagaaaagaaaatgttggacaccagagcccgagaattaaaagaacaacttcaccagaaggaccaaaaaatcctactcttgttggaagagaaggagatgattttccgggacatggctgagtgcagcacccctctcccagaggattgctccccaacacatagccctagagttctcttccgctccaacacagaagaggctctcaaaggaggacctttaatgaaaagtgcaataaatgaggtggagatccttcagggtttggtgagtggaaatctgggaggcacacttgggccgactgtcagcagccccattgagcaagatgtggtcggtcccgtttccctgccccggagagcagagacctttggaggatttgacagccatcagatgaatgcttcaaaaggaggcgagaaggaagagggagatgatggccaagatcttaggagaacggaatcagatagtggcctaaaaaagggtggaaatgctaacctggtatttatgcttaaaagaaacagtgagcaggttgtccagagcgttgttcatctctacgagctcctcagcgctctgcagggtgtggtgctgcagcaggacagctacattgaggaccagaaactggtgctgagcgagagggcgctcactcgcagcttgtcccgcccgagctccctcattgagcaggagaagcagcgcagcctggagaagcagcgccaggacctggccaacctgcagaagcagcaggcccagtacctcgaggagaagcgcaggcgcgagcgtgagtgggaagctcgtgagagggagctgcgggagcgggaggccctcctggcccagcgcgaggaggaggtgcagcaggggcagcaggacctggaaaaggagcgggaggagctccagcagaagaagggcacataccagtatgacctggagcgactgcgtgctgcccagaaacagcttgagagggaacaggagcagctgcgccgggaggcagagcggctcagccagcggcagacagaacgggacctgtgtcaggtttcccatccacataccaagctgatgaggatcccatcgttcttccccagtcctgaggagcccccctcgccatctgcaccttccatagccaaatcagggtcattggactcagaactttcagtgtccccaaaaaggaacagcatctctcggacacacaaagataaggggccttttcacatactgagttcaaccagccagacaaacaaaggaccagaagggcagagccaggcccctgcgtccacctctgcctctacccgcctgtttgggttaacaaagccaaaggaaaagaaggagaaaaaaaagaagaacaaaaccagccgctctcagcccggtgatggtcccgcgtcagaagtatcagcagagggtgaagagatcttctgctgaccctcttcctctctgctgaggcagctgcctcctgatcctggccagcccacctctcctgctgtccccgcgtgcacaagtctcttacactggacgcccactgctcctcagcgtccagtcctcctgggcggccccaggtcctggacaataagcaacagatgatattgagtgtcgggtggggaaggaggcccagactctgcttcggccatgatttgtgactgcccaggactctcaggttgggctggccctactcaggattacactgaaagtaatggcctcgtaagtacaggtgatggttttggacacgtcaggaattcctaaaggctgaaagagtgtatccaagtaaggtctgaacctccgaatgccttttatttgggggaacacaaaaccaaacagcagatgttttggacttgatctgtgtacgtacatggggacctgtctgcatatacacacggggaatgccagaagaaggcccagtctgcaccaggcgtctggtcaacttagcacaagggcagtgcctggacggacccggagcccccgcatatcagcagttcacccagtactcctcagagactggtttccctctaaacccatcccgggcacataccacccgtgttttgcatgtatttctcatttcattttagggatgacaaacatttgtgaaaccagtgagagaaggcttgatgtgtataaaagacgtgatgtgcaccacctcgatctcggtgtttcaggcactaaagcaacaaaacaacccatagtatctcattctgtcatcagatccagaagaaatatcctggttttccagcatgtttacccacatgttttggccatggataaagtgaagaggcctactcaccattatccctgcagcgtgacaccttttgattgtcactgaccactcagaaggggccacggcctcctggctgtgttcctgagcccccgtcgtgcctctcccagacagcagctgtctggcccttgctgggtgagggcacaccactgccaggggtcagcctcgcacccaggccaggcagaagctgtgctctgaagctaggacagctggctgagaagtgggttcaggcgaagggtgaagccatgtgtagcagttcctgccagtgcagatctggagaggagctggcccggaaggcgtggttgtgaaagcgcccttcttatgttaggaggccttggcaaaattggatttcttcaaaaatacatgtaaaggtctgttgttgaattgtactctgcccctggaagcagatacagatggctgcctgctgctcggctttgcttttgcttttcccaccgtgttttcatctttgttcacttgaggctttccccagctggtgtgtgcaggacagttcatggtaatgttgccctctgaggccccgtacaccagaagggaggccctggaaaattttgtgcttccaacgtggccttcaattcttgcttttttgcccctcggaagcatggggcttttgagcacacttaaaaaaagaaa

SEQ ID NO: 170993 - DNA, 13057 bp, Artificial Sequence
  derived and/or modified sequence
aaattattagaaaagcagcctcctattgaaggtgattgtgttgttacagtgctgcttgctgaagaggacaaagctgaagatgatgtagtgttttacttggtatttttgggttccaccctccgtcactgtacaagtactcggaaggtcagttctgatacattggagaccattgctcctggtcatgattgttgtgaaacagtgaaggtgcagctctgtgcttccaaagagggccttcccgtgtttgtggtggctgaagaagactttcatttcgtccaggatgaagcgtatgatgcagctcaattcctagcaaccagtgctggaaatcagcaggctttgaactttacccgttttcttgaccagtcaggacccccatctggggatgtgaattcccttgataagaagttggtgctggcattcaggcacctgaagctgcccacggagtggaatgtattggggacagatcagagtttgcatgatgctggcccgcgagagacattgatgcattttgctgtgcggctgggactgctgaggttgacgtggttcctgttgcagaagccaggtggccgcggagctctcagtatccacaaccaggaaggggcgacgcctgtgagcttggccttggagcgaggctatcacaagctgcaccagcttctaaccgaggagaatgctggagaaccagactcctggagcagtttatcctatgaaataccgtatggagactgttctgtgaggcatcatcgagagttggacatctatacattaacctctgagtctgattcacatcatgaacacccatttcctggagacggttgcactggaccaatttttaaacttatgaacatccaacagcaactaatgaaaacaaacctcaagcagatggacagtcttatgcccttaatgatgacagcacaggatccttccagtgccccagagacagatggccagtttcttccctgtgcaccggagcccacggaccctcagcgactttcttcttctgaagagactgagagcactcagtgctgcccagggagccctgttgcacagactgaaagtccctgtgatttgtcaagcatagttgaggaggagaatacagaccgttcctgtaggaagaaaaataaaggcgtggaaagaaaaggggaagaggtggagccagcacctattgtggactctggaactgtatctgatcaagacagctgccttcagagcttgcctgattgtggagtaaagggcacggaaggcctttcgtcctgtggaaacagaaatgaagaaactggaacaaaatcttctggaatgcccacagaccaggagtccctgagcagtggagatgctgtgcttcagagagacttggtcatggagccaggcacagcccagtattcctctggaggtgaactgggaggcatttcaacaacaaatgtcagtaccccagacactgcaggggaaatggaacatgggctcatgaacccagatgccactgtttggaagaatgtgcttcagggaggggaaagtacaaaggaaagatttgagaactctaatattggcacagctggagcctctgacgtgcacgtcacaagtaagcctgtggataaaatcagtgttccaaactgtgcccctgctgccagttccctggatggtaacaaacctgctgagtcttcacttgcatttagtaatgaagaaacctccactgaaaaaacagcagaaacggaaacttcacgaagtcgtgaggagagtgctgatgctccagtagatcagaattctgtggtgattccagctgctgcaaaagacaagatttcagatggattagaaccttatactctcttagcagcaggcataggtgaggcaatgtcaccctcagatttagcccttcttgggctggaagaagatgtaatgccacaccagaactcagaaacaaattcatctcatgctcaaagccaaaagggcaaatcctcacccatttgttctacaactggagacgataaactttgtgcagactctgcatgtcaacagaacacagtgacttctagtggcgatttggttgcaaaactgtgtgataacatagttagcgagtccgaaagcaccacagcaaggcaacccagctcacaagatccacccgatgcctcccactgtgaagacccacaggctcatacagtcacctctgaccctgtaagggatacccaggaacgtgcggatttttgtcctttcaaagtggtggataacaaaggccaacgaaaagatgtgaaactagataaacctttaacaaatatgcttgaggtggtttcacatccacatccagttgtccctaaaatggagaaagaactggtgccagaccaggcagtaatatcagacagtactttctctctggcaaacagtccaggcagtgaatcagtaaccaaggatgacgcactttcttttgtcccctcccagaaagaaaagggaacagcaactcctgaactacatacagctacagattatagagatggcccagatggaaattcgaatgagcctgatacgcggccactagaagacagggcagtaggcctgtccacatcctccactgctgcagagcttcagcacgggatggggaataccagtctcacaggacttggtggagagcatgagggtcccgcccctccagcaatcccagaagctctgaatatcaaggggaacactgactcttccctgcaaagtgtgggtaaggccactttggctttagattcagttttgactgaagaaggaaaacttctggtggtttcagaaagctctgcagctcaggaacaagataaggataaagcggtgacctgttcctctattaaggaaaatgctctctcttcaggaactttgcaggaagagcagagaacaccacctcctggacaagatactcaacaatttcatgaaaaatcaatctcagctgactgtgccaaggacaaagcacttcagctaagtaattcaccgggtgcatcctctgcctttcttaaggcagaaactgaacataacaaggaagtggccccacaagtctcactgctgactcaaggtggggctgcccagagcctggtgccaccaggagcaagtctggccacagagtcaaggcaggaagccttgggggcagagcacaacagctccgctctgttgccatgtctgttgccagatgggtctgatgggtccgatgctcttaactgcagtcagccttctcctctggatgttggagtgaagaacactcaatcccagggaaaaactagtgcctgtgaggtgagtggagatgtgacggtggatgttacaggggttaatgctctacaaggtatggctgagcccagaagagagaatatatcacacaacacccaagacatcctgattccaaacgtcttgttgagccaagagaagaatgccgttctaggtttgccagtggctctacaggacaaagctgtgactgacccacagggagttggaaccccagagatgatacctcttgattgggagaaagggaagctggagggagcagaccacagctgtaccatgggtgacgctgaggaagcccaaatagacgatgaagcacatcctgtcctactgcagcctgttgccaaggagctccccacagacatggagctctcagcccatgatgatggggccccagctggtgtgagggaagtcatgcgagccccgccttcaggcagggaaaggagcactccctctctaccttgcatggtctctgcccaggacgcacctctgcctaagggggcagacttgatagaggaggctgccagccgtatagtggatgctgtcatcgaacaagtcaaggccgctggagcactgcttactgagggggaggcctgtcacatgtcactgtccagccctgagttgggtcctctcactaaaggactagagagtgcttttacagaaaaagtgagtactttcccacctggggagagcctaccaatgggcagtactcctgaggaagccacggggagccttgcaggatgttttgctggaagggaggagccagagaagatcattttacctgtccaggggcctgagccagcagcagaaatgccagacgtgaaagctgaagatgaagtggattttagagcaagttcaatttctgaagaagtggctgtagggagcatagctgctacactgaagatgaagcaaggcccaatgacccaggcgataaaccgagaaaactggtgtacaatagagccatgccctgatgcagcatctcttctggcttccaagcagagcccagaatgtgagaacttcctggatgttggactgggcagagagtgtacctcaaaacaaggtgtacttaaaagagaatctgggagtgattctgacctctttcactcacccagtgatgacatggacagcatcatcttcccaaagccagaggaagagcatttggcctgtgatatcaccggatccagttcatccaccgatgacacggcttcactggaccgacattcttctcatggcagtgatgtgtctctctcccagattttaaagccaaacaggtcaagagatcggcaaagccttgatggattctacagccatgggatgggagctgagggtcgagaaagtgagagtgagcctgctgacccaggcgacgtggaggaggaggagatggacagtatcactgaagtgcctgcaaactgctctgtcctaaggagctccatgcgctctctttctcccttccggaggcacagctgggggcctgggaaaaatgcagccagcgatgcagaaatgaaccaccggagtttcagtctagaaggcttgacaggaggagctggtgtcggaaacaagccatcctcatctctagaagtaagctctgcaaatgccgaagagctcagacacccattcagtggtgaggaacgggttgactctttggtgtcactttcagaagaggatctggagtcagaccagagagaacataggatgtttgatcagcagatatgtcacagatctaagcagcagggatttaattactgtacatcagccatttcctctccattgacaaaatccatctcattaatgacaatcagccatcctggattggacaattcacggcccttccacagtaccttccacaataccagtgctaatctgactgagagtataacagaagagaactataatttcctgccacatagcccctccaagaaagattctgaatggaagagtggaacaaaagtcagtcgtacattcagctacatcaagaataaaatgtctagcagcaagaagagcaaagaaaaggaaaaagaaaaagataagattaaggagaaggagaaagattctaaagacaaggagaaagataagaagactgtcaacgggcacactttcagttccattcctgttgtgggtcccatcagctgtagccagtgtatgaagcccttcaccaacaaagatgcctatacttgtgcaaattgcagtgcttttgtccacaaaggctgccgagaaagtctagcctcctgtgcaaaggtcaaaatgaagcagcccaaagggagccttcaggcacatgacacatcatcactgcccacggtcattatgagaaacaagccctcacagcccaaggagcgtcctcggtccgcagtcctcctggtggatgaaaccgctaccaccccaatatttgccaatagacgatcccagcagagtgtctcgctctccaaaagtgtctccatacagaacattactggagttggcaatgatgagaacatgtcaaacacctggaaattcctgtctcattcaacagactcactaaataaaatcagcaaggtcaatgagtcaacagaatcacttactgatgagggtacagacatgaatgaaggacaactactgggagactttgagattgagtccaaacagctggaagcagagtcttggagtcggataatagacagcaagtttctaaaacagcaaaagaaagatgtggtcaaacggcaagaagtaatatatgagttgatgcagacagagtttcatcatgtccgcactctcaagatcatgagtggtgtgtacagccaggggatgatggcggatctgctttttgagcagcagatggtagaaaagctgttcccctgtttggatgagctgatcagtatccatagccaattcttccagaggattctggagcggaagaaggagtctctggtggataaaagtgaaaagaactttctcatcaagaggataggggatgtgcttgtaaatcagttttcaggtgagaatgcagaacgtttaaagaagacatatggcaagttttgtgggcaacataaccagtctgtaaactacttcaaagacctttatgccaaggataagcgttttcaagcctttgtaaagaagaagatgagcagttcagttgttagaaggcttggaattccagagtgcatattgcttgtaactcagcggattaccaagtacccagttttattccaaagaatattgcagtgtaccaaagacaatgaagtggagcaggaagatctagcacagtccttgagcctggtgaaggatgtgattggagctgtagacagcaaagtggcaagttatgaaaagaaagtgcgtctcaatgagatttatacaaagacagatagcaagtcaatcatgaggatgaagagtggtcagatgtttgccaaggaagatttgaaacggaagaagcttgtacgtgatgggagtgtgtttctgaagaatgcagcaggaaggttgaaagaggttcaagcagttcttctcactgacattttagttttccttcaagaaaaagaccagaagtacatctttgcatcattggaccagaagtcaacagtgatctctttaaagaagctgattgtgagagaagtggcacatgaggagaaaggtttattcctgatcagcatggggatgacagatccagagatggtagaagtccatgccagctccaaagaggaacgaaacagctggattcagatcattcaggacacaatcaacaccctgaacagagatgaagatgaaggaattcctagtgagaatgaggaagaaaagaaaatgttggacaccagagcccgagaattaaaagaacaacttcaccagaaggaccaaaaaatcctactcttgttggaagagaaggagatgattttccgggacatggctgagtgcagcacccctctcccagaggattgctccccaacacatagccctagagttctcttccgctccaacacagaagaggctctcaaaggaggacctttaatgaaaagtgcaataaatgaggtggagatccttcagggtttggtgagtggaaatctgggaggcacacttgggccgactgtcagcagccccattgagcaagatgtggtcggtcccgtttccctgccccggagagcagagacctttggaggatttgacagccatcagatgaatgcttcaaaaggaggcgagaaggaagagggagatgatggccaagatcttaggagaacggaatcagatagtggcctaaaaaagggtggaaatgctaacctggtatttatgcttaaaagaaacagtgagcaggttgtccagagcgttgttcatctctacgagctcctcagcgctctgcagggtgtggtgctgcagcaggacagctacattgaggaccagaaactggtgctgagcgagagggcgctcactcgcagcttgtcccgcccgagctccctcattgagcaggagaagcagcgcagcctggagaagcagcgccaggacctggccaacctgcagaagcagcaggcccagtacctcgaggagaagcgcaggcgcgagcgtgagtgggaagctcgtgagagggagctgcgggagcgggaggccctcctggcccagcgcgaggaggaggtgcagcaggggcagcaggacctggaaaaggagcgggaggagctccagcagaagaagggcacataccagtatgacctggagcgactgcgtgctgcccagaaacagcttgagagggaacaggagcagctgcgccgggaggcagagcggctcagccagcggcagacagaacgggacctgtgtcaggtttcccatccacataccaagctgatgaggatcccatcgttcttccccagtcctgaggagcccccctcgccatctgcaccttccatagccaaatcagggtcattggactcagaactttcagtgtccccaaaaaggaacagcatctctcggacacacaaagataaggggccttttcacatactgagttcaaccagccagacaaacaaaggaccagaagggcagagccaggcccctgcgtccacctctgcctctacccgcctgtttgggttaacaaagccaaaggaaaagaaggagaaaaaaaagaagaacaaaaccagccgctctcagcccggtgatggtcccgcgtcagaagtatcagcagagggtgaagagatcttctgctgaccctcttcctctctgctgaggcagctgcctcctgatcctggccagcccacctctcctgctgtccccgcgtgcacaagtctcttacactggacgcccactgctcctcagcgtccagtcctcctgggcggccccaggtcctggacaataagcaacagatgatattgagtgtcgggtggggaaggaggcccagactctgcttcggccatgatttgtgactgcccaggactctcaggttgggctggccctactcaggattacactgaaagtaatggcctcgtaagtacaggtgatggttttggacacgtcaggaattcctaaaggctgaaagagtgtatccaagtaaggtctgaacctccgaatgccttttatttgggggaacacaaaaccaaacagcagatgttttggacttgatctgtgtacgtacatggggacctgtctgcatatacacacggggaatgccagaagaaggcccagtctgcaccaggcgtctggtcaacttagcacaagggcagtgcctggacggacccggagcccccgcatatcagcagttcacccagtactcctcagagactggtttccctctaaacccatcccgggcacataccacccgtgttttgcatgtatttctcatttcattttagggatgacaaacatttgtgaaaccagtgagagaaggcttgatgtgtataaaagacgtgatgtgcaccacctcgatctcggtgtttcaggcactaaagcaacaaaacaacccatagtatctcattctgtcatcagatccagaagaaatatcctggttttccagcatgtttacccacatgttttggccatggataaagtgaagaggcctactcaccattatccctgcagcgtgacaccttttgattgtcactgaccactcagaaggggccacggcctcctggctgtgttcctgagcccccgtcgtgcctctcccagacagcagctgtctggcccttgctgggtgagggcacaccactgccaggggtcagcctcgcacccaggccaggcagaagctgtgctctgaagctaggacagctggctgagaagtgggttcaggcgaagggtgaagccatgtgtagcagttcctgccagtgcagatctggagaggagctggcccggaaggcgtggttgtgaaagcgcccttcttatgttaggaggccttggcaaaattggatttcttcaaaaatacatgtaaaggtctgttgttgaattgtactctgcccctggaagcagatacagatggctgcctgctgctcggctttgcttttgcttttcccaccgtgttttcatctttgttcacttgaggctttccccagctggtgtgtgcaggacagttcatggtaatgttgccctctgaggccccgtacaccagaagggaggccctggaaaattttgtgcttccaacgtggccttcaattcttgcttttttgcccctcggaagcatggggcttttgagcacacttaaaaaaagaaaaatctgtaacttggtgcttattgatgaattgcaagctggccttgcagatggagatatttatctttcagtttatttgaaagaggtctggtttaaaatttgtagcctacatttgttttatttattgtatttgtgtgtttgtgtttgtttttttttaagggtgagccaggtctagcccaacagtctaaactatccagtcaataccgagtgaagtggcagccagcactgttcactctgtgtcttttgaagtgccttgaaggcccagatgaaattttaaagggagggggtccatgtccttccctcccccaccccgcctcattctttaatcaaaggatgtcttctcccttgtttgagaatgaagaaactcgccacctctgacctacctttgcctttttctgtcatggagaatactcacccttcagaaacagaccaaaggccaaaacctgctgatttttctattgaaaatatgtccccttgcaaagaccctaaacaaaaagttaagtttctttctttcacctatttgtacaactccaagttacagctgaatctgtcgtgactttcctgagatctacccggggcttggctgtctgttctgggcactggctccgagttcccctcctgggatttgcaggagggcagtactgaacctgcattcttctccttgtaaatgtaggccgggtgcccctgttctccgggtttggaacaatacgaggttggtgctgatgggatttacttgcgtacgtgctcttcacaaaaacaccgtggatgctgaagttagagcacgtcgccacagagcttgacatcaatgttagagggtctcttactccccgcccagctgtgatgtttcatctgctttggttgttttggtggtcttttttaaaaatagagatttcacatctgcccagaccccactcaaaacgatttggtcaggttctggttggacaagtttaaaatcaaagtagtgcccggaattccctcaaaccacccaacttcatccaggaatacagtctgcagtgcagcaacagaaccgcttaccaagaactgtgcttacatacctttgtcatctctcttccccccttggaagttgtcctcagggggatttgttcctgtcctggggatttacctgggatggtggctgcctgtgcttttgctcatggccttgacagtgctctagttgctggatctaatggcctgtcttggtttctatcacatgagaaggggttgtttttttggggtgactcggactgaattccccatactgtttccacgccgggacaccatgttctccatcaagctaaagaaatcacgtgcctgaaactgtgcttaagttttgggggaaagatggagttcctatccagagcccccagatttccagaatcgagtgagcttcctggaaggagactgcgtcttctctcaattccagtcatctcagtcgttgtcgttaggtgacatgtgcactttaaatgctctcatcggttggcttcattttcaagacaatcaaatgtattgactgtgttttcttcttagaaaatggagagggttaaaaacatgcaaactgccactttcaacctttgccagtattccctctacccccgtgagagctatctggggggaagaatccttaccaaggtttttttggaaaggtacgaatcttaacttttttccccttctgtgtctcagggtaatactattcagagtcgcccctttgctcattttctcccgtatttgttaccttcctgaggcctcagtattagtcgtgagcacaaagttttgagacctttggcgttgtttcttgatgtgggaggggaggtgttagtgcatgcaagggttgaactagatagaccctgccttagtagagggtgggactataaccttagaggccagaacttgatccagaagttgctgtccacagaagtgctttctatttcatcatttttgtttctagggctctttttctgtagccaggtcttcccaaggattttagtatttgcattggagttgaggtttactctaatgatggtggcccagctgtgcccagaggacagccaggcaggccctgggagggagtttagaaagacagtcctggtgaatgggcttcaagtggtcacaaagagggtggctgtgaggtgaccccagacactgcagaacgatgtgcaccctctgcgttttggatgtccttggaatgtgggagcctagaaataaccctgtggatggaattggggcagcggctgctggagatctgtgtgccttgccttccttcagcaggaccgtctaggtgcgcagccacctatggatgcgtcccagccagccccgtcgctctcgtccatcctcagagacaaagaagagggcagggagtttgggcttggttttgaactttcctttcaatgtagcaaagcattcctagttaaccagagccttggaatctactgcctgctggccaggctttaaaatgaaaagtgttttaatgctgccataaaagggaggcgggggggaggaagggaaaataaaggcatctttccaagtactcatctaatttaattgtcaaaagattgataggccatgaattacttctccatctcactaagggttaaaggcgtgcaaccccccactggctgtgtcccctgccaccgaagtgagtgacctgccctacaaccaggtgggaccacctgtgctgcagtccggaggggcttctgcaggaagcactcaccccccacaccttccccggcctgagcttcccctacctttcgtcaccacctgagggcatgagcacaggccatggggcgtgcctggtgagtctgcctgtggttcaggcttagcctgtggtctcctgtgtgctgctgcccgcatgggatgcgcaggggaggcgtggggatccgcaggagggtggttgggatacaccggatacctctgctctcattgcttgtttgcaaatgctctatggacatttgtgtgctaaatcctattaaataaaaaagacgggttaaaacccagatgctgtatattcatttgtaattatgtataaagtgaagcagttttaaactgtaaagatttttttcagtgtgttttctcgaattttgccacaacatactggcttcgtattttatttatctttctttctagttaccagcttcagacccttgtaaagtctccctcagccctttcaaaaaataataaatttcctgtgaagtt

SEQ ID NO: 170994 - DNA, 5459 bp, Artificial Sequence
  derived and/or modified sequence
tgcgcggactggagctgtgtgcagggccagcgcggagcccgagcagccgcggtgaagcgcctgtgctctgccgagactgccgtgcccattgctcgcctcggtcgccgccgctttagccgcctccgggggagcggccgcctattgtctttctccgcggcgaaggtgaagagttgtcccagctcggcccgcgggggagccccgggagccgcacgtgtcctgggtcatgaaacttaatccacagcaagctcccttatatggtgattgtgttgttacagtgctgcttgctgaagaggacaaagctgaagatgatgtagtgttttacttggtatttttgggttccaccctccgtcactgtacaagtactcggaaggtcagttctgatacattggagaccattgctcctggtcatgattgttgtgaaacagtgaaggtgcagctctgtgcttccaaagagggccttcccgtgtttgtggtggctgaagaagactttcatttcgtccaggatgaagcgtatgatgcagctcaattcctagcaaccagtgctggaaatcagcaggctttgaactttacccgttttcttgaccagtcaggacccccatctggggatgtgaattcccttgataagaagttggtgctggcattcaggcacctgaagctgcccacggagtggaatgtattggggacagatcagagtttgcatgatgctggcccgcgagagacattgatgcattttgctgtgcggctgggactgctgaggttgacgtggttcctgttgcagaagccaggtggccgcggagctctcagtatccacaaccaggaaggggcgacgcctgtgagcttggccttggagcgaggctatcacaagctgcaccagcttctaaccgaggagaatgctggagaaccagactcctggagcagtttatcctatgaaataccgtatggagactgttctgtgaggcatcatcgagagttggacatctatacattaacctctgagtctgattcacatcatgaacacccatttcctggagacggttgcactggaccaatttttaaacttatgaacatccaacagcaactaatgaaaacaaacctcaagcagatggacagtcttatgcccttaatgatgacagcacaggatccttccagtgccccagagacagatggccagtttcttccctgtgcaccggagcccacggaccctcagcgactttcttcttctgaagagactgagagcactcagtgctgcccagggagccctgttgcacagactgaaagtccctgtgatttgtcaagcatagttgaggaggagaatacagaccgttcctgtaggaagaaaaataaaggcgtggaaagaaaaggggaagaggtggagccagcacctattgtggactctggaactgtatctgatcaagacagctgccttcagagcttgcctgattgtggagtaaagggcacggaaggcctttcgtcctgtggaaacagaaatgaagaaactggaacaaaatcttctggaatgcccacagaccaggagtccctgagcagtggagatgctgtgcttcagagagacttggtcatggagccaggcacagcccagtattcctctggaggtgaactgggaggcatttcaacaacaaatgtcagtaccccagacactgcaggggaaatggaacatgggctcatgaacccagatgccactgtttggaagaatgtgcttcagggaggggaaagtacaaaggaaagatttgagaactctaatattggcacagctggagcctctgacgtgcacgtcacaagtaagcctgtggataaaatcagtgttccaaactgtgcccctgctgccagttccctggatggtaacaaacctgctgagtcttcacttgcatttagtaatgaagaaacctccactgaaaaaacagcagaaacggaaacttcacgaagtcgtgaggagagtgctgatgctccagtagatcagaattctgtggtgattccagctgctgcaaaagacaagatttcagatggattagaaccttatactctcttagcagcaggcataggtgaggcaatgtcaccctcagatttagcccttcttgggctggaagaagatgtaatgccacaccagaactcagaaacaaattcatctcatgctcaaagccaaaagggcaaatcctcacccatttgttctacaactggagacgataaactttgtgcagactctgcatgtcaacagaacacagtgacttctagtggcgatttggttgcaaaactgtgtgataacatagttagcgagtccgaaagcaccacagcaaggcaacccagctcacaagatccacccgatgcctcccactgtgaagacccacaggctcatacagtcacctctgaccctgtaagggatacccaggaacgtgcggatttttgtcctttcaaagtggtggataacaaaggccaacgaaaagatgtgaaactagataaacctttaacaaatatgcttgaggtggtttcacatccacatccagttgtccctaaaatggagaaagaactggtgccagaccaggcagtaatatcagacagtactttctctctggcaaacagtccaggcagtgaatcagtaaccaaggatgacgcactttcttttgtcccctcccagaaagaaaagggaacagcaactcctgaactacatacagctacagattatagagatggcccagatggaaattcgaatgagcctgatacgcggccactagaagacagggcagtaggcctgtccacatcctccactgctgcagagcttcagcacgggatggggaataccagtctcacaggacttggtggagagcatgagggtcccgcccctccagcaatcccagaagctctgaatatcaaggggaacactgactcttccctgcaaagtgtgggtaaggccactttggctttagattcagttttgactgaagaaggaaaacttctggtggtttcagaaagctctgcagctcaggaacaagataaggataaagcggtgacctgttcctctattaaggaaaatgctctctcttcaggaactttgcaggaagagcagagaacaccacctcctggacaagatactcaacaatttcatgaaaaatcaatctcagctgactgtgccaaggacaaagcacttcagctaagtaattcaccgggtgcatcctctgcctttcttaaggcagaaactgaacataacaaggaagtggccccacaagtctcactgctgactcaaggtggggctgcccagagcctggtgccaccaggagcaagtctggccacagagtcaaggcaggaagccttgggggcagagcacaacagctccgctctgttgccatgtctgttgccagatgggtctgatgggtccgatgctcttaactgcagtcagccttctcctctggatgttggagtgaagaacactcaatcccagggaaaaactagtgcctgtgaggtgagtggagatgtgacggtggatgttacaggggttaatgctctacaaggtatggctgagcccagaagagagaatatatcacacaacacccaagacatcctgattccaaacgtcttgttgagccaagagaagaatgccgttctaggtttgccagtggctctacaggacaaagctgtgactgacccacagggagttggaaccccagagatgatacctcttgattgggagaaagggaagctggagggagcagaccacagctgtaccatgggtgacgctgaggaagcccaaatagacgatgaagcacatcctgtcctactgcagcctgttgccaaggagctccccacagacatggagctctcagcccatgatgatggggccccagctggtgtgagggaagtcatgcgagccccgccttcaggcagggaaaggagcactccctctctaccttgcatggtctctgcccaggacgcacctctgcctaagggggcagacttgatagaggaggctgccagccgtatagtggatgctgtcatcgaacaagtcaaggccgctggagcactgcttactgagggggaggcctgtcacatgtcactgtccagccctgagttgggtcctctcactaaaggactagagagtgcttttacagaaaaagtgagtactttcccacctggggagagcctaccaatgggcagtactcctgaggaagccacggggagccttgcaggatgttttgctggaagggaggagccagagaagatcattttacctgtccaggggcctgagccagcagcagaaatgccagacgtgaaagctgaagatgaagtggattttagagcaagttcaatttctgaagaagtggctgtagggagcatagctgctacactgaagatgaagcaaggcccaatgacccaggcgataaaccgagaaaactggtgtacaatagagccatgccctgatgcagcatctcttctggcttccaagcagagcccagaatgtgagaacttcctggatgttggactgggcagagagtgtacctcaaaacaaggtgtacttaaaagagaatctgggagtgattctgacctctttcactcacccagtgatgacatggacagcatcatcttcccaaagccagaggaagagcatttggcctgtgatatcaccggatccagttcatccaccgatgacacggcttcactggaccgacattcttctcatggcagtgatgtgtctctctcccagattttaaagccaaacaggtcaagagatcggcaaagccttgatggattctacagccatgggatgggagctgagggtcgagaaagtgagagtgagcctgctgacccaggcgacgtggaggaggaggagatggacagtatcactgaagtgcctgcaaactgctctgtcctaaggagctccatgcgctctctttctcccttccggaggcacagctgggggcctgggaaaaatgcagccagcgatgcagaaatgaaccaccggagtttcagtctagaaggcttgacaggaggagctggtgtcggaaacaagccatcctcatctctagaagtaagctctgcaaatgccgaagagctcagacacccattcagtggtgaggaacgggttgactctttggtgtcactttcagaagaggatctggagtcagaccagagagaacataggatgtttgatcagcagatatgtcacagatctaagcagcagggatttaattactgtacatcagccatttcctctccattgacaaaatccatctcattaatgacaatcagccatcctggattggacaattcacggcccttccacagtaccttccacaataccagtgctaatctgactgagagtataacagaagagaactataatttcctgccacatagcccctccaagaaagattctgaatggaagagtggaacaaaagtcagtcgtacattcagctacatcaagaataaaatgtctagcagcaagaagagcaaag

SEQ ID NO: 170995 - DNA, 322 bp, Artificial Sequence
  derived and/or modified sequence
gttgtcccagctcggcccgcgggggagccccgggagccgcacgggacatgtatagtttcaccatgttggccaggatggtctgaaactccttatctgaagtgatcagcctgccttgacctcccaaaattctgggattacaggcgtgtgccaccgcgtctgtcctaaggagacacactgtttctctggcttattaagagtgtcctgggtcatgaaacttaatccacagcaagctcccttatatggtgattgtgttgttacagtgctgcttgctgaagaggacaaagctgaagatgatgtagtgttttacttggtatttttgggt

SEQ ID NO: 170996 - DNA, 3765 bp, Artificial Sequence
  derived and/or modified sequence
gaagcgcctgtgctctgccgagactgccgtgcccattgctcgcctcggtcgccgccgctttagccgcctccgggggagcggccgcctattgtctttctccgcggcgaaggtgaagagttgtcccagctcggcccgcgggggagccccgggagccgcacgtgtcctgggtcatgaaacttaatccacagcaagctcccttatatggtgattgtgttgttacagtgctgcttgctgaagaggacaaagctgaagatgatgtagtgttttacttggtatttttgggttccaccctccgtcactgtacaagtactcggaaggtcagttctgatacattggagaccattgctcctggtcatgattgttgtgaaacagtgaaggtgcagctctgtgcttccaaagagggccttcccgtgtttgtggtggctgaagaagactttcatttcgtccaggatgaagcgtatgatgcagctcaattcctagcaaccagtgctggaaatcagcaggctttgaactttacccgttttcttgaccagtcaggacccccatctggggatgtgaattcccttgataagaagttggtgctggcattcaggcacctgaagctgcccacggagtggaatgtattggggacagatcagagtttgcatggtgagaatttatatgatctacaaacacactttaagtttgtgatatttctactttttttttaatggggctacttttctatggtcatcatattcaggtcttccacagaggctgcgtaaatcttagaattactgtaggaaagtggcctcaatggcatctcttctaggttcttcaattgagctgttaagcatgttgttgcagcgaaatgaccctagggattacccaaggagagtggcacgtcaccttcctgtgggtctggatttcagatttgatctctcaagtgtagaaagtgacatgctcttcatgaggagagtagcagagttactttttggtgtttaatgatcaaagacatggttttcattattgtattctgaagttctctaaagatagcctggaagtgaaggagaggaaagattgggcagtgagtgggaggagcatgagaacagggtgtgctctgagaaaccacacacttccttaaccaggttagtgtcactcttactgactttatctgttggccctccctatgagagttcactgaagaaaggactttttgtttgttttttgtttttttttgagaacgggctttcactcttgtagtccaggctggagtgcagtggcatgatctcggctcactgcagcctccacctcctgggttcaggtgattctgctgcctcagcctcccaaatagctgggattacaggcatgtaccaccatgcctagcaaatttttttttttttttaattagagacagggtttcaccgtgttagtcaggctggtctcgaactcctgacctcaggtaatctacccacctcggcctcccaaagtgctgggattataggcatgagccactgcgcccggccagaactccactttttcaaaaatatttacatagtaagtcctcttactcaaacaagggttttcccacataattctagtagccaatgacatctacttgatgtcataattgtatagatattttttaatgaaacataatgtgtacctggagttcaataagtaacatccagtttcccttctgagttcaagtccaattgaacgatttgggagtcctgagatagaaaccaaaatgtttattactgatgaaatctagattggaagcctgatgttagagctcctgccagaagggtctgcttgtactttctatgtcttcaatgaaagagctggtcagtcacaccattgccctgtagagtccacccagccttgagtattgaattattttgggtaagcagaccacaagtcactctccccacaggtgagcagttcctgaggagaaatacccagaggggcctgagccatagcatagttagtttctacactcagatgaattttgtcttcttccatggaagaatggtaaagaggtctttgccagctttgattctcttaaatctacactaaatttaacagttaaacctgtggtcagccgtcagaacggtgtcccatactgtcaggtgcatactgtcagattctacctggatagtcctgcccaggtaaaacctgaaaggaagtatcaaatcaaggaagaaaggatttatccttttcttcttctttttttaagtatagtgtccaagaaacttctgtcttgctaatatttagagatcagaatatttgacattctgaaaaggcactcatgccttatataaacctggtgatgggccttaatacctctagctcctcctatttctgtattgatacaggaatgtttattctggctgcctttcacaaatcagtgtcaagatagtactgcattagttatttgtggggcttatggtgttttatggttttgttttgtcttgtttaaagaggggcccaggagttggatagttttatgttgccatgattaaaaacaactattagaaaaagcaaacatctgaaactttggacatatcacttcctctttctctctcttttttttttttttttttgagatagagtcttgctctgtcgcccaggctggagtgcaatggtgcaatctcggctcactgcaacctccatctcctgggttgaagcgattctcctgccttagcctcccaagtagctgggaatacaggcacatgccaccacaccctgctgcttttttgtgtgttttagtagagacggggtttcaccatgttgcccaggctggtcttgaactcctgagctcaggcaatccacccgcctcagcctcccaaagtgctaggattacaggcgtgagccactgtgcccggccacttcctctctttgggccttaacttccttgtctttaataggagggaattggccagctttaatttttttttgtactgtcagtgtactggtaaattttctgttgcacaaaattgctcaagcagtgctaacaaaggccaaaccaaatttgaacacttgaggaaggaaatacatattaaaaccacaatgagatatcattacacatttatcataatggctaagatgaagaataccaagtgctggcaaagatgaagaacatatcatatgttgcttgtaggaatgcaaaatgtataaccactctagaaatatttggcagtttcttgtaaagttaaacatacacttagcgtatgacccagtaatcccacttttgggtgtttatcctagagaaatgaaaatctgtagtcaccaaaaagtctgtgcacggacgtgctcatagtaatgttattcataatcttcaaaaactggaaataacccagatttccctcactgagtgaatacagaagcaaactataatatatccatacagtggaatactactcagcaataaaaagaagcaaactgttgacatgtgcaacaacttggatgtgttttaaatgcattatgcgggaaaatgaagtcagtttccaaaggttccatactatgtgattctatttatatgatattctggaagatgcaaaattatagaaaaagagaacagatgagtagttgctaggggctgggagtgggggaagtctgactggaaagaggtatcatgagggaattctttgggttgttggagttgttttgtcttgttcgtggtggtggctgtaagaatctatgcatgtgttaaaactcataggagtgtacatcccctaaaggtgaattttattgtacatatatttaaaataataaaataacaaa

SEQ ID NO: 170997 - DNA, 3177 bp, Artificial Sequence
  derived and/or modified sequence
atgagcagcagcaagaagagcaaggagaaggagaaggagaaggacaagatcaaggagaaggagaaggacagcaaggacaaggagaaggacaagaagaccgtgaacggccacaccttcagcagcatccccgtggtgggccccatcagctgcagccagtgcatgaagcccttcaccaacaaggacgcctacacctgcgccaactgcagcgccttcgtgcacaagggctgcagagagagcctggccagctgcgccaaggtgaagatgaagcagcccaagggcagcctgcaggcccacgacaccagcagcctgcccaccgtgatcatgagaaacaagcccagccagcccaaggagagacccagaagcgccgtgctgctggtggacgagaccgccaccacccccatcttcgccaacagaagaagccagcagagcgtgagcctgagcaagagcgtgagcatccagaacatcaccggcgtgggcaacgacgagaacatgagcaacacctggaagttcctgagccacagcaccgacagcctgaacaagatcagcaaggtgaacgagagcaccgagagcctgaccgacgagggcgtgggcaccgacatgaacgagggccagctgctgggcgacttcgagatcgagagcaagcagctggaggccgagagctggagcagaatcatcgacagcaagttcctgaagcagcagaagaaggacgtggtgaagagacaggaggtgatctacgagctgatgcagaccgagttccaccacgtgagaaccctgaagatcatgagcggcgtgtacagccagggcatgatggccgacctgctgttcgagcagcagatggtggagaagctgttcccctgcctggacgagctgatcagcatccacagccagttcttccagagaatcctggagagaaagaaggagagcctggtggacaagagcgagaagaacttcctgatcaagagaatcggcgacgtgctggtgaaccagttcagcggcgagaacgccgagagactgaagaagacctacggcaagttctgcggccagcacaaccagagcgtgaactacttcaaggacctgtacgccaaggacaagagattccaggccttcgtgaagaagaagatgagcagcagcgtggtgagaagactgggcatccccgagtgcatcctgctggtgacccagagaatcaccaagtaccccgtgctgttccagagaatcctgcagtgcaccaaggacaacgaggtggagcaggaggacctggcccagagcctgagcctggtgaaggacgtgatcggcgccgtggacagcaaggtggccagctacgagaagaaggtgagactgaacgagatctacaccaagaccgacagcaagagcatcatgagaatgaagagcggccagatgttcgccaaggaggacctgaagagaaagaagctggtgagagacggcagcgtgttcctgaagaacgccgccggcagactgaaggaggtgcaggccgtgctgctgaccgacatcctggtgttcctgcaggagaaggaccagaagtacatcttcgccagcctggaccagaagagcaccgtgatcagcctgaagaagctgatcgtgagagaggtggcccacgaggagaagggcctgttcctgatcagcatgggcatgaccgaccccgagatggtggaggtgcacgccagcagcaaggaggagagaaacagctggatccagatcatccaggacaccatcaacaccctgaacagagacgaggacgagggcatccccagcgagaacgaggaggagaagaagatgctggacaccagagccagagagctgaaggagcagctgcaccagaaggaccagaagatcctgctgctgctggaggagaaggagatgatcttcagagacatggccgagtgcagcacccccctgcccgaggactgcagccccacccacagccccagagtgctgttcagaagcaacaccgaggaggccctgaagggcggccccctgatgaagagcgccatcaacgaggtggagatcctgcagggcctggtgagcggcaacctgggcggcaccctgggccccaccgtgagcagccccatcgagcaggacgtggtgggccccgtgagcctgcccagaagagccgagaccttcggcggcttcgacagccaccagatgaacgccagcaagggcggcgagaaggaggagggcgacgacggccaggacctgagaagaaccgagagcgacagcggcctgaagaagggcggcaacgccaacctggtgttcatgctgaagagaaacagcgagcaggtggtgcagagcgtggtgcacctgtacgagctgctgagcgccctgcagggcgtggtgctgcagcaggacagctacatcgaggaccagaagctggtgctgagcgagagagccctgaccagaagcctgagcagacccagcagcctgatcgagcaggagaagcagagaagcctggagaagcagagacaggacctggccaacctgcagaagcagcaggcccagtacctggaggagaagagaagaagagagagagagtgggaggccagagagagagagctgagagagagagaggccctgctggcccagagagaggaggaggtgcagcagggccagcaggacctggagaaggagagagaggagctgcagcagaagaagggcacctaccagtacgacctggagagactgagagccgcccagaagcagctggagagagagcaggagcagctgagaagagaggccgagagactgagccagagacagaccgagagagacctgtgccaggtgagccacccccacaccaagctgatgagaatccccagcttcttccccagccccgaggagccccccagccccagcgcccccagcatcgccaagagcggcagcctggacagcgagctgagcgtgagccccaagagaaacagcatcagcagaacccacaaggacaagggccccttccacatcctgagcagcaccagccagaccaacaagggccccgagggccagagccaggcccccgccagcaccagcgccagcaccagactgttcggcctgaccaagcccaaggagaagaaggagaagaagaagaagaacaagaccagcagaagccagcccggcgacggccccgccagcgaggtgagcgccgagggcgaggagatcttctgctag

SEQ ID NO: 170998 - DNA, 8442 bp, Artificial Sequence
  derived and/or modified sequence
atgaagctgaacccccagcaggcccccctgtacggcgactgcgtggtgaccgtgctgctggccgaggaggacaaggccgaggacgacgtggtgttctacctggtgttcctgggcagcaccctgagacactgcaccagcaccagaaaggtgagcagcgacaccctggagaccatcgcccccggccacgactgctgcgagaccgtgaaggtgcagctgtgcgccagcaaggagggcctgcccgtgttcgtggtggccgaggaggacttccacttcgtgcaggacgaggcctacgacgccgcccagttcctggccaccagcgccggcaaccagcaggccctgaacttcaccagattcctggaccagagcggcccccccagcggcgacgtgaacagcctggacaagaagctggtgctggccttcagacacctgaagctgcccaccgagtggaacgtgctgggcaccgaccagagcctgcacgacgccggccccagagagaccctgatgcacttcgccgtgagactgggcctgctgagactgacctggttcctgctgcagaagcccggcggcagaggcgccctgagcatccacaaccaggagggcgccacccccgtgagcctggccctggagagaggctaccacaagctgcaccagctgctgaccgaggagaacgccggcgagcccgacagctggagcagcctgagctacgagatcccctacggcgactgcagcgtgagacaccacagagagctggacatctacaccctgaccagcgagagcgacagccaccacgagcaccccttccccggcgacggctgcaccggccccatcttcaagctgatgaacatccagcagcagctgatgaagaccaacctgaagcagatggacagcctgatgcccctgatgatgaccgcccaggaccccagcagcgcccccgagaccgacggccagttcctgccctgcgcccccgagcccaccgacccccagagactgagcagcagcgaggagaccgagagcacccagtgctgccccggcagccccgtggcccagaccgagagcccctgcgacctgagcagcatcgtggaggaggagaacaccgacagaagctgcagaaagaagaacaagggcgtggagagaaagggcgaggaggtggagcccgcccccatcgtggacagcggcaccgtgagcgaccaggacagctgcctgcagagcctgcccgactgcggcgtgaagggcaccgagggcctgagcagctgcggcaacagaaacgaggagaccggcaccaagagcagcggcatgcccaccgaccaggagagcctgagcagcggcgacgccgtgctgcagagagacctggtgatggagcccggcaccgcccagtacagcagcggcggcgagctgggcggcatcagcaccaccaacgtgagcacccccgacaccgccggcgagatggagcacggcctgatgaaccccgacgccaccgtgtggaagaacgtgctgcagggcggcgagagcaccaaggagagattcgagaacagcaacatcggcaccgccggcgccagcgacgtgcacgtgaccagcaagcccgtggacaagatcagcgtgcccaactgcgcccccgccgccagcagcctggacggcaacaagcccgccgagagcagcctggccttcagcaacgaggagaccagcaccgagaagaccgccgagaccgagaccagcagaagcagagaggagagcgccgacgcccccgtggaccagaacagcgtggtgatccccgccgccgccaaggacaagatcagcgacggcctggagccctacaccctgctggccgccggcatcggcgaggccatgagccccagcgacctggccctgctgggcctggaggaggacgtgatgccccaccagaacagcgagaccaacagcagccacgcccagagccagaagggcaagagcagccccatctgcagcaccaccggcgacgacaagctgtgcgccgacagcgcctgccagcagaacaccgtgaccagcagcggcgacctggtggccaagctgtgcgacaacatcgtgagcgagagcgagagcaccaccgccagacagcccagcagccaggacccccccgacgccagccactgcgaggacccccaggcccacaccgtgaccagcgaccccgtgagagacacccaggagagagccgacttctgccccttcaaggtggtggacaacaagggccagagaaaggacgtgaagctggacaagcccctgaccaacatgctggaggtggtgagccacccccaccccgtggtgcccaagatggagaaggagctggtgcccgaccaggccgtgatcagcgacagcaccttcagcctggccaacagccccggcagcgagagcgtgaccaaggacgacgccctgagcttcgtgcccagccagaaggagaagggcaccgccacccccgagctgcacaccgccaccgactacagagacggccccgacggcaacagcaacgagcccgacaccagacccctggaggacagagccgtgggcctgagcaccagcagcaccgccgccgagctgcagcacggcatgggcaacaccagcctgaccggcctgggcggcgagcacgagggccccgccccccccgccatccccgaggccctgaacatcaagggcaacaccgacagcagcctgcagagcgtgggcaaggccaccctggccctggacagcgtgctgaccgaggagggcaagctgctggtggtgagcgagagcagcgccgcccaggagcaggacaaggacaaggccgtgacctgcagcagcatcaaggagaacgccctgagcagcggcaccctgcaggaggagcagagaacccccccccccggccaggacacccagcagttccacgagaagagcatcagcgccgactgcgccaaggacaaggccctgcagctgagcaacagccccggcgccagcagcgccttcctgaaggccgagaccgagcacaacaaggaggtggccccccaggtgagcctgctgacccagggcggcgccgcccagagcctggtgccccccggcgccagcctggccaccgagagcagacaggaggccctgggcgccgagcacaacagcagcgccctgctgccctgcctgctgcccgacggcagcgacggcagcgacgccctgaactgcagccagcccagccccctggacgtgggcgtgaagaacacccagagccagggcaagaccagcgcctgcgaggtgagcggcgacgtgaccgtggacgtgaccggcgtgaacgccctgcagggcatggccgagcccagaagagagaacatcagccacaacacccaggacatcctgatccccaacgtgctgctgagccaggagaagaacgccgtgctgggcctgcccgtggccctgcaggacaaggccgtgaccgacccccagggcgtgggcacccccgagatgatccccctggactgggagaagggcaagctggagggcgccgaccacagctgcaccatgggcgacgccgaggaggcccagatcgacgacgaggcccaccccgtgctgctgcagcccgtggccaaggagctgcccaccgacatggagctgagcgcccacgacgacggcgcccccgccggcgtgagagaggtgatgagagccccccccagcggcagagagagaagcacccccagcctgccctgcatggtgagcgcccaggacgcccccctgcccaagggcgccgacctgatcgaggaggccgccagcagaatcgtggacgccgtgatcgagcaggtgaaggccgccggcgccctgctgaccgagggcgaggcctgccacatgagcctgagcagccccgagctgggccccctgaccaagggcctggagagcgccttcaccgagaaggtgagcaccttcccccccggcgagagcctgcccatgggcagcacccccgaggaggccaccggcagcctggccggctgcttcgccggcagagaggagcccgagaagatcatcctgcccgtgcagggccccgagcccgccgccgagatgcccgacgtgaaggccgaggacgaggtggacttcagagccagcagcatcagcgaggaggtggccgtgggcagcatcgccgccaccctgaagatgaagcagggccccatgacccaggccatcaacagagagaactggtgcaccatcgagccctgccccgacgccgccagcctgctggccagcaagcagagccccgagtgcgagaacttcctggacgtgggcctgggcagagagtgcaccagcaagcagggcgtgctgaagagagagagcggcagcgacagcgacctgttccacagccccagcgacgacatggacagcatcatcttccccaagcccgaggaggagcacctggcctgcgacatcaccggcagcagcagcagcaccgacgacaccgccagcctggacagacacagcagccacggcagcgacgtgagcctgagccagatcctgaagcccaacagaagcagagacagacagagcctggacggcttctacagccacggcatgggcgccgagggcagagagagcgagagcgagcccgccgaccccggcgacgtggaggaggaggagatggacagcatcaccgaggtgcccgccaactgcagcgtgctgagaagcagcatgagaagcctgagccccttcagaagacacagctggggccccggcaagaacgccgccagcgacgccgagatgaaccacagaagcagcatgagagtgctgggcgacgtggtgagaagaccccccatccacagaagaagcttcagcctggagggcctgaccggcggcgccggcgtgggcaacaagcccagcagcagcctggaggtgagcagcgccaacgccgaggagctgagacaccccttcagcggcgaggagagagtggacagcctggtgagcctgagcgaggaggacctggagagcgaccagagagagcacagaatgttcgaccagcagatctgccacagaagcaagcagcagggcttcaactactgcaccagcgccatcagcagccccctgaccaagagcatcagcctgatgaccatcagccaccccggcctggacaacagcagacccttccacagcaccttccacaacaccagcgccaacctgaccgagagcatcaccgaggagaactacaacttcctgccccacagccccagcaagaaggacagcgagtggaagagcggcaccaaggtgagcagaaccttcagctacatcaagaacaagatgagcagcagcaagaagagcaaggagaaggagaaggagaaggacaagatcaaggagaaggagaaggacagcaaggacaaggagaaggacaagaagaccgtgaacggccacaccttcagcagcatccccgtggtgggccccatcagctgcagccagtgcatgaagcccttcaccaacaaggacgcctacacctgcgccaactgcagcgccttcgtgcacaagggctgcagagagagcctggccagctgcgccaaggtgaagatgaagcagcccaagggcagcctgcaggcccacgacaccagcagcctgcccaccgtgatcatgagaaacaagcccagccagcccaaggagagacccagaagcgccgtgctgctggtggacgagaccgccaccacccccatcttcgccaacagaagaagccagcagagcgtgagcctgagcaagagcgtgagcatccagaacatcaccggcgtgggcaacgacgagaacatgagcaacacctggaagttcctgagccacagcaccgacagcctgaacaagatcagcaaggtgaacgagagcaccgagagcctgaccgacgagggcgtgggcaccgacatgaacgagggccagctgctgggcgacttcgagatcgagagcaagcagctggaggccgagagctggagcagaatcatcgacagcaagttcctgaagcagcagaagaaggacgtggtgaagagacaggaggtgatctacgagctgatgcagaccgagttccaccacgtgagaaccctgaagatcatgagcggcgtgtacagccagggcatgatggccgacctgctgttcgagcagcagatggtggagaagctgttcccctgcctggacgagctgatcagcatccacagccagttcttccagagaatcctggagagaaagaaggagagcctggtggacaagagcgagaagaacttcctgatcaagagaatcggcgacgtgctggtgaaccagttcagcggcgagaacgccgagagactgaagaagacctacggcaagttctgcggccagcacaaccagagcgtgaactacttcaaggacctgtacgccaaggacaagagattccaggccttcgtgaagaagaagatgagcagcagcgtggtgagaagactgggcatccccgagtgcatcctgctggtgacccagagaatcaccaagtaccccgtgctgttccagagaatcctgcagtgcaccaaggacaacgaggtggagcaggaggacctggcccagagcctgagcctggtgaaggacgtgatcggcgccgtggacagcaaggtggccagctacgagaagaaggtgagactgaacgagatctacaccaagaccgacagcaagagcatcatgagaatgaagagcggccagatgttcgccaaggaggacctgaagagaaagaagctggtgagagacggcagcgtgttcctgaagaacgccgccggcagactgaaggaggtgcaggccgtgctgctgaccgacatcctggtgttcctgcaggagaaggaccagaagtacatcttcgccagcctggaccagaagagcaccgtgatcagcctgaagaagctgatcgtgagagaggtggcccacgaggagaagggcctgttcctgatcagcatgggcatgaccgaccccgagatggtggaggtgcacgccagcagcaaggaggagagaaacagctggatccagatcatccaggacaccatcaacaccctgaacagagacgaggacgagggcatccccagcgagaacgaggaggagaagaagatgctggacaccagagccagagagctgaaggagcagctgcaccagaaggaccagaagatcctgctgctgctggaggagaaggagatgatcttcagagacatggccgagtgcagcacccccctgcccgaggactgcagccccacccacagccccagagtgctgttcagaagcaacaccgaggaggccctgaagggcggccccctgatgaagagcgccatcaacgaggtggagatcctgcagggcctggtgagcggcaacctgggcggcaccctgggccccaccgtgagcagccccatcgagcaggacgtggtgggccccgtgagcctgcccagaagagccgagaccttcggcggcttcgacagccaccagatgaacgccagcaagggcggcgagaaggaggagggcgacgacggccaggacctgagaagaaccgagagcgacagcggcctgaagaagggcggcaacgccaacctggtgttcatgctgaagagaaacagcgagcaggtggtgcagagcgtggtgcacctgtacgagctgctgagcgccctgcagggcgtggtgctgcagcaggacagctacatcgaggaccagaagctggtgctgagcgagagagccctgaccagaagcctgagcagacccagcagcctgatcgagcaggagaagcagagaagcctggagaagcagagacaggacctggccaacctgcagaagcagcaggcccagtacctggaggagaagagaagaagagagagagagtgggaggccagagagagagagctgagagagagagaggccctgctggcccagagagaggaggaggtgcagcagggccagcaggacctggagaaggagagagaggagctgcagcagaagaagggcacctaccagtacgacctggagagactgagagccgcccagaagcagctggagagagagcaggagcagctgagaagagaggccgagagactgagccagagacagaccgagagagacctgtgccaggtgagccacccccacaccaagctgatgagaatccccagcttcttccccagccccgaggagccccccagccccagcgcccccagcatcgccaagagcggcagcctggacagcgagctgagcgtgagccccaagagaaacagcatcagcagaacccacaaggacaagggccccttccacatcctgagcagcaccagccagaccaacaagggccccgagggccagagccaggcccccgccagcaccagcgccagcaccagactgttcggcctgaccaagcccaaggagaagaaggagaagaagaagaagaacaagaccagcagaagccagcccggcgacggccccgccagcgaggtgagcgccgagggcgaggagatcttctgctag

SEQ ID NO: 170999 - DNA, 8379 bp, Artificial Sequence
  derived and/or modified sequence
aagctgctggagaagcagccccccatcgagggcgactgcgtggtgaccgtgctgctggccgaggaggacaaggccgaggacgacgtggtgttctacctggtgttcctgggcagcaccctgagacactgcaccagcaccagaaaggtgagcagcgacaccctggagaccatcgcccccggccacgactgctgcgagaccgtgaaggtgcagctgtgcgccagcaaggagggcctgcccgtgttcgtggtggccgaggaggacttccacttcgtgcaggacgaggcctacgacgccgcccagttcctggccaccagcgccggcaaccagcaggccctgaacttcaccagattcctggaccagagcggcccccccagcggcgacgtgaacagcctggacaagaagctggtgctggccttcagacacctgaagctgcccaccgagtggaacgtgctgggcaccgaccagagcctgcacgacgccggccccagagagaccctgatgcacttcgccgtgagactgggcctgctgagactgacctggttcctgctgcagaagcccggcggcagaggcgccctgagcatccacaaccaggagggcgccacccccgtgagcctggccctggagagaggctaccacaagctgcaccagctgctgaccgaggagaacgccggcgagcccgacagctggagcagcctgagctacgagatcccctacggcgactgcagcgtgagacaccacagagagctggacatctacaccctgaccagcgagagcgacagccaccacgagcaccccttccccggcgacggctgcaccggccccatcttcaagctgatgaacatccagcagcagctgatgaagaccaacctgaagcagatggacagcctgatgcccctgatgatgaccgcccaggaccccagcagcgcccccgagaccgacggccagttcctgccctgcgcccccgagcccaccgacccccagagactgagcagcagcgaggagaccgagagcacccagtgctgccccggcagccccgtggcccagaccgagagcccctgcgacctgagcagcatcgtggaggaggagaacaccgacagaagctgcagaaagaagaacaagggcgtggagagaaagggcgaggaggtggagcccgcccccatcgtggacagcggcaccgtgagcgaccaggacagctgcctgcagagcctgcccgactgcggcgtgaagggcaccgagggcctgagcagctgcggcaacagaaacgaggagaccggcaccaagagcagcggcatgcccaccgaccaggagagcctgagcagcggcgacgccgtgctgcagagagacctggtgatggagcccggcaccgcccagtacagcagcggcggcgagctgggcggcatcagcaccaccaacgtgagcacccccgacaccgccggcgagatggagcacggcctgatgaaccccgacgccaccgtgtggaagaacgtgctgcagggcggcgagagcaccaaggagagattcgagaacagcaacatcggcaccgccggcgccagcgacgtgcacgtgaccagcaagcccgtggacaagatcagcgtgcccaactgcgcccccgccgccagcagcctggacggcaacaagcccgccgagagcagcctggccttcagcaacgaggagaccagcaccgagaagaccgccgagaccgagaccagcagaagcagagaggagagcgccgacgcccccgtggaccagaacagcgtggtgatccccgccgccgccaaggacaagatcagcgacggcctggagccctacaccctgctggccgccggcatcggcgaggccatgagccccagcgacctggccctgctgggcctggaggaggacgtgatgccccaccagaacagcgagaccaacagcagccacgcccagagccagaagggcaagagcagccccatctgcagcaccaccggcgacgacaagctgtgcgccgacagcgcctgccagcagaacaccgtgaccagcagcggcgacctggtggccaagctgtgcgacaacatcgtgagcgagagcgagagcaccaccgccagacagcccagcagccaggacccccccgacgccagccactgcgaggacccccaggcccacaccgtgaccagcgaccccgtgagagacacccaggagagagccgacttctgccccttcaaggtggtggacaacaagggccagagaaaggacgtgaagctggacaagcccctgaccaacatgctggaggtggtgagccacccccaccccgtggtgcccaagatggagaaggagctggtgcccgaccaggccgtgatcagcgacagcaccttcagcctggccaacagccccggcagcgagagcgtgaccaaggacgacgccctgagcttcgtgcccagccagaaggagaagggcaccgccacccccgagctgcacaccgccaccgactacagagacggccccgacggcaacagcaacgagcccgacaccagacccctggaggacagagccgtgggcctgagcaccagcagcaccgccgccgagctgcagcacggcatgggcaacaccagcctgaccggcctgggcggcgagcacgagggccccgccccccccgccatccccgaggccctgaacatcaagggcaacaccgacagcagcctgcagagcgtgggcaaggccaccctggccctggacagcgtgctgaccgaggagggcaagctgctggtggtgagcgagagcagcgccgcccaggagcaggacaaggacaaggccgtgacctgcagcagcatcaaggagaacgccctgagcagcggcaccctgcaggaggagcagagaacccccccccccggccaggacacccagcagttccacgagaagagcatcagcgccgactgcgccaaggacaaggccctgcagctgagcaacagccccggcgccagcagcgccttcctgaaggccgagaccgagcacaacaaggaggtggccccccaggtgagcctgctgacccagggcggcgccgcccagagcctggtgccccccggcgccagcctggccaccgagagcagacaggaggccctgggcgccgagcacaacagcagcgccctgctgccctgcctgctgcccgacggcagcgacggcagcgacgccctgaactgcagccagcccagccccctggacgtgggcgtgaagaacacccagagccagggcaagaccagcgcctgcgaggtgagcggcgacgtgaccgtggacgtgaccggcgtgaacgccctgcagggcatggccgagcccagaagagagaacatcagccacaacacccaggacatcctgatccccaacgtgctgctgagccaggagaagaacgccgtgctgggcctgcccgtggccctgcaggacaaggccgtgaccgacccccagggcgtgggcacccccgagatgatccccctggactgggagaagggcaagctggagggcgccgaccacagctgcaccatgggcgacgccgaggaggcccagatcgacgacgaggcccaccccgtgctgctgcagcccgtggccaaggagctgcccaccgacatggagctgagcgcccacgacgacggcgcccccgccggcgtgagagaggtgatgagagccccccccagcggcagagagagaagcacccccagcctgccctgcatggtgagcgcccaggacgcccccctgcccaagggcgccgacctgatcgaggaggccgccagcagaatcgtggacgccgtgatcgagcaggtgaaggccgccggcgccctgctgaccgagggcgaggcctgccacatgagcctgagcagccccgagctgggccccctgaccaagggcctggagagcgccttcaccgagaaggtgagcaccttcccccccggcgagagcctgcccatgggcagcacccccgaggaggccaccggcagcctggccggctgcttcgccggcagagaggagcccgagaagatcatcctgcccgtgcagggccccgagcccgccgccgagatgcccgacgtgaaggccgaggacgaggtggacttcagagccagcagcatcagcgaggaggtggccgtgggcagcatcgccgccaccctgaagatgaagcagggccccatgacccaggccatcaacagagagaactggtgcaccatcgagccctgccccgacgccgccagcctgctggccagcaagcagagccccgagtgcgagaacttcctggacgtgggcctgggcagagagtgcaccagcaagcagggcgtgctgaagagagagagcggcagcgacagcgacctgttccacagccccagcgacgacatggacagcatcatcttccccaagcccgaggaggagcacctggcctgcgacatcaccggcagcagcagcagcaccgacgacaccgccagcctggacagacacagcagccacggcagcgacgtgagcctgagccagatcctgaagcccaacagaagcagagacagacagagcctggacggcttctacagccacggcatgggcgccgagggcagagagagcgagagcgagcccgccgaccccggcgacgtggaggaggaggagatggacagcatcaccgaggtgcccgccaactgcagcgtgctgagaagcagcatgagaagcctgagccccttcagaagacacagctggggccccggcaagaacgccgccagcgacgccgagatgaaccacagaagcttcagcctggagggcctgaccggcggcgccggcgtgggcaacaagcccagcagcagcctggaggtgagcagcgccaacgccgaggagctgagacaccccttcagcggcgaggagagagtggacagcctggtgagcctgagcgaggaggacctggagagcgaccagagagagcacagaatgttcgaccagcagatctgccacagaagcaagcagcagggcttcaactactgcaccagcgccatcagcagccccctgaccaagagcatcagcctgatgaccatcagccaccccggcctggacaacagcagacccttccacagcaccttccacaacaccagcgccaacctgaccgagagcatcaccgaggagaactacaacttcctgccccacagccccagcaagaaggacagcgagtggaagagcggcaccaaggtgagcagaaccttcagctacatcaagaacaagatgagcagcagcaagaagagcaaggagaaggagaaggagaaggacaagatcaaggagaaggagaaggacagcaaggacaaggagaaggacaagaagaccgtgaacggccacaccttcagcagcatccccgtggtgggccccatcagctgcagccagtgcatgaagcccttcaccaacaaggacgcctacacctgcgccaactgcagcgccttcgtgcacaagggctgcagagagagcctggccagctgcgccaaggtgaagatgaagcagcccaagggcagcctgcaggcccacgacaccagcagcctgcccaccgtgatcatgagaaacaagcccagccagcccaaggagagacccagaagcgccgtgctgctggtggacgagaccgccaccacccccatcttcgccaacagaagaagccagcagagcgtgagcctgagcaagagcgtgagcatccagaacatcaccggcgtgggcaacgacgagaacatgagcaacacctggaagttcctgagccacagcaccgacagcctgaacaagatcagcaaggtgaacgagagcaccgagagcctgaccgacgagggcaccgacatgaacgagggccagctgctgggcgacttcgagatcgagagcaagcagctggaggccgagagctggagcagaatcatcgacagcaagttcctgaagcagcagaagaaggacgtggtgaagagacaggaggtgatctacgagctgatgcagaccgagttccaccacgtgagaaccctgaagatcatgagcggcgtgtacagccagggcatgatggccgacctgctgttcgagcagcagatggtggagaagctgttcccctgcctggacgagctgatcagcatccacagccagttcttccagagaatcctggagagaaagaaggagagcctggtggacaagagcgagaagaacttcctgatcaagagaatcggcgacgtgctggtgaaccagttcagcggcgagaacgccgagagactgaagaagacctacggcaagttctgcggccagcacaaccagagcgtgaactacttcaaggacctgtacgccaaggacaagagattccaggccttcgtgaagaagaagatgagcagcagcgtggtgagaagactgggcatccccgagtgcatcctgctggtgacccagagaatcaccaagtaccccgtgctgttccagagaatcctgcagtgcaccaaggacaacgaggtggagcaggaggacctggcccagagcctgagcctggtgaaggacgtgatcggcgccgtggacagcaaggtggccagctacgagaagaaggtgagactgaacgagatctacaccaagaccgacagcaagagcatcatgagaatgaagagcggccagatgttcgccaaggaggacctgaagagaaagaagctggtgagagacggcagcgtgttcctgaagaacgccgccggcagactgaaggaggtgcaggccgtgctgctgaccgacatcctggtgttcctgcaggagaaggaccagaagtacatcttcgccagcctggaccagaagagcaccgtgatcagcctgaagaagctgatcgtgagagaggtggcccacgaggagaagggcctgttcctgatcagcatgggcatgaccgaccccgagatggtggaggtgcacgccagcagcaaggaggagagaaacagctggatccagatcatccaggacaccatcaacaccctgaacagagacgaggacgagggcatccccagcgagaacgaggaggagaagaagatgctggacaccagagccagagagctgaaggagcagctgcaccagaaggaccagaagatcctgctgctgctggaggagaaggagatgatcttcagagacatggccgagtgcagcacccccctgcccgaggactgcagccccacccacagccccagagtgctgttcagaagcaacaccgaggaggccctgaagggcggccccctgatgaagagcgccatcaacgaggtggagatcctgcagggcctggtgagcggcaacctgggcggcaccctgggccccaccgtgagcagccccatcgagcaggacgtggtgggccccgtgagcctgcccagaagagccgagaccttcggcggcttcgacagccaccagatgaacgccagcaagggcggcgagaaggaggagggcgacgacggccaggacctgagaagaaccgagagcgacagcggcctgaagaagggcggcaacgccaacctggtgttcatgctgaagagaaacagcgagcaggtggtgcagagcgtggtgcacctgtacgagctgctgagcgccctgcagggcgtggtgctgcagcaggacagctacatcgaggaccagaagctggtgctgagcgagagagccctgaccagaagcctgagcagacccagcagcctgatcgagcaggagaagcagagaagcctggagaagcagagacaggacctggccaacctgcagaagcagcaggcccagtacctggaggagaagagaagaagagagagagagtgggaggccagagagagagagctgagagagagagaggccctgctggcccagagagaggaggaggtgcagcagggccagcaggacctggagaaggagagagaggagctgcagcagaagaagggcacctaccagtacgacctggagagactgagagccgcccagaagcagctggagagagagcaggagcagctgagaagagaggccgagagactgagccagagacagaccgagagagacctgtgccaggtgagccacccccacaccaagctgatgagaatccccagcttcttccccagccccgaggagccccccagccccagcgcccccagcatcgccaagagcggcagcctggacagcgagctgagcgtgagccccaagagaaacagcatcagcagaacccacaaggacaagggccccttccacatcctgagcagcaccagccagaccaacaagggccccgagggccagagccaggcccccgccagcaccagcgccagcaccagactgttcggcctgaccaagcccaaggagaagaaggagaagaagaagaagaacaagaccagcagaagccagcccggcgacggccccgccagcgaggtgagcgccgagggcgaggagatcttctgctag

SEQ ID NO: 171000 - DNA, 5238 bp, Artificial Sequence
  derived and/or modified sequence
atgaagctgaacccccagcaggcccccctgtacggcgactgcgtggtgaccgtgctgctggccgaggaggacaaggccgaggacgacgtggtgttctacctggtgttcctgggcagcaccctgagacactgcaccagcaccagaaaggtgagcagcgacaccctggagaccatcgcccccggccacgactgctgcgagaccgtgaaggtgcagctgtgcgccagcaaggagggcctgcccgtgttcgtggtggccgaggaggacttccacttcgtgcaggacgaggcctacgacgccgcccagttcctggccaccagcgccggcaaccagcaggccctgaacttcaccagattcctggaccagagcggcccccccagcggcgacgtgaacagcctggacaagaagctggtgctggccttcagacacctgaagctgcccaccgagtggaacgtgctgggcaccgaccagagcctgcacgacgccggccccagagagaccctgatgcacttcgccgtgagactgggcctgctgagactgacctggttcctgctgcagaagcccggcggcagaggcgccctgagcatccacaaccaggagggcgccacccccgtgagcctggccctggagagaggctaccacaagctgcaccagctgctgaccgaggagaacgccggcgagcccgacagctggagcagcctgagctacgagatcccctacggcgactgcagcgtgagacaccacagagagctggacatctacaccctgaccagcgagagcgacagccaccacgagcaccccttccccggcgacggctgcaccggccccatcttcaagctgatgaacatccagcagcagctgatgaagaccaacctgaagcagatggacagcctgatgcccctgatgatgaccgcccaggaccccagcagcgcccccgagaccgacggccagttcctgccctgcgcccccgagcccaccgacccccagagactgagcagcagcgaggagaccgagagcacccagtgctgccccggcagccccgtggcccagaccgagagcccctgcgacctgagcagcatcgtggaggaggagaacaccgacagaagctgcagaaagaagaacaagggcgtggagagaaagggcgaggaggtggagcccgcccccatcgtggacagcggcaccgtgagcgaccaggacagctgcctgcagagcctgcccgactgcggcgtgaagggcaccgagggcctgagcagctgcggcaacagaaacgaggagaccggcaccaagagcagcggcatgcccaccgaccaggagagcctgagcagcggcgacgccgtgctgcagagagacctggtgatggagcccggcaccgcccagtacagcagcggcggcgagctgggcggcatcagcaccaccaacgtgagcacccccgacaccgccggcgagatggagcacggcctgatgaaccccgacgccaccgtgtggaagaacgtgctgcagggcggcgagagcaccaaggagagattcgagaacagcaacatcggcaccgccggcgccagcgacgtgcacgtgaccagcaagcccgtggacaagatcagcgtgcccaactgcgcccccgccgccagcagcctggacggcaacaagcccgccgagagcagcctggccttcagcaacgaggagaccagcaccgagaagaccgccgagaccgagaccagcagaagcagagaggagagcgccgacgcccccgtggaccagaacagcgtggtgatccccgccgccgccaaggacaagatcagcgacggcctggagccctacaccctgctggccgccggcatcggcgaggccatgagccccagcgacctggccctgctgggcctggaggaggacgtgatgccccaccagaacagcgagaccaacagcagccacgcccagagccagaagggcaagagcagccccatctgcagcaccaccggcgacgacaagctgtgcgccgacagcgcctgccagcagaacaccgtgaccagcagcggcgacctggtggccaagctgtgcgacaacatcgtgagcgagagcgagagcaccaccgccagacagcccagcagccaggacccccccgacgccagccactgcgaggacccccaggcccacaccgtgaccagcgaccccgtgagagacacccaggagagagccgacttctgccccttcaaggtggtggacaacaagggccagagaaaggacgtgaagctggacaagcccctgaccaacatgctggaggtggtgagccacccccaccccgtggtgcccaagatggagaaggagctggtgcccgaccaggccgtgatcagcgacagcaccttcagcctggccaacagccccggcagcgagagcgtgaccaaggacgacgccctgagcttcgtgcccagccagaaggagaagggcaccgccacccccgagctgcacaccgccaccgactacagagacggccccgacggcaacagcaacgagcccgacaccagacccctggaggacagagccgtgggcctgagcaccagcagcaccgccgccgagctgcagcacggcatgggcaacaccagcctgaccggcctgggcggcgagcacgagggccccgccccccccgccatccccgaggccctgaacatcaagggcaacaccgacagcagcctgcagagcgtgggcaaggccaccctggccctggacagcgtgctgaccgaggagggcaagctgctggtggtgagcgagagcagcgccgcccaggagcaggacaaggacaaggccgtgacctgcagcagcatcaaggagaacgccctgagcagcggcaccctgcaggaggagcagagaacccccccccccggccaggacacccagcagttccacgagaagagcatcagcgccgactgcgccaaggacaaggccctgcagctgagcaacagccccggcgccagcagcgccttcctgaaggccgagaccgagcacaacaaggaggtggccccccaggtgagcctgctgacccagggcggcgccgcccagagcctggtgccccccggcgccagcctggccaccgagagcagacaggaggccctgggcgccgagcacaacagcagcgccctgctgccctgcctgctgcccgacggcagcgacggcagcgacgccctgaactgcagccagcccagccccctggacgtgggcgtgaagaacacccagagccagggcaagaccagcgcctgcgaggtgagcggcgacgtgaccgtggacgtgaccggcgtgaacgccctgcagggcatggccgagcccagaagagagaacatcagccacaacacccaggacatcctgatccccaacgtgctgctgagccaggagaagaacgccgtgctgggcctgcccgtggccctgcaggacaaggccgtgaccgacccccagggcgtgggcacccccgagatgatccccctggactgggagaagggcaagctggagggcgccgaccacagctgcaccatgggcgacgccgaggaggcccagatcgacgacgaggcccaccccgtgctgctgcagcccgtggccaaggagctgcccaccgacatggagctgagcgcccacgacgacggcgcccccgccggcgtgagagaggtgatgagagccccccccagcggcagagagagaagcacccccagcctgccctgcatggtgagcgcccaggacgcccccctgcccaagggcgccgacctgatcgaggaggccgccagcagaatcgtggacgccgtgatcgagcaggtgaaggccgccggcgccctgctgaccgagggcgaggcctgccacatgagcctgagcagccccgagctgggccccctgaccaagggcctggagagcgccttcaccgagaaggtgagcaccttcccccccggcgagagcctgcccatgggcagcacccccgaggaggccaccggcagcctggccggctgcttcgccggcagagaggagcccgagaagatcatcctgcccgtgcagggccccgagcccgccgccgagatgcccgacgtgaaggccgaggacgaggtggacttcagagccagcagcatcagcgaggaggtggccgtgggcagcatcgccgccaccctgaagatgaagcagggccccatgacccaggccatcaacagagagaactggtgcaccatcgagccctgccccgacgccgccagcctgctggccagcaagcagagccccgagtgcgagaacttcctggacgtgggcctgggcagagagtgcaccagcaagcagggcgtgctgaagagagagagcggcagcgacagcgacctgttccacagccccagcgacgacatggacagcatcatcttccccaagcccgaggaggagcacctggcctgcgacatcaccggcagcagcagcagcaccgacgacaccgccagcctggacagacacagcagccacggcagcgacgtgagcctgagccagatcctgaagcccaacagaagcagagacagacagagcctggacggcttctacagccacggcatgggcgccgagggcagagagagcgagagcgagcccgccgaccccggcgacgtggaggaggaggagatggacagcatcaccgaggtgcccgccaactgcagcgtgctgagaagcagcatgagaagcctgagccccttcagaagacacagctggggccccggcaagaacgccgccagcgacgccgagatgaaccacagaagcttcagcctggagggcctgaccggcggcgccggcgtgggcaacaagcccagcagcagcctggaggtgagcagcgccaacgccgaggagctgagacaccccttcagcggcgaggagagagtggacagcctggtgagcctgagcgaggaggacctggagagcgaccagagagagcacagaatgttcgaccagcagatctgccacagaagcaagcagcagggcttcaactactgcaccagcgccatcagcagccccctgaccaagagcatcagcctgatgaccatcagccaccccggcctggacaacagcagacccttccacagcaccttccacaacaccagcgccaacctgaccgagagcatcaccgaggagaactacaacttcctgccccacagccccagcaagaaggacagcgagtggaagagcggcaccaaggtgagcagaaccttcagctacatcaagaacaagatgagcagcagcaagaagagcaagtag

SEQ ID NO: 171001 - protein, 662 aa, Artificial Sequence
  derived and/or modified sequence
MRGAGPSPRQSPRTLRPDPGPAMSFFRRKVKGKEQEKTSDVKSIKASISVHSPQKSTKNHALLEAAGPSHVAINAISANMDSFSSSRTATLKKQPSHMEAAHFGDLGRSCLDYQTQETKSSLSKTLEQVLHDTIVLPYFIQFMELRRMEHLVKFWLEAESFHSTTWSRIRAHSLNTVKQSSLAEPVSPSKKHETTASFLTDSLDKRLEDSGSAQLFMTHSEGIDLNNRTNSTQNHLLLSQECDSAHSLRLEMARAGTHQVSMETQESSSTLTVASRNSPASPLKELSGKLMKSIEQDAVNTFTKYISPDAAKPIPITEAMRNDIIARICGEDGQVDPNCFVLAQSIVFSAMEQEHFSEFLRSHHFCKYQIEVLTSGTVYLADILFCESALFYFSEYMEKEDAVNILQFWLAADNFQSQLAAKKGQYDGQEAQNDAMILYDKYFSLQATHPLGFDDVVRLEIESNICREGGPLPNCFTTPLRQAWTTMEKVFLPGFLSSNLYYKYLNDLIHSVRGDEFLGGNVSLTAPGSVGPPDESHPGSSDSSASQSSVKKASIKILKNFDEAIIVDAASLDPESLYQRTYAGKMTFGRVSDLGQFIRESEPEPDVRKSKGSMFSQAMKKWVQGNTDEAQEELAWKIAKMIVSDIMQQAQYDQPLEKSTKL

SEQ ID NO: 171002 - DNA, 1989 bp, Artificial Sequence
  derived and/or modified sequence
atgagaggagcgggcccatccccaaggcaaagccctcggactctgcggccagatcctgggccggcaatgagtttctttcggagaaaagtcaagggtaaagaacaggaaaaaactagtgacgtgaaatccataaaagcttccatttcagttcatagcccacaaaaatctaccaaaaaccatgcgctgttagaggccgccggaccttcacatgttgctattaatgccatttctgccaatatggattcgttctctagtagtcggactgctacactgaaaaaacagccaagccatatggaagccgcccactttggcgacctcggccggtcgtgcctggattatcagacccaggaaaccaaatcaagcctatcgaagacgcttgagcaggtcctacatgatacaatcgttctgccgtacttcatccagttcatggaacttcgacgaatggaacatctggtgaaattctggcttgaggctgagtcttttcatagcactacatggagccgcatcagggcacactccttgaacactgttaagcagtcttcgctcgccgaaccagtgtccccatcgaagaagcacgagacaacagcctccttcctaactgactctctggataagaggctcgaggattccggatcagcacagctctttatgactcactctgaggggatcgacctgaacaatcggaccaattctacgcaaaaccatctgctgctctcccaagaatgtgactccgcccattctcttcgattggaaatggcacgagcagggactcatcaggtgtctatggagacacaggagtcctcctctacactgaccgttgcctctaggaattcccctgccagcccgctcaaagagctctctggaaagctgatgaagtccatcgagcaagacgcagtaaatacgtttactaagtacatctcccctgacgcagctaaacctatacctatcaccgaggccatgaggaatgatattatcgctaggatctgcggcgaggatgggcaggtggaccccaattgtttcgtcctggctcagagcattgtgttctcggccatggagcaggagcacttcagcgaattcctgcggagccaccacttctgtaagtatcaaattgaggtgctgacatcgggcaccgtatatctcgctgatattctcttctgcgagtctgcgctgttctattttagtgagtatatggagaaggaagatgccgtgaatattttgcagttctggctagccgccgacaactttcagtctcagctagccgctaagaaaggacagtacgatggccaggaggctcaaaatgacgccatgatcctatacgacaaatacttcagtctacaggcaacacaccccctcggttttgacgatgtggtaagactggaaatcgaatccaacatctgtagagaaggggggcctttacccaattgttttaccactccactgcgacaggcgtggaccaccatggagaaagtgtttctccctggctttctctcctctaacctttattacaagtaccttaatgacctcatccactccgtccgcggcgacgagtttcttggcgggaacgtttctttgaccgccccgggcagcgtgggacccccagatgaatcgcacccaggcagctccgactccagtgcctctcagagctccgtaaagaaagcatctatcaagattttgaagaattttgacgaagccattatagtggacgccgcttcgttggaccctgagtcgttataccagcgaacttatgcaggcaaaatgaccttcggaagggtgagcgacctaggtcagttcattcgagaaagtgaacctgagccggatgtccggaagtcaaagggctcaatgttctcacaggccatgaagaaatgggtccagggcaacactgacgaggcacaagaggaactcgcctggaagatagctaagatgatagtgtcagatatcatgcagcaggcacagtatgaccagcccctggaaaagagcacaaaactctag

SEQ ID NO: 171003 - DNA, 1989 bp, Artificial Sequence
  derived and/or modified sequence
atgagaggagctggccccagcccccggcagagccccaggaccctgcggccagaccccggccctgccatgtccttcttccggaggaaggtgaagggcaaggagcaggagaagaccagtgatgtgaagagcatcaaggccagcatctctgtgcacagcccccagaagagcaccaagaaccacgccctgctggaggccgccggccccagccacgtggccatcaatgccatcagcgccaacatggacagcttcagcagcagcaggacagccaccctgaagaagcagcccagccacatggaggccgcccactttggagacctgggccgcagctgcctggactaccagacccaggagaccaagagcagcctgagcaagaccctggagcaggtgctgcatgacaccatcgtgctgccctacttcatccagttcatggagctgcggaggatggagcacctggtgaagttctggctggaggccgagagcttccacagcaccacctggagccgcatccgggcccacagcctgaacacagtgaagcagagcagcctggccgagcctgtgagccccagcaagaagcatgagaccacagccagcttcctgacagacagcctggacaagaggctggaggacagcggcagcgcccagctgttcatgacccacagcgagggcatcgacctgaacaacagaaccaacagcacccagaaccacctgctgctgagccaggagtgtgacagcgcccacagcctgcggctggagatggcccgggccggcacccaccaggtgtccatggagacccaggagagcagcagcaccctgactgtggccagcaggaacagccctgccagccccctgaaggagctgagcggcaagctgatgaagagcattgagcaggatgctgtgaacaccttcaccaagtacatcagcccagatgctgccaagcccatccccatcacagaggccatgagaaatgacatcatcgcccgcatctgtggagaagatggccaggtggaccccaactgctttgtgctggcccagagcatcgtgttttctgccatggagcaggagcacttcagcgagttcctgcggagccaccacttctgcaagtaccagatcgaggtgctgaccagcggcaccgtgtacctggccgacatcctcttctgtgagagcgccctcttctacttcagcgagtacatggagaaggaggatgctgtgaacatcctgcagttctggctggccgctgacaacttccagagccagctggccgccaagaagggccagtatgatggccaggaggcccagaatgatgccatgatcctgtatgacaagtacttcagcctgcaggccacccaccccctgggctttgatgatgtggtgcggctggagattgagagcaacatctgccgggagggcggccccctgcccaactgcttcaccacccccctgcggcaggcctggaccaccatggagaaggtgttcctgcccggcttcctgagcagcaacctgtactacaagtacctgaatgacctgatccacagcgtgagaggagatgagttcctgggcggcaatgtgtccctgacagcccctggctctgtgggccccccagatgagagccaccctggcagcagtgacagcagcgccagccagagctctgtgaagaaggccagcatcaagatcctgaagaactttgatgaggccatcatcgtggatgctgccagcctggaccctgagagcctgtaccagaggacctacgccggcaagatgaccttcggccgggtgtctgacctgggccagttcatccgggagagcgagcctgagccagatgtgaggaagagcaagggctccatgttcagccaggccatgaagaagtgggtgcagggcaacacagatgaggcccaggaggagctggcctggaagatcgccaagatgattgtgtctgacatcatgcagcaggcccagtatgaccagcccctggagaagagcaccaagctgtag

SEQ ID NO: 171004 - DNA, 1989 bp, Artificial Sequence
  derived and/or modified sequence
atgcggggcgccggccccagcccccggcagagcccccggaccctgcggccagaccctgggcctgcgatgtcattctttaggcgtaaggtcaaagggaaagagcaggagaaaaccagtgatgtaaagtccattaaagccagcatctcagtccattctccacagaaatctaccaaaaatcatgccctgctcgaagccgcaggcccatcccatgtggcaatcaacgcaatctccgcaaatatggacagtttctcctccagccgcacggcaacactgaaaaaacaaccctcccacatggaagcggcccatttcggggatttaggcagaagttgtcttgattaccagacgcaagagaccaagtcatcattaagcaaaaccctggaacaggtgctgcacgacactatcgtcttaccctacttcatccagtttatggaactgagacgtatggaacacctcgtcaagttctggctcgaggccgaatcttttcacagtacaacatggagccggatcagggcacactccctcaatacggttaagcagtcctcactggccgagccagtatcgccttcaaagaagcacgagacaactgccagcttcctcacagacagtctggataaacggctcgaagattccgggtcagcccagttattcatgacacacagtgaaggcatcgatctgaacaatcgcaccaactcaacccaaaatcatctgcttctgtctcaggaatgtgattctgctcacagcttgcggctggagatggcaagggctggcacccaccaggtctctatggaaacccaggagtctagttcaactttaacggtcgcatcgcggaacagccctgctagcccacttaaggaactctctgggaagctgatgaaatctatagagcaggacgccgtaaataccttcaccaaatacattagtcctgatgctgctaaacccattcccatcacagaggcaatgaggaatgatatcattgctcgcatttgtggcgaggacgggcaggtcgatcccaattgttttgtcttagctcagtctatagtttttagtgctatggagcaggaacacttcagtgagtttctgcgctctcaccacttttgcaagtaccaaatagaggtgttaaccagcgggaccgtatatctggccgatattctcttttgcgagagcgccctgttctattttagcgagtatatggaaaaggaagacgccgtcaacatcctccaattctggctggcggcagacaatttccagtcacagcttgcagccaagaaaggtcagtatgatggccaagaggctcagaacgatgcaatgattctctacgataagtatttttccttgcaggctacgcatcccctgggtttcgatgatgtggtgcggctagaaatagaatctaacatttgtcgggaagggggacccttgccaaattgcttcactactcccctgcggcaggcttggactacgatggagaaagtctttctgcccggcttcctgagttctaacctctactacaaatacctgaacgatttaatacacagtgttcggggggacgaatttctcgggggtaatgttagccttaccgcgcctgggagcgtgggtccaccagacgaaagtcaccccggaagcagtgactcctctgcctcccagtcatcggtgaagaaggcctccatcaaaatcctgaaaaactttgatgaggccataattgttgatgccgcctccctcgaccccgagtcactctatcaaaggacatatgctggaaagatgaccttcgggagggtcagtgaccttggacaattcatcagagaatccgagcccgaaccagatgtgcggaagagcaagggttctatgttcagtcaggctatgaagaagtgggtgcagggtaacacagacgaggctcaagaagagttggcttggaagatcgcaaagatgattgtgagtgacatcatgcagcaagcgcaatacgaccagccactggaaaagtcaacgaagctatag

SEQ ID NO: 171005 - DNA, 1989 bp, Artificial Sequence
  derived and/or modified sequence
atgcggggagcaggtccttccccgagacagagcccacgcacgctccgaccagacccaggacccgctatgtctttcttccgcagaaaggtgaaaggcaaggaacaggaaaaaacttcagatgttaaatcaatcaaagctagcattagcgtgcacagtccacagaaatccacaaagaaccacgctcttctggaagctgctgggccatcccacgtggctataaacgccatctcggctaatatggattcgttttcatccagtaggaccgctacgctgaagaaacagcctagtcacatggaagcagcgcacttcggagatctggggaggtcatgcctcgattaccagactcaggagaccaagtcctccctctcaaaaactctggagcaagtcctgcacgataccattgttctgccttactttattcagttcatggaattgcgcaggatggagcacctggtgaagttttggcttgaagcagagagtttccatagcacaacatggtcaaggattcgggcacactcacttaacacggtgaagcagtcctcgctggccgagcccgtgtcgccaagcaaaaaacatgagacaactgcttctttcctgactgacagcctggataagcgcctggaggactcaggaagtgcacagttgttcatgacccactccgaaggtattgatttaaacaataggactaattcaacccaaaaccatttactgttaagccaggagtgtgatagcgcacattctctaaggctcgaaatggcaagggcaggcacccatcaggtctctatggaaacgcaggaaagcagtagcacccttaccgtggctagccggaactccccggcaagtcccctcaaggagctatccggtaagctgatgaagagcattgagcaagatgctgtcaacacttttacaaagtacattagccctgatgctgctaaaccaatccctatcaccgaagccatgaggaatgacataatcgccagaatctgcggagaggacgggcaggtggacccaaattgttttgtcctagcgcaatctatcgtttttagtgccatggaacaggaacatttttccgaatttctgaggtctcatcacttttgcaagtaccagatcgaggtgctgaccagtgggaccgtctacctggcagatattttattctgcgagtccgcccttttttatttttctgaatatatggagaaagaggacgccgtgaatattttgcagttctggctggccgctgataacttccaaagccagctggcagcgaagaaagggcagtatgatggtcaggaggcgcagaatgacgccatgatcctgtatgataagtacttcagcctccaagccactcatccacttggattcgatgacgtggttagactggaaatcgaaagtaacatatgtcgtgaaggaggccctctccctaattgtttcaccacccctttgcggcaagcttggactaccatggagaaggtctttcttccaggctttctttccagcaacctctactacaagtatctcaatgacctgattcatagcgtccgtggcgatgagtttcttgggggaaacgtgtccttgacagcacccggatccgtcggacctcctgacgaatctcacccaggcagttcagatagctctgccagtcagtcttctgtcaaaaaagccagtataaagattctcaagaattttgacgaggcaattatagtggatgcggcaagtctggaccccgagtcactgtaccagaggacgtatgctggtaagatgacttttggccgtgtgagtgatctggggcagttcattcgagaaagcgagcccgagcccgacgtccggaaaagcaaggggtccatgtttagccaggcaatgaagaagtgggtgcaaggcaacacagatgaagcgcaggaggaactcgcatggaaaatagccaagatgattgtttctgatattatgcaacaagctcaatacgatcagcctctggagaagtcgaccaaattatag

SEQ ID NO: 171006 - DNA, 3899 bp, Artificial Sequence
  derived and/or modified sequence
aaggaccggaactccgggcgggcggcttgttgataatatggcggctggagctgcctgggcatcccgaggaggcggtggggcccactcccggaagaagggtcccttttcgcgctagtgcagcggcccctctggacccggaagtccgggccggttgctgaatgaggggagccgggccctccccgcgccagtccccccgcaccctccgtcccgacccgggccccgccatgtccttcttccggcggaaagtgaaaggcaaagaacaagagaagacctcagatgtgaagtccattaaagcttcaatatccgtacattccccacaaaaaagcactaaaaatcatgccttgctggaggctgcaggaccaagtcatgttgcaatcaatgccatttctgccaacatggactccttttcaagtagcaggacagccacacttaagaagcagccaagccacatggaggccgctcattttggtgacctgggcagatcttgtctggactaccagactcaagagaccaaatcaagcctttctaagacccttgaacaagtcttgcacgacactattgtcctcccttacttcattcaattcatggaacttcggcgaatggagcatttggtgaaattttggttagaggctgaaagttttcattcaacaacttggtcgcgaataagagcacacagtctaaacacagtgaagcagagctcactggctgagcctgtctctccatctaaaaagcatgaaactacagcgtcttttttaactgattctcttgataagagattggaggattctggctcagcacagttgtttatgactcattcagaaggaattgacctgaataatagaactaacagcactcagaatcacttgctgctttcccaggaatgtgacagtgcccattctctccgtcttgaaatggccagagcaggaactcaccaagtttccatggaaacccaagaatcttcctctacacttacagtagccagtagaaatagtcccgcttctccactaaaagaattgtcaggaaaactaatgaaaagtatagaacaagatgcagtgaatacttttaccaaatatatatctccagatgctgctaaaccaataccaattacagaagcaatgagaaatgacatcatagcaaggatttgtggagaagatggacaggtggatcccaactgtttcgttttggcacagtccatagtctttagtgcaatggagcaagagcactttagtgagtttctgcgaagtcaccatttctgtaaataccagattgaagtgctgaccagtggaactgtttacctggctgacattctcttctgtgagtcagccctcttttatttctctgagtacatggaaaaagaggatgcagtgaatatcttacaattctggttggcagcagataacttccagtctcagcttgctgccaaaaagggccaatatgatggacaggaggcacagaatgatgccatgattttatatgacaagtacttctccctccaagccacacatcctcttggatttgatgatgttgtacgattagaaattgaatccaatatctgcagggaaggtgggccactccccaactgtttcacaactccattacgtcaggcctggacaaccatggagaaggtctttttgcctggctttttgtccagcaatctttattataaatatttgaatgatctcatccattcggttcgaggagatgaatttctgggcgggaacgtgtcgctgactgctcctggctctgttggccctcctgatgagtctcacccagggagttctgacagctctgcgtctcagtccagtgtgaaaaaagccagtattaaaatactgaaaaattttgatgaagcgataattgtggatgcggcaagtctggatccagaatctttatatcaacggacatatgccgggaagatgacatttggaagagtcagtgacttggggcaattcatccgagaatctgagcctgaacctgatgtaaggaaatcaaaaggatccatgttctcacaagctatgaagaaatgggtgcaaggaaatactgatgaggcccaggaagagctagcttggaagattgctaaaatgatagtcagtgacattatgcagcaggctcagtatgatcaaccgttagagaaatctacaaagttatgactcaaaacttgagataaaggaaatctgcttgtgaaaaataagagaacttttttcccttggttggattcttcaacacagccaatgaaaacagcactatatttctgatctgtcactgttgtttccaggagagaatgggagacaatcctagacttccaccataatgcagttacctgtaggcataattgatgcacatgatgttcacacagtgagagtcttaaagatacaaaatggtattgtttacattactagaaaattattagttttccaatggcaataacccatttatgagagtgttttagcctactggaatagacagggaccacatcctctgggaagcagataagcatagaactgatacttgatgcacactcgtagtggtaactcatccctaatcagcattgtaaagcaggtgccagaggtggtttgctttgtccttccaaagcaggtgagtcagccccaccgagagccaggcagctttgagtggcagcgtggtgctagcagcttcagcggaacagggtgagagttaattatgcagtcttcttgacagcggcattaatttggaaggaaactgacaagtcatgggtcaagtttcagtgacttcctccttcctctgatggcagtatatagttttcacattttaattcctcctcctgagatgcactatacttaaaaccattctctcccctgctaacagaagggtgtgaatctggtttactttgagcattaggatttgcccctttggaattctgcactccagttacttaactttcccttcagaatacatgtggaaagaaagaaagaaatagcgatgactccacttttgcccctgtggcaccttgaacaaagcagttcttcccaaattatactttttttttttttaaataaggtgagcaggatgactggggagagagaaacatttgactttgactgcctcccccattctttgctgtgagctggaaagtgtgcagttggtcgtctttcttctcctttctttaggatagtaagagactcactcactgcacttctgctcagttggcttctgcatcgggatcacacagccatcagcaggactgcccagttggtgagcacactccattgaccacgtggcgccagcgcttcctcaatgcacatgattgagaggaaagaaagttctcttagatgttactgcttttgctcagactttgcaaaaaaaaaaatatatatatatatgtataaatatataattattaatcacttttgtccttgagaaagtcttgaatgaacagagaatttattccattgcaatatttgattgtatagaggcacactgtttcatcgacagaagaagcaaaaaggctttgtgtaagtttttggtactatgtaccacctctgttattcttttaaagctgaagtattcatgtacttaaaccatattatatttaattgtgtttgattttaaaatatatatatatgaattctatttaaaattgtgtcaactttctgctttcagggcatttatggctcttctgttgaaatatattgatctttccaaatattttcatttgctttctaaaaacccagaacatgagccactactggactttgccttgtgtttgaagtgtatggcataaacccaaggtttttattagtcatctatgctgtgattaattcattttgttcttttaacaaaatatttccatccacttcacattgcttcaatctttaacagaaaagcaatataaaggttatagaataaaatgtggttttgggcaa

SEQ ID NO: 171007 - DNA, 1989 bp, Artificial Sequence
  derived and/or modified sequence
atgagaggcgccggccccagccccagacagagccccagaaccctgagacccgaccccggccccgccatgagcttcttcagaagaaaggtgaagggcaaggagcaggagaagaccagcgacgtgaagagcatcaaggccagcatcagcgtgcacagcccccagaagagcaccaagaaccacgccctgctggaggccgccggccccagccacgtggccatcaacgccatcagcgccaacatggacagcttcagcagcagcagaaccgccaccctgaagaagcagcccagccacatggaggccgcccacttcggcgacctgggcagaagctgcctggactaccagacccaggagaccaagagcagcctgagcaagaccctggagcaggtgctgcacgacaccatcgtgctgccctacttcatccagttcatggagctgagaagaatggagcacctggtgaagttctggctggaggccgagagcttccacagcaccacctggagcagaatcagagcccacagcctgaacaccgtgaagcagagcagcctggccgagcccgtgagccccagcaagaagcacgagaccaccgccagcttcctgaccgacagcctggacaagagactggaggacagcggcagcgcccagctgttcatgacccacagcgagggcatcgacctgaacaacagaaccaacagcacccagaaccacctgctgctgagccaggagtgcgacagcgcccacagcctgagactggagatggccagagccggcacccaccaggtgagcatggagacccaggagagcagcagcaccctgaccgtggccagcagaaacagccccgccagccccctgaaggagctgagcggcaagctgatgaagagcatcgagcaggacgccgtgaacaccttcaccaagtacatcagccccgacgccgccaagcccatccccatcaccgaggccatgagaaacgacatcatcgccagaatctgcggcgaggacggccaggtggaccccaactgcttcgtgctggcccagagcatcgtgttcagcgccatggagcaggagcacttcagcgagttcctgagaagccaccacttctgcaagtaccagatcgaggtgctgaccagcggcaccgtgtacctggccgacatcctgttctgcgagagcgccctgttctacttcagcgagtacatggagaaggaggacgccgtgaacatcctgcagttctggctggccgccgacaacttccagagccagctggccgccaagaagggccagtacgacggccaggaggcccagaacgacgccatgatcctgtacgacaagtacttcagcctgcaggccacccaccccctgggcttcgacgacgtggtgagactggagatcgagagcaacatctgcagagagggcggccccctgcccaactgcttcaccacccccctgagacaggcctggaccaccatggagaaggtgttcctgcccggcttcctgagcagcaacctgtactacaagtacctgaacgacctgatccacagcgtgagaggcgacgagttcctgggcggcaacgtgagcctgaccgcccccggcagcgtgggcccccccgacgagagccaccccggcagcagcgacagcagcgccagccagagcagcgtgaagaaggccagcatcaagatcctgaagaacttcgacgaggccatcatcgtggacgccgccagcctggaccccgagagcctgtaccagagaacctacgccggcaagatgaccttcggcagagtgagcgacctgggccagttcatcagagagagcgagcccgagcccgacgtgagaaagagcaagggcagcatgttcagccaggccatgaagaagtgggtgcagggcaacaccgacgaggcccaggaggagctggcctggaagatcgccaagatgatcgtgagcgacatcatgcagcaggcccagtacgaccagcccctggagaagagcaccaagctgtag

SEQ ID NO: 171008 - protein, 1103 aa, Artificial Sequence
  derived and/or modified sequence
MAEAELHKERLQAIAEKRKRQTEIEGKRQQLDEQILLLQHSKSKVLREKWLLQGIPAGTAEEEEARRRQSEEDEFRVKQLEDNIQRLEQEIQTLESEESQISAKEQIILEKLKETEKSFKDFQKGFSSTDGDAVNYISSQLPDLPILCSRTAEPSPGQDGTSRAAGVGWENVLLKEGESASNATETSGPDMTIKKPPQLSEDDIWLKSEGDNYSATLLEPAASSLSPDHKNMEIEVSVAECKSVPGITSTPHPMDHPSAFYSPPHNGLLTDHHESLDNDVAREIRYLDEVLEANCCDSAVDGTYNGTSSPEPGAVVLVGGLSPPVHEATQPEPTERTASRQAPPHIELSNSSPDPMAEAERTNGHSPSQPRDALGDSLQVPVSPSSTTSSRCSSRDGEFTLTTLKKEAKFELRAFHEDKKPSKLFEDDEHEKEQYCIRKVRPSEEMLELEKERRELIRSQAVKKNPGIAAKWWNPPQEKTIEEQLDEEHLESHKKYKERKERRAQQEQLLLQKQLQQQQQQPPSQLCTAPASSHERASMIDKAKEDIVTEQIDFSAARKQFQLMENSRQAVAKGQSTPRLFSIKPFYRPLGSVNSDKPLTNPRPPSVGGPPEDSGASAAKGQKSPGALETPSAAGSQGNTASQGKEGPYSEPSKRGPLSKLWAEDGEFTSARAVLTVVKDDDHGILDQFSRSVNVSLTQEELDSGLDELSVRSQDTTVLETLSNDFSMDNISDSGASNETTNALQENSLADFSLPQTPQTDNPSEGRGEGVSKSFSDHGFYSPSSTLGDSPLVDDPLEYQAGLLVQNAIQQAIAEQVDKAVSKTSRDGAEQQGPEATVEEAEAAAFGSEKPQSMFEPPQVSSPVQEKRDVLPKILPAEDRALRERGPPQPLPAVQPSGPINMEETRPEGSYFSKYSEAAELRSTASLLATQESDVMVGPFKLRSRKQRTLSMIEEEIRAAQEREEELKRQRQVLQSTQSPRTKNAPSLPSRTCYKTAPGKIEKVKPPPSPTTEGPSLQPDLAPEEAAGTQRPKNLMQTLMEDYETHKSKRRERMDDSSYTSKLLSCKVTSEVLEATRVNRRKSALALRWEAGIYANQEEEDNE

SEQ ID NO: 171009 - DNA, 3312 bp, Artificial Sequence
  derived and/or modified sequence
atggccgaggccgagctgcacaaggagagactgcaggccatcgccgagaagagaaagagacagaccgagatcgagggcaagagacagcagctggacgagcagatcctgctgctgcagcacagcaagagcaaggtgctgagagagaagtggctgctgcagggcatccccgccggcaccgccgaggaggaggaggccagaagaagacagagcgaggaggacgagttcagagtgaagcagctggaggacaacatccagagactggagcaggagatccagaccctggagagcgaggagagccagatcagcgccaaggagcagatcatcctggagaagctgaaggagaccgagaagagcttcaaggacttccagaagggcttcagcagcaccgacggcgacgccgtgaactacatcagcagccagctgcccgacctgcccatcctgtgcagcagaaccgccgagcccagccccggccaggacggcaccagcagagccgccggcgtgggctgggagaacgtgctgctgaaggagggcgagagcgccagcaacgccaccgagaccagcggccccgacatgaccatcaagaagcccccccagctgagcgaggacgacatctggctgaagagcgagggcgacaactacagcgccaccctgctggagcccgccgccagcagcctgagccccgaccacaagaacatggagatcgaggtgagcgtggccgagtgcaagagcgtgcccggcatcaccagcaccccccaccccatggaccaccccagcgccttctacagccccccccacaacggcctgctgaccgaccaccacgagagcctggacaacgacgtggccagagagatcagatacctggacgaggtgctggaggccaactgctgcgacagcgccgtggacggcacctacaacggcaccagcagccccgagcccggcgccgtggtgctggtgggcggcctgagcccccccgtgcacgaggccacccagcccgagcccaccgagagaaccgccagcagacaggcccccccccacatcgagctgagcaacagcagccccgaccccatggccgaggccgagagaaccaacggccacagccccagccagcccagagacgccctgggcgacagcctgcaggtgcccgtgagccccagcagcaccaccagcagcagatgcagcagcagagacggcgagttcaccctgaccaccctgaagaaggaggccaagttcgagctgagagccttccacgaggacaagaagcccagcaagctgttcgaggacgacgagcacgagaaggagcagtactgcatcagaaaggtgagacccagcgaggagatgctggagctggagaaggagagaagagagctgatcagaagccaggccgtgaagaagaaccccggcatcgccgccaagtggtggaaccccccccaggagaagaccatcgaggagcagctggacgaggagcacctggagagccacaagaagtacaaggagagaaaggagagaagagcccagcaggagcagctgctgctgcagaagcagctgcagcagcagcagcagcagccccccagccagctgtgcaccgcccccgccagcagccacgagagagccagcatgatcgacaaggccaaggaggacatcgtgaccgagcagatcgacttcagcgccgccagaaagcagttccagctgatggagaacagcagacaggccgtggccaagggccagagcacccccagactgttcagcatcaagcccttctacagacccctgggcagcgtgaacagcgacaagcccctgaccaaccccagaccccccagcgtgggcggcccccccgaggacagcggcgccagcgccgccaagggccagaagagccccggcgccctggagacccccagcgccgccggcagccagggcaacaccgccagccagggcaaggagggcccctacagcgagcccagcaagagaggccccctgagcaagctgtgggccgaggacggcgagttcaccagcgccagagccgtgctgaccgtggtgaaggacgacgaccacggcatcctggaccagttcagcagaagcgtgaacgtgagcctgacccaggaggagctggacagcggcctggacgagctgagcgtgagaagccaggacaccaccgtgctggagaccctgagcaacgacttcagcatggacaacatcagcgacagcggcgccagcaacgagaccaccaacgccctgcaggagaacagcctggccgacttcagcctgccccagaccccccagaccgacaaccccagcgagggcagaggcgagggcgtgagcaagagcttcagcgaccacggcttctacagccccagcagcaccctgggcgacagccccctggtggacgaccccctggagtaccaggccggcctgctggtgcagaacgccatccagcaggccatcgccgagcaggtggacaaggccgtgagcaagaccagcagagacggcgccgagcagcagggccccgaggccaccgtggaggaggccgaggccgccgccttcggcagcgagaagccccagagcatgttcgagcccccccaggtgagcagccccgtgcaggagaagagagacgtgctgcccaagatcctgcccgccgaggacagagccctgagagagagaggccccccccagcccctgcccgccgtgcagcccagcggccccatcaacatggaggagaccagacccgagggcagctacttcagcaagtacagcgaggccgccgagctgagaagcaccgccagcctgctggccacccaggagagcgacgtgatggtgggccccttcaagctgagaagcagaaagcagagaaccctgagcatgatcgaggaggagatcagagccgcccaggagagagaggaggagctgaagagacagagacaggtgctgcagagcacccagagccccagaaccaagaacgcccccagcctgcccagcagaacctgctacaagaccgcccccggcaagatcgagaaggtgaagcccccccccagccccaccaccgagggccccagcctgcagcccgacctggcccccgaggaggccgccggcacccagagacccaagaacctgatgcagaccctgatggaggactacgagacccacaagagcaagagaagagagagaatggacgacagcagctacaccagcaagctgctgagctgcaaggtgaccagcgaggtgctggaggccaccagagtgaacagaagaaagagcgccctggccctgagatgggaggccggcatctacgccaaccaggaggaggaggacaacgagtag

SEQ ID NO: 171010 - DNA, 3312 bp, Artificial Sequence
  derived and/or modified sequence
atggccgaggctgaattgcacaaagagcgactgcaggccatagccgaaaagagaaagcgccagacagagattgagggcaagaggcagcaactggatgagcagatcctactgcttcagcactccaagagcaaggtcctgcgcgaaaaatggctgctgcagggcattcccgcaggcaccgccgaggaggaagaggctcgtcgcaggcagagcgaggaggacgagttcagagtgaagcagctcgaggacaacatccagcgcctggaacaggagattcaaaccctcgaatctgaggagtctcagatctcagccaaagaacagattatattagagaagctgaaggagaccgagaaatcattcaaagatttccagaagggattttccagtacggacggggacgcggtgaactacatcagctcccagctgcccgatctccccatcctctgctctagaacggctgaacccagcccaggacaggatggtacctccagagccgcgggagttggctgggaaaatgtgctgttgaaagagggggaatccgcatccaacgccacagagacttcagggcccgacatgaccatcaagaagcccccacagttgtctgaggatgacatttggctgaaatctgaaggggacaactattccgcaactttactggagccggctgcttccagcttatctccagaccataaaaatatggagattgaggtgagcgttgctgagtgtaaaagcgtccctggaatcaccagcacaccacaccctatggatcatccatccgctttctatagtcctccgcacaatggcctgctgacagatcaccacgagtccttagacaatgatgtggccagggaaattaggtatttggatgaagtcctggaggcaaattgctgcgattccgctgtggatggcacatacaacggcacctcatcaccagagcctggcgcggtagtgctggtgggtggactgtcgccccccgtgcacgaggccacacaacccgagcctacagagcggaccgctagcaggcaggcccccccccacattgaattaagcaattcatcccccgacccaatggccgaggctgaaaggactaacggtcactctccctcccagcccagagacgcgctgggagattcgctgcaagtgcccgtttcaccatcatccaccaccagttctcggtgcagtagcagggatggcgaatttacactgaccaccttaaagaaggaagcgaagttcgaacttagagcattccatgaagataagaaacccagtaaattatttgaggatgatgaacatgagaaagagcagtactgtataaggaaagtgcgcccgtcggaagagatgttagaacttgagaaggagcgccgtgagctgatcagaagccaggcggttaagaaaaaccctggcatcgcggccaagtggtggaacccacctcaggaaaaaactatcgaggagcagctagatgaggaacatttggagtcgcataaaaagtataaagagaggaaggagcgccgtgcacagcaagaacagctgttgctgcagaagcagttgcagcagcaacaacagcagccacctagccagctctgcacagcccctgccagctcgcacgagagggcgtctatgatcgataaagcaaaggaggacattgtcacagaacaaattgatttttcagccgcccgaaaacagttccagctaatggaaaacagtcggcaggcagtcgctaaaggccagagcaccccaagacttttctccattaaaccattttacagaccactgggctccgtgaacagtgacaaacctttaacgaacccgaggccgccctccgtgggcggaccacccgaagatagtggtgcaagcgccgctaagggccagaagagccccggggcccttgaaactccttccgcggctggcagtcaaggaaataccgcaagccagggtaaggagggcccctacagtgaacctagcaagagaggtccactctctaagctttgggctgaggatggcgagtttacttccgcccgtgcagtcctgaccgtcgtgaaagatgacgaccatgggattctggaccagttctctcggtccgtgaacgttagcctgacccaggaggagctcgacagtggactggacgaactttcagtgcgcagccaggacacaaccgtgcttgagacattgtcaaatgacttttctatggacaacatatctgactccggagccagcaacgaaacaactaacgcattacaggagaattcccttgccgatttttcgctgccacagactccgcagacagacaacccgagtgaaggtaggggagagggagtgtccaagtcattctccgaccatggcttctattcacccagctcaaccctgggggattcacctctcgttgatgatcccctggagtaccaggctggtctccttgtgcagaacgctattcaacaggcaattgctgaacaggttgacaaggcagtatccaagacttctcgggacggggctgagcagcagggtcctgaagccacagtggaagaggctgaagctgcagcattcgggtccgagaaacctcagtccatgtttgaacctccccaggtgtcttctcctgtgcaagagaaacgcgacgtgttacccaagatcttaccagcagaagatagagctttgagagagagaggtccaccacaacccttaccagctgtgcaaccatcaggtcctatcaacatggaagagactcggcctgagggaagctatttcagtaagtactccgaggctgctgaactgcgctcaaccgcgtcccttttggctacgcaagagtccgatgtcatggttggacccttcaaacttcggagcaggaagcaacgaaccctgtcaatgatagaagaagagattcgagctgctcaggagcgggaagaagagctcaagcgacagaggcaggtcctccagtcaacccagtccccccgcacaaaaaatgcaccaagtcttccatcaagaacctgctacaagactgctccgggaaagattgaaaaggtgaagcctcccccatccccaaccacagaagggcccagcctgcagccagacctagcacccgaagaagccgcagggacgcagcgcccaaagaacttaatgcagacccttatggaagactatgagacccataaaagcaagcggagggagcgaatggatgattcatcctatacatctaaactcctcagctgcaaagtgacttcggaagtattagaggctacgagagtcaacagaagaaagtccgcactcgccctaagatgggaggccggcatctatgccaatcaggaggaggaggacaatgaatag

SEQ ID NO: 171011 - DNA, 3312 bp, Artificial Sequence
  derived and/or modified sequence
atggccgaggccgagctgcacaaggagcggctgcaggccatcgccgagaagaggaagaggcagacagaaattgagggcaagaggcagcagctggatgagcagatcctgctgctgcagcacagcaagagcaaggtgctgcgggagaagtggctgctgcagggcatcccagctggaacagctgaggaggaggaggcccggcggcggcagagcgaggaggatgagttccgggtgaagcagctggaggacaacatccagaggctggagcaggagatccagaccctggagagcgaggagagccagatcagcgccaaggagcagatcatcctggagaagctgaaggagacagagaagagcttcaaggacttccagaagggcttcagcagcacagatggagatgctgtgaactacatcagcagccagctgcctgacctgcccatcctgtgcagcaggacagctgagcccagccctggccaggacggcaccagcagagctgctggggtgggctgggagaatgtgctgctgaaggagggggagagcgccagcaatgccacagagaccagcggccctgacatgaccatcaagaagccaccccagctgtctgaagatgacatctggctgaagtctgagggggacaactacagcgccaccctgctggagcctgctgccagcagcctgagcccagaccacaagaacatggagattgaggtgtctgtggccgagtgcaagtctgtgcccggcatcaccagcaccccccaccccatggaccaccccagcgccttctacagccccccccacaacggcctgctgacagaccaccacgagagcctggacaatgatgtggcccgggagatccgctacctggatgaggtgctggaggccaactgctgtgacagcgctgtggatggcacctacaacggcaccagcagccctgagcccggggctgtggtgctggtgggcggcctgagcccccctgtgcatgaggccacccagcctgagcccacagagaggacagccagccggcaggccccaccccacatcgagctgagcaacagcagcccagaccccatggccgaggccgagaggaccaacggccacagccccagccagcccagagatgccctgggggacagcctgcaggtgcctgtgagccccagcagcaccaccagcagccgctgcagcagcagagatggagagttcaccctgaccaccctgaagaaggaggccaagtttgagctgcgggccttccacgaggacaagaagcccagcaagctgtttgaagatgatgagcacgagaaggagcagtactgcatcaggaaggtgcggcccagcgaggagatgctggagctggagaaggagcggcgggagctgatccgcagccaggccgtgaagaagaaccctggcattgctgccaagtggtggaaccccccccaggagaagaccatcgaggagcagctggatgaggagcacctggagagccacaagaagtacaaggagaggaaggagcggcgggcccagcaggagcagctgctgctgcagaagcagctgcagcagcagcagcagcagccccccagccagctgtgcacagccccagccagcagccatgagcgggcctccatgattgacaaggccaaggaggacatcgtgacagagcagattgacttctctgctgccaggaagcagttccagctgatggagaacagccggcaggccgtggccaagggccagagcacccccaggctcttcagcatcaagcccttctaccggcccctgggctctgtgaacagcgacaagcccctgaccaacccccggccccccagcgtgggcggccccccagaggacagcggggccagcgctgccaagggccagaagagccctggggccctggagacccccagcgctgctggcagccagggcaacacagccagccagggcaaggagggcccctacagcgagcccagcaagaggggccccctgagcaagctgtgggccgaggatggagagttcaccagcgcccgggctgtgctgactgtggtgaaggatgatgaccacggcatcctggaccagttcagccgctctgtgaatgtgtccctgacccaggaggagctggacagcggcctggatgagctgtctgtgcgcagccaggacaccaccgtgctggagaccctgagcaatgacttctccatggacaacatcagtgacagcggggccagcaatgagaccaccaatgccctgcaggagaacagcctggccgacttcagcctgccccagaccccccagacagacaaccccagcgagggccgcggggagggcgtgtccaagagcttcagtgaccacggcttctacagccccagcagcaccctgggggacagccccctggtggatgaccccctggagtaccaggccggcctgctggtgcagaatgccatccagcaggccatcgccgagcaggtggacaaggctgtgtccaagaccagcagagatggagctgagcagcagggccctgaggccaccgtggaggaggccgaggccgccgccttcggcagcgagaagccccagagcatgtttgagcccccccaggtgagcagccctgtgcaggagaagagagatgtgctgcccaagatcctgcctgctgaggaccgggccctgcgggagcggggccccccccagcccctgcctgctgtgcagcccagcggccccatcaacatggaggagaccaggcctgagggcagctacttcagcaagtacagcgaggccgctgagctgcggagcacagccagcctgctggccacccaggagagtgatgtgatggtgggccccttcaagctgcggagcaggaagcagaggaccctgtccatgattgaggaggagatccgggccgcccaggagcgggaggaggagctgaagaggcagaggcaggtgctgcagagcacccagagccccaggaccaagaatgcccccagcctgcccagcaggacctgctacaagacagcccctgggaagattgagaaggtgaagcccccacccagccccaccacagagggccccagcctgcagcctgacctggcccctgaggaggccgccggcacccagaggcccaagaacctgatgcagaccctgatggaggactatgagacccacaagagcaagaggcgggagaggatggatgacagcagctacaccagcaagctgctgagctgcaaggtgaccagcgaggtgctggaggccaccagggtgaacagaaggaagagcgccctggccctgcgctgggaggccggcatctatgccaaccaggaggaggaggacaatgaatag

SEQ ID NO: 171012 - DNA, 3312 bp, Artificial Sequence
  derived and/or modified sequence
atggccgaggccgagctgcacaaggagcggctgcaggccatcgccgagaagaggaaacgccagactgagatagagggcaagcgccagcagctggatgagcaaatcctgctgctgcagcattcgaagtcaaaggtgctacgggaaaaatggctactgcaggggatccccgccgggaccgccgaggaggaagaagcccggagaagacagtctgaggaggacgagtttagagttaaacaattggaagataatatccagagactggaacaagaaattcagacactggaaagcgaggagtctcaaatctccgcaaaggagcagattattcttgaaaagctgaaggagactgaaaaatctttcaaagacttccagaagggcttctctagcaccgatggagacgctgtgaactatatctcatcacagctgcccgacttgcccatactctgttctagaacagctgagccctcccccggacaagacggcacatcgcgggccgcaggggtcgggtgggaaaatgtgctgctgaaagaaggtgagtcagcctccaacgcgactgaaacttccggaccggacatgacgatcaaaaaacctcctcagctgtccgaggacgacatctggctgaaatccgagggagacaattactccgccacactgctggaacctgccgcaagcagcttgagccctgatcataagaatatggagatcgaagtttccgtcgccgagtgcaagtcagttcccggaataactagcacgccccatccaatggaccatccttcagccttctacagtccaccccataacgggcttctgacggatcatcatgagtcacttgataacgacgtcgcacgagagataaggtatctggacgaggtgcttgaggctaactgctgtgattcggccgtggacggaacatacaatgggacctcatcaccagagcctggggccgtggtgctggtgggcggtttgtctccgcctgtccatgaagccacccaaccagagcccacagagaggaccgcaagccgccaagctcctccccacatagaattaagtaacagttctcccgaccccatggcggaggcagaacggacaaacggtcatagtccgagccagcctagggacgcactcggcgattccttgcaggtaccggtgagcccttcatctactaccagctcgcgatgctcttcacgcgacggcgagttcaccttaacaaccctaaagaaagaagctaaattcgaactgcgagcatttcacgaggataagaagccatcaaagctgtttgaggacgacgagcatgaaaaggagcagtattgcatccgaaaggtcaggccatcagaagagatgctcgagctggaaaaagagcggcgcgagttgatccggtcccaggccgttaaaaaaaatcctgggatcgcagctaagtggtggaacccccctcaggagaaaaccattgaagagcagctggatgaggagcatcttgaatcccacaaaaagtataaggagagaaaagagagacgggcacaacaggagcagctcttgctgcagaagcagctccaacaacaacagcagcaaccaccctcccagctctgtacagcacctgcctcttcgcatgaacgcgcctcaatgatcgacaaggccaaggaggatatcgtgaccgagcagatcgatttcagtgcagcccgcaaacagttccagttaatggagaactccagacaggctgtcgcaaagggtcagtctaccccgcgcctgttctctattaaacccttctatcgcccactcgggtctgtgaactctgacaagccactgacaaaccctaggccccccagtgtgggcggaccaccagaagacagcggagcatcggccgctaaaggccagaaatctcctggggcactggaaaccccatcagccgccgggtctcagggcaatacagccagccagggcaaagagggaccctacagcgaaccgtctaaacgaggacccctaagcaagctctgggccgaagatggggagtttacctccgctcgcgcagtgcttaccgtggtcaaggatgacgaccacggcatactggaccagttctcccggagtgtcaatgtctcacttacccaggaggagctggattccggcctggatgagctgtccgttagatctcaggacacaactgtattggagaccctcagcaacgacttttcgatggataatatctccgatagtggggctagcaatgaaacaactaatgctcttcaggaaaacagtctggccgatttttccttaccgcagacgccccagactgataacccctccgaggggcgtggggagggggtgagcaaaagcttctcagaccacgggttctactccccctcatctaccctgggggattccccactggtggacgaccccctcgaataccaagccgggttactggtgcagaacgctatacagcaggccatcgctgagcaagtggacaaagccgtctctaaaacaagtagagatggggcagagcagcagggccccgaggcgacagtcgaggaggctgaggcagccgcttttggttctgaaaagccgcagtccatgtttgagccccctcaagtgagtagtccagttcaggaaaagcgggacgtgcttcccaaaatcctgcctgcagaagatcgtgccttacgagagagggggccacctcagccccttcctgccgttcagccaagcggcccaattaacatggaggagacacggcctgagggcagctacttctccaaatacagcgaggccgcagagctccggagcactgccagcttactggctacccaggagtctgatgtgatggtgggcccctttaagttgagatcgcggaagcagcggaccttgtcaatgattgaggaagaaatacgtgcagcccaagaacgtgaggaagaactgaagagacaaaggcaggtgctgcagtcaacacaaagtccacgtaccaaaaatgccccatccctgcctagcagaacctgctacaaaaccgctccaggcaagatagagaaagtaaaacctcctccttcaccaactaccgagggacccagtcttcaacccgacctagcgcctgaagaggctgcagggactcagaggcctaagaacctcatgcaaactcttatggaggattacgagacccacaagtctaagaggcgcgaacgcatggatgattcttcttatacatccaagcttctcagttgcaaggtcacgtccgaggtgttggaggcaacccgagtgaatcgacggaagtccgccctggccttgcgctgggaggctggaatttatgccaatcaggaggaggaggataacgaatag

SEQ ID NO: 171013 - DNA, 7507 bp, Artificial Sequence
  derived and/or modified sequence
cccgggcgagcccgccgtgcgcacagctctgcccgccgcccctggagcggatccccagccgtccctgggcgttctcccgggttctagcaaagccccccggggtgcccatcagtttccttgggtgactacagcgtgtgttttttctttcctctttcccctgcctgtgtgcccttctccaggatggcagaggcggaattgcacaaggaaaggctgcaagccatagcagaaaaaagaaagaggcagactgaaatagaaggcaagcgacaacagcttgacgagcagatacttctgctgcagcattccaagtccaaagtgcttcgggagaaatggctgctgcagggcatacccgctggaactgccgaagaggaggaagccaggaggcggcagtctgaagaggatgagttcagagtcaagcaacttgaagataacattcagaggctggagcaagaaatacaaacgctagaaagtgaagagtcccagatatctgccaaagagcaaatcatcctagagaaactgaaggaaacagaaaaatccttcaaggactttcagaagggtttctccagtacggatggagatgcagtaaattacatttcctcccagcttcccgacctgccaatcctctgttcacgaacagcagaaccatcacctgggcaggacgggaccagcagagcggctggagtcgggtgggagaatgtgctgctaaaggaaggtgagtcagcctcgaacgccacagaaacatccggcccagacatgactatcaagaagcctccccagctttctgaggatgatatctggctaaaaagcgagggagacaactatagtgccaccctcctggagcctgctgccagctctctttccccagatcacaaaaacatggaaattgaggtgtctgttgcagaatgtaaaagtgttcctggaatcacctctaccccacatcccatggaccatccctccgctttctattcacccccgcataatggcctccttactgatcaccacgaatccctggataatgatgttgccagagagatccgctatctagatgaggtgctagaggccaactgctgtgattctgctgtggatggaacgtacaatggaacatcctccccagagcctggtgcagtggttctggtgggcggcctaagcccccctgtccacgaggcgacccagccagaacccactgaaagaacagctagccggcaggcacctcctcacatcgagctcagtaatagcagccctgaccccatggcagaggcagaaagaacaaatggccattcccccagccagcctagagatgcgctgggggacagcctgcaggtgcctgtcagccccagctccacaaccagctcacggtgttcttcccgagatggagagttcactctcaccacactgaaaaaggaggccaagtttgagctgcgtgccttccatgaggacaagaagccctccaagctctttgaggatgacgagcatgagaaagaacaatactgcattagaaaagtgaggccttcagaggagatgctggagctggaaaaggagaggagagagctcatccgcagccaggccgtcaagaagaatcctggcattgcagcaaaatggtggaatcccccgcaggaaaaaaccatcgaggagcagctggacgaggaacatctggagtcgcacaaaaagtacaaggagcgcaaagagagaagggcacagcaggaacagttgctgctgcagaagcagttacagcagcagcagcagcagcccccatcgcagctctgcacagcccctgcctcttctcatgaacgcgcaagcatgattgacaaagcaaaggaggacattgtcacagagcagatagatttctctgctgctcgcaaacaatttcagctgatggagaattccaggcaagcggtggccaagggccagagtacacccaggctgttctccatcaagcctttctacaggcctctggggtcagtcaactcagacaagccactgactaatccgagaccaccttctgtcgggggacctccagaagacagtggtgcctcagccgccaagggacagaaatcccccggtgccctggagaccccatcggcagcaggaagccagggcaacacagcctctcaggggaaggaagggccctacagcgagccttctaaacgtgggcccttatctaaactgtgggctgaggatggagaatttacgagcgcccgggctgtcctcactgtggtcaaggatgatgaccatgggattttggatcagttctcaagatctgtcaatgtctccttgacccaagaggagcttgactctggtctggacgaattgtcggtgaggtctcaggataccacagtcctggagaccctatccaatgatttcagcatggacaacatcagtgacagcggggcatccaatgagacaaccaatgccctccaggaaaattcactggctgatttttctctgccccagacaccacaaactgacaacccctcagagggccgaggagaaggcgtctccaagtcatttagtgatcatggtttctattccccttcctccacgctgggggactctccgttggttgatgaccccttggagtatcaggctggcctcctggtgcagaatgccattcaacaagccatagccgagcaggtggataaagctgtgtccaaaaccagcagggatggagcagagcaacagggacctgaagcgactgtagaggaagctgaagctgcggctttcggctcagaaaagcctcagagcatgtttgagccacctcaggtgtcttctcctgttcaagagaaaagggatgtattaccaaagattctgcctgctgaagacagggcgctcagggaaagggggcccccccagccactgccagctgtgcagcccagtggcccgattaacatggaggagaccaggcccgaaggaagctatttcagcaagtactcggaggcagctgagctgagaagcacagcctccctcctggccactcaagaatctgacgtgatggttgggcctttcaagctgaggtccaggaaacagcggactttgtccatgattgaggaagagatccgagcagctcaggaaagggaagaggagctgaagaggcagagacaagtcttgcagagtacgcagagccccaggacaaagaatgccccatcactgccctccagaacatgctacaaaactgctccagggaaaatagagaaagtcaaacctcctccatcccccaccactgaaggccccagcttgcagcctgacttagcccctgaagaggctgccggaacccagcggcccaagaatctgatgcagaccctcatggaagactatgagacacacaaatctaaaaggcgcgagagaatggatgatagtagttacacttctaagttactgtcttgcaaggtgacttccgaggtcctcgaggccacacgggttaatcgaagaaagagcgcactggctttgcgctgggaagcagggatctatgccaaccaggaggaagaagacaacgaataaacttccttcaacccaggaagcgtctttggtgcttgggagaccaagaaaccaagaaattaacaactgaaagcattttaatggactatttattaaagtgcaaacaaactcagcaatccttatgtagaccagaagctgcaatatacaatgatgaaaatgaaacgaaaaggaagtccccccatcagactctggacacccaggaatcaaaagagaaaggacttttttggtgactcaatcccagtgtctggtttggggccaatctacaatggatccaaaaggacaaaacatgttacaagcaaatcaacatagttgctgcaggcggaactgagaccagcctctctgggcgatgaaggacaatggtggtagggccacttagagagcagtagggcccaggctggtgcagcctacatggcacaggatatttccctgcaccagtttcccacctgtcacttgcagcatcagagggtgttgcattaactccattttctccagcagccataaaatgaatggcgtttctctccatatttgcccagaagaggcagttatgattccacttctcctacatttaattatttttaattgagaacaactcatgatcacaattcataaaatccatattttaagacaatagttcttcatgtcacaaacacaatctattctacatgaggaggctgagaaaggggaagagaaaaacaaaccaaatggatgatgttagctttaggatcgtgtctgcttataatattcactgatctgcagtttatgagaacacattttcacagttatgtttcttcataggaaaactatatttagtgggcaacaactatttttatgatgggatgggggagtatatacacgtatagaatctgtacgcgttgaacaacttggttcaagatggtgggggcatttttagagcggcaataattgaaaaaaaaggcgaactctgccttggagaggtagatgataagaaataaaaaggtgtttataactattttgtattataaagtgggccttagagataggaagaagaatgatggattccttttggatcaatcagaaaggaaacacgaaagaaaagtcaggaaggtagagagagaaaaagggagggaaggagaaagaatgggaataaaataaggaggtaagagatactatttttgctgagcaaccagtgtgtttcaggatgatacaaagaaaaatatagaatagaaataagtgcaggcttggaatcagctacaaatcctaaagatggggtgtgtgtggatgtgtgtgtgtgtgtgtgtacaccattgtgtgtttgtaaaatgtgtatgttcatgagtaagggtgtgtgtgtgtgtgtattaaaattccagagtgaccgtggcacttgggtgtacaggtaattcctccagagctgtttgctggcttcaggagtggagtgagaatttcttttttatgaaaagggatataaaggcaccgagctgatgcagtatttgtaatattaagttgacctaacaaggtatttgcatgagtcacaattacaaagttttgagcggttttgtaatttgacatttaggagagtctcctatttattctcatactttacattcatgcttagtatactatagaggatgccagctttaatctttctgtcatttaaagcaatatgataagggtattcaataattgggtgccctaaatttctggatgagaaaattttcaattctggccatgagaaagaaaaaaaaataaacagccttctttttttttcctttgttttaaaactgtggttttttaaaaaagcaataattaactcagacctcactaaaaatcatttttgtttttatattgttatgtcataagctctattatgttattctaacaagtagcaatttcacaaaatttgtatgtagatgttaacgcacatttcctttgcttcttttattagactagtgttgactttggggggggacatttattcacaaatgagaagtaggcacaaagtaaaaaatggaaccatctactaacaaggatcctttaaaactgccaagggagctctaacttgaagccacatcctacagatggcagcccaaatagcacatgggcaattggcaccatctttatatggttgagtctcctgaatattttgaatgaattctcaacaaaatgtgctagccactggggacgcaaaacaagtaagatccctgttgcaagaaattcattttatagtgagggaggttggcatggagactaaaattctcaggaaaatgagatccgtgttagattagaagtcctgatgtgaaatgggaggactcaggaaggaggatcgtctttacctgaggatttctagccagaggtcccagatgcctgggctgagaacccagcgataagggggcgttcccaaagcagacacagggataagaacagaggaggcagcagcattgcacagccccaggcacagtggcagttaggatggctggagagtaggatagttctatgggttgcccaaaaaatgtgatgcgcttcatgttttctctgactcatggatctggtagagaccatagacatgatatagactaacttccccatttttcacaagaggaaaccatccttatgacttaccttaaagttttttgttctgttttgaaggaaaccatgtgcttcatgaaacctacagttgacaagagaatgtacagctaagagaaaagcttaagaggccacactattcgcggaatggctttagaggcagatgaagtggtctttgaccacagttgattgaaccagagcacttattgcttaaagaataacagagttctagagctgggggttcttgggccatgctccgtgtgtggataaggaaagaaatactgtttctgggactctcccacagtcacaaagctgttttcactgtggcccctacatctcttaacttttgctattactcctatgctgccttccggattactgctgtctatcttcttgctccactcactgaagatcctattataatcccatgaaaatgtaaattacagtttacttgggagagccagattttctctgtgctcttgagttttttattcattcaagaaaccttgggccaccgctttgtacatagcaccgtgctaggctctgggatcccaaatggacccttttaactttctgaagatgggaccgtcccctggaggaaagtcattcctgcctaatccatcgagagaaagaggcttacgaaaaactttgcctctgatgctcagccccacccccaaatagcacacaagcttgttaaccccacctcttacaaaatgtttagattctgtaggtgttaaaagcctttctggaagtattgcattctgccgtgtttataggtgttcactttcctccagagctgattaactactgacatgacttggctttctcatccagaaattatggaaacagggtctgtcagtggcaggaggccgtgctgtgttttacttggatgacacaatgcagtttacttgcctcttcatacccatgcatgctgctcaccctagacaatgacatataagccgtatatagatcaatgtccacatatatatacacacacacatatatatatataaagtgtaacaaggaacactaaaacagtgttgattcttgtctctgaagacaaataattaaaccttttttttcccaactaaagaatggatttaattaaactatgtattgaaaaaaaagtagcctaagtgttagagatggtgaatatattccattttagttaaagaacaaatttcctgaattttaagcattcagtgagctgccaattttgattttgtgttgctctttacccaaattattttttctttgtttttctttttttgggggaggaggggaaaaaagcagcaatactgtgtttggaaattatactctgtatctggttttcctgtgtatgttaaccacttaaatgttattatcctgctttggttttagagtgattgtgaggcattcaatgcaagtatacagttattttctcattaaaatccaatgtgtgttgagtttttataaa

SEQ ID NO: 171014 - DNA, 3312 bp, Artificial Sequence
  derived and/or modified sequence
atggccgaggccgaactccacaaggagcgattgcaggccattgcagagaaaagaaaacgccaaaccgaaattgagggcaagaggcagcagctcgatgaacagatcctcctgctacagcatagcaagtccaaggttctacgtgaaaagtggctactgcaggggatcccagcgggaactgccgaagaggaagaagcacggagacgccagagcgaggaggacgagtttcgggtgaaacagctggaggacaacatacagcggctggaacaggaaattcagacattagagtccgaagagagccagatatcggctaaggagcagatcatcctagaaaagctcaaagagaccgagaagtctttcaaggactttcagaaggggttttccagcaccgacggggatgcagttaattatatctcgagccagctgcctgatctcccaatactctgctcccgtacagcagaacctagtcccggacaggacggaacgagccgggctgctggagtaggttgggaaaatgtgcttctcaaggagggcgagagcgcatcaaacgcaaccgaaacatccggacctgacatgactattaagaagcctccccagctgagcgaggacgatatttggttgaagtctgaaggggataactacagcgcgactttattagaacccgcagcgtctagcctaagtccggaccataagaatatggagatcgaagtttcagtggccgaatgcaaaagtgtgcctggcattacctccaccccccatcccatggaccacccttccgcattttattcaccgccacacaatggactcctcacagaccaccacgagtccctagataacgatgtggcacgcgagattaggtatctcgatgaggtgctcgaggccaactgctgcgattctgcagttgacggcacatataacggcacatcatcacccgaacccggagctgtggttttggttggtggtctgagccctccagtgcacgaagcaactcagcctgagcccacggaacggacagcttcacggcaggctccccctcacatcgagttgtctaactctagtcctgatcctatggctgaagccgaaaggacgaacgggcactcaccgtcgcaaccccgagacgccctcggcgactcccttcaggttcccgtctcaccatcgtccacgaccagctcacgatgctcaagtcgggacggtgagttcactttgacgaccctaaaaaaagaggcgaagttcgaactacgggctttccacgaggacaagaaaccgagtaagttattcgaagatgacgaacacgaaaaagaacagtactgtattcgcaaggtgagacctagcgaggaaatgctagagctggagaaggagaggagagagctaatacggtcccaggccgtgaagaagaaccctggcatcgctgcgaagtggtggaaccctccgcaagagaaaaccatcgaggagcagctggacgaagagcacctggaaagccataagaaatataaagagcgaaaggaacgtcgagcgcagcaggagcagctgcttctacagaaacaactgcagcagcagcagcagcaaccaccttctcaactgtgcacagccccagccagttcccacgaaagagcctcgatgattgacaaggctaaagaggacatcgtgactgagcagattgacttcagcgcagccagaaagcagttccagctgatggagaatagtagacaggcagtagccaaaggtcagtcaacaccccgattatttagtattaaacctttttaccgtcccctgggttccgttaactccgacaagcccctgacaaatccgaggcccccaagcgtgggaggccctcctgaagactcaggagcatccgctgctaaaggacaaaagtccccaggggctctggaaactccctcagctgctggctcccagggaaacacagctagtcagggcaaagaaggtccatattctgagccttccaaacggggacctttgtccaagctgtgggcagaggacggtgaattcactagtgctagagccgtgttgaccgtcgtcaaggatgacgaccatggcatacttgaccagttcagcagatcggtgaatgtgtctctcacccaagaagagttagactcgggccttgatgagctgtctgtacgctcacaggacacgaccgtcttagaaacactgagcaatgacttctcaatggacaacatctctgactctggtgcatccaacgagacaactaacgccctccaggagaatagtctggctgacttctctctgcctcagacgccccagacggacaacccgtctgaggggagaggggaaggcgttagcaagtctttcagcgaccacggcttttactcacccagttccactctgggagactctcccctagttgatgaccctttggaataccaggctggacttctagtgcagaatgctatccaacaggctatcgccgagcaggtagataaggcggtgagtaagactagcagagacggcgctgagcaacagggacccgaggccaccgtcgaggaagctgaggccgcagcctttgggtctgaaaaacctcagtcaatgttcgaacccccacaggtgtcttcccctgtgcaggagaaacgcgacgtgctgccaaaaatacttcccgctgaagaccgcgcattgagagagaggggtccccctcaacctttaccagccgtgcagccatcggggccaattaatatggaagagaccaggcccgaggggtcatatttctcgaaatatagcgaagctgcggaactgagaagtaccgcctcattactagctacccaggaaagcgatgtgatggtgggtccatttaagctgcgatcacgaaagcaacggaccttgtccatgatcgaggaagaaatccgcgcagcacaagagcgcgaggaggaattgaagcggcagcgtcaggttcttcagagtacacagagtccccgtacaaaaaacgccccttccctgcctagccggacttgctacaagaccgctcctggaaagattgaaaaagttaaaccaccacccagtccaaccaccgagggaccttcattgcagcctgacttggctcccgaggaggccgcagggacacaaaggcccaaaaacctcatgcagaccctcatggaggactatgaaacacacaagtcaaagcgccgtgaacgtatggacgacagcagttacacctcgaaactgttgtcatgtaaggtcacatccgaggtgctcgaagccactagagtcaacagacgcaaaagcgcattggctctccgatgggaagcaggcatatacgctaaccaggaagaggaagacaacgaatag

SEQ ID NO: 171015 - DNA, 3312 bp, Artificial Sequence
  derived and/or modified sequence
atggccgaggctgagttgcacaaggaaagacttcaggctattgccgaaaaacgaaagcgtcaaacagagattgaaggaaagcgtcaacagctggacgaacaaatactgctcctgcagcatagcaagtcgaaagtgctccgagagaaatggctgctacaaggaatcccagcgggaacggcagaagaggaagaggcgcgtaggcgccaaagcgaggaggatgagttccgggtgaaacagctcgaggataatatccaacgtctggaacaagagattcagacacttgagagcgaagaatcacagattagcgccaaggaacaaattattctggaaaaattgaaggaaactgaaaaatccttcaaggactttcagaaaggtttttcgtctaccgacggcgacgctgtcaattacattagctctcaattgcctgacctgccaatcctctgctcccgcaccgctgagcccagccccggccaagacggtacatccagggctgccggcgttggttgggagaatgttctactcaaggagggtgagtcagcctcgaatgctaccgaaacttcaggccccgatatgaccattaaaaaaccacctcagctttctgaggacgatatttggcttaaatcagaaggcgataactactcagctaccctgcttgaacccgccgccagcagtctgtctcccgatcataagaacatggagattgaggtatccgtcgccgagtgtaagtccgtaccgggcattacatccacacctcatccaatggatcacccatctgctttctactctcccccccataacggtctgcttacggatcaccacgagagtcttgataatgatgtggcaagagagattcgttacctggacgaagtgctcgaggccaattgctgcgatagcgccgtggatggaacttacaatggaacaagcagtcccgaacctggggccgtcgtactggtcggcggcttgagtccaccagtgcatgaggccacacagcccgagcccacggagagaactgctagccgtcaggcccccccacatatcgagctgagcaactctagtccagatcccatggctgaggctgagcggacaaatgggcatagccctagtcaaccacgggacgcattgggagactcactacaggtccccgtttcgccctccagcaccactagtagcagatgtagttcacgtgacggcgaatttacacttaccacactgaagaaagaggctaagtttgagctacgggccttccacgaggacaagaagcccagcaagctgtttgaggatgatgagcatgagaaggaacaatactgcatccgtaaggtgagacctagtgaggagatgctggaactggaaaaggagagaagggaacttattcgctcccaagccgtgaaaaagaaccctggcatcgccgcaaaatggtggaatccaccccaggagaaaacaatcgaggagcagctggacgaagaacacctggagtcccataaaaaatataaggaaaggaaagagcgccgcgcacagcaggagcagctgttactgcagaagcagctccagcaacagcagcagcaaccaccctcccaattgtgcaccgccccagcaagttcgcatgagcgcgcttcaatgattgacaaagccaaagaggatatcgtgaccgaacagattgacttctccgccgccagaaaacagttccagttgatggagaacagtcggcaggccgtggcaaagggccaatccactcctaggctgttttcgattaagcctttctatagaccactaggctcagttaatagcgacaaacccctgacaaacccgcgaccgcccagcgttggaggcccccctgaggacagcggggcaagcgctgctaaaggacagaagtcacctggcgcactagagaccccaagcgcagcaggctctcagggaaataccgcaagtcagggaaaagaagggccttacagcgagcctagtaaaaggggtcctctgtctaaactttgggctgaggatggtgagtttacatcagctcgcgcagtactgactgtcgtcaaggacgatgaccacggcattttggaccagtttagccggagtgtaaacgtctctctgacccaagaagagttagactcaggcctggacgagctgtccgtgcgctcccaggataccaccgttttagaaaccctttccaatgatttttccatggataatatatcggattctggagcctctaatgaaacaaccaatgccctgcaggagaacagtctcgccgactttagcctgccgcagaccccccagacggataatcccagcgagggccgcggagaaggggtttcgaaatcctttagcgatcacgggttctacagcccaagctccaccctgggcgacagcccgttggttgacgaccctctcgaatatcaggctggactgctggtgcagaatgcaattcaacaggccattgccgaacaggtcgacaaggcggtcagcaaaaccagccgggatggtgccgagcagcaggggccggaggctacggtggaggaagccgaagctgctgcattcggatccgagaagccccagtcaatgttcgaacctcctcaagttagctcacctgtgcaggaaaagcgggacgttctgcctaaaatcctgcctgcagaggatcgcgccctgcgggagcggggccccccccagccgctgcccgcagtgcagccctcaggcccgataaacatggaggaaactcggcctgaaggatcatactttagcaaatactcagaggcagccgaactcagatccacagcctcgcttctggctacacaggagtccgacgtaatggtcggcccttttaaactacggagcaggaaacaacgaacactctccatgatcgaagaggaaatcagggcagctcaagagcgcgaggaagagttaaaaagacagcgccaggtacttcaatccacccagtcccctcgaaccaaaaacgcaccgagcctgccctcacggacatgttacaaaaccgcccccggtaaaattgagaaggtgaaaccaccaccctctcccactacagagggcccatccctccagccagacctcgctcccgaagaagcggctggcacccagaggcctaaaaaccttatgcaaaccttgatggaggactacgagacccacaaatccaagaggcgcgagcgtatggatgacagtagctacacgtcaaagttactctcctgcaaggtgaccagcgaggtcttggaggccactagggtgaaccggcgaaagagcgccctcgcccttcgatgggaggcaggaatttacgcgaaccaagaggaagaggacaatgagtag

SEQ ID NO: 171016 - DNA, 3312 bp, Artificial Sequence
  derived and/or modified sequence
atggccgaggccgagctgcacaaggagcggctgcaggccatcgccgagaaaagaaaaaggcagaccgagattgaggggaagaggcagcagctcgatgagcagatattgctcctccagcactcaaagtctaaggtgttgcgcgaaaaatggcttctacagggcattcccgccggaaccgccgaagaggaggaggctcgacggcgccagtccgaggaggacgaatttcgcgtgaaacagctggaggataatattcagcggctagagcaggagattcaaacactggaatcagaggaatctcaaatttctgctaaggaacaaattatacttgaaaaattgaaagaaaccgagaaatctttcaaggattttcagaaaggcttctcatccacagacggtgacgctgtgaactacataagttcccaactgcccgatcttccaattttatgttccaggacagcggaaccgagccctgggcaagatggaacgagccgtgcagcgggtgtgggctgggaaaacgtattgctaaaagagggtgagagtgcatccaatgcaaccgagactagcgggcctgatatgactataaaaaaacctcctcagctgtccgaggacgatatctggttgaagagtgaaggggataactactccgcaaccctgcttgagcccgccgcaagctccctgagtccagaccataaaaatatggaaatcgaggttagcgtcgccgaatgtaaatcagtacctgggattacaagtacaccccacccaatggaccaccccagtgcattctactcacctccacacaacgggttgttgactgaccaccacgagtctttggataacgacgtggcaagggagattagatacctggacgaggtccttgaggccaattgttgtgatagtgccgtcgacggcacttacaatgggacatcttcccccgaacccggagccgtcgtgctggtgggcggattgagcccacctgtgcatgaagccacccagccagaaccaaccgagcggacagcctctagacaagctccacctcatatagagttgtccaactcctcccccgatcccatggctgaggctgagagaaccaatgggcatagtccttctcagccacgggacgccctgggagactccttgcaagtgccagtctctccaagctctacgacatctagccgctgctccagccgcgacggagagttcactctgaccaccttaaagaaggaggccaaatttgaactacgagcttttcatgaagacaaaaagccctccaaactcttcgaggatgatgagcatgaaaaggaacaatactgtatacgcaaagtgagaccatccgaagagatgctggagctggagaaggagcgccgcgaactgatcagaagtcaagcggtgaaaaaaaatccgggcatcgccgccaagtggtggaatcccccccaggagaagaccattgaagagcaactggatgaagaacacttagaatctcacaaaaagtacaaggagcgaaaggagagacgggcccagcaagaacaattattgctgcagaagcaactacagcagcagcaacagcagcctccttcacagctgtgcaccgcccctgcttcatcccacgagcgcgcttccatgatagacaaggcaaaggaagatatcgtaactgaacagatcgatttcagtgccgctagaaagcagtttcaactaatggagaattctcgccaggctgttgctaagggccagtcgactcctcgcttattttccataaagcccttctatcgcccactgggatccgttaacagcgataagccgctgacaaaccctcggccaccttctgttggaggccccccagaggattctggcgcctccgccgctaagggtcagaagagccctggagcactggagaccccatccgccgcaggaagccagggcaatacagcgtcccagggcaaggaaggtccatattcagagccttccaagcggggaccactgtctaagttgtgggccgaagatggggagttcacctccgcccgggccgtattaactgtggtaaaggatgacgatcatgggattctggaccagttctcccgctccgtaaatgtttctttaactcaagaggagttggactcaggccttgacgagctatcagtccggagtcaggacactaccgtgctagagacgctctcgaacgattttagcatggataatatttcagatagcggggcctctaacgagactacaaacgcgctccaggaaaatagcctcgcagatttttctctcccacagactccccagactgacaatccgtcagaagggcgaggcgagggtgtgagtaaatcattttctgatcacggcttctacagtcccagctctaccctgggggattctccacttgttgatgacccgttggagtatcaagccggtctcctggtgcagaacgctatccagcaggccattgccgagcaggttgacaaggcagtgagtaaaacatcaagggacggtgctgagcagcagggccctgaggccacagtagaagaagccgaagccgcagccttcggctccgaaaaaccccagagcatgtttgagcctccacaggtatcctcccctgttcaggaaaagagagatgtgttaccaaagatactgccagccgaagatcgcgcactaagggaacgcggcccaccccagcccctgcccgcagtccagcctagcggcccgataaatatggaagagactcgtcccgaggggtcatatttttctaagtactctgaagccgccgaactccgctcaactgcaagcctattggcgacccaggagtccgacgtgatggtgggccctttcaagctccggagtcgcaaacagaggaccctgagcatgattgaagaagaaattcgggccgcccaagaaagggaggaagaactgaagcgtcaacggcaggtcctgcagagtacccagtctcccagaacgaaaaacgctccaagcctcccaagccgcacctgctacaagacggcacccggcaaaatagagaaggtaaagccccctccttcccctaccactgagggacctagcctccagcccgatttagcccctgaagaagccgccgggactcaacgaccaaaaaatttaatgcagactctcatggaagactacgaaacccacaaaagcaaacggcgcgaaaggatggacgattctagctatactagcaaactcctgtcttgcaaggtaacctccgaagtcctggaagcaaccagagttaaccgccgcaaatccgcactggccctgagatgggaggccggcatctacgcaaaccaggaggaagaagataatgaatag

SEQ ID NO: 171017 - DNA, 3312 bp, Artificial Sequence
  derived and/or modified sequence
atggcggaagccgagctacataaggagcggctccaagccattgccgagaagaggaagaggcagaccgagatcgagggaaaacgtcaacaattggatgagcagattctgcttcttcagcactcaaagtccaaagtacttcgcgagaaatggcttttgcagggcatcccggctgggaccgccgaagaagaagaagcgagacgtagacagagcgaggaggacgagtttagagtgaagcagctggaagacaacattcagcgacttgagcaggagatacagactctcgagtccgaagaatctcagatcagcgccaaggagcagattatactcgagaaactgaaggagactgagaagtccttcaaagactttcagaagggattctctagtaccgacggtgatgccgttaattacatctcctcccagttaccagatctccccattttatgtagccgaaccgccgagccaagccctggacaggatggtacctccagggctgccggagtggggtgggagaacgtgctgctcaaggagggtgagagcgcgtccaacgccactgaaacatctggcccagacatgacaattaagaagccaccccagctgagcgaggacgacatttggttgaagagcgaaggcgataattattcagccacactgttggagcctgccgctagctcactgtcacccgaccacaagaatatggagatagaagtttcggttgcggaatgtaagagcgtgcctgggattacgagcacaccccaccccatggatcaccctagcgccttttactcacctccccacaatgggctcctcaccgaccatcacgaaagtctggacaatgacgttgcacgggagatccgctatctggatgaagtgttagaagccaattgctgtgactctgccgttgacggcacatacaatggcacttccagccccgaacccggagctgtcgtactggttggcggtctgtcccctccagtgcacgaggccacccagcccgaacccaccgagcgcacagcatcgcgccaggccccaccccatatcgaactcagtaactcaagtccggaccccatggcagaggctgagaggacaaatgggcatagccccagtcagcctcgggatgcactgggtgatagtctgcaggtgcccgtttcgccctcttccactacatcatccagatgttcatctcgggatggtgagttcaccttaaccacactgaagaaggaggccaagtttgaactgcgggcttttcacgaggataagaagccctcaaagctcttcgaggacgatgaacacgaaaaggagcaatattgcattagaaaggtgcgtccatctgaagagatgcttgagctggagaaagagcgacgcgaacttattagatctcaggctgtgaaaaagaatcccggaatagccgctaagtggtggaaccccccacaggagaagacaatagaagagcaactggatgaagaacacctggagagccataaaaaatacaaggagcgcaaagagagaagggcacagcaagaacagctcttgttgcagaagcagctgcagcagcagcagcagcaaccgccatctcagctgtgcacagctccagcctcttcgcacgagcgtgcctccatgatcgataaggcaaaggaggatattgtgactgaacagatcgacttcagcgccgctcggaagcagttccagctcatggagaattctcgtcaggcggtggcaaagggccaatccacaccgaggctgtttagtattaaaccgttttaccggcctctcggatctgtgaattccgataagccactgaccaacccaaggcctccaagcgtgggcggaccgccagaggacagcggtgcatctgccgcaaaggggcagaaatctcctggagccctggaaacaccttctgctgctgggtcccagggcaacacagcctcacaggggaaggagggaccatactctgagccctccaagagaggccctctgagtaaactatgggctgaagatggggagtttacctccgctcgggctgttctgactgtggtgaaggatgacgaccacgggatcttagaccagttttccagatctgtgaatgtgtcactgacccaggaggagctggacagtggcctggatgaattgagcgtgagaagccaggatacaactgtgctggagaccctctcaaacgacttcagcatggataacatcagcgactcaggtgctagtaacgagacgacaaatgccttgcaagagaactctctcgccgacttcagcctgcctcagacgccacagaccgacaacccttccgaaggcaggggtgagggggtttccaagtcatttagcgatcacggcttctactctccgtcttccacgctgggggatagtcccttagtggacgatcccttggagtaccaggcagggcttctggtccaaaacgcaatccagcaggcaatagctgagcaagtcgacaaagccgtgagcaagactagccgggacggagccgagcagcaagggccagaagccacagtggaagaagcagaggcagctgccttcggcagtgagaagccacaaagtatgtttgaaccaccccaggtgagttcccccgtgcaggaaaagagggatgtcctccctaaaattttgcctgcagaagacagggccctgcgggaacgaggtccaccacaacccttacctgcggtgcagccctctggcccaattaacatggaggagacaaggcctgagggcagttatttcagcaaatattcggaggcagccgagctgcggtccaccgcttcattactcgccacccaggaatccgacgtgatggtgggaccattcaaactgcgtagcagaaagcaacggacattgagtatgattgaggaggaaatcagggctgcccaggaaagggaagaagaactcaaacgccagcgccaggtgctgcagagtacacagtctcctagaacaaaaaatgctccaagtttgccgagccgaacatgttataaaacggccccaggaaagatcgagaaggtgaagccacctcctagcccaactacggaagggccatccctccagcccgatctagcccctgaggaagccgctgggacacaaagaccaaagaacctcatgcagacgctcatggaggattacgagacccataaaagcaaacggcgagagcggatggatgacagctcctatacctccaaactcctgagctgtaaggtgacatccgaagttttggaggctacccgcgtgaaccgacgtaagtcagcgctcgctctccgctgggaggcagggatttacgccaatcaggaggaggaggacaatgagtag

SEQ ID NO: 171018 - DNA, 3312 bp, Artificial Sequence
  derived and/or modified sequence
atggcagaggcggaattgcacaaggaaaggctgcaagccatagcagaaaaaagaaagaggcagactgaaatagaaggcaagcgacaacagcttgacgagcagatacttctgctgcagcattccaagtccaaagtgcttcgggagaaatggctgctgcagggcatacccgctggaactgccgaagaggaggaagccaggaggcggcagtctgaagaggatgagttcagagtcaagcaacttgaagataacattcagaggctggagcaagaaatacaaacgctagaaagtgaagagtcccagatatctgccaaagagcaaatcatcctagagaaactgaaggaaacagaaaaatccttcaaggactttcagaagggtttctccagtacggatggagatgcagtaaattacatttcctcccagcttcccgacctgccaatcctctgttcacgaacagcagaaccatcacctgggcaggacgggaccagcagagcggctggagtcgggtgggagaatgtgctgctaaaggaaggtgagtcagcctcgaacgccacagaaacatccggcccagacatgactatcaagaagcctccccagctttctgaggatgatatctggctaaaaagcgagggagacaactatagtgccaccctcctggagcctgctgccagctctctttccccagatcacaaaaacatggaaattgaggtgtctgttgcagaatgtaaaagtgttcctggaatcacctctaccccacatcccatggaccatccctccgctttctattcacccccgcataatggcctccttactgatcaccacgaatccctggataatgatgttgccagagagatccgctatctagatgaggtgctagaggccaactgctgtgattctgctgtggatggaacgtacaatggaacatcctccccagagcctggtgcagtggttctggtgggcggcctaagcccccctgtccacgaggcgacccagccagaacccactgaaagaacagctagccggcaggcacctcctcacatcgagctcagtaatagcagccctgaccccatggcagaggcagaaagaacaaatggccattcccccagccagcctagagatgcgctgggggacagcctgcaggtgcctgtcagccccagctccacaaccagctcacggtgttcttcccgagatggagagttcactctcaccacactgaaaaaggaggccaagtttgagctgcgtgccttccatgaggacaagaagccctccaagctctttgaggatgacgagcatgagaaagaacaatactgcattagaaaagtgaggccttcagaggagatgctggagctggaaaaggagaggagagagctcatccgcagccaggccgtcaagaagaatcctggcattgcagcaaaatggtggaatcccccgcaggaaaaaaccatcgaggagcagctggacgaggaacatctggagtcgcacaaaaagtacaaggagcgcaaagagagaagggcacagcaggaacagttgctgctgcagaagcagttacagcagcagcagcagcagcccccatcgcagctctgcacagcccctgcctcttctcatgaacgcgcaagcatgattgacaaagcaaaggaggacattgtcacagagcagatagatttctctgctgctcgcaaacaatttcagctgatggagaattccaggcaagcggtggccaagggccagagtacacccaggctgttctccatcaagcctttctacaggcctctggggtcagtcaactcagacaagccactgactaatccgagaccaccttctgtcgggggacctccagaagacagtggtgcctcagccgccaagggacagaaatcccccggtgccctggagaccccatcggcagcaggaagccagggcaacacagcctctcaggggaaggaagggccctacagcgagccttctaaacgtgggcccttatctaaactgtgggctgaggatggagaatttacgagcgcccgggctgtcctcactgtggtcaaggatgatgaccatgggattttggatcagttctcaagatctgtcaatgtctccttgacccaagaggagcttgactctggtctggacgaattgtcggtgaggtctcaggataccacagtcctggagaccctatccaatgatttcagcatggacaacatcagtgacagcggggcatccaatgagacaaccaatgccctccaggaaaattcactggctgatttttctctgccccagacaccacaaactgacaacccctcagagggccgaggagaaggcgtctccaagtcatttagtgatcatggtttctattccccttcctccacgctgggggactctccgttggttgatgaccccttggagtatcaggctggcctcctggtgcagaatgccattcaacaagccatagccgagcaggtggataaagctgtgtccaaaaccagcagggatggagcagagcaacagggacctgaagcgactgtagaggaagctgaagctgcggctttcggctcagaaaagcctcagagcatgtttgagccacctcaggtgtcttctcctgttcaagagaaaagggatgtattaccaaagattctgcctgctgaagacagggcgctcagggaaagggggcccccccagccactgccagctgtgcagcccagtggcccgattaacatggaggagaccaggcccgaaggaagctatttcagcaagtactcggaggcagctgagctgagaagcacagcctccctcctggccactcaagaatctgacgtgatggttgggcctttcaagctgaggtccaggaaacagcggactttgtccatgattgaggaagagatccgagcagctcaggaaagggaagaggagctgaagaggcagagacaagtcttgcagagtacgcagagccccaggacaaagaatgccccatcactgccctccagaacatgctacaaaactgctccagggaaaatagagaaagtcaaacctcctccatcccccaccactgaaggccccagcttgcagcctgacttagcccctgaagaggctgccggaacccagcggcccaagaatctgatgcagaccctcatggaagactatgagacacacaaatctaaaaggcgcgagagaatggatgatagtagttacacttctaagttactgtcttgcaaggtgacttccgaggtcctcgaggccacacgggttaatcgaagaaagagcgcactggctttgcgctgggaagcagggatctatgccaaccaggaggaagaagacaacgaataa

SEQ ID NO: 171019 - protein, 140 aa, Artificial Sequence
  derived and/or modified sequence
MQRLNIGYVINVTTHLPLYHYEKGLFNYKRLPATDSNKQNLRQYFEEAFEFIEEAHQCGKGLLIHCQAGVSRSATIVIAYLMKHTRMTMTDAYKFVKGKRPIISPNLNFMGQLLEFEEDLNNGVTPRILTPKLMGVETVV

SEQ ID NO: 171020 - protein, 482 aa, Artificial Sequence
  derived and/or modified sequence
MPPSPLDDRVVVALSRPVRPQDLNLCLDSSYLGSANPGSNSHPPVIATTVVSLKAANLTYMPSSSGSARSLNCGCSSASCCTVATYDKDNQAQTQAIAAGTTTTAIGTSTTCPANQMVNNNENTGSLSPSSGVGSPVSGTPKQLASIKIIYPNDLAKKMTKCSKSHLPSQGPVIIDCRPFMEYNKSHIQGAVHINCADKISRRRLQQGKITVLDLISCREGKDSFKRIFSKEIIVYDENTNEPSRVMPSQPLHIVLESLKREGKEPLVLKGGLSSFKQNHENLCDNSLQLQECREVGGGASAASSLLPQPIPTTPDIENAELTPILPFLFLGNEQDAQDLDTMQRLNIGYVINVTTHLPLYHYEKGLFNYKRLPATDSNKQNLRQYFEEAFEFIEEAHQCGKGLLIHCQAGVSRSATIVIAYLMKHTRMTMTDAYKFVKGKRPIISPNLNFMGQLLEFEEDLNNGVTPRILTPKLMGVETVV

SEQ ID NO: 171021 - protein, 427 aa, Artificial Sequence
  derived and/or modified sequence
MPPSPLDDRVVVALSRPVRPQDLNLCLDSSYLGSANPGSNSHPPVITTTAIGTSTTCPANQMVNNNENTGSLSPSSGVGSPVSGTPKQLASIKIIYPNDLAKKMTKCSKSHLPSQGPVIIDCRPFMEYNKSHIQGAVHINCADKISRRRLQQGKITVLDLISCREGKDSFKRIFSKEIIVYDENTNEPSRVMPSQPLHIVLESLKREGKEPLVLKGGLSSFKQNHENLCDNSLQLQECREVGGGASAASSLLPQPIPTTPDIENAELTPILPFLFLGNEQDAQDLDTMQRLNIGYVINVTTHLPLYHYEKGLFNYKRLPATDSNKQNLRQYFEEAFEFIEEAHQCGKGLLIHCQAGVSRSATIVIAYLMKHTRMTMTDAYKFVKGKRPIISPNLNFMGQLLEFEEDLNNGVTPRILTPKLMGVETVV

SEQ ID NO: 171022 - DNA, 1449 bp, Artificial Sequence
  derived and/or modified sequence
atgccccccagccccctggacgacagagtggtggtggccctgagcagacccgtgagaccccaggacctgaacctgtgcctggacagcagctacctgggcagcgccaaccccggcagcaacagccacccccccgtgatcgccaccaccgtggtgagcctgaaggccgccaacctgacctacatgcccagcagcagcggcagcgccagaagcctgaactgcggctgcagcagcgccagctgctgcaccgtggccacctacgacaaggacaaccaggcccagacccaggccatcgccgccggcaccaccaccaccgccatcggcaccagcaccacctgccccgccaaccagatggtgaacaacaacgagaacaccggcagcctgagccccagcagcggcgtgggcagccccgtgagcggcacccccaagcagctggccagcatcaagatcatctaccccaacgacctggccaagaagatgaccaagtgcagcaagagccacctgcccagccagggccccgtgatcatcgactgcagacccttcatggagtacaacaagagccacatccagggcgccgtgcacatcaactgcgccgacaagatcagcagaagaagactgcagcagggcaagatcaccgtgctggacctgatcagctgcagagagggcaaggacagcttcaagagaatcttcagcaaggagatcatcgtgtacgacgagaacaccaacgagcccagcagagtgatgcccagccagcccctgcacatcgtgctggagagcctgaagagagagggcaaggagcccctggtgctgaagggcggcctgagcagcttcaagcagaaccacgagaacctgtgcgacaacagcctgcagctgcaggagtgcagagaggtgggcggcggcgccagcgccgccagcagcctgctgccccagcccatccccaccacccccgacatcgagaacgccgagctgacccccatcctgcccttcctgttcctgggcaacgagcaggacgcccaggacctggacaccatgcagagactgaacatcggctacgtgatcaacgtgaccacccacctgcccctgtaccactacgagaagggcctgttcaactacaagagactgcccgccaccgacagcaacaagcagaacctgagacagtacttcgaggaggccttcgagttcatcgaggaggcccaccagtgcggcaagggcctgctgatccactgccaggccggcgtgagcagaagcgccaccatcgtgatcgcctacctgatgaagcacaccagaatgaccatgaccgacgcctacaagttcgtgaagggcaagagacccatcatcagccccaacctgaacttcatgggccagctgctggagttcgaggaggacctgaacaacggcgtgacccccagaatcctgacccccaagctgatgggcgtggagaccgtggtgtag

SEQ ID NO: 171023 - DNA, 1284 bp, Artificial Sequence
  derived and/or modified sequence
atgccccccagccccctggacgacagagtggtggtggccctgagcagacccgtgagaccccaggacctgaacctgtgcctggacagcagctacctgggcagcgccaaccccggcagcaacagccacccccccgtgatcaccaccaccgccatcggcaccagcaccacctgccccgccaaccagatggtgaacaacaacgagaacaccggcagcctgagccccagcagcggcgtgggcagccccgtgagcggcacccccaagcagctggccagcatcaagatcatctaccccaacgacctggccaagaagatgaccaagtgcagcaagagccacctgcccagccagggccccgtgatcatcgactgcagacccttcatggagtacaacaagagccacatccagggcgccgtgcacatcaactgcgccgacaagatcagcagaagaagactgcagcagggcaagatcaccgtgctggacctgatcagctgcagagagggcaaggacagcttcaagagaatcttcagcaaggagatcatcgtgtacgacgagaacaccaacgagcccagcagagtgatgcccagccagcccctgcacatcgtgctggagagcctgaagagagagggcaaggagcccctggtgctgaagggcggcctgagcagcttcaagcagaaccacgagaacctgtgcgacaacagcctgcagctgcaggagtgcagagaggtgggcggcggcgccagcgccgccagcagcctgctgccccagcccatccccaccacccccgacatcgagaacgccgagctgacccccatcctgcccttcctgttcctgggcaacgagcaggacgcccaggacctggacaccatgcagagactgaacatcggctacgtgatcaacgtgaccacccacctgcccctgtaccactacgagaagggcctgttcaactacaagagactgcccgccaccgacagcaacaagcagaacctgagacagtacttcgaggaggccttcgagttcatcgaggaggcccaccagtgcggcaagggcctgctgatccactgccaggccggcgtgagcagaagcgccaccatcgtgatcgcctacctgatgaagcacaccagaatgaccatgaccgacgcctacaagttcgtgaagggcaagagacccatcatcagccccaacctgaacttcatgggccagctgctggagttcgaggaggacctgaacaacggcgtgacccccagaatcctgacccccaagctgatgggcgtggagaccgtggtgtag

SEQ ID NO: 171024 - DNA, 2676 bp, Artificial Sequence
  derived and/or modified sequence
ggattcttattggcccaacccgccgtcggtcggcggcgagtccgccccctcagaaccttacatttacagtgtagcaaaagagaaagtaactatgttgctgctggagatcaatgaagccgagtgaatgggggctgaatgtgcgagtccatagctgaagaggagcgccagatggtggaggaatacacttatttatgaaactgtcttgagttcttcttgaattgccagttttcagcctcctcatgcctccgtctcctttagacgacagggtagtagtggcactatctaggcccgtccgacctcaggatctcaacctttgtttagactctagttaccttggctctgccaacccaggcagtaacagccaccctcctgtcatcgccaccaccgttgtgtccctcaaggctgcgaatctgacgtatatgccctcatccagcggctctgcccgctcgctgaattgtggatgcagcagtgccagctgctgcactgtggcaacctacgacaaggacaatcaggcccaaacccaagccattgccgctggcaccaccaccactgccatcggaacctctaccacctgccctgctaaccagatggtcaacaataatgagaatacaggctctctaagtccatcaagtggggtgggcagccctgtgtcagggacccccaagcagctagccagcatcaaaataatctaccccaatgacttggcaaagaagatgaccaaatgcagcaagagtcacctgccgagtcagggccctgtcatcattgactgcaggcccttcatggagtacaacaagagtcacatccaaggagctgtccacattaactgtgccgataagatcagccggcggagactgcagcagggcaagatcactgtcctagacttgatttcctgtagggaaggcaaggactctttcaagaggatcttttccaaagaaattatagtttatgatgagaataccaatgaaccaagccgagtgatgccctcccagccacttcacatagtcctcgagtccctgaagagagaaggcaaagaacctctggtgttgaaaggtggacttagtagttttaagcagaaccatgaaaacctctgtgacaactccctccagctccaagagtgccgggaggtggggggcggcgcatccgcggcctcgagcttgctacctcagcccatccccaccacccctgacatcgagaacgctgagctcacccccatcttgcccttcctgttccttggcaatgagcaggatgctcaggacctggacaccatgcagcggctgaacatcggctacgtcatcaacgtcaccactcatcttcccctctaccactatgagaaaggcctgttcaactacaagcggctgccagccactgacagcaacaagcagaacctgcggcagtactttgaagaggcttttgagttcattgaggaagctcaccagtgtgggaaggggcttctcatccactgccaggctggggtgtcccgctccgccaccatcgtcatcgcttacttgatgaagcacactcggatgaccatgactgatgcttataaatttgtcaaaggcaaacgaccaattatctccccaaaccttaacttcatggggcagttgctagagttcgaggaagacctaaacaacggtgtgacaccgagaatccttacaccaaagctgatgggcgtggagacggttgtgtgacaatggtctggatggaaaggattgctgctctccattaggagacaatgaggaaggaggatggattctggttttttttctttctttttttttttgtagttgggagtaagtttgtgaatggaaacaaacttgtttaaacactttatttttaacaagtgtaagaagactataacttttgatgccattgagattcacctcccacaaactgacaaattaaggaggttaaagaagtaatttttttaagccaacaataaaaatataatacaacttgtttctcccccttttccttttaagctatttgtagagtttatgactaaatagtctgtgcaggttcatagaccgaagatactacacactttaaaccaattaaaaagaaccaaaagtaaatagaaaagacattgaatcaccaaggcctgggatcaacctgggctgtccacacagaaaacaaaaacccaaccaaaccaagccctgttgtgctcactggtgcaaagagaagatcagggcagcttaagtggtctaagaatccttcaggcattctttaaggagaaaaaggatacctttgattttgtgtgtttcatgctctggattttttttttttttccttctctgggtttaagagattttttttgaaatagtgaggaactgaccattatatgccttcactggcttcttgtgcaataatatgatgttttaagtgtgcaaacaagttagagctggcagctgaatgatagacaaatagtgcaaatttgccagcttggagatagaaaggaattcaacaatatatcaaatactttccttcccacctttttccttttttttttttttttctgatttgattctggttacagtgccataaaccttgttacatatgtatatcagaatgtaagaaaaaaaaatttatttaaaaatatttttcgcaaaaaaaaaaaaaatcttggtgtgtttctgttgattgtgtaaaaatttattttcattatataaatgaaactgg

SEQ ID NO: 171025 - DNA, 2272 bp, Artificial Sequence
  derived and/or modified sequence
atgcctccgtctcctttagacgacagggtagtagtggcactatctaggcccgtccgacctcaggatctcaacctttgtttagactctagttaccttggctctgccaacccaggcagtaacagccaccctcctgtcatcaccaccactgccatcggaacctctaccacctgccctgctaaccagatggtcaacaataatgagaatacaggctctctaagtccatcaagtggggtgggcagccctgtgtcagggacccccaagcagctagccagcatcaaaataatctaccccaatgacttggcaaagaagatgaccaaatgcagcaagagtcacctgccgagtcagggccctgtcatcattgactgcaggcccttcatggagtacaacaagagtcacatccaaggagctgtccacattaactgtgccgataagatcagccggcggagactgcagcagggcaagatcactgtcctagacttgatttcctgtagggaaggcaaggactctttcaagaggatcttttccaaagaaattatagtttatgatgagaataccaatgaaccaagccgagtgatgccctcccagccacttcacatagtcctcgagtccctgaagagagaaggcaaagaacctctggtgttgaaaggtggacttagtagttttaagcagaaccatgaaaacctctgtgacaactccctccagctccaagagtgccgggaggtggggggcggcgcatccgcggcctcgagcttgctacctcagcccatccccaccacccctgacatcgagaacgctgagctcacccccatcttgcccttcctgttccttggcaatgagcaggatgctcaggacctggacaccatgcagcggctgaacatcggctacgtcatcaacgtcaccactcatcttcccctctaccactatgagaaaggcctgttcaactacaagcggctgccagccactgacagcaacaagcagaacctgcggcagtactttgaagaggcttttgagttcattgaggaagctcaccagtgtgggaaggggcttctcatccactgccaggctggggtgtcccgctccgccaccatcgtcatcgcttacttgatgaagcacactcggatgaccatgactgatgcttataaatttgtcaaaggcaaacgaccaattatctccccaaaccttaacttcatggggcagttgctagagttcgaggaagacctaaacaacggtgtgacaccgagaatccttacaccaaagctgatgggcgtggagacggttgtgtgacaatggtctggatggaaaggattgctgctctccattaggagacaatgaggaaggaggatggattctggttttttttctttctttttttttttgtagttgggagtaagtttgtgaatggaaacaaacttgtttaaacactttatttttaacaagtgtaagaagactataacttttgatgccattgagattcacctcccacaaactgacaaattaaggaggttaaagaagtaatttttttaagccaacaataaaaatataatacaacttgtttctcccccttttccttttaagctatttgtagagtttatgactaaatagtctgtgcaggttcatagaccgaagatactacacactttaaaccaattaaaaagaaccaaaagtaaatagaaaagacattgaatcaccaaggcctgggatcaacctgggctgtccacacagaaaacaaaaacccaaccaaaccaagccctgttgtgctcactggtgcaaagagaagatcagggcagcttaagtggtctaagaatccttcaggcattctttaaggagaaaaaggatacctttgattttgtgtgtttcatgctctggattttttttttttttccttctctgggtttaagagattttttttgaaatagtgaggaactgaccattatatgccttcactggcttcttgtgcaataatatgatgttttaagtgtgcaaacaagttagagctggcagctgaatgatagacaaatagtgcaaatttgccagcttggagatagaaaggaattcaacaatatatcaaatactttccttcccacctttttccttttttttttttttttctgatttgattctggttacagtgccataaaccttgttacatatgtatatcagaatgtaagaaaaaaaaatttatttaaaaatatttttcgcaaaaaaaaaaaaaatcttggtgtgtttctgttgattgtgtaaaaatttattttcattatataaatgaaactgg

SEQ ID NO: 171026 - DNA, 1449 bp, Artificial Sequence
  derived and/or modified sequence
atgcctcctagccctctggatgatcgcgtggtcgttgcattgtcaagacctgtgaggcctcaggacctaaacctttgtttggattcttcctatttaggctctgcaaacccaggatcaaattctcaccccccagtaatagccaccaccgtggtcagcttgaaagcggccaacctcacatacatgccaagcagcagtgggtcggcacggagcctgaattgcgggtgttcttctgccagttgttgtaccgtggccacgtatgataaggacaatcaggcccagactcaggccattgctgccggaaccactactaccgctattgggacctccacaacttgtccggctaaccagatggtgaacaacaatgaaaacactgggagcctgtctccttccagtggggtaggtagccccgtctctggcactccaaagcagctggccagtattaagataatttatccgaacgatctggccaaaaagatgaccaagtgctctaagtcccacctgccctcgcaaggtcccgttatcatcgattgtcgaccctttatggaatataataaaagccacattcaaggagcagtgcacattaactgcgccgataaaatctcgcgcaggcggttgcaacagggaaaaatcactgtactggatctgatctcctgccgagaagggaaagattcattcaaacgcatcttcagcaaagagattatagtatacgatgagaacaccaatgaacccagtcgcgtgatgcccagccagccccttcacatagtgctggagtcattgaagcgcgagggaaaggaaccgttagtcctcaaggggggattgtcatcatttaaacagaaccacgaaaatctgtgcgataatagcctgcagctgcaggaatgccgcgaggtaggcggcggcgccagcgctgcgagctcattgctccctcagcccatccccacaacacccgacattgaaaacgccgagctcacaccaattttgccttttctgtttcttggaaacgaacaggacgctcaggaccttgacacgatgcagcggctaaacatcggctatgtgatcaatgtgacaacacacctgcccctttatcactacgaaaaaggcctgtttaattataagcgactcccagcgaccgactccaacaaacagaatctgcggcagtatttcgaggaggccttcgaatttattgaggaggcccaccagtgcggaaagggcctgttgatacactgtcaagccggggtttctcgaagtgccaccattgtgatagcctatctgatgaagcatacgcgcatgaccatgacagatgcatataaatttgtaaaaggaaagcggcccatcatcagccccaacttgaattttatggggcagcttctggaattcgaagaggacttgaacaacggagtcacacccaggatccttactcctaagcttatgggcgtcgagaccgtggtctag

SEQ ID NO: 171027 - DNA, 1284 bp, Artificial Sequence
  derived and/or modified sequence
atgccgccctctccgctggacgacagggtggtagtggcgctatctcgcccggtgaggcctcaggaccttaatctctgtttagactcctcctatcttggaagcgccaatcccggaagcaatagtcaccctccagtgataactaccacagcgattgggacatcaacgacatgcccagccaatcagatggtcaacaacaatgaaaataccggaagcctgagcccctctagcggcgtaggcagccctgtgtctggaactccaaaacagctggcgtcaattaaaattatataccctaatgacctcgccaagaagatgactaaatgtagtaagagccacctgccctcacaggggccggtgatcatcgattgtcgaccatttatggagtacaacaagtcccatatccagggagccgtgcatattaattgcgccgacaagatatcaaggaggcggctgcaacagggcaagataaccgtccttgacttgattagttgccgagagggcaaggattcatttaagagaatcttcagcaaggagataattgtttacgacgagaatactaacgagccgagccgggttatgccatcgcagccactgcacattgttctggaatcactaaaacgggaaggaaaggagcccttagtgcttaaaggcgggctttcctctttcaagcaaaaccacgagaatctgtgtgacaatagcctgcagctccaggaatgcagagaggtgggaggcggagcaagtgccgcatccagccttctgcctcaacccatccccactacgccagatatcgaaaatgcggagctcactccgattttgcccttcctatttttagggaacgaacaagacgcccaggatttggacactatgcagcggctcaacataggctacgtgattaacgtcacgacgcatcttcccctttaccactacgaaaagggattgtttaactataaaaggctgcccgccaccgacagcaataaacaaaatctaagacagtactttgaggaagcattcgaattcatcgaagaagcccatcagtgcggaaagggcctgctaatccactgtcaggcgggcgtgtcacgcagcgctacaattgtaatcgcttacctcatgaaacatacacgcatgaccatgactgacgcatataagttcgtgaagggcaaacgccccatcattagccctaacctgaattttatggggcagcttttggagttcgaagaagatctgaacaacggagtgacacccaggatcctgactcctaaattgatgggagtagaaactgtggtgtag

SEQ ID NO: 171028 - DNA, 1449 bp, Artificial Sequence
  derived and/or modified sequence
atgccacccagccccctggatgacagagtggtggtggccctgagcaggcctgtgcggccccaggacctgaacctgtgcctggacagcagctacctgggcagcgccaaccctggcagcaacagccacccccctgtgattgccaccaccgtggtgtccctgaaggccgccaacctgacctacatgcccagcagcagcggcagcgcccggagcctgaactgtggctgcagcagcgccagctgctgcaccgtggccacctatgacaaggacaaccaggcccagacccaggccatcgctgctggcaccaccaccacagccatcggcaccagcaccacctgcccagccaaccagatggtgaacaacaatgaaaatacaggcagcctgagccccagcagtggagtgggcagccctgtgtctggcacccccaagcagctggccagcatcaagatcatctacccaaatgacctggccaagaagatgaccaagtgcagcaagagccacctgcccagccagggccctgtgatcatcgactgccggcccttcatggagtacaacaagagccacatccagggcgctgtgcacatcaactgtgccgacaagatcagcagaagaaggctgcagcagggcaagatcaccgtgctggacctgatcagctgccgggagggcaaggacagcttcaagaggatcttcagcaaggagatcatcgtgtatgatgagaacaccaatgagcccagccgggtgatgcccagccagcccctgcacatcgtgctggagagcctgaagcgggagggcaaggagcccctggtgctgaagggcggcctgagcagcttcaagcagaaccacgagaacctgtgtgacaacagcctgcagctgcaggagtgccgggaggtgggcggcggggccagcgctgccagcagcctgctgccccagcccatccccaccaccccagacattgaaaatgctgagctgacccccatcctgcccttcctgttcctgggcaatgagcaggatgcccaggacctggacaccatgcagaggctgaacatcggctacgtgatcaacgtgaccacccacctgcccctgtaccactatgagaagggcctcttcaactacaagaggctgcctgccacagacagcaacaagcagaacctgcggcagtactttgaggaggcctttgagttcatcgaggaggcccaccagtgtgggaagggcctgctgatccactgccaggccggcgtgagccgcagcgccaccatcgtcatcgcctacctgatgaagcacaccaggatgaccatgacagatgcctacaagtttgtgaagggcaagaggcccatcatcagccccaacctgaacttcatgggccagctgctggagtttgaggaggacctgaacaacggggtgaccccccgcatcctgacccccaagctgatgggcgtggagaccgtggtgtag

SEQ ID NO: 171029 - DNA, 1284 bp, Artificial Sequence
  derived and/or modified sequence
atgccacccagccccctggatgacagagtggtggtggccctgagcaggcctgtgcggccccaggacctgaacctgtgcctggacagcagctacctgggcagcgccaaccctggcagcaacagccacccccctgtgatcaccaccacagccatcggcaccagcaccacctgcccagccaaccagatggtgaacaacaatgaaaatacaggcagcctgagccccagcagcggcgtgggcagccctgtgtctggcacccccaagcagctggccagcatcaagatcatctacccaaatgacctggccaagaagatgaccaagtgcagcaagagccacctgcccagccagggccctgtgatcatcgactgccggcccttcatggagtacaacaagagccacatccagggcgctgtgcacatcaactgtgccgacaagatcagcagaagaaggctgcagcagggcaagatcaccgtgctggacctgatcagctgccgggagggcaaggacagcttcaagaggatcttcagcaaggagatcatcgtgtatgatgagaacaccaatgagcccagccgggtgatgcccagccagcccctgcacatcgtgctggagagcctgaagcgggagggcaaggagcccctggtgctgaagggcggcctgagcagcttcaagcagaaccacgagaacctgtgtgacaacagcctgcagctgcaggagtgccgggaggtgggcggcggggccagcgctgccagcagcctgctgccccagcccatccccaccaccccagacattgaaaatgctgagctgacccccatcctgcccttcctgttcctgggcaatgagcaggatgcccaggacctggacaccatgcagaggctgaacatcggctacgtgatcaacgtgaccacccacctgcccctgtaccactatgagaagggcctcttcaactacaagaggctgcctgccacagacagcaacaagcagaacctgcggcagtactttgaggaggcctttgagttcatcgaggaggcccaccagtgtgggaagggcctgctgatccactgccaggccggcgtgagccgcagcgccaccatcgtgattgcctacctgatgaagcacaccaggatgaccatgacagatgcctacaagtttgtgaagggcaagaggcccatcatcagccccaacctgaacttcatgggccagctgctggagtttgaggaggacctgaacaatggagtgaccccccgcatcctgacccccaagctgatgggcgtggagaccgtggtgtag

SEQ ID NO: 171030 - DNA, 1449 bp, Artificial Sequence
  derived and/or modified sequence
atgccccccagccccctggacgaccgggtggtggtggccctgagccggccagtgcgcccccaggatctgaatctatgcttggacagctcctatttgggttctgctaatccggggagcaattcccacccgccagtgatcgcaactactgtggtgagcctgaaggcggcaaatttaacctacatgccgagttcctccggcagcgcccgctcccttaactgtgggtgttcttcagcctcctgctgtactgtggccacctacgataaagataaccaagcacagacccaggccatcgctgctggtaccacaaccaccgccatcggaacatcaacgacatgtcccgccaatcagatggtgaataataacgaaaacacgggatcattgagcccttccagtggcgtgggcagccccgtctcgggaacacccaaacaacttgcaagcattaaaataatttatcccaacgacttagcaaaaaagatgacaaagtgtagtaagtcccacctgccatcacaagggcctgtgattatcgattgccgaccctttatggagtacaataaatctcacattcagggagccgttcatatcaactgcgctgacaagatctctcgcaggcgcctccagcaaggtaagataacagttcttgatttgatcagttgcagagaggggaaggattcttttaagcggattttcagcaaagaaattatcgtgtacgacgagaacactaacgagcccagcagggtgatgccgagtcagccgctgcacatcgtgctggagtcccttaaacgagagggcaaagaacccctcgtgcttaaaggcggcttgtcatcatttaagcagaatcacgagaacttgtgcgataactctctgcagctccaggagtgtcgagaagttggcggtggtgccagcgccgcttcaagtttgctgccacagcccatccctacaacgccggacatcgagaacgctgaacttacaccgattctgccattcctgtttttagggaacgaacaggacgcgcaggatcttgatactatgcaacggttaaacatcggctacgtgattaacgtgactacacacctgcctttgtatcattatgagaagggcctgttcaactataagcgactgcccgcaacagattcaaacaaacaaaacctgcggcaatatttcgaggaagcttttgaatttattgaagaagcccaccaatgcggtaaaggacttctgatccactgtcaggctggtgtcagtagatctgctaccattgttattgcctacctaatgaaacatacacgaatgacaatgacagatgcctacaagttcgtgaaaggaaaaaggcctataatcagccccaatctaaactttatgggccagctgctagagttcgaagaggatctgaataatggagtgaccccccgaattctgacccctaagttaatgggtgtggagacggtagtctag

SEQ ID NO: 171031 - DNA, 1284 bp, Artificial Sequence
  derived and/or modified sequence
atgccccccagccccctggacgaccgggtggtggtggccctgagcagaccagtcagacctcaagacttgaatctctgtttagattcgtcctacctgggtagcgcaaatcctggaagtaattctcaccctcccgtcattactacaactgcaattggcacctccactacttgtcctgccaaccaaatggtgaataacaacgagaacacaggatcactttccccctccagtggcgtgggaagccccgtttccggtacccctaagcaattagcctctattaaaatcatataccccaatgaccttgctaagaagatgactaagtgttcgaaaagccatttgccgagccagggaccagtcataattgattgcaggcctttcatggagtacaacaagagccatattcagggagccgtgcatattaactgtgctgataaaatctcgagaaggcgcctccaacaaggcaaaatcacggtcctggatctgataagttgcagagaaggaaaggactcatttaagaggatttttagtaaggagattatcgtctacgacgagaacacgaacgagccatcgagggtgatgcccagccagcctcttcacatcgtcctggaatccctcaaacgtgagggaaaagagcctctggtgctgaagggtgggcttagcagtttcaaacagaaccatgaaaatctgtgcgataatagtctgcaactccaggagtgtcgtgaagtgggtggaggagcatcagcggcgagctcgttgctgccccagcccatcccgactacgccagatattgaaaacgccgaacttacccctattctgccgttcctttttctggggaacgaacaggatgcacaagacctggatacaatgcaaagactgaatattggctacgtgattaacgtgaccacacacttgccactgtatcattatgagaaaggcctgtttaattataagcggctcccggctactgatagtaataagcagaacctcagacaatacttcgaggaggctttcgaatttattgaagaggcccaccagtgtggcaagggcttgcttatacactgccaggcaggcgtatccagatccgctacaattgttatcgcatacttgatgaaacacacccgaatgaccatgacagatgcttacaagttcgtcaagggcaagcgcccaataatctccccaaacctgaattttatgggacagctcctcgagttcgaagaagatttgaacaacggtgtgacacctagaattctgacccccaaactgatgggcgtggagactgtggtgtag

SEQ ID NO: 171032 - DNA, 1449 bp, Artificial Sequence
  derived and/or modified sequence
atgccgccaagcccgctcgacgatcgcgttgtggtagcattaagccggccagttcggccacaagatcttaacctttgtctcgattccagttatctgggctccgccaaccccggtagtaatagccaccccccagtaatcgcaaccaccgtggtgtctttaaaggctgctaatttgacgtatatgccaagcagttctggtagtgcccgatcacttaactgtggatgctcatcagcttcgtgctgtaccgtagctacatatgacaaagataaccaggcccagactcaagcaatcgcggcaggtactacaaccactgcgatcgggaccagtacaacatgccctgctaaccaaatggttaataataacgaaaacacaggctcccttagcccttcttccggggtggggagtcctgtgagtgggacgcccaaacagttagccagcatcaaaatcatctaccctaatgacctggcaaagaagatgaccaaatgtagcaagagccatcttccgtcacaggggccagtcataattgattgtagacctttcatggagtacaacaaaagtcacattcagggcgcagttcacatcaactgcgctgacaaaatttcccgacgccgactgcagcagggcaagatcacagtgttggacctgattagttgtagggaagggaaggacagtttcaagcgaattttttccaaggagattatcgtgtatgacgaaaacaccaatgagcccagccgcgtgatgccctctcagcccctccacattgtgctagagtccctgaagcgtgaaggaaaggagccacttgttctcaaagggggattatcctcttttaagcagaatcatgagaacctttgcgacaatagtttacaactgcaagaatgtagagaagtggggggtggggctagcgccgcaagcagtctcttgccccagccaataccgaccacaccggatattgaaaacgcagaactcactcccattctcccattcctgtttttgggcaatgagcaagacgctcaggatctggacactatgcagaggttaaacatcggctatgttattaacgttacaacgcacttacccctgtatcactatgaaaagggcctcttcaactacaaacggctgcccgctactgacagcaacaaacagaatctacggcaatactttgaggaagccttcgagtttattgaagaggcgcaccagtgtggcaaggggctgcttatacactgtcaagcaggcgtgtccagatctgctactatcgtcatagcctacctaatgaagcatactcgtatgacaatgactgacgcttataagttcgtgaaggggaagcggcctattatctcccctaatctgaatttcatgggccagctgttggagtttgaagaggacctgaataacggagtgacacccaggattctcactcctaaattaatgggtgtcgagacagtggtatag

SEQ ID NO: 171033 - DNA, 1284 bp, Artificial Sequence
  derived and/or modified sequence
atgccaccatcccctctggatgaccgcgtggtggttgcgttgagccggccagtgcgaccccaggatctcaacctgtgtctcgatagctcatatcttggaagcgcaaatcccggtagtaactcccacccacccgttatcacaaccaccgccatcggaacctctaccacttgcccagcaaaccagatggtgaacaacaacgaaaatactggctccctgtcccccagcagcggcgtagggtccccagtttccggcacacccaagcagctagcatctataaagattatctatcccaatgacctggcaaaaaagatgaccaagtgttcaaaatctcatctacccagtcagggacctgtcataatagattgtagaccattcatggagtataataaatcccatatccagggtgcagttcacataaactgtgccgataagatttcacggcgacggctgcagcagggcaaaatcaccgtcttagacctgatcagctgtcgagagggaaaagatagcttcaagcgcatcttctctaaggaaattatagtttatgatgagaacactaacgagcctagccgagttatgcctagccagccgctgcacattgtcttggagtcgctgaaacgcgaaggcaaagagcctctggtcctgaagggaggactctccagcttcaagcagaatcacgaaaatctgtgcgataatagtttgcagctgcaggaatgtcgcgaggttggcggaggagcttccgcagcaagcagcttgttacctcaacctatccctaccacgcccgacattgaaaatgctgagttgacacccatcttgccctttctgttcctggggaatgagcaggatgcacaggatctggatacaatgcagcgactcaacatcggctacgtgatcaatgtcacgacacacctgcccctctatcattacgagaagggactgttcaactacaaacgtttaccggcaacagatagcaataagcagaacttacggcaatattttgaagaggcctttgagttcatcgaagaggcccatcaatgcggaaagggactcctgatccactgtcaggctggcgtgtctcgctcggccacaatcgtgattgcctatctgatgaaacataccaggatgacaatgacagatgcctacaaatttgtaaagggcaagcggcctattatatcaccaaatctgaatttcatgggccagttgttggaattcgaggaggaccttaacaacggtgtaaccccacgcattctaacccccaaactaatgggggtggaaactgtggtgtag

SEQ ID NO: 171034 - protein, 348 aa, Artificial Sequence [sequence omitted]

SEQ ID NO: 171035 - protein, 375 aa, Artificial Sequence
  derived and/or modified sequence
MPGWRLLTQVGAQVLGRLGDGLGAALGPGNRVTTNSLNVSLIRRNVGSEEKVGDLKKRTHIWLFVRGLHGKSGTWWDEHLSEENVPFIKQLVSDEDKAQLASKLCPLKDEPWPIHPWEPGSFRVGLIALKLGMMPLWTKDGQKHVVTLLQVQDCHVLKYTSKENCNGKMATLSVGGKTVSRFRKATSILEFYRELGLPPKQTVKIFNITDNAAIKPGTPLYAAHFRPGQYVDVTAKTIGKGFQGVMKRWGFKGQPATHGQTKTHRRPGAVATGDIGRVWPGTKMPGKMGNIYRTEYGLKVWRINTKHNIIYVNGSVPGHKNCLVKVKDSKLPAYKDLGKNLPFPTYFPDGDEEELPEDLYDENVCQPGAPSITFA

SEQ ID NO: 171036 - protein, 363 aa, Artificial Sequence
  derived and/or modified sequence
  misc_feature (1)..(1): Xaa can be any naturally occurring amino acid
XFFPSQRASAGDRSGGHCENFPTATASTWRWRGDSLKAERQGARKSTHIWLFVRGLHGKSGTWWDEHLSEENVPFIKQLVSDEDKAQLASKLCPLKDEPWPIHPWEPGSFRVGLIALKLGMMPLWTKDGQKHVVTLLQVQDCHVLKYTSKENCNGKMATLSVGGKTVSRFRKATSILEFYRELGLPPKQTVKIFNITDNAAIKPGTPLYAAHFRPGQYVDVTAKTIGKGFQGVMKRWGFKGQPATHGQTKTHRRPGAVATGDIGRVWPGTKMPGKMGNIYRTEYGLKVWRINTKHNIIYVNGSVPGHKNCLVKVKDSKLPAYKDLGKNLPFPTYFPDGDEEELPEDLYDENVCQPGAPSITFA

SEQ ID NO: 171037 - DNA, 1047 bp, Artificial Sequence
  derived and/or modified sequence
atgccaggctggagactgctgacacaggtaggtgcccaggtgctgggcagactgggcgacggactgggtgccgcccttggaccaggaaacaggacccatatctggctttttgtgagaggactacatggcaagagcggcacctggtgggatgaacacttatctgaggagaacgtcccatttattaagcagcttgtgagcgacgaggataaggcgcagcttgcaagtaagctgtgcccacttaaggacgagccatggccaatacacccatgggaacctggcagttttagagtgggcttaatcgcactcaaattggggatgatgcctctgtggacaaaggatgggcagaaacacgtggtcacactgttacaggtccaggactgccacgtcctcaagtataccagtaaagagaactgtaacggcaagatggctacattatctgtaggtggcaaaactgtgagcagatttcggaaggcaacttcgattcttgaattttatagggaactcgggctgccaccaaagcaaactgtgaagatctttaacataacagataatgcggcaatcaaacctggtacaccactatatgcagcacactttcgtccaggacagtacgttgatgtgacagcgaagaccatcggaaaaggatttcaaggcgtgatgaagcgctggggcttcaaaggccaacctgctacacatggacagactaaaacacatagaaggcctggggcagtagctaccggcgatataggacgtgtctggcccggaaccaagatgccagggaagatgggaaatatttatcgaactgagtacgggctgaaagtttggcggataaataccaagcataacattatttatgtgaacggttccgtgcctggacacaaaaactgcctggtgaaagtcaaagattccaagcttcctgcatataaggacctggggaaaaacctgccattccctacatactttccagacggcgacgaagaggagttacctgaagacctctatgacgaaaacgtctgccaacccggagccccttctataacattcgcttag

SEQ ID NO: 171038 - DNA, 1128 bp, Artificial Sequence
  derived and/or modified sequence
atgccagggtggaggttgctgactcaggttggtgctcaagtcctgggacgtctgggagatggtctcggcgccgccctcggacccggtaaccgcgtgacgactaactcgcttaatgtgtctctcattagaaggaacgttggttcggaagagaaagtaggtgatcttaaaaagcgaacacacatttggctatttgtgagggggttgcacggcaagagtggaacttggtgggacgaacatcttagcgaggaaaatgtgcctttcattaagcagctggtgtctgacgaggacaaagctcagctggcttctaagctctgtccacttaaagatgaaccctggcccattcacccttgggagcctgggtcattccgtgtggggcttattgccctcaaactcggcatgatgcccctctggacaaaggatgggcaaaagcatgtagtgacgttgcttcaagttcaggactgccacgtattgaagtatacttcaaaggagaactgcaacggaaaaatggctacactgagtgttggggggaaaactgttagcagattccgcaaggccactagtatccttgagttctatagggagctcggactgccaccgaagcagactgtgaagattttcaacataacagacaatgccgctataaaacctggaacacccctttacgcagcacatttcaggccaggccagtatgtcgacgtgactgcaaaaactataggtaagggttttcaaggagtcatgaagaggtggggcttcaaaggtcagccagctactcacggtcagactaaaacccaccggaggccaggagcagtcgcaacgggtgatatcggacgagtctggccaggaaccaaaatgcccggcaaaatgggcaatatctaccgcacagaatacgggttgaaagtctggagaatcaacacaaagcataatattatctatgtgaacggctcagttccaggccataaaaattgcttggtgaaagtaaaggatagtaagctgccagcctacaaagacttgggcaagaatcttcctttccccacatatttcccagacggcgacgaggaagagttgcctgaggatctatacgatgaaaatgtgtgtcagccgggggctccaagtatcaccttcgcttag

SEQ ID NO: 171039 - DNA, 1092 bp, Artificial Sequence
  derived and/or modified sequence
taattttttccaagtcagagagcctccgctggggacagatcgggagggcactgcgagaactttcccactgctaccgctagtacctggaggtggcgcggagactcactgaaggccgagcgccaaggcgcccgcaagagcactcacatctggctgttcgtcaggggtctgcatggcaagtcgggaacctggtgggacgagcacttgtccgaggagaatgtcccgttcatcaagcagctcgtcagcgacgaagacaaggctcaactagcctctaagctctgtcccttgaaggatgagccctggccaatccatccctgggaacctggcagcttcagagttggcctgatcgcgctgaagctgggcatgatgcccctgtggacaaaggacggccagaagcacgtggttacattgctccaggtccaggattgtcacgtcctcaaatatacctcaaaagaaaactgtaacggtaagatggctacactgtccgttggaggcaaaaccgtgtctcggtttagaaaggccacgtcaatcctggaattttacagggagcttggactgccacctaaacagaccgtcaagatatttaatattaccgacaatgccgccattaaaccaggcactccactctatgcagctcactttcgcccgggccagtacgttgacgtgaccgccaaaacaatcggcaaagggttccagggtgtgatgaaaaggtggggtttcaaaggccagcccgcaactcacggtcagacaaaaacacatagacgcccaggcgcggtggcaacaggtgacatcggaagagtttggcctggcacaaaaatgcccgggaaaatggggaatatttatagaacagagtatgggctgaaggtttggaggatcaacaccaagcacaatattatttacgtgaacggatccgtgcccgggcacaaaaattgcctcgtcaaggttaaggactccaagttgccggcctataaggacctgggaaagaatttgccattccccacttattttcccgatggagacgaggaggaactgcctgaagacctgtatgacgaaaacgtgtgccagccaggtgcaccttcaataacttttgcttag

SEQ ID NO: 171040 - DNA, 1047 bp, Artificial Sequence
  derived and/or modified sequence
atgcctggctggaggctgctgacccaggtgggcgcccaggtgctgggccgcctgggagatggcctgggcgccgccctgggccctggcaacagaacccacatctggctgtttgtgcggggcctgcacggcaagagcggcacctggtgggatgagcacctgtctgaggagaatgtgcccttcatcaagcagctggtgtctgatgaggacaaggcccagctggccagcaagctgtgccccctgaaggatgagccctggcccatccacccctgggagcccggcagcttccgggtgggcctcatcgccctgaagctgggcatgatgcccctgtggaccaaggatggccagaagcacgtggtgaccctgctgcaggtgcaggactgccacgtgctgaagtacaccagcaaggagaactgcaatggcaagatggccaccctgtctgtgggcggcaagacagtgagccgcttcaggaaggccaccagcatcctggagttctaccgggagctgggcctgccccccaagcagacagtgaagatcttcaacatcacagacaatgctgccatcaagccaggcacccccctgtatgctgcccacttccggcccggccagtatgtggatgtgacagccaagaccatcggcaagggcttccagggcgtgatgaagcgctggggcttcaagggccagcctgccacccacggccagaccaagacccaccggcggcctggagctgtggccactggagacatcggccgggtgtggccaggcaccaagatgcctgggaagatgggcaacatctacagaacagaatatggcctgaaggtgtggaggatcaacaccaagcacaacatcatctacgtgaatggatctgtgcccggccacaagaactgcctggtgaaggtgaaggacagcaagctgcctgcctacaaggacctgggcaagaacctgcccttccccacctacttcccagatggagatgaggaggagctgcctgaggacctgtatgatgaaaatgtgtgccagcccggggcccccagcatcacctttgcctag

SEQ ID NO: 171041 - DNA, 1128 bp, Artificial Sequence
  derived and/or modified sequence
atgcctggctggaggctgctgacccaggtgggcgcccaggtgctgggccgcctgggagatggcctgggcgccgccctgggccctggcaacagagtgaccaccaacagcctgaatgtgtccctcatcagaagaaatgtgggcagcgaggagaaggtgggggacctgaagaagaggacccacatctggctgtttgtgcggggcctgcacggcaagagcggcacctggtgggatgagcacctgtctgaagaaaatgtgcccttcatcaagcagctggtgtctgatgaggacaaggcccagctggccagcaagctgtgccccctgaaggatgagccctggcccatccacccctgggagcccggcagcttccgggtgggcctgattgccctgaagctgggcatgatgcccctgtggaccaaggatggccagaagcacgtggtgaccctgctgcaggtgcaggactgccacgtgctgaagtacaccagcaaagaaaactgcaatggcaagatggccaccctgtctgtgggcggcaagacagtgagccgcttcaggaaggccaccagcatcctggagttctaccgggagctgggcctgccccccaagcagacagtgaagatcttcaacatcacagacaatgctgccatcaagccaggcacccccctgtatgctgcccacttccggcccggccagtatgtggatgtgacagccaagaccatcggcaagggcttccagggcgtgatgaagcgctggggcttcaagggccagcctgccacccacggccagaccaagacccacagaagacctggagctgtggccaccggggacatcggccgggtgtggccaggcaccaagatgcctgggaagatgggcaacatctacagaacagaatatggcctgaaggtgtggaggatcaacaccaagcacaacatcatctacgtgaatggatctgtgcccggccacaagaactgcctggtgaaggtgaaggacagcaagctgcctgcctacaaggacctgggcaagaacctgcccttccccacctacttcccagatggagatgaggaggagctgcctgaggacctgtatgatgaaaatgtgtgccagcccggggcccccagcatcacctttgcctag

SEQ ID NO: 171042 - DNA, 1092 bp, Artificial Sequence
  derived and/or modified sequence
tgattcttccccagccagagggccagcgctggggacagaagtggcggccactgtgagaacttccccacagccacagccagcacctggcgctggaggggggacagcctgaaggccgagcggcagggcgccaggaagagcacccacatctggctgtttgtgcggggcctgcacggcaagagcggcacctggtgggatgagcacctgtctgaagaaaatgtgcccttcatcaagcagctggtgtctgatgaggacaaggcccagctggccagcaagctgtgccccctgaaggatgagccctggcccatccacccctgggagcccggcagcttccgggtgggcctgattgccctgaagctgggcatgatgcccctgtggaccaaggatggccagaagcacgtggtgaccctgctgcaggtgcaggactgccacgtgctgaagtacaccagcaaagaaaactgcaatggcaagatggccaccctgtctgtgggcggcaagacagtgagccgcttcaggaaggccaccagcatcctggagttctaccgggagctgggcctgccccccaagcagacagtgaagatcttcaacatcacagacaatgctgccatcaagccaggcacccccctgtatgctgcccacttccggcccggccagtatgtggatgtgacagccaagaccatcggcaagggcttccagggcgtgatgaagcgctggggcttcaagggccagcctgccacccacggccagaccaagacccacagaagacctggagctgtggccaccggggacatcggccgggtgtggccaggcaccaagatgcctgggaagatgggcaacatctacagaacagaatatggcctgaaggtgtggaggatcaacaccaagcacaacatcatctacgtgaatggatctgtgcccggccacaagaactgcctggtgaaggtgaaggacagcaagctgcctgcctacaaggacctgggcaagaacctgcccttccccacctacttcccagatggagatgaggaggagctgcctgaggacctgtatgatgaaaatgtgtgccagcccggggcccccagcatcacctttgcctag

SEQ ID NO: 171043 - DNA, 1694 bp, Artificial Sequence
  derived and/or modified sequence
agagagcatcggccggcgaccgttccggcggccattgcgaaaacttccccacggctactgcgtccacgtggcggtggcgtggggactccctgaaagcagagcggcagggcgcccggaagtcgtgagtcgagtcttcccgggctaatccatgccgggttggaggctgctgacgcaggtcggcgcccaggtgctgggtcgactcggggacggcctgggtgctgccctgggcccggggaacagaacacacatctggctttttgttagaggtcttcatggaaagagtggtacatggtgggatgagcatctttctgaagaaaatgtcccattcattaagcagttggtctctgatgaagataaagcccaattagcaagtaaactgtgtcctctgaaagatgaaccatggcctatacatccttgggaaccaggttcctttagagttggtcttattgccttgaagctgggcatgatgcctttatggaccaaggatggtcaaaagcatgtggtcacattacttcaggtacaagactgtcatgtcttaaaatatacgtcaaaggaaaactgtaatggaaaaatggcaaccctgtctgtaggaggaaaaactgtatcacgttttcgtaaagctacatccatattggaattttaccgggaacttggattgccgccgaaacagacagttaaaatctttaatataacagataatgctgcaattaaaccaggcactcctctttatgctgctcactttcgtccaggacagtatgtggatgtcacagccaaaactattggtaaaggttttcaaggtgtcatgaaaagatggggatttaaaggccagcctgctacgcatggtcaaacgaaaacccacaggagacctggagctgttgcaactggtgatattggcagagtctggcctggaactaaaatgcctggaaaaatgggaaacatatacaggacagaatatggactgaaagtgtggagaataaacacaaagcacaacataatctatgtaaatggctctgtacctggacataaaaattgcttagtaaaggtcaaagattctaaactgcctgcatataaggatctcggtaaaaatctaccattccctacatattttcctgatggagatgaagaggaactgccagaagatttgtatgatgaaaacgtgtgtcagcccggtgcgccttctattacatttgcctaacatctttggacgtggcagaaccttacatattctgtgagcttcgatgagccagagtgatatcataaccaccagaaatcatactctcctttcttagtcacaacaaaatcacacatgtcatctttgtcaagggcataaatatatcattcatacccccattaaattttgttagaaaaattaccacattaaatatatgagttaagtagattggatttgctgaaattggtgttgggcatattagcaaaatattcttaatttgtggactcgattcttttttactacatatttcccaagttatcttaagatgtctgtaaatttaacttttattaaagttttgtcaatctttgtgaaatagtggttgtggaacagtagaaaaccatatggggactatagtgcaacctatttgggtaaagaaaccatttgctaaaatggagaaagtaaatagatttttatttaaattacagaaacatgttaaaggccggacaaaggaaagacaataaaa

SEQ ID NO: 171044 - DNA, 1457 bp, Artificial Sequence
  derived and/or modified sequence
tttctttccgtcgcagagagcatcggccggcgaccgttccggcggccattgcgaaaacttccccacggctactgcgtccacgtggcggtggcgtggggactccctgaaagcagagcggcagggcgcccggaagtcgtgagtcgagtcttcccgggctaatccatgccgggttggaggctgctgacgcaggtcggcgcccaggtgctgggtcgactcggggacggcctgggtgctgccctgggcccggggaacagggtaacgactaacagtttaaatgtgagccttatccgaaggaatgtggggagtgaggaaaaggttggagacctgaaaaaaagaacacacatctggctttttgttagaggtcttcatggaaagagtggtacatggtgggatgagcatctttctgaagaaaatgtcccattcattaagcagttggtctctgatgaagataaagcccaattagcaagtaaactgtgtcctctgaaagatgaaccatggcctatacatccttgggaaccaggttcctttagagttggtcttattgccttgaagctgggcatgatgcctttatggaccaaggatggtcaaaagcatgtggtcacattacttcaggtacaagactgtcatgtcttaaaatatacgtcaaaggaaaactgtaatggaaaaatggcaaccctgtctgtaggaggaaaaactgtatcacgttttcgtaaagctacatccatattggaattttaccgggaacttggattgccgccgaaacagacagttaaaatctttaatataacagataatgctgcaattaaaccaggcactcctctttatgctgctcactttcgtccaggacagtatgtggatgtcacagccaaaactattggtaaaggttttcaaggtgtcatgaaaagatggggatttaaaggccagcctgctacgcatggtcaaacgaaaacccacaggagacctggagctgttgcaactggtgatattggcagagtctggcctggaactaaaatgcctggaaaaatgggaaacatatacaggacagaatatggactgaaagtgtggagaataaacacaaagcacaacataatctatgtaaatggctctgtacctggacataaaaattgcttagtaaaggtcaaagattctaaactgcctgcatataaggatctcggtaaaaatctaccattccctacatattttcctgatggagatgaagaggaactgccagaagatttgtatgatgaaaacgtgtgtcagcccggtgcgccttctattacatttgcctaacatctttggacgtggcagaaccttacatattctgtgagcttcgatgagccagagtgatatcataaccaccagaaatcatactctcctttcttagtcacaacaaaatcacacatgtcatctttgtcaagggcataaatatatcattcatacccccattaaattttgtt

SEQ ID NO: 171045 - DNA, 1377 bp, Artificial Sequence
  derived and/or modified sequence
tttctttccgtcgcagagagcatcggccggcgaccgttccggcggccattgcgaaaacttccccacggctactgcgtccacgtggcggtggcgtggggactccctgaaagcagagcggcagggcgcccggaagtcaacacacatctggctttttgttagaggtcttcatggaaagagtggtacatggtgggatgagcatctttctgaagaaaatgtcccattcattaagcagttggtctctgatgaagataaagcccaattagcaagtaaactgtgtcctctgaaagatgaaccatggcctatacatccttgggaaccaggttcctttagagttggtcttattgccttgaagctgggcatgatgcctttatggaccaaggatggtcaaaagcatgtggtcacattacttcaggtacaagactgtcatgtcttaaaatatacgtcaaaggaaaactgtaatggaaaaatggcaaccctgtctgtaggaggaaaaactgtatcacgttttcgtaaagctacatccatattggaattttaccgggaacttggattgccgccgaaacagacagttaaaatctttaatataacagataatgctgcaattaaaccaggcactcctctttatgctgctcactttcgtccaggacagtatgtggatgtcacagccaaaactattggtaaaggttttcaaggtgtcatgaaaagatggggatttaaaggccagcctgctacgcatggtcaaacgaaaacccacaggagacctggagctgttgcaactggtgatattggcagagtctggcctggaactaaaatgcctggaaaaatgggaaacatatacaggacagaatatggactgaaagtgtggagaataaacacaaagcacaacataatctatgtaaatggctctgtacctggacataaaaattgcttagtaaaggtcaaagattctaaactgcctgcatataaggatctcggtaaaaatctaccattccctacatattttcctgatggagatgaagaggaactgccagaagatttgtatgatgaaaacgtgtgtcagcccggtgcgccttctattacatttgcctaacatctttggacgtggcagaaccttacatattctgtgagcttcgatgagccagagtgatatcataaccaccagaaatcatactctcctttcttagtcacaacaaaatcacacatgtcatctttgtcaagggcataaatatatcattcatacccccattaaattttgttagaaaaattaccacattaaatatatgagttaagtagattggatttgctgaaattggtgttgggcatattagcaaaatattcttaatttgtggactcgattcttttttactacatatttcc

SEQ ID NO: 171046 - DNA, 1047 bp, Artificial Sequence
  derived and/or modified sequence
atgcccggctggcggctgctgacccaggtgggcgcccaggtgctgggtagacttggcgacggcttgggagctgctttggggcccggcaatcgcacacacatttggctgtttgttcgtgggctgcatggaaagtcagggacatggtgggatgaacacctgtctgaagagaatgtgcccttcatcaaacagttagtgagtgatgaggacaaggcccaactggctagtaagctgtgtcccctgaaagacgagccatggccaatccacccttgggagccaggatcatttagagtcggcctgatcgctctgaagctgggaatgatgcccttgtggactaaggatggccagaaacacgtggtaacactcctgcaggttcaagattgccacgttctgaagtacacctctaaagagaattgcaacgggaaaatggccacactaagcgtggggggtaagaccgtgagcaggttccgcaaggcgacaagtatcctggagttctatcgtgaactggggctgccaccgaaacaaacagttaagatttttaacattactgacaacgcggcaataaaacccggcacccccttatacgcagctcacttccgtcccgggcagtatgtggacgttacagccaagacgatcggcaaagggttccagggagttatgaagcgctgggggttcaaaggccagccagctacgcacggacagaccaagacacaccggcgacctggagcggtggccaccggggatatcgggcgcgtgtggcccggcaccaagatgcctgggaaaatgggaaacatctacagaaccgagtacgggttgaaggtctggcgaattaataccaagcataacatcatctacgtcaatggcagcgtgccagggcacaagaactgtctggtgaaggtcaaggacagtaaactgcccgcgtacaaagacctcggaaagaatctacctttcccgacttactttcctgacggcgatgaggaagaactcccggaggacctgtatgatgagaatgtttgccagcctggggctcccagcatcacttttgcctag

SEQ ID NO: 171047 - DNA, 1128 bp, Artificial Sequence
  derived and/or modified sequence
atgcccggctggcggctgctgacccaggtgggcgcccaggtgctgggtcggctaggcgacgggctgggggctgcccttggacccggcaacagagtcaccaccaatagccttaacgtcagtctcatccgtcggaacgtgggatccgaggaaaaagtcggggatttaaagaaacggacacacatatggctgttcgtgagaggactgcacggcaagagtgggacttggtgggacgagcatctgagtgaagagaacgtgccgttcatcaagcaactggtgtctgacgaggacaaggcgcagctggcatccaaattgtgccctctgaaggatgaaccctggcccatccatccctgggaacctggcagcttcagagtgggtctgattgcacttaaactgggcatgatgcctctctggacaaaagatggacagaagcatgtggtgaccttgctgcaggttcaggattgccacgtactcaaatacacctctaaggagaattgtaatggcaaaatggccactttaagcgtgggtggtaagacagttagccgattccgcaaggcaactagtatcctggagttttacagagaactgggacttcctccaaagcagactgtgaagatatttaatattacagacaatgccgcaattaagccagggaccccactgtatgcagcacactttcgtcccggccaatacgtggacgtgaccgctaagacgattggtaagggttttcagggggtgatgaaacgttggggctttaagggacagcccgctacacatggacagactaagacacaccggagaccgggagctgtggccacaggcgacataggacgggtgtggcccggcacgaaaatgcccggaaagatgggaaatatctatcgaactgagtatgggctgaaagtgtggaggataaatacaaaacacaacatcatctacgtcaacggatcagtccccggacacaagaactgcctggtaaaagtaaaagacagcaagctccccgcttataaggaccttggcaaaaatctgcctttccccacatatttcccggacggcgatgaagaagagctccctgaagacctttacgacgaaaatgtgtgccagccgggcgcaccttccattaccttcgcatag

SEQ ID NO: 171048 - DNA, 1092 bp, Artificial Sequence
  derived and/or modified sequence
tgattcttccccagccagcgggccagcgccggcgaccggagcggcggacattgtgagaatttcccaaccgcaaccgcgtccacctggaggtggagaggcgatagcctcaaagctgagcggcagggcgcgaggaaatccacacacatttggctatttgttcggggcctgcacgggaaaagcggtacatggtgggatgaacatctttctgaagaaaatgttccatttattaaacagctggtgtccgacgaagacaaggcccagctggcgagcaagctgtgtccactcaaggatgaaccgtggccaatacatccttgggaaccaggaagctttcgggtggggctaattgcactgaagctcgggatgatgcctctgtggactaaagacggtcagaagcatgtggtgactcttctccaggtgcaggattgtcacgtgctgaagtacacttccaaagagaattgcaacggaaaaatggccaccctgagcgtcggtggaaaaacggtgtcacggttcagaaaggccacgtcaatcctggaattttatagggagttaggacttccaccaaaacagaccgtcaagatctttaatatcactgataatgccgcaattaagcctggcaccccgctgtacgccgctcacttcaggccaggacagtatgtggacgtaaccgcgaagactatcgggaaaggcttccagggggtgatgaaaagatggggctttaaaggtcagcccgccacacacggtcagactaagacacaccgcagacccggagcggtcgccaccggcgacatcggccgtgtgtggccaggaacaaagatgccgggcaagatgggtaacatatatagaaccgaatatggtctgaaggtctggagaatcaatactaagcataatataatttatgtaaatggaagcgttccgggccacaagaactgccttgtcaaggtaaaagactccaaattgccagcctataaggacttggggaagaacttaccgtttccaacgtatttccccgacggcgacgaggaggagttaccagaagatctgtacgacgagaacgtatgtcagcctggtgcaccctccatcacgttcgcatag

SEQ ID NO: 171049 - DNA, 1047 bp, Artificial Sequence
  derived and/or modified sequence
atgccgggttggaggctactcacccaagtgggggcacaggtgctcggcaggctgggcgacgggctgggggctgccctggggcctggaaaccggactcatatatggctgttcgtgagagggttgcatggaaagtccgggacctggtgggatgaacatctgagcgaagagaatgtgccattcataaagcaattggtgtccgatgaagacaaagcccagttggcctcaaagctgtgccccctcaaagatgaaccctggccaattcatccgtgggagccgggaagcttcagagtgggtctcatcgcactaaaactggggatgatgccattatggacgaaggatggccaaaagcacgtggtgacactgctgcaggtgcaggattgtcacgtgctgaagtacaccagcaaagaaaattgcaacggcaaaatggccaccctcagtgtgggcggaaagacagtgtcccgcttccgcaaagctacatctatcctcgagttttacagagagctggggctgccaccaaaacaaactgtaaaaatcttcaacataacagataatgccgctatcaagcctgggacgccactctacgctgcacactttcgtcctggccaatacgttgacgttactgccaagacaattggaaagggcttccagggcgtcatgaagcgttggggattcaaggggcaaccagccactcatgggcagaccaagacgcacagacgccctggtgcagtagcaaccggagacattgggagggtttggccagggaccaagatgcccggtaagatgggaaacatttatcgcaccgagtatgggttaaaggtgtggcggatcaataccaaacacaatatcatctacgtaaacggttcagttcccggtcataaaaactgtcttgttaaggtgaaggacagtaagctgcctgcttataaagatttagggaagaatttgccatttcctacctactttccagacggcgacgaggaagaacttccagaagacctatacgatgagaatgtgtgtcagcccggtgctcctagtataacctttgcttag

SEQ ID NO: 171050 - DNA, 1128 bp, Artificial Sequence
  derived and/or modified sequence
atgccgggatggcgtcttctcacacaggtcggagcccaggtgcttggcaggctgggagacggcctgggcgcagcactagggcctggaaaccgagttaccacaaattccctcaatgttagtttgatccggagaaatgttgggtcagaggagaaggtaggggacctgaagaagcgcactcacatttggctctttgttagaggcttgcatgggaagagcggcacatggtgggatgagcacctgagcgaggagaatgtacccttcattaagcagttggtgagcgacgaggataaagctcagttggccagtaagctttgcccactgaaagacgagccttggcccatccacccttgggagcctggatcctttcgagtcggcttaattgccctgaaactgggcatgatgccactgtggaccaaggatggacaaaagcatgtggttaccctcttgcaagtccaagattgccacgttttgaagtatacatcaaaggagaactgtaacggtaagatggcaaccttgagcgtcggcggaaagacagtatctaggttccgcaaggcaacgtctatccttgagttctaccgggagctcggattgccccctaaacagactgtaaagatcttcaacattacagacaatgccgctattaagcctgggacccctttgtacgctgcccatttcaggccagggcagtatgttgatgtgaccgctaagacaatcggaaagggctttcagggtgtgatgaaacgatgggggttcaagggacagccagctacacacgggcagactaagacccacaggcgccctggagcagttgccaccggggacatcgggcgagtgtggccagggaccaagatgcctggaaagatgggaaacatctatcgcaccgaatacggccttaaagtctggcggatcaacacaaaacacaatatcatctacgtgaacggcagtgttccgggtcataagaactgcctcgtcaaggtcaaagatagcaaacttcccgcttacaaggatctggggaagaacctccccttccccacttactttcccgatggtgacgaagaggaattgccagaggacctgtacgatgaaaacgtctgtcagccaggcgcaccaagtatcacgtttgcttag

SEQ ID NO: 171051 - DNA, 1092 bp, Artificial Sequence
  derived and/or modified sequence
tagttttttccttcgcaacgggcttccgccggagaccgctctggcggacattgtgagaactttcctacggccaccgcctccacctggaggtggcgaggagattcactgaaggccgagcggcagggagcaaggaaatctacacacatttggcttttcgtgaggggcctacatggcaagtctggaacgtggtgggacgagcacctgtcagaggaaaacgtgccttttatcaagcagctggtgtcagatgaagacaaggcacaactcgcttcaaagttgtgcccactgaaagatgagccctggccaattcatccgtgggagcctggctcttttcgagtaggccttattgccctcaaactcggcatgatgcctctttggaccaaagatggtcaaaagcatgtggtgactctgcttcaggtccaggactgtcacgtcctgaaatacacctctaaggaaaactgtaatggcaagatggccaccttgtcagtgggaggaaagaccgtgtcccgctttaggaaggctactagcatcctcgagttctatcgcgagctgggattgcctcccaaacaaaccgtgaagattttcaacattactgacaacgccgctattaagccgggaacgccactctacgcagcacatttccgacccggacaatacgtggacgtgactgcaaaaacaattggcaaaggctttcagggcgtgatgaagcggtggggttttaaaggtcagccagctactcatggacaaacgaagacccacagaaggcctggcgcagtggccactggcgacatcggacgcgtatggcccggaactaagatgcctggcaaaatgggaaatatctacagaaccgagtacgggcttaaagtgtggcgcatcaatacaaagcataatattatctacgtgaacgggtctgttcctggccacaagaattgtctggtgaaggtgaaagatagcaaattacctgcttataaggatctggggaaaaatctgcctttcccaacgtatttcccggatggggatgaagaagagctgccagaagacctctatgacgagaacgtatgccagcctggggctcccagcattactttcgcctag

SEQ ID NO: 171052 - DNA, 1047 bp, Artificial Sequence
  derived and/or modified sequence
atgcccggctggagactgctgacccaggtgggcgcccaggtgctgggcagactgggcgacggcctgggcgccgccctgggccccggcaacagaacccacatctggctgttcgtgagaggcctgcacggcaagagcggcacctggtgggacgagcacctgagcgaggagaacgtgcccttcatcaagcagctggtgagcgacgaggacaaggcccagctggccagcaagctgtgccccctgaaggacgagccctggcccatccacccctgggagcccggcagcttcagagtgggcctgatcgccctgaagctgggcatgatgcccctgtggaccaaggacggccagaagcacgtggtgaccctgctgcaggtgcaggactgccacgtgctgaagtacaccagcaaggagaactgcaacggcaagatggccaccctgagcgtgggcggcaagaccgtgagcagattcagaaaggccaccagcatcctggagttctacagagagctgggcctgccccccaagcagaccgtgaagatcttcaacatcaccgacaacgccgccatcaagcccggcacccccctgtacgccgcccacttcagacccggccagtacgtggacgtgaccgccaagaccatcggcaagggcttccagggcgtgatgaagagatggggcttcaagggccagcccgccacccacggccagaccaagacccacagaagacccggcgccgtggccaccggcgacatcggcagagtgtggcccggcaccaagatgcccggcaagatgggcaacatctacagaaccgagtacggcctgaaggtgtggagaatcaacaccaagcacaacatcatctacgtgaacggcagcgtgcccggccacaagaactgcctggtgaaggtgaaggacagcaagctgcccgcctacaaggacctgggcaagaacctgcccttccccacctacttccccgacggcgacgaggaggagctgcccgaggacctgtacgacgagaacgtgtgccagcccggcgcccccagcatcaccttcgcctag

SEQ ID NO: 171053 - DNA, 1128 bp, Artificial Sequence
  derived and/or modified sequence
atgcccggctggagactgctgacccaggtgggcgcccaggtgctgggcagactgggcgacggcctgggcgccgccctgggccccggcaacagagtgaccaccaacagcctgaacgtgagcctgatcagaagaaacgtgggcagcgaggagaaggtgggcgacctgaagaagagaacccacatctggctgttcgtgagaggcctgcacggcaagagcggcacctggtgggacgagcacctgagcgaggagaacgtgcccttcatcaagcagctggtgagcgacgaggacaaggcccagctggccagcaagctgtgccccctgaaggacgagccctggcccatccacccctgggagcccggcagcttcagagtgggcctgatcgccctgaagctgggcatgatgcccctgtggaccaaggacggccagaagcacgtggtgaccctgctgcaggtgcaggactgccacgtgctgaagtacaccagcaaggagaactgcaacggcaagatggccaccctgagcgtgggcggcaagaccgtgagcagattcagaaaggccaccagcatcctggagttctacagagagctgggcctgccccccaagcagaccgtgaagatcttcaacatcaccgacaacgccgccatcaagcccggcacccccctgtacgccgcccacttcagacccggccagtacgtggacgtgaccgccaagaccatcggcaagggcttccagggcgtgatgaagagatggggcttcaagggccagcccgccacccacggccagaccaagacccacagaagacccggcgccgtggccaccggcgacatcggcagagtgtggcccggcaccaagatgcccggcaagatgggcaacatctacagaaccgagtacggcctgaaggtgtggagaatcaacaccaagcacaacatcatctacgtgaacggcagcgtgcccggccacaagaactgcctggtgaaggtgaaggacagcaagctgcccgcctacaaggacctgggcaagaacctgcccttccccacctacttccccgacggcgacgaggaggagctgcccgaggacctgtacgacgagaacgtgtgccagcccggcgcccccagcatcaccttcgcctag

SEQ ID NO: 171054 - DNA, 1092 bp, Artificial Sequence
  derived and/or modified sequence
tgattcttccccagccagagagccagcgccggcgacagaagcggcggccactgcgagaacttccccaccgccaccgccagcacctggagatggagaggcgacagcctgaaggccgagagacagggcgccagaaagagcacccacatctggctgttcgtgagaggcctgcacggcaagagcggcacctggtgggacgagcacctgagcgaggagaacgtgcccttcatcaagcagctggtgagcgacgaggacaaggcccagctggccagcaagctgtgccccctgaaggacgagccctggcccatccacccctgggagcccggcagcttcagagtgggcctgatcgccctgaagctgggcatgatgcccctgtggaccaaggacggccagaagcacgtggtgaccctgctgcaggtgcaggactgccacgtgctgaagtacaccagcaaggagaactgcaacggcaagatggccaccctgagcgtgggcggcaagaccgtgagcagattcagaaaggccaccagcatcctggagttctacagagagctgggcctgccccccaagcagaccgtgaagatcttcaacatcaccgacaacgccgccatcaagcccggcacccccctgtacgccgcccacttcagacccggccagtacgtggacgtgaccgccaagaccatcggcaagggcttccagggcgtgatgaagagatggggcttcaagggccagcccgccacccacggccagaccaagacccacagaagacccggcgccgtggccaccggcgacatcggcagagtgtggcccggcaccaagatgcccggcaagatgggcaacatctacagaaccgagtacggcctgaaggtgtggagaatcaacaccaagcacaacatcatctacgtgaacggcagcgtgcccggccacaagaactgcctggtgaaggtgaaggacagcaagctgcccgcctacaaggacctgggcaagaacctgcccttccccacctacttccccgacggcgacgaggaggagctgcccgaggacctgtacgacgagaacgtgtgccagcccggcgcccccagcatcaccttcgcctag

SEQ ID NO: 171055 - protein, 123 aa, Artificial Sequence [sequence omitted]

SEQ ID NO: 171056 - protein, 96 aa, Artificial Sequence
  derived and/or modified sequence
  misc_feature (1)..(1): Xaa can be any naturally occurring amino acid
XAKIKARDLRGKKKEELLKQLDDLKVELSQLRVAKVTGGAASKLSKIRVVRKSIARVLTVINQTQKENLRKFYKAAAGGPCIQMDRVLPQPPACSC

SEQ ID NO: 171057 - DNA, 372 bp, Artificial Sequence
  derived and/or modified sequence
atggccaagatcaaggccagagacctgagaggcaagaagaaggaggagctgctgaagcagctggacgacctgaaggtggagctgagccagctgagagtggccaaggtgaccggcggcgccgccagcaagctgagcaagatcagagtggtgagaaagagcatcgccagagtgctgaccgtgatcaaccagacccagaaggagaacctgagaaagttctacaagggcaagaagtacaagcccctggacctgagacccaagaagaccagagccatgagaagaagactgaacaagcacgaggagaacctgaagaccaagaagcagcagagaaaggagagactgtaccccctgagaaagtacgccgtgaaggcctag

SEQ ID NO: 171058 - DNA, 291 bp, Artificial Sequence
  derived and/or modified sequence
tgagccaagatcaaggccagagacctgagaggcaagaagaaggaggagctgctgaagcagctggacgacctgaaggtggagctgagccagctgagagtggccaaggtgaccggcggcgccgccagcaagctgagcaagatcagagtggtgagaaagagcatcgccagagtgctgaccgtgatcaaccagacccagaaggagaacctgagaaagttctacaaggccgccgccggcggcccctgcatccagatggacagagtgctgccccagccccccgcctgcagctgctag

SEQ ID NO: 171059 - DNA, 455 bp, Artificial Sequence
  derived and/or modified sequence
cttcctctttccctcggagcgggcggcggcgttggcggcttgtgcagcaatggccaagatcaaggctcgagatcttcgcgggaagaagaaggaggagctgctgaaacagctggacgacctgaaggtggagctgtcccagctgcgcgtcgccaaagtgacaggcggtgcggcctccaagctctctaagatccgagtcgtccggaaatccattgcccgtgttctcacagttattaaccagactcagaaagaaaacctcaggaaattctacaagggcaagaagtacaagcccctggacctgcggcctaagaagacacgtgccatgcgccgccggctcaacaagcacgaggagaacctgaagaccaagaagcagcagcggaaggagcggctgtacccgctgcggaagtacgcggtcaaggcctgaggggcgcattgtcaataaagcacagctggctgag

SEQ ID NO: 171060 - DNA, 372 bp, Artificial Sequence
  derived and/or modified sequence
atggccaaaattaaagcgcgagacctgaggggcaagaagaaagaggaactgcttaagcagctcgacgatcttaaggttgagctcagccagctgcgagtggcgaaggtcactggaggagccgcttcaaagcttagtaagattcgagtggtgagaaagtcaatcgcgagggtcctgacagttatcaaccagacacaaaaggagaatctgcggaagttctacaagggtaagaaatacaagcctctggaccttcgtcctaaaaaaaccagggcaatgcgtcgccgcttaaacaaacacgaggagaatctgaagactaagaaacagcagcgcaaggaacggttatatccacttcgcaagtatgctgtgaaggcctag

SEQ ID NO: 171061 - DNA, 291 bp, Artificial Sequence
  derived and/or modified sequence
tgagccaaaattaaggctcgggacctacggggaaaaaaaaaggaggaactactcaagcagctcgacgatttgaaagtcgagctttcgcagctgagagttgcaaaggtgaccggaggagccgcctctaaactgtcaaagatcagggtcgtccggaaatcgatcgcccgggtgttgactgtcataaaccagacacagaaggaaaatctaaggaaattctataaagccgctgccggcggcccttgtatccagatggaccgggtgctgcctcagcctcctgcctgtagctgctag

SEQ ID NO: 171062 - DNA, 488 bp, Artificial Sequence
  derived and/or modified sequence
ggccaagatcaaggctcgagatcttcgcgggaagaagaaggaggagctgctgaaacagctggacgacctgaaggtggagctgtcccagctgcgcgtcgccaaagtgacaggcggtgcggcctccaagctctctaagatccgagtcgtccggaaatccattgcccgtgttctcacagttattaaccagactcagaaagaaaacctcaggaaattctacaaggcagcagctggtgggccctgcatacagatggacagagtactgcctcagcccccagcatgctcttgctaaccagagccgagggcaagaagtacaagcccctggacctgcggcctaagaagacacgtgccatgcgccgccggctcaacaagcacgaggagaacctgaagaccaagaagcagcagcggaaggagcggctgtacccgctgcggaagtacgcggtcaaggcctgaggggcgcattgtcaataaagcacagctggctgagactg

SEQ ID NO: 171063 - DNA, 372 bp, Artificial Sequence
  derived and/or modified sequence
atggccaagatcaaggcccgggacctgcggggcaagaagaaggaggagctgctgaagcagctggatgacctgaaggtggagctgagccagctgcgggtggccaaggtgactggaggagctgccagcaagctgagcaagatccgggtggtgaggaagagcatcgcccgggtgctgaccgtcatcaaccagacccagaaggagaacctgaggaagttctacaagggcaagaagtacaagcccctggacctgcggcccaagaagacccgggccatgagaagaaggctgaacaagcatgaggagaacctgaagaccaagaagcagcagaggaaggagcggctgtaccccctgaggaaatatgctgtgaaggcctag

SEQ ID NO: 171064 - DNA, 291 bp, Artificial Sequence
  derived and/or modified sequence
tgagccaagatcaaggcccgggacctgcggggcaagaagaaggaggagctgctgaagcagctggatgacctgaaggtggagctgagccagctgcgggtggccaaggtgactggaggagctgccagcaagctgagcaagatccgggtggtgaggaagagcatcgcccgggtgctgaccgtcatcaaccagacccagaaggagaacctgaggaagttctacaaggctgctgctgggggcccctgcatccagatggacagagtgctgccccagcccccagcctgcagctgctag

SEQ ID NO: 171065 - DNA, 372 bp, Artificial Sequence
  derived and/or modified sequence
atggccaagatcaaggcccgggacctgcggggcaagaagaaggaggaactgctgaaacagctcgacgaccttaaggtggagctgagccagctgcgcgttgccaaagtgaccggtggagcggcctcaaaactcagtaaaattcgggtggttcgcaaaagtatcgcgcgcgtgctgacagttatcaatcagacccagaaggaaaatctcagaaagttttacaaaggtaagaagtacaagccgctggatctgcggcctaagaagaccagggccatgcgacggcgccttaacaaacatgaggagaatctcaagaccaagaagcaacagcgcaaggaacgcctctatccgcttaggaaatatgctgttaaggcctag

SEQ ID NO: 171066 - DNA, 291 bp, Artificial Sequence
  derived and/or modified sequence
tgagccaagatcaaggcccgggacctgcggggcaagaagaaggaggaactgttaaaacaattggatgatctgaaagtagaactgtcacaactgcgcgtggccaaagtcactggcggggctgcttccaaactcagcaagatccgagtcgtaagaaagagcattgcaagagtgttaactgttataaaccagacacagaaggagaacctgagaaagttctacaaagccgcggcaggaggcccttgcatccaaatggacagagtattaccacagccccccgcttgctcatgttag

SEQ ID NO: 171067 - DNA, 372 bp, Artificial Sequence
  derived and/or modified sequence
atggctaaaatcaaagccagagatctacgcggtaaaaagaaagaggagcttttaaaacagttagatgacctcaaggtggaattaagccagctcagggtggcgaaggtgactggaggagcagcatccaagctctccaagataagggtggtaaggaaatccatcgctcgtgtgctgacagtcatcaaccaaacccaaaaggagaatctccgcaaattctacaagggaaagaagtacaagcctctcgacctgagacctaagaagaccagagcaatgaggagaagactgaacaagcacgaagagaatcttaagacaaagaagcagcagcggaaggagcgtttatatccactgcgcaagtacgccgtgaaggcctag

SEQ ID NO: 171068 - DNA, 291 bp, Artificial Sequence
  derived and/or modified sequence
tgagctaaaatcaaagccagagatcttcggggaaagaaaaaggaggagctgctcaagcaactcgatgacttaaaagtcgagttatctcagctgcgggtcgccaaagtgacagggggagccgcaagcaagctatctaagatcagggtggtgcggaagtcaattgctagggttcttaccgtgattaaccaaacccaaaaagagaatctcaggaagttttataaagctgccgctggcggtccatgcatccaaatggatcgagtgctcccgcagcccccagcatgctcttgctag

SEQ ID NO: 171069 - protein, 392 aa, Artificial Sequence
  derived and/or modified sequence
MELKVWVDGVQRIVCGVTEVTTCQEVVIALAQAIGRTGRYTLIEKWRDTERHLAPHENPIISLNKWGQYASDVQLILRRTGPSLSERPTSDSVARIPERTLYRQSLPPLAKLRPQIDKSIKRREPKRKSLTFTGGAKGLMDIFGKGKETEFKQKVLNNCKTTADELKKLIRLQTEKLQSIEKQLESNEIEIRFWEQKYNSNLEEEIVRLEQKIKRNDVEIEEEEFWENELQIEQENEKQLKDQLQEIRQKITECENKLKDYLAQIRTMESGLEAEKLQREVQEAQVNEEEVKGKIGKVKGEIDIQGQQSLRLENGIKAVERSLGQATKRLQDKEQELEQLTKELRQVNLQQFIQQTGTKVTVLPAEPIEIEASHADIERGIIILSDKQECKD

SEQ ID NO: 171070 - protein, 91 aa, Artificial Sequence
  derived and/or modified sequence
MELKVWVDGVQRIVCGVTEVTTCQEVVIALAQAIGRTGRYTLIEKWRDTERHLAPHENPIISLNKWGQYASDVQLILRRTGPSLSERPTSD

SEQ ID NO: 171071 - protein, 208 aa, Artificial Sequence
  derived and/or modified sequence
MELKVWVDGVQRIVCGVTEVTTCQEVVIALAQAIGRTGRYTLIEKWRDTERHLAPHENPIISLNKWGQYASDVQLILRRTGPSLSERPTSDSVARIPERTLYRQSLPPLAKLRPQIDKSIKRREPKRKSLTFTGGAKGLMDIFGKGKETEFKQKVLNNCKTTADELKKLIRLQTEKLQSIEKQLESNEIEIRFWEQKYNSNLEEEIVR

SEQ ID NO: 171072 - protein, 109 aa, Artificial Sequence
  derived and/or modified sequence
MELKVWVDGVQRIVCGVTEVTTCQEVVIALAQAIGRTGRYTLIEKWRDTERHLAPHENPIISLNKWGQYASDVQLILRRTGPSLSERPTSDSVARIPERTLYRQSLPLS

SEQ ID NO: 171073 - protein, 219 aa, Artificial Sequence
  derived and/or modified sequence
MELKVWVDGVQRIVCGVTEVTTCQEVVIALAQAIGRTGRYTLIEKWRDTERHLAPHENPIISLNKWGQYASDVQLILRRTGPSLSERPTSDSVARIPERTLYRQSLPPLAKLRPQIDKSIKRREPKRKSLTFTGGAKGLMDIFGKGKETEFKQKVLNNCKTTADELKKLIRLQTEKLQSIEKQLESNEIEIRFWEQKYNSNLEEEIVRLEQKIKRNDVE

SEQ ID NO: 171074 - protein, 122 aa, Artificial Sequence
  derived and/or modified sequence
MELKVWVDGVQRIVCGVTEVTTCQEVVIALAQAIGRTGRYTLIEKWRDTERHLAPHENPIISLNKWGQYASDVQLILRRTGPSLSERPTSDSVARIPERTLYRQSLPPLAKLRPQIDKSIKR

SEQ ID NO: 171075 - protein, 159 aa, Artificial Sequence
  derived and/or modified sequence
MELKVWVDGVQRIVCGVTEVTTCQEVVIALAQAIGRTGRYTLIEKWRDTERHLAPHENPIISLNKWGQYASDVQLILRRTGPSLSERPTSDSVARIPERTLYRQSLPPLAKLRPQIDKSIKRREPKRKSLTFTGGAKGLMDIFGKGKETEFKQKVLNNC

SEQ ID NO: 171076 - DNA, 1179 bp, Artificial Sequence
  derived and/or modified sequence
atggagctgaaggtgtgggtggacggcgtgcagagaatcgtgtgcggcgtgaccgaggtgaccacctgccaggaggtggtgatcgccctggcccaggccatcggcagaaccggcagatacaccctgatcgagaagtggagagacaccgagagacacctggccccccacgagaaccccatcatcagcctgaacaagtggggccagtacgccagcgacgtgcagctgatcctgagaagaaccggccccagcctgagcgagagacccaccagcgacagcgtggccagaatccccgagagaaccctgtacagacagagcctgccccccctggccaagctgagaccccagatcgacaagagcatcaagagaagagagcccaagagaaagagcctgaccttcaccggcggcgccaagggcctgatggacatcttcggcaagggcaaggagaccgagttcaagcagaaggtgctgaacaactgcaagaccaccgccgacgagctgaagaagctgatcagactgcagaccgagaagctgcagagcatcgagaagcagctggagagcaacgagatcgagatcagattctgggagcagaagtacaacagcaacctggaggaggagatcgtgagactggagcagaagatcaagagaaacgacgtggagatcgaggaggaggagttctgggagaacgagctgcagatcgagcaggagaacgagaagcagctgaaggaccagctgcaggagatcagacagaagatcaccgagtgcgagaacaagctgaaggactacctggcccagatcagaaccatggagagcggcctggaggccgagaagctgcagagagaggtgcaggaggcccaggtgaacgaggaggaggtgaagggcaagatcggcaaggtgaagggcgagatcgacatccagggccagcagagcctgagactggagaacggcatcaaggccgtggagagaagcctgggccaggccaccaagagactgcaggacaaggagcaggagctggagcagctgaccaaggagctgagacaggtgaacctgcagcagttcatccagcagaccggcaccaaggtgaccgtgctgcccgccgagcccatcgagatcgaggccagccacgccgacatcgagagaggcatcatcatcctgagcgacaagcaggagtgcaaggactag

SEQ ID NO: 171077 - DNA, 276 bp, Artificial Sequence
  derived and/or modified sequence
atggagctgaaggtgtgggtggacggcgtgcagagaatcgtgtgcggcgtgaccgaggtgaccacctgccaggaggtggtgatcgccctggcccaggccatcggcagaaccggcagatacaccctgatcgagaagtggagagacaccgagagacacctggccccccacgagaaccccatcatcagcctgaacaagtggggccagtacgccagcgacgtgcagctgatcctgagaagaaccggccccagcctgagcgagagacccaccagcgactag

SEQ ID NO: 171078 - DNA, 90 bp, Artificial Sequence
  derived and/or modified sequence
atggagctgaaggtgtgggtggacggcgtgcagagaatcgtgtgcggcgtgaccgaggtgaccacctgccaggaggtggtgatcgcctag

SEQ ID NO: 171079 - DNA, 627 bp, Artificial Sequence
  derived and/or modified sequence
atggagctgaaggtgtgggtggacggcgtgcagagaatcgtgtgcggcgtgaccgaggtgaccacctgccaggaggtggtgatcgccctggcccaggccatcggcagaaccggcagatacaccctgatcgagaagtggagagacaccgagagacacctggccccccacgagaaccccatcatcagcctgaacaagtggggccagtacgccagcgacgtgcagctgatcctgagaagaaccggccccagcctgagcgagagacccaccagcgacagcgtggccagaatccccgagagaaccctgtacagacagagcctgccccccctggccaagctgagaccccagatcgacaagagcatcaagagaagagagcccaagagaaagagcctgaccttcaccggcggcgccaagggcctgatggacatcttcggcaagggcaaggagaccgagttcaagcagaaggtgctgaacaactgcaagaccaccgccgacgagctgaagaagctgatcagactgcagaccgagaagctgcagagcatcgagaagcagctggagagcaacgagatcgagatcagattctgggagcagaagtacaacagcaacctggaggaggagatcgtgagatag

SEQ ID NO: 171080 - DNA, 330 bp, Artificial Sequence
  derived and/or modified sequence
atggagctgaaggtgtgggtggacggcgtgcagagaatcgtgtgcggcgtgaccgaggtgaccacctgccaggaggtggtgatcgccctggcccaggccatcggcagaaccggcagatacaccctgatcgagaagtggagagacaccgagagacacctggccccccacgagaaccccatcatcagcctgaacaagtggggccagtacgccagcgacgtgcagctgatcctgagaagaaccggccccagcctgagcgagagacccaccagcgacagcgtggccagaatccccgagagaaccctgtacagacagagcctgcccctgagctag

SEQ ID NO: 171081 - DNA, 660 bp, Artificial Sequence
  derived and/or modified sequence
atggagctgaaggtgtgggtggacggcgtgcagagaatcgtgtgcggcgtgaccgaggtgaccacctgccaggaggtggtgatcgccctggcccaggccatcggcagaaccggcagatacaccctgatcgagaagtggagagacaccgagagacacctggccccccacgagaaccccatcatcagcctgaacaagtggggccagtacgccagcgacgtgcagctgatcctgagaagaaccggccccagcctgagcgagagacccaccagcgacagcgtggccagaatccccgagagaaccctgtacagacagagcctgccccccctggccaagctgagaccccagatcgacaagagcatcaagagaagagagcccaagagaaagagcctgaccttcaccggcggcgccaagggcctgatggacatcttcggcaagggcaaggagaccgagttcaagcagaaggtgctgaacaactgcaagaccaccgccgacgagctgaagaagctgatcagactgcagaccgagaagctgcagagcatcgagaagcagctggagagcaacgagatcgagatcagattctgggagcagaagtacaacagcaacctggaggaggagatcgtgagactggagcagaagatcaagagaaacgacgtggagtag

SEQ ID NO: 171082 - DNA, 369 bp, Artificial Sequence
  derived and/or modified sequence
atggagctgaaggtgtgggtggacggcgtgcagagaatcgtgtgcggcgtgaccgaggtgaccacctgccaggaggtggtgatcgccctggcccaggccatcggcagaaccggcagatacaccctgatcgagaagtggagagacaccgagagacacctggccccccacgagaaccccatcatcagcctgaacaagtggggccagtacgccagcgacgtgcagctgatcctgagaagaaccggccccagcctgagcgagagacccaccagcgacagcgtggccagaatccccgagagaaccctgtacagacagagcctgccccccctggccaagctgagaccccagatcgacaagagcatcaagagatag

SEQ ID NO: 171083 - DNA, 480 bp, Artificial Sequence
  derived and/or modified sequence
atggagctgaaggtgtgggtggacggcgtgcagagaatcgtgtgcggcgtgaccgaggtgaccacctgccaggaggtggtgatcgccctggcccaggccatcggcagaaccggcagatacaccctgatcgagaagtggagagacaccgagagacacctggccccccacgagaaccccatcatcagcctgaacaagtggggccagtacgccagcgacgtgcagctgatcctgagaagaaccggccccagcctgagcgagagacccaccagcgacagcgtggccagaatccccgagagaaccctgtacagacagagcctgccccccctggccaagctgagaccccagatcgacaagagcatcaagagaagagagcccaagagaaagagcctgaccttcaccggcggcgccaagggcctgatggacatcttcggcaagggcaaggagaccgagttcaagcagaaggtgctgaacaactgctag

SEQ ID NO: 171084 - DNA, 1179 bp, Artificial Sequence
  derived and/or modified sequence
atggagctcaaagtttgggtggacggtgtgcagcgaatcgtgtgtggtgtaaccgaagttaccacatgtcaggaagtggtaatagccttggcccaagctatcggccgaactgggcgctacactctgattgagaaatggagggacacagagcgccacctcgcgccccatgaaaatcctatcatcagccttaataagtggggacagtacgccagcgatgtccagttgattctgcggcggactggcccaagcttgtctgagcgccccaccagcgattctgtggcacggattccagagaggactctgtatcggcagagcctgccgccactggccaaacttaggccacaaatcgataagtccattaagaggagagaacccaagcggaagtcactgacattcacaggaggcgctaaaggccttatggatatctttgggaaaggcaaggagacagaatttaagcaaaaggtgctcaataactgtaaaaccaccgccgacgagctcaaaaaactcattcggttgcagaccgagaagctccaatcgatcgaaaagcagttggagtctaacgaaatagagattcggttctgggaacagaagtataacagcaatctggaagaagagatagtgcggctggaacagaagatcaaacgtaacgacgtcgaaatcgaagaggaggaattttgggagaacgagttacagatagagcaggagaatgagaaacagctcaaagatcaactccaagagatccgccagaaaataacagagtgtgagaataaacttaaagactacctcgcccagatcaggactatggagtccggcctcgaggcagaaaagctgcagagggaggtgcaagaagcccaagtgaacgaggaggaggtgaagggtaagataggtaaggtcaagggggagatagatatccagggacagcagagcttacgtctcgagaatggcatcaaggctgtcgagcgaagcctggggcaagcaaccaagaggctgcaggacaaggaacaggagcttgagcagctgacaaaagaactcagacaggtcaatctgcagcaatttatccagcaaacaggcaccaaggtaactgtgctgccggcagagcccatcgaaatcgaggcctctcatgcagatattgagagaggcatcattattctttcagacaagcaggagtgcaaggattag

SEQ ID NO: 171085 - DNA, 276 bp, Artificial Sequence
  derived and/or modified sequence
atggaactcaaagtgtgggtcgatggagtgcagcggatagtttgcggcgttacagaagtgacaacgtgtcaagaggtggtgatcgccttggcacaagcaataggcagaacagggcggtatactcttatcgagaagtggcgcgataccgaacgtcatttagcaccacacgaaaatcccatcatatccctcaacaagtgggggcaatatgctagtgacgttcaattgattttgagaagaaccgggcccagcctctctgaaaggccaacgagtgactag

SEQ ID NO: 171086 - DNA, 90 bp, Artificial Sequence
  derived and/or modified sequence
atggagctgaaggtatgggtggacggggttcagaggatcgtgtgtggggtgacagaggtaacaacttgccaggaagtcgttattgcttag

SEQ ID NO: 171087 - DNA, 627 bp, Artificial Sequence
  derived and/or modified sequence
atggaattgaaggtatgggtcgacggagttcagcgaatagtgtgtggcgtgaccgaagtcacaacttgccaggaggtagtgatcgccctggcccaagctattggccggacaggaaggtacacattaatagagaagtggcgcgatactgaacgccatctcgctccccacgagaacccaatcatttctcttaacaagtggggccaatacgccagtgatgtccagctgatattacgacgtactgggcctagtctctctgagagacctacaagcgatagtgtggccaggataccagagaggactctttatcggcagagtcttccccctctggcaaagctgaggccccagatcgacaagtcaataaagcgcagggagccaaagcggaaatccctgacattcactggcggcgccaagggcctgatggatatttttggaaagggcaaagaaacggagttcaagcagaaagtcctgaacaattgcaaaacgaccgccgatgaactcaaaaaactgattcggctccagacagaaaagctccaatcgatcgaaaagcagctggagtccaacgaaattgaaatcaggttctgggaacaaaagtacaacagcaacctggaggaggagattgtccggtag

SEQ ID NO: 171088 - DNA, 330 bp, Artificial Sequence
  derived and/or modified sequence
atggagctcaaggtctgggtcgacggcgttcagagaatcgtttgcggagtaactgaggtgaccacatgccaggaggtcgtaattgccctcgcacaggccataggccgcaccgggcgatatactctgattgaaaagtggagagacacagagagacatctggcaccgcatgagaatccaattatcagccttaacaaatggggacagtatgcctcagacgttcagctgattcttcgccgcaccggcccaagccttagcgagaggccaacgagcgattccgtagcccgcatcccggaacgcaccttataccggcagtctctacctctgagttag

SEQ ID NO: 171089 - DNA, 660 bp, Artificial Sequence
  derived and/or modified sequence
atggagctcaaggtgtgggtggacggggttcagcggatcgtatgcggcgttacagaagtgaccacatgccaggaggtggtcatagccttggcccaggccatcggcagaacaggccgatacaccctgatagaaaaatggcgcgacactgagcggcatttggcaccgcatgagaaccccatcatttcacttaataaatggggccaatacgcgtccgatgtgcagctcattttgagacggacgggcccatccctctccgaacgacctacttcagactctgtggctagaatccctgaaagaactctgtaccgacagtctctgcctcctcttgctaaactgaggccgcagatcgacaagtcaatcaagaggcgcgagcccaaacgcaagagcttgacttttaccggcggagctaaggggctgatggatatttttgggaaaggcaaagaaacggaatttaaacagaaggtgctcaataactgtaaaacgactgccgatgaactgaagaagctgatccgtttacagacagagaaattgcagtcaattgagaagcagttggaaagcaatgaaatagagatcaggttttgggagcagaaatataactctaacttggaggaagagattgtacggctcgagcagaaaatcaagagaaatgatgtggagtag

SEQ ID NO: 171090 - DNA, 369 bp, Artificial Sequence
  derived and/or modified sequence
atggagctcaaggtctgggtcgacggcgtccagaggattgtatgtggagtgacggaggtaaccacctgtcaggaagttgttatcgctttggcacaggctattggaaggactggtagatacaccttaattgagaagtggcgggataccgaaagacatttagcaccgcatgagaaccccatcatatctctgaataaatggggacagtacgcctcagatgtgcagctgattctccgccgtactggcccttccctctcggagcgcccaacctccgattccgtggcccgcattcccgagagaacactgtacaggcagagcctccccccactggccaaactgaggccacagattgataagagcattaaacgatag

SEQ ID NO: 171091 - DNA, 480 bp, Artificial Sequence
  derived and/or modified sequence
atggagctgaaagtttgggtcgatggtgttcaacggattgtgtgcggggtaactgaggtgacaacttgccaggaagtagtgatcgcattggctcaggctattggtcgtacaggccgttatacccttatcgagaaatggcgggacacagaaagacacctcgcccctcacgaaaatccaataattagcctcaataaatggggccaatatgcatccgacgtgcagctgatactccggagaaccgggcctagtctgtccgaacgcccaaccagcgattctgtggccaggatccctgaaagaacattgtaccgccagagtctgccaccactggccaagctgaggcctcagatcgacaaatccatcaaacggcgggagccgaagaggaaatccttgaccttcacgggcggagccaaaggattaatggacattttcggtaagggcaaggaaacggaatttaaacagaaggtgctgaataattgttag

SEQ ID NO: 171092 - DNA, 1179 bp, Artificial Sequence
  derived and/or modified sequence
atggagctgaaggtgtgggtggatggagtgcagagaattgtgtgtggggtgacagaggtgaccacctgccaggaggtggtgattgccctggcccaggccatcggccgcacaggccgctacaccctgattgagaagtggagggacacagagcggcacctggcccctcatgagaaccccatcatcagcctgaacaagtggggccagtatgccagtgatgtgcagctgatcctgcggaggacaggccccagcctgtctgagcggcccaccagtgacagcgtggcccgcatccctgagaggaccctgtaccggcagagcctgccccccctggccaagctgcggccccagattgacaagagcatcaagaggcgggagcccaagaggaagagcctgaccttcaccggcggggccaagggcctgatggacatctttgggaagggcaaggagacagagttcaagcagaaggtgctgaacaactgcaagaccacagcagatgagctgaagaagctgatccggctgcagacagagaagctgcagagcattgagaagcagctggagagcaatgaaattgagatccgcttctgggagcagaagtacaacagcaacctggaggaggagatcgtgcggctggagcagaagatcaagagaaatgatgtggagattgaggaggaggagttctgggagaatgagctgcagatcgagcaggagaatgagaagcagctgaaggaccagctgcaggagatccggcagaagatcacagaatgtgagaacaagctgaaggactacctggcccagatccgcaccatggagagcggcctggaggccgagaagctgcagcgggaggtgcaggaggcccaggtgaatgaggaggaggtgaagggcaagattggcaaggtgaagggggagattgacatccagggccagcagagcctgcggctggagaatggcatcaaggctgtggagaggagcctgggccaggccaccaagaggctgcaggacaaggagcaggagctggagcagctgaccaaggagctgcggcaggtgaacctgcagcagttcatccagcagacaggcaccaaggtgacagtgctgcctgctgagcccatcgagattgaggccagccatgctgacatcgagcggggcatcatcatcctgagtgacaagcaggagtgcaaggactag

SEQ ID NO: 171093 - DNA, 276 bp, Artificial Sequence
  derived and/or modified sequence
atggagctgaaggtgtgggtggatggagtgcagagaattgtgtgtggggtgacagaggtgaccacctgccaggaggtggtgattgccctggcccaggccatcggccgcacaggccgctacaccctgattgagaagtggagggacacagagcggcacctggcccctcatgagaaccccatcatcagcctgaacaagtggggccagtatgccagtgatgtgcagctgatcctgcggaggacaggccccagcctgtctgagcggcccaccagtgactag

SEQ ID NO: 171094 - DNA, 90 bp, Artificial Sequence
  derived and/or modified sequence
atggagctgaaggtgtgggtggatggagtgcagagaattgtgtgtggggtgacagaggtgaccacctgccaggaggtggtgattgcctag

SEQ ID NO: 171095 - DNA, 627 bp, Artificial Sequence
  derived and/or modified sequence
atggagctgaaggtgtgggtggatggagtgcagagaattgtgtgtggggtgacagaggtgaccacctgccaggaggtggtgattgccctggcccaggccatcggccgcacaggccgctacaccctgattgagaagtggagggacacagagcggcacctggcccctcatgagaaccccatcatcagcctgaacaagtggggccagtatgccagtgatgtgcagctgatcctgcggaggacaggccccagcctgtctgagcggcccaccagtgacagcgtggcccgcatccctgagaggaccctgtaccggcagagcctgccccccctggccaagctgcggccccagattgacaagagcatcaagaggcgggagcccaagaggaagagcctgaccttcaccggcggggccaagggcctgatggacatctttgggaagggcaaggagacagagttcaagcagaaggtgctgaacaactgcaagaccacagcagatgagctgaagaagctgatccggctgcagacagagaagctgcagagcattgagaagcagctggagagcaatgaaattgagatccgcttctgggagcagaagtacaacagcaacctggaggaggagatcgtgaggtag

SEQ ID NO: 171096 - DNA, 330 bp, Artificial Sequence
  derived and/or modified sequence
atggagctgaaggtgtgggtggatggagtgcagagaattgtgtgtggggtgacagaggtgaccacctgccaggaggtggtgattgccctggcccaggccatcggccgcacaggccgctacaccctgattgagaagtggagggacacagagcggcacctggcccctcatgagaaccccatcatcagcctgaacaagtggggccagtatgccagtgatgtgcagctgatcctgcggaggacaggccccagcctgtctgagcggcccaccagtgacagcgtggcccgcatccctgagaggaccctgtaccggcagagcctgcccctgtcctag

SEQ ID NO: 171097 - DNA, 660 bp, Artificial Sequence
  derived and/or modified sequence
atggagctgaaggtgtgggtggatggagtgcagagaattgtgtgtggggtgacagaggtgaccacctgccaggaggtggtgattgccctggcccaggccatcggccgcacaggccgctacaccctgattgagaagtggagggacacagagcggcacctggcccctcatgagaaccccatcatcagcctgaacaagtggggccagtatgccagtgatgtgcagctgatcctgcggaggacaggccccagcctgtctgagcggcccaccagtgacagcgtggcccgcatccctgagaggaccctgtaccggcagagcctgccccccctggccaagctgcggccccagattgacaagagcatcaagaggcgggagcccaagaggaagagcctgaccttcaccggcggggccaagggcctgatggacatctttgggaagggcaaggagacagagttcaagcagaaggtgctgaacaactgcaagaccacagcagatgagctgaagaagctgatccggctgcagacagagaagctgcagagcattgagaagcagctggagagcaatgaaattgagatccgcttctgggagcagaagtacaacagcaacctggaggaggagatcgtgcggctggagcagaagatcaagagaaatgatgtggagtag

SEQ ID NO: 171098 - DNA, 369 bp, Artificial Sequence
  derived and/or modified sequence
atggagctgaaggtgtgggtggatggagtgcagagaattgtgtgtggggtgacagaggtgaccacctgccaggaggtggtgattgccctggcccaggccatcggccgcacaggccgctacaccctgattgagaagtggagggacacagagcggcacctggcccctcatgagaaccccatcatcagcctgaacaagtggggccagtatgccagtgatgtgcagctgatcctgcggaggacaggccccagcctgtctgagcggcccaccagtgacagcgtggcccgcatccctgagaggaccctgtaccggcagagcctgccccccctggccaagctgcggccccagattgacaagagcatcaagaggtag

SEQ ID NO: 171099 - DNA, 480 bp, Artificial Sequence
  derived and/or modified sequence
atggagctgaaggtgtgggtggatggagtgcagagaattgtgtgtggggtgacagaggtgaccacctgccaggaggtggtgattgccctggcccaggccatcggccgcacaggccgctacaccctgattgagaagtggagggacacagagcggcacctggcccctcatgagaaccccatcatcagcctgaacaagtggggccagtatgccagtgatgtgcagctgatcctgcggaggacaggccccagcctgtctgagcggcccaccagtgacagcgtggcccgcatccctgagaggaccctgtaccggcagagcctgccccccctggccaagctgcggccccagattgacaagagcatcaagaggcgggagcccaagaggaagagcctgaccttcaccggcggggccaagggcctgatggacatctttgggaagggcaaggagacagagttcaagcagaaggtgctgaacaactgctag

SEQ ID NO: 171100 - DNA, 1179 bp, Artificial Sequence
  derived and/or modified sequence
atggagctgaaggtgtgggtggacggcgtgcagcggatcgtgtgcggggtgacagaagttaccacctgtcaggaagttgtaatcgccttagcccaggccataggtcgcacaggccggtacacactgatcgagaagtggagggacacagagcgacatctcgcaccacacgagaatcctatcatctccctcaacaaatggggtcaatacgcctccgacgtgcagctgattctgagacggaccgggccgagcctgtctgagcgcccaacttcagattccgtggcgcggatacctgaaagaaccctttatagacagagtctcccgcctcttgccaaactaagacctcagattgacaagtccattaaacgccgagagcccaaaagaaagtccttaacattcactgggggtgccaagggtctaatggatatatttggcaagggaaaggagacagaattcaagcaaaaggtgctaaacaattgtaagactacagctgatgaactgaaaaagcttattaggctgcagaccgaaaaattacagtccattgagaagcaattggaaagtaatgagatcgaaattcgtttttgggagcagaagtacaactccaatctggaggaggagatcgttcggctggaacaaaagattaaaagaaacgatgttgagattgaggaagaggagttctgggaaaacgaactccagatcgagcaggagaacgaaaagcagctgaaagatcagctgcaggagatccgacagaaaatcactgaatgtgagaacaagctgaaggattacctggcacagattaggaccatggagagcgggcttgaagcagagaagctgcagcgcgaagtccaggaggcacaggtgaatgaagaggaggtcaaagggaaaatcggaaaggtgaaaggagaaatcgacatccagggccagcagagcttgcgccttgagaatggcattaaagccgtggagcgctctctcggtcaggcgacaaagaggttacaggataaagagcaagaactcgagcagttgactaaggagctgcgtcaggtaaacttacagcagttcatccagcagacaggcaccaaggtaacggtgctgcccgccgaaccgatcgagatagaagccagccacgccgatatcgagcggggaattatcatcttgagcgacaaacaggagtgtaaagattag

SEQ ID NO: 171101 - DNA, 276 bp, Artificial Sequence
  derived and/or modified sequence
atggagctgaaggtgtgggtggacggcgtgcagcggatcgtgtgcggcgttaccgaggttacgacctgtcaggaggtagtgatcgccctcgcccaggccattggcagaacaggccgttataccctcatcgaaaagtggcgtgacaccgagaggcatctcgccccacatgaaaacccaataatctccctgaacaaatggggacagtatgctagtgacgtgcagttaatccttcggagaaccgggcccagcctctcagagcggcccacaagtgactag

SEQ ID NO: 171102 - DNA, 90 bp, Artificial Sequence
  derived and/or modified sequence
atggagctgaaggtgtgggtggacggcgtgcagcggatcgtgtgcggcgtgacggaggtgacaacttgccaggaagttgtgattgcatag

SEQ ID NO: 171103 - DNA, 627 bp, Artificial Sequence
  derived and/or modified sequence
atggagctgaaggtgtgggtggacggcgtgcagcggatcgtgtgcggcgtgaccgaggtgaccacgtgccaggaggtggtgattgcgcttgcacaggccataggacgaaccggcagatatactctcattgagaaatggagggacacagagcgccatctagccccacatgaaaacccaatcatcagtcttaataaatgggggcagtacgccagcgacgtacagctgatcctgcggaggaccggcccgtctctttcagaacgtccaacgagtgatagcgtggcgcggatccccgaacggaccctgtaccgccaaagtctgccccctttggcaaagctcaggcctcagatcgacaagagcattaagaggcgtgagcccaagagaaaaagcttaacctttacaggaggagctaaaggcctgatggacatttttggtaaaggcaaggaaactgagtttaagcaaaaggtgcttaacaattgcaaaactactgctgacgaactgaaaaaactgattaggctacagaccgaaaagctgcaatccattgaaaagcagctcgagtcaaatgagatcgagattagattttgggaacagaagtataatagcaacttggaggaggagatcgtgagatag

SEQ ID NO: 171104 - DNA, 330 bp, Artificial Sequence
  derived and/or modified sequence
atggagctgaaggtgtgggtggacggcgtgcagcggatcgtgtgcggagtgacagaagtcactacttgtcaggaggttgtcatagctctagcacaggctatcgggcggacaggtcggtacacacttattgaaaaatggagggacactgaacggcacctggcaccacatgaaaacccgattattagccttaacaagtggggccaatatgccagcgatgtgcagctgatcctcagacgaacaggtccttccttgagtgaaagacctacctcagattccgttgctaggatcccggaacgaacactgtaccgtcagtcactgcccctctcatag

SEQ ID NO: 171105 - DNA, 660 bp, Artificial Sequence
  derived and/or modified sequence
atggagctgaaggtgtgggtggacggcgtgcagcggatcgtgtgcggagtcaccgaggtaactacctgccaagaggtcgtgatcgccctggctcaggctatcggtcgaactgggaggtacaccctgatcgaaaaatggcgggacacagagcgccaccttgcgccacatgaaaatccgataatctccttgaacaagtggggccagtatgcatccgacgtccagctcatcctaaggcgaaccggtcccagtctctctgaaaggccaacatctgacagcgtcgctcgcatccccgaaagaaccttgtatcgtcagagcctaccgcccctcgcgaaactgcggccgcagatcgacaagtccataaagcgacgcgaaccaaaaagaaaaagcctgacgttcaccgggggggcaaaagggctgatggacattttcggaaaaggaaaggaaaccgagttcaagcagaaggtactaaataattgtaaaactacagccgatgagcttaaaaaattaattcggctgcagacggagaagcttcagagcattgagaagcagctggaatccaatgagatagaaattagattttgggaacagaagtacaactctaacctggaagaagagattgtccggctggagcaaaaaatcaagcgcaatgatgtggagtag

SEQ ID NO: 171106 - DNA, 369 bp, Artificial Sequence
  derived and/or modified sequence
atggagctgaaggtgtgggtggacggcgtgcagcggatcgtgtgcggggtcaccgaagtgacgacctgccaggaggtggtgatcgctctagctcaggctatcgggaggacagggcgatataccctcattgaaaagtggcgcgacacggaaaggcacctcgcacctcacgagaacccgattatttcactgaataagtggggacagtacgcatcagatgtccagctgatcttacggaggactgggcctagcctctccgaaagaccaacgtctgactcagtcgctagaattccggagagaacactatacagacagtctctgccaccccttgctaagctgcgcccacagatcgataagagcattaagaggtag

SEQ ID NO: 171107 - DNA, 480 bp, Artificial Sequence
  derived and/or modified sequence
atggagctgaaggtgtgggtggacggcgtgcagcggatcgtgtgcggagtgaccgaggtcaccacctgtcaggaagtggtgatcgctctggcccaagcaattggtagaaccggccgatacaccctcatcgaaaagtggagggacaccgaaaggcacttagccccccatgaaaacccaattatctccctgaacaagtggggccagtacgccagtgatgtccaattaatcttgcgccgcactgggccttccttgagcgaacgcccaacgtcagactctgttgcacgcattcccgagcgcactctttacagacagagccttcctccactggcaaaactccggcctcaaattgacaaatctataaagcgccgggagcccaagagaaagtccctgaccttcactggaggtgctaagggtcttatggacatctttgggaagggaaaagaaaccgagttcaagcagaaagtgcttaataactgctag

SEQ ID NO: 171108 - DNA, 1179 bp, Artificial Sequence
  derived and/or modified sequence
atggagttgaaggtttgggtggatggggtacagaggatagtgtgcggtgtgaccgaagtaactacatgtcaggaggtggtcattgccctggcccaggcaattggcagaactgggcgatacacgctaatcgaaaagtggcgcgataccgaacggcacttggcccctcatgagaatcccatcattagcctgaacaaatggggccagtacgcgtccgatgtgcaacttattctccggcgaaccgggcctagcttgtcggaacggccaacatcagactcagtcgcccgtattcccgaacgcaccctgtacaggcagagcctgccacccctggcaaaacttcgcccacagatagacaaatctattaaacggagagagcccaagcgcaaaagtctcaccttcacaggcggagctaaaggtcttatggatatcttcggaaagggaaaggagactgaattcaagcagaaggttttgaacaattgtaagacaactgcagatgagctcaaaaagcttatacgtcttcagacggaaaaacttcagagcattgaaaaacaactggagagtaatgaaatcgaaatcagattttgggaacagaaatacaatagtaacctggaggaagaaatcgtacgtctggagcagaaaataaaaagaaacgatgttgagattgaagaagaagagttttgggaaaacgagctccagattgaacaagaaaatgagaagcagttgaaagatcagttgcaggaaatacgtcagaaaataaccgagtgtgagaataagctcaaagattacctggctcaaatcaggaccatggaaagcggactcgaagccgaaaaactgcagcgcgaagtgcaagaggctcaggttaacgaggaggaagtgaaaggcaaaatcggcaaagtgaaaggtgaaatagacattcaaggacagcagtctttaaggttagaaaacggtatcaaggccgtggaaaggagcctaggccaggcgacaaaacggttgcaagataaggagcaggaacttgagcagttaactaaggagctgcggcaggtgaacttacagcagtttatacaacaaaccggcacgaaagtgacagtactgcccgcagagcctatagagatcgaggcttctcatgccgacatcgaaaggggtatcattattttatccgacaaacaggaatgcaaggactag

SEQ ID NO: 171109 - DNA, 276 bp, Artificial Sequence
  derived and/or modified sequence
atggagctcaaagtgtgggtggacggggtgcagcgaatcgtctgcggcgtaactgaggtgaccacttgtcaggaggtggtgattgcccttgcacaggcgattgggagaactggtaggtatacattgatagagaagtggcgggacactgagaggcatctagctccccacgaaaaccccattatcagtctcaataaatggggacaatacgcatcagatgtgcagttaatactacggaggactggccctagcctatctgagcgcccaacgagcgactag

SEQ ID NO: 171110 - DNA, 90 bp, Artificial Sequence
  derived and/or modified sequence
atggagctgaaggtctgggttgacggagtccagaggattgtgtgcggtgtcacagaagttaccacctgtcaagaggtagtcatcgcttag

SEQ ID NO: 171111 - DNA, 627 bp, Artificial Sequence
  derived and/or modified sequence
atggagttgaaggtctgggtggacggcgttcagcgcatcgtgtgtggggttacggaggtaactacctgccaggaagtggtaatcgcattggcacaggctattggacggactggccgatacaccttaatcgagaagtggcgggataccgaaaggcacctcgcaccgcacgagaacccaattatctcactgaacaagtggggccaatatgccagtgatgttcagctcatcctgcgtaggaccgggccatctctcagcgaacgaccaaccagtgacagtgtggcaagaatcccagaacgcaccttgtatcggcagagcctgcccccacttgctaaactaagaccacagatcgataaatctattaagcggcgtgagcctaagcgcaagtctttaacattcacaggcggagctaagggtttgatggacatcttcgggaagggaaaggaaactgaatttaaacagaaggtactcaataactgtaaaactacagctgatgagttaaagaagttgatacggttgcagaccgagaaattgcaaagcatcgaaaaacaactcgaatccaacgagattgagatcaggttttgggagcagaagtataattcaaatctggaggaggagattgtgcgttag

SEQ ID NO: 171112 - DNA, 330 bp, Artificial Sequence
  derived and/or modified sequence
atggaacttaaagtgtgggtggatggcgtgcagagaatcgtgtgtggcgtgacagaggtcacaacttgccaggaggttgtcatcgcattagctcaggcaattggaagaactggcagatacacattgatagagaaatggagggacaccgaaaggcacttagcccctcacgagaaccctatcattagcctcaataaatggggacagtatgcgagtgatgtccagctgatactgcgtcgaacaggcccaagcttgtctgagcgccctacatcggactccgttgctagaatacctgaacggaccctctatagacaaagcctgcctctctcatag

SEQ ID NO: 171113 - DNA, 660 bp, Artificial Sequence
  derived and/or modified sequence
atggagctgaaggtatgggtcgatggcgtgcaaaggatcgtgtgcggcgtaactgaggttaccacctgtcaggaagtggtcatcgccctggcacaggccatcggacgcactggaagatatacgctgatcgaaaagtggagagacacggagaggcacctcgcaccgcatgaaaaccccatcattagcctgaataaatggggccagtatgcatctgacgtccagctaattctccggcgaaccggaccatctctgagtgaacgccctaccagcgattccgtggctagaatccctgaacgaacgctgtatcgccaatcactgccccctctggccaagctgaggccacagatcgacaaatccatcaaaagaagagagcccaagcgaaagagcctgacctttaccggaggcgctaaaggcctgatggacatatttgggaagggaaaagagacggagttcaaacagaaagtgctgaataactgcaaaaccacagccgacgagcttaagaagttaatcaggctccagactgagaaactgcagtcgatcgagaagcaacttgagtccaatgaaattgagataagattctgggaacagaagtataactcaaacctggaggaagagatcgtgcgacttgagcaaaaaatcaagagaaatgacgtagaatag

SEQ ID NO: 171114 - DNA, 369 bp, Artificial Sequence
  derived and/or modified sequence
atggaactgaaagtttgggtggatggcgtgcagcgcatcgtctgcggcgttaccgaagttacgacctgccaggaggtggtcattgccctggcccaagccattgggagaacaggaaggtatacccttatcgagaagtggcgagataccgaaaggcacctggcccctcacgaaaaccctattattagcctgaacaaatggggtcaatatgcttcagatgtgcagctgatactgcggaggacgggaccctctctgagcgagcgcccaacctcagatagcgtagccagaattccagagaggactctgtataggcaatctctgcccccactagccaaactaaggccccagattgataagtcaatcaaacgttag

SEQ ID NO: 171115 - DNA, 480 bp, Artificial Sequence
  derived and/or modified sequence
atggaattgaaagtctgggtggatggagttcagaggatcgtctgcggtgttactgaggtcaccacgtgccaagaagtcgtgattgccttggcccaggctataggccgaacaggcagatatactctcatcgaaaaatggcgcgacacagagcgtcatctggccccacatgaaaacccaattatctccctcaacaagtggggccagtatgcttcggatgtccagctgatcctccgcagaaccggtccatccctttctgaaagacctacgtcagactcggtagcccgtatccctgaaagaaccctgtaccggcagagcttaccaccactggccaagctgcgcccacagattgataagtctataaaacggagagagccaaagcggaagtctctgacttttactggaggggcaaagggcctgatggacatatttggtaaggggaaagagaccgagttcaagcagaaggtgttgaataactgctag

SEQ ID NO: 171116 - DNA, 2320 bp, Artificial Sequence
  derived and/or modified sequence
ggggagtgcggcgcggggacgggcgctgggcggccgcggagctccgggtgccgccgcgtccccagcgccccggccggcccctctgggcggcctgcgggggcggcgcagttgcgaaactgagtgcctgtgtagatcatcctagaatacctgtgtggtgctgtccttcctcaagactacctcattctcactggctcggagactcctgcctgctgagctgactacacagacttagtcttctccactccgtgttcctgcagctagagacatgacctaacaccctgatgaccactctcagggaccttgagtgactggccggtgcaccatggaacttaaagtatgggtggatggagttcagaggattgtttgtggagtcactgaagtcacaacttgccaggaggttgtcatagccttagctcaagcaataggtcgaactggaaggtacacccttatagagaaatggagagatactgaaagacacttagcacctcatgaaaatcctatcatatccttaaacaaatgggggcagtatgctagtgatgtgcagctcattctacgacgaactgggccgtctctcagtgagcgacccacttcagacagtgtggctcgaattcctgaaagaactttatacaggcagagtctgccccccttagctaaactgaggcctcagattgacaaatcaatcaaaaggagggaaccgaaaaggaaatcactgacatttacaggaggtgccaaaggattaatggacatttttggaaaaggtaaagaaactgagtttaagcaaaaggtgctgaataactgcaaaacaacagcagatgagttgaagaagctaatccgtctgcagacagagaagcttcaatccattgagaaacagctggaatctaatgaaatagaaataagattttgggagcaaaagtataattccaaccttgaagaggaaattgtccgtctagagcaaaagatcaaaagaaacgatgtagaaattgaggaggaagaattctgggaaaatgaattacagattgaacaggaaaatgaaaaacagctgaaggatcaacttcaagaaataagacagaaaataacagaatgtgaaaacaaattaaaggactatttggcacagatccggactatggaaagtggtcttgaagcagaaaaattgcaacgggaagttcaagaggcacaggtcaatgaggaagaggttaaaggaaagatcggtaaggtcaaaggggagattgacattcaaggccagcagagtctgaggttggaaaatggcatcaaagctgtggaaagatctcttggacaagccaccaaacgcttacaggacaaagaacaggaactggagcagttgactaaggagttgcggcaagtcaatctccagcagttcatccagcagacagggacaaaagttaccgttttgccagcggagcccattgaaatagaggcctcacatgcagacattgaaagggggatcatcattctttctgataagcaggagtgtaaagattagatatcacaccaaaagctcaggcaagaaaagcaaaaatgaacaagtgggactacattaaacccaaaactcctgcacaacaaaggaaacgatcaccaaaatgaaaaggtggactgtagattgggagaaaatatttgcaaaccgttatctggtaagggtttaatatccaaactatataaggaactcacagaacttaaagaaaacaaataatccaattaaaaatggtcaaaggggctgggcatggtggctcacgcctgtaatctcagcactttgggaggccgaggtgggagaatcacaaggtcaggagactgagaccatcctggctaacaccatgatgggctaacacccatctctactaaaaatatgaaacattagccaggtgtggtggcacgcgcctgtaatcccagctactcgggaggctgaggcagaaggattgtttgaacccgggaggtggaggttgcagtgagccgagatcgcattactgcactccagcctgggtaacagagtgagactccatctcaaaaaaaaaaaaaatagatatttttccaaagaagacataaaaacagccaacaggtatatgaaaaagtgctcaacatcactgatcagcagggaaatgcaaatcaaagccacaatgagataccacctcacacctgttaggttacatctgctattgtcaaaaagataagagatagcaagtgtcagcaagggtctggagaaaagggaatttttgtatactgttggtgggaatgtaaatcagtacagctattgtggaaaacagtgtagaggtttctcaaaaaattaaaactatcatacaacccagca

SEQ ID NO: 171117 - DNA, 523 bp, Artificial Sequence
  derived and/or modified sequence
gcggccgcggagctccgggtgccgccgcgtccccagcgccccggccggcccctctgggcggcctgcgggggcggcgcagttgcgaaactgagtgcctgtgtagatcatcctagaatacctgtgtggtgctgtccttcctcaagactacctcattctcactggctcggagactcctgcctgctgagctagagacatgacctaacaccctgatgaccactctcagggaccttgagtgactggccggtgcaccatggaacttaaagtatgggtggatggagttcagaggattgtttgtggagtcactgaagtcacaacttgccaggaggttgtcatagccttagctcaagcaataggtcgaactggaaggtacacccttatagagaaatggagagatactgaaagacacttagcacctcatgaaaatcctatcatatccttaaacaaatgggggcagtatgctagtgatgtgcagctcattctacgacgaactgggccgtctctcagtgagcgacccacttcagac

SEQ ID NO: 171118 - DNA, 587 bp, Artificial Sequence
  derived and/or modified sequence
agtctgaacgatgaccaatccaccacacgcacctacagtgtaggtcttccattttactctctagtctggttctggggctgggcatagaactgttggagttgatataaagatcagggttacagctcctagagtggagtattttgggctgagacgatggggttttccagatattggatcatgtcatctgcaaagaaagacaacttgacttcctctcctcccatttgactacactttatttctttctcttgcctgattgccctggcctgaatttccaatactatgttgaattaatgactcaatatatgactaaaagttcaaagtgaaacaatgataattcagataggaaaatatgtggcagtatgctaaagtctaaaaaggaatataaaacgtctgtgagatacctaacatcagatttatagaaacagaatagaatctagagacatgacctaacaccctgatgaccactctcagggaccttgagtgactggccggtgcaccatggaacttaaagtatgggtggatggagttcagaggattgtttgtggagtcactgaagtcacaacttgccaggaggttgtcatagcctt

SEQ ID NO: 171119 - DNA, 772 bp, Artificial Sequence
  derived and/or modified sequence
agtctgaacgatgaccaatccaccacacgcacctacagtctgactacacagacttagtcttctccactccgtgttcctgcagctagagacatgacctaacaccctgatgaccactctcagggaccttgagtgactggccggtgcaccatggaacttaaagtatgggtggatggagttcagaggattgtttgtggagtcactgaagtcacaacttgccaggaggttgtcatagccttagctcaagcaataggtcgaactggaaggtacacccttatagagaaatggagagatactgaaagacacttagcacctcatgaaaatcctatcatatccttaaacaaatgggggcagtatgctagtgatgtgcagctcattctacgacgaactgggccgtctctcagtgagcgacccacttcagacagtgtggctcgaattcctgaaagaactttatacaggcagagtctgccccccttagctaaactgaggcctcagattgacaaatcaatcaaaaggagggaaccgaaaaggaaatcactgacatttacaggaggtgccaaaggattaatggacatttttggaaaaggtaaagaaactgagtttaagcaaaaggtgctgaataactgcaaaacaacagcagatgagttgaagaagctaatccgtctgcagacagagaagcttcaatccattgagaaacagctggaatctaatgaaatagaaataagattttgggagcaaaagtataattccaaccttgaagaggaaattgtccgtc

SEQ ID NO: 171120 - DNA, 330 bp, Artificial Sequence
  derived and/or modified sequence
atggaacttaaagtatgggtggatggagttcagaggattgtttgtggagtcactgaagtcacaacttgccaggaggttgtcatagccttagctcaagcaataggtcgaactggaaggtacacccttatagagaaatggagagatactgaaagacacttagcacctcatgaaaatcctatcatatccttaaacaaatgggggcagtatgctagtgatgtgcagctcattctacgacgaactgggccgtctctcagtgagcgacccacttcagacagtgtggctcgaattcctgaaagaactttatacaggcagagtctgccccttagctaa

SEQ ID NO: 171121 - DNA, 853 bp, Artificial Sequence
  derived and/or modified sequence
tcactatcagcgaaccagaaagcaggctctcacccgacgctgagtctgacggtgacttgaccttggactttccagcttccagaaaactgactacacagacttagtcttctccactccgtgttcctgcagctagagacatgacctaacaccctgatgaccactctcagggaccttgagtgactggccggtgcaccatggaacttaaagtatgggtggatggagttcagaggattgtttgtggagtcactgaagtcacaacttgccaggaggttgtcatagccttagctcaagcaataggtcgaactggaaggtacacccttatagagaaatggagagatactgaaagacacttagcacctcatgaaaatcctatcatatccttaaacaaatgggggcagtatgctagtgatgtgcagctcattctacgacgaactgggccgtctctcagtgagcgacccacttcagacagtgtggctcgaattcctgaaagaactttatacaggcagagtctgccccccttagctaaactgaggcctcagattgacaaatcaatcaaaaggagggaaccgaaaaggaaatcactgacatttacaggaggtgccaaaggattaatggacatttttggaaaaggtaaagaaactgagtttaagcaaaaggtgctgaataactgcaaaacaacagcagatgagttgaagaagctaatccgtctgcagacagagaagcttcaatccattgagaaacagctggaatctaatgaaatagaaataagattttgggagcaaaagtataattccaaccttgaagaggaaattgtccgtctagagcaaaagatcaaaagaaacgatgtagaaat

SEQ ID NO: 171122 - DNA, 555 bp, Artificial Sequence
  derived and/or modified sequence
aaaccatatttcactgggagagcaaactgctagcatttatcatcccctccagctttaagttacagaggctaaactcctgctgactacacagacttagtcttctccactccgtgttcctgcagctagagacatgacctaacaccctgatgaccactctcagggaccttgagtgactggccggtgcaccatggaacttaaagtatgggtggatggagttcagaggattgtttgtggagtcactgaagtcacaacttgccaggaggttgtcatagccttagctcaagcaataggtcgaactggaaggtacacccttatagagaaatggagagatactgaaagacacttagcacctcatgaaaatcctatcatatccttaaacaaatgggggcagtatgctagtgatgtgcagctcattctacgacgaactgggccgtctctcagtgagcgacccacttcagacagtgtggctcgaattcctgaaagaactttatacaggcagagtctgccccccttagctaaactgaggcctcagattgacaaatcaatcaaaaggag

SEQ ID NO: 171123 - DNA, 577 bp, Artificial Sequence
  derived and/or modified sequence
gaacgatgaccaatccaccacacgcacctacagtctagagacatgacctaacaccctgatgaccactctcagggaccttgagtgactggccggtgcaccatggaacttaaagtatgggtggatggagttcagaggattgtttgtggagtcactgaagtcacaacttgccaggaggttgtcatagccttagctcaagcaataggtcgaactggaaggtacacccttatagagaaatggagagatactgaaagacacttagcacctcatgaaaatcctatcatatccttaaacaaatgggggcagtatgctagtgatgtgcagctcattctacgacgaactgggccgtctctcagtgagcgacccacttcagacagtgtggctcgaattcctgaaagaactttatacaggcagagtctgccccccttagctaaactgaggcctcagattgacaaatcaatcaaaaggagggaaccgaaaaggaaatcactgacatttacaggaggtgccaaaggattaatggacatttttggaaaaggtaaagaaactgagtttaagcaaaaggtgctgaataactgca

SEQ ID NO: 171124 - protein, 178 aa, Artificial Sequence
  derived and/or modified sequence
MSEVRLPPLRALDDFVLGSARLAAPDPCDPQRWCHRVINNLLYYQTNYLLCFGIGLALAGYVRPLHTLLSALVVAVALGVLVWAAETRAAVRRCRRSHPAACLAAVLAVGLLVLWVAGGACTFLFSIAGPVLLILVHASLRLRNLKNKIENKIESIGLKRTPMGLLLEALGQEQEAGS

SEQ ID NO: 171125 - DNA, 537 bp, Artificial Sequence
  derived and/or modified sequence
atgtcagaagtgcgactgccccctttacgggccttggacgactttgtcctcggtagcgcccgtcttgctgcccccgatccttgcgaccctcagcgttggtgtcacagggtgatcaataacctcttgtattatcagacaaactacctgctgtgtttcggtatagggctcgccctagcaggatacgtcagacctcttcataccttgttgtctgccctggtcgttgccgtggccctcggcgtgctggtgtgggccgccgagactcgcgccgccgtacgccgctgcaggagatcacaccccgccgcttgtctggctgcagttttagcagtcggtctgctggtcctgtgggtggctgggggggcgtgcaccttcctgttctctatcgccggtcccgtgctgctgatcttagtgcacgcctccctcagattgcggaatctcaagaacaagatcgaaaataagattgagagtatcgggttaaagcgtaccccaatgggactgctgctggaagcactgggccaggagcaggaggcagggtcctag

SEQ ID NO: 171126 - DNA, 537 bp, Artificial Sequence
  derived and/or modified sequence
atgtctgaggtgcggctgccccccctgcgggccctggatgactttgtgctgggcagcgcccggctggccgccccagacccctgtgacccccagcgctggtgccacagggtcatcaacaacctgctgtactaccagaccaactacctgctgtgcttcggcatcggcctggccctggccggctacgtgcggcccctgcacaccctgctgagcgccctggtggtggccgtggccctgggcgtgctggtgtgggccgctgagaccagggctgctgtgcggcgctgcagaagaagccaccctgctgcctgcctggccgctgtgctggccgtgggcctgctggtgctgtgggtggccggcggggcctgcaccttcctgttcagcattgctggccctgtgctgctgatcctggtgcacgccagcctgcggctgaggaacctgaagaacaagattgagaacaagattgagagcatcggcctgaagaggacccccatgggcctgctgctggaggccctgggccaggagcaggaggccggcagctag

SEQ ID NO: 171127 - DNA, 537 bp, Artificial Sequence
  derived and/or modified sequence
atgagcgaggtgcggctgccccccctgcgggccctggacgacttcgtcctgggatcagcccgccttgcagcccccgatccctgcgatccccagaggtggtgtcatcgagtgatcaataatctgctatattaccagaccaactaccttttgtgttttggtatcgggttagctctagcaggatatgtgaggcctctgcacactctcctgagtgcactggttgtcgcagtcgcgctgggggtgttggtctgggccgccgagactcgggcggctgtccgccgttgcaggcgttcccatcccgccgcctgtttggcggcagtactggctgtcgggctgctcgttctgtgggttgctggtggtgcctgtacattcctgtttagtatagctggacctgttttgctgattctggtacacgcgagccttcggcttcgcaatctgaagaacaaaattgaaaacaagatagagtccatcggtctgaaacgaacccctatggggctgctgcttgaggccttaggccaggaacaagaggcagggtcttag

SEQ ID NO: 171128 - DNA, 1332 bp, Artificial Sequence
  derived and/or modified sequence
tcccggtgtgccccgcggtggcgaggggcgtaacggttgttgtagtccggccccctcctggctggtccagccacattaaccggcaggatgtcggaggtgcggctgccaccgctacgcgccctggacgactttgttctggggtcggcgcgtctggcggctccggatccatgcgacccgcagcgatggtgccaccgcgtcatcaacaacctcctctactaccaaaccaactaccttctctgcttcggcatcggcctcgctctcgccgggtacgtgcggccacttcatacgctcctgagcgcgctggtagtggcggtggccctcggcgtgctggtgtgggcagctgagacccgcgcagctgtgcgccgctgccgccgcagccaccctgcagcctgcctggccgcagtgcttgccgtcggcctcctggtgctctgggtcgcgggcggcgcttgcaccttcctgttcagcatcgccgggccggtgcttctgatcctggtgcacgcctcgttgcgcctgcgcaaccttaagaacaagattgagaacaagatcgagagcattggtctcaagcggacgccaatgggcctgctactagaggcactgggacaagagcaggaggctggatcctaggcccctgggatctgtacccaggacctggagaataccaccccacccccagcccataattgggacccagagccctttcccagcacttaaaacaggagcctagagccccctgcccaaacaaaacaggacatctgtgaccgccctacccccacgccagccccaaactaagatatccctcacacccagcccccattacctagggacaagagtcttccccagccttgaacctaggaccaagagccacctacatccagccccaaaactggggcttcaggccagagcatccatggccaatttcaaattgtgaacccagagacactcccatccacccttctccatgctcatccccaaactggggcctggagcaaggcactctcaaatcttgaaccctggaccaaagcttttccagaccccaccctaccttccaacccaggtcaagacattgccaaatcttgaactcagaacccaagtgttccatgcccctgtgtggatggagtcgggtatcctgactgttggacccctggtccaggtgatcccgaccctcaccagtcccatttgcctccctccagctctgcttaggcattttgcccctcaccccaatgttccacaccatcgacaaccaaggggtgaggtggggacaggcctcagcagggaatggggcgtatatgttagtgttgctgcaacaataaagcctgttgcatctctcatgcc

SEQ ID NO: 171129 - DNA, 537 bp, Artificial Sequence
  derived and/or modified sequence
atgtccgaagtcagattgccccctctgagggctctggatgatttcgtacttggcagcgcacgtctggcagctcccgatccatgtgacccacagcggtggtgccaccgcgtgattaacaatctgctctattaccagaccaattatttgctctgcttcggcattggtctggcactcgccggatatgtaagacccctacacaccctcctcagcgctctggtagtcgcagtcgccctaggggtgctcgtgtgggccgctgaaacccgcgcagccgtacgccgttgtcgccgatcgcacccagccgcatgcctcgctgctgtcctggcagtcgggctcctggtgctctgggttgccggaggagcatgcacgttcctcttcagcatagccggaccagtgctcttgatccttgtccacgcttctctaagactgcgaaacctgaagaacaagatagagaacaagatcgagtctattggactcaaaaggacccctatgggtctgctgctggaggctctgggccaggaacaagaggcgggatcctag

SEQ ID NO: 171130 - DNA, 537 bp, Artificial Sequence
  derived and/or modified sequence
atgagcgaggtgagactgccccccctgagagccctggacgacttcgtgctgggcagcgccagactggccgcccccgacccctgcgacccccagagatggtgccacagagtgatcaacaacctgctgtactaccagaccaactacctgctgtgcttcggcatcggcctggccctggccggctacgtgagacccctgcacaccctgctgagcgccctggtggtggccgtggccctgggcgtgctggtgtgggccgccgagaccagagccgccgtgagaagatgcagaagaagccaccccgccgcctgcctggccgccgtgctggccgtgggcctgctggtgctgtgggtggccggcggcgcctgcaccttcctgttcagcatcgccggccccgtgctgctgatcctggtgcacgccagcctgagactgagaaacctgaagaacaagatcgagaacaagatcgagagcatcggcctgaagagaacccccatgggcctgctgctggaggccctgggccaggagcaggaggccggcagctag

SEQ ID NO: 171131 - protein, 760 aa, Artificial Sequence
  derived and/or modified sequence
MAGQQFQYDDSGNTFFYFLTSFVGLIVIPATYYLWPRDQNAEQIRLKNIRKVYGRCMWYRLRLLKPQPNIIPTVKKIVLLAGWALFLFLAYKVSKTDREYQEYNPYEVLNLDPGATVAEIKKQYRLLSLKYHPDKGGDEVMFMRIAKAYAALTDEESRKNWEEFGNPDGPQATSFGIALPAWIVDQKNSILVLLVYGLAFMVILPVVVGSWWYRSIRYSGDQILIRTTQIYTYFVYKTRNMDMKRLIMVLAGASEFDPQYNKDATSRPTDNILIPQLIREIGSINLKKNEPPLTCPYSLKARVLLLSHLARMKIPETLEEDQQFMLKKCPALLQEMVNVICQLIVMARNREEREFRAPTLASLENCMKLSQMAVQGLQQFKSPLLQLPHIEEDNLRRVSNHKKYKIKTIQDLVSLKESDRHTLLHFLEDEKYEEVMAVLGSFPYVTMDIKSQVLDDEDSNNITVGSLVTVLVKLTRQTMAEVFEKEQSICAAEEQPAEDGQGETNKNRTKGGWQQKSKGPKKTAKSKKKKPLKKKPTPVLLPQSKQQKQKQANGVVGNEAAVKEDEEEVSDKGSDSEEEETNRDSQSEKDDGSDRDSDREQDEKQNKDDEAEWQELQQSIQRKERALLETKSKITHPVYSLYFPEEKQEWWWLYIADRKEQTLISMPYHVCTLKDTEEVELKFPAPGKPGNYQYTVFLRSDSYMGLDQIKPLKLEVHEAKPVPENHPQWDTAIEGDEDQEDSEGFEDSFEEEEEEEEDDD

SEQ ID NO: 171132 - protein, 378 aa, Artificial Sequence
  derived and/or modified sequence
EHEREFRAPTLASLENCMKLSQMAVQGLQQFKSPLLQLPHIEEDNLRRVSNHKKYKIKTIQDLVSLKESDRHTLLHFLEDEKYEEVMAVLGSFPYVTMDIKSQVLDDEDSNNITVGSLVTVLVKLTRQTMAEVFEKEQSICAAEEQPAEDGQGETNKNRTKGGWQQKSKGPKKTAKSKKKKPLKKKPTPVLLPQSKQQKQKQANGVVGNEAAVKEDEEEVSDKGSDSEEEWQELQQSIQRKERALLETKSKITHPVYSLYFPEEKQEWWWLYIADRKEQTLISMPYHVCTLKDTEEVELKFPAPGKPGNYQYTVFLRSDSYMGLDQIKPLKLEVHEAKPVPENHPQWDTAIEGDEDQEDSEGFEDSFEEEEEEEEDDD

SEQ ID NO: 171133 - DNA, 2283 bp, Artificial Sequence
  derived and/or modified sequence
atggccggacagcagttccagtatgacgactcggggaacaccttcttctactttctgacctcgttcgtgggtctcattgtgatccccgccacatactacctctggccaagagaccaaaatgcagaacaaatcagattgaaaaatatcaggaaagtttatggtcggtgcatgtggtaccgtctcagacttctcaagccacagccaaacattatacccacagtgaagaaaatcgtcctccttgccggctgggccctgtttctcttcctggcgtataaggtatccaagacagacagggaataccaggaatacaacccgtacgaagtgctgaacctggaccccggcgcgacagtggcagaaattaagaagcagtatcgcctgctctcgttaaagtatcaccccgataagggaggtgacgaggtgatgttcatgcgcatcgcaaaagcttatgcggccctgaccgacgaagaaagccgaaaaaactgggaggagtttggcaatcccgatggcccacaggccacctcttttggaattgccctccctgcttggatcgttgatcaaaagaacagcatccttgtgctgctggtctacggcctggcatttatggtgatattacccgtggtggttggcagttggtggtacaggagcatccgttacagcggggaccaaatcttgatccgcacgacccagatctatacttattttgtttataagacacggaacatggacatgaagagactcatcatggttctggccggcgccagcgaattcgacccccaatataacaaggatgccacaagccgaccaacagacaatattctaattccgcagcttatcagagaaatcggctcaatcaacttgaaaaaaaacgagccccctttgacatgtccatatagtctgaaagccagggtgttgctgcttagtcacctcgcaaggatgaagatccctgaaacactggaagaggaccaacagtttatgctgaagaagtgtcccgccctgcttcaggagatggtcaacgtaatttgccagctcatcgtgatggccagaaacagagaggagagggaatttcgcgctccaaccctggcatctctggaaaattgcatgaagctcagccagatggctgtgcagggcctacagcagtttaagtcccccctgctacagctaccacatatcgaggaagacaacctgaggagggtctcaaaccacaagaaatataaaattaagaccattcaagatctggtgagtctaaaggagtccgaccggcatactcttctgcatttcctggaggatgagaaatacgaggaagtcatggctgtgcttggcagcttcccttatgtgacgatggatatcaagtcccaggtactcgacgatgaggactcaaataatatcacggtcggcagtctggtcactgtattggttaagctcacccgtcaaaccatggctgaagtgttcgaaaaggagcagtctatctgtgccgcggaggagcagcccgccgaagatggtcagggtgagaccaacaagaacagaactaagggcggatggcagcagaagtctaaagggcctaagaagacagcgaagtcaaagaagaaaaagcctctaaaaaaaaagcctaccccagttcttctgcctcagtcgaaacaacagaagcaaaagcaggcaaatggcgtcgtcgggaacgaggccgcggtcaaagaggatgaggaagaagtctctgataaaggatccgattcagaggaagaggaaacaaaccgggattcacagagtgaaaaggacgatgggagcgatcgggacagtgatcgggaacaggacgaaaaacaaaataaagacgatgaggccgagtggcaggagcttcagcagtcaatccagcggaaagagagggcgcttctcgaaaccaaatcaaaaatcacccaccctgtctacagtctctattttcctgaggagaagcaggagtggtggtggttgtacatagcagaccggaaggagcaaaccctcatctcgatgccgtatcacgtgtgcactctgaaagacactgaagaagtggaattaaaatttcccgcgcccggtaaacccggcaactaccagtatacagtcttccttcggtcagactcgtatatggggctcgaccagatcaagcccttgaaactcgaggtccatgaggcaaagcctgtaccggagaatcaccctcagtgggataccgcaatagaaggcgacgaagaccaggaagactccgagggtttcgaggactcctttgaagaggaggaggaagaagaggaggacgatgactag

SEQ ID NO: 171134 - DNA, 2283 bp, Artificial Sequence
  derived and/or modified sequence
atggccggccagcagttccagtatgatgattctggcaacaccttcttctacttcctgaccagctttgtgggcctcatcgtcatcccagccacctactacctgtggccccgggaccagaatgctgagcagatccggctgaagaacatcaggaaggtgtatggccgctgcatgtggtaccgcctgcggctgctgaagccccagcccaacatcatccccaccgtgaagaagatcgtgctgctggccggctgggccctcttcctgttcctggcctacaaggtgtccaagacagaccgggagtaccaggagtacaacccctatgaggtgctgaacctggaccccggggccaccgtggccgagatcaagaagcagtaccgcctgctgagcctgaagtaccacccagacaagggaggagatgaggtgatgttcatgagaattgccaaggcctatgctgccctgacagatgaggagagcaggaagaactgggaggagtttggaaatccagatggcccccaggccaccagctttggaattgccctgcctgcctggatcgtggaccagaagaacagcatcctggtgctgctggtgtatggcctggccttcatggtgatcctgcctgtggtggtgggctcctggtggtaccgcagcatccgctacagcggggaccagatcctgatccgcaccacccagatctacacctactttgtgtacaagaccaggaacatggacatgaagaggctcatcatggtgctggccggggccagcgagtttgacccccagtacaacaaggatgccaccagccggcccacagacaacatcctgatcccccagctgatccgggagatcggcagcatcaacctgaagaagaatgaaccacccctgacctgcccctacagcctgaaggcccgggtgctgctgctgagccacctggccaggatgaagatccctgagaccctggaggaggaccagcagttcatgctgaagaagtgcccagccctgctgcaggagatggtgaatgtcatctgccagctgattgtgatggccaggaaccgggaggagcgggagttccgggcccccaccctggccagcctggagaactgcatgaagctgagccagatggctgtgcagggcctgcagcagttcaagagccccctgctgcagctgccccacatcgaggaggacaacctgcggcgggtgagcaaccacaagaagtacaagatcaagaccatccaggacctggtgtccctgaaggagagtgacagacacaccctgctgcacttcctggaggatgagaagtatgaggaggtgatggctgtgctgggcagcttcccctacgtgaccatggacatcaagagccaggtgctggatgatgaggacagcaacaacatcaccgtgggcagcctggtgacagtgctggtgaagctgacccggcagaccatggccgaggtgtttgagaaggagcagagcatctgtgccgctgaggagcagcctgcagaagatggccagggcgagaccaacaagaacagaaccaagggcggctggcagcagaagagcaagggccccaagaagacagccaagagcaagaagaagaagcccctgaagaagaagcccacccctgtgctgctgccccagagcaagcagcagaagcagaagcaggccaatggagtggtgggcaatgaggccgctgtgaaggaggatgaggaggaggtgtctgacaagggcagtgacagcgaggaggaggagaccaacagagacagccagagcgagaaggatgatggcagtgaccgggacagcgaccgggagcaggatgagaagcagaacaaggatgatgaagctgagtggcaggagctgcagcagagcatccagaggaaggagcgggccctgctggagaccaagagcaagatcacccaccctgtgtacagcctgtacttccctgaggagaagcaggagtggtggtggctgtacatcgctgacaggaaggagcagaccctcatctccatgccctaccacgtgtgcaccctgaaggacacagaggaggtggagctgaagtttcctgcccctgggaagccaggcaactaccagtacacagtgttcctgcggagtgacagctacatgggcctggaccagatcaagcccctgaagctggaggtgcatgaggccaagcctgtgcctgagaaccacccccagtgggacacagccattgaaggagatgaggaccaggaggacagcgagggctttgaggacagctttgaggaggaggaggaggaggaggaggatgatgactag

SEQ ID NO: 171135 - DNA, 2283 bp, Artificial Sequence
  derived and/or modified sequence
atggccggccagcagttccagtacgacgacagcggcaacaccttcttttattttctaactagctttgtgggtttgatcgtgattccagctacatattatttgtggccaagggatcagaatgcggagcagattcgactcaaaaatattcgcaaagtgtacggtcggtgcatgtggtacaggctacggcttctaaaaccccagcctaacataattcccaccgttaagaagattgtgctcctggccgggtgggccctctttttgttccttgcttataaggtgagcaaaactgacagagagtaccaagagtacaacccgtacgaagtgctaaatctcgatcccggagctacagttgccgagattaagaagcaatatcgcctcctctcactcaagtaccatcctgataagggaggggatgaagtgatgtttatgaggatcgcgaaggcctacgcagccctgacagacgaggaaagtcgaaagaattgggaggagttcgggaaccccgacgggccacaggccaccagttttggtattgccctaccagcctggatagtcgatcagaaaaacagcatattggtactgttggtgtacggtctcgctttcatggtcattctgccagtggtggtaggctcttggtggtacaggtccatccggtactccggtgaccagattctcattcgtactacccagatctacacctattttgtttacaagactcgcaatatggatatgaaacggctcattatggtactggccggggccagtgaatttgatccacagtacaacaaggatgcaacctctcgaccaacagacaatatcctcatcccacagctgatccgcgagatcggcagtattaatctaaagaaaaatgaaccccccctgacgtgtccttattccctgaaggcccgggtattactgctgagccacctggcccggatgaaaatccccgagacgcttgaggaagaccagcagttcatgctgaagaagtgccctgcgttactccaagagatggttaacgtaatttgccagttgatcgtcatggccagaaaccgtgaggagcgggagttcagggcccccacactcgctagtctggagaattgtatgaaactgtcccagatggctgtgcagggattacaacaattcaagtcccccctcctacaactgccccatattgaggaggataacctacgcagagtatccaatcataagaagtataagattaaaactattcaagatcttgtgagtctcaaggagtccgatagacacactctgttacacttcctggaggatgaaaagtatgaagaagtcatggcagtgctcgggagttttccctacgtgacgatggacataaagagtcaggtgcttgatgatgaagattccaacaatatcacggttggaagcctagtcaccgttctggtcaagctgacccggcagactatggccgaggtgttcgagaaggagcagtctatttgtgcagcagaagaacagcccgccgaggatgggcaaggtgagacaaacaaaaatagaactaagggcggatggcagcagaagagtaaagggcctaaaaaaactgcaaaatccaaaaagaagaaacccctgaagaagaaacccacccctgttctgctcccacaatccaagcagcaaaagcagaaacaggccaatggcgtcgtgggcaacgaggccgctgtgaaagaagacgaggaggaggtcagcgataaaggcagtgacagtgaggaagaagagacaaatagggatagtcaaagtgagaaagacgatggtagcgatcgcgactccgatcgcgagcaggacgaaaaacagaacaaagatgacgaagccgagtggcaggagttacagcagtccatacagagaaaggaaagagcacttttagagaccaaatcaaagatcacccatcccgtgtactccttgtattttccagaggaaaaacaggagtggtggtggctatacatagcagaccgcaaagagcagactttaatctcaatgccataccacgtgtgtacacttaaagacacggaggaggtggagctcaaattcccagctccaggaaaaccggggaattaccagtataccgtgttcctgcggtctgattcctacatggggctggaccagattaagcctttgaagctggaagtgcacgaagctaagccggtccccgaaaaccatccccaatgggatacagccatagagggggacgaagaccaggaggattctgagggctttgaagactccttcgaggaagaggaagaggaagaagaggatgatgactag

SEQ ID NO: 171136 - DNA, 2283 bp, Artificial Sequence
  derived and/or modified sequence
atggccggtcaacagttccagtacgatgactccgggaacacctttttctatttcctgacatctttcgtcggcctgatcgtcattccagccacatattatctctggcctcgcgatcagaacgccgagcagatacggctgaagaacattcgcaaggtttatggacgatgcatgtggtatcgcctgcgattgttgaagcctcagcctaacattatccccacagtcaagaagatcgttctccttgctgggtgggcccttttcctttttctcgcatataaagtgagcaagaccgacagagagtaccaggagtataacccttacgaagtgctcaacttagatccgggtgccaccgtggctgaaatcaaaaaacagtatcgcttgcttagtctgaagtatcacccagataagggcggagacgaggtaatgtttatgcgaattgcaaaggcctacgccgcactcaccgacgaggaatctcgtaagaattgggaagagttcggcaatcctgatggtccccaggcaactagtttcgggattgctcttccggcttggatcgtggaccagaagaactctattttagtcctcctagtgtacgggctagctttcatggtgattcttccggtagtagtgggcagttggtggtatagatctatccggtactccggtgatcagatccttatcagaacgacccagatttacacctatttcgtttacaaaacccgcaacatggatatgaagcgcttaattatggtgctggccggagccagtgaatttgacccgcagtacaacaaggacgccacttcccgcccaacagacaatatcttgatccctcagctcattcgcgaaattggatcgattaacctgaagaagaatgagccccctctcacctgtccttattcattaaaagccagagttctgcttttgtctcacctggccaggatgaaaattcctgaaaccttagaggaagatcagcagttcatgcttaaaaaatgtcccgctctgctccaggaaatggtcaacgtgatctgccaactgattgtaatggccagaaatagggaggaacgggaattccgggcacctaccctagcctcattagaaaactgcatgaaactgtcccagatggctgtacagggccttcaacagttcaagtctcctttgctacagctgcctcatatcgaagaagataaccttaggagggtctccaatcataagaagtacaagataaaaaccattcaggatctcgtcagcttaaaggaaagtgaccggcacacccttctccactttctggaggacgagaagtatgaggaggtcatggctgttttaggatccttcccctatgttaccatggacatcaaatctcaggtcctggatgacgaagacagtaataacatcacggtgggcagtctggttacagtactcgtgaaactcacccggcagaccatggctgaggttttcgaaaaagagcagagtatttgcgcagctgaggagcagccagccgaagacgggcaaggagagactaataaaaatcgcaccaaagggggttggcaacagaagagcaagggtcctaagaaaactgctaaatcaaaaaaaaaaaaaccacttaagaagaagcctacccctgttctgctgccgcagagcaaacagcagaagcagaagcaagccaacggtgtagtggggaatgaagccgctgtcaaagaagacgaggaagaggtaagcgacaaaggttctgatagtgaggaggaagagacaaatcgcgactctcaatctgaaaaggatgacggttcggatagagattctgatcgggagcaggatgaaaaacagaacaaggatgacgaggccgagtggcaggagcttcagcagagcatccagcgtaaggaaagggcgcttttggaaaccaagtcaaaaatcacacacccagtatattctctgtatttccccgaagagaaacaggaatggtggtggctgtacatcgccgaccgaaaagagcaaactctgatctcaatgccctaccacgtatgtacactcaaggacacggaggaagtcgaactgaagtttccggcacccggaaagcctgggaattaccagtatacagtcttcctgcgctctgattcttatatgggactggatcaaatcaaaccattgaaactcgaagtgcatgaggccaagcccgttccggaaaaccacccccaatgggacactgccattgagggggacgaagaccaagaggattccgagggcttcgaagattccttcgaagaggaggaggaagaggaagaggatgatgattag

SEQ ID NO: 171137 - DNA, 6411 bp, Artificial Sequence
  derived and/or modified sequence
cggcggcggcagcggcagaggtggcggcggcgtgtccgtgagagtggcgtgggggcggggaggagaggcggcggcggcagtgtccaagctacgccactcgggccggggcgttgggagcgggagtgcagagcgtggtcgtggcggcggcggtgagaagagcgaggcggaggagggggtgccatggccgggcagcagttccagtacgatgacagtgggaacaccttcttctacttcctcacctccttcgtggggctcatcgtgatcccggcgacatactacctctggccccgagatcagaatgccgagcaaattcgattaaagaatatcagaaaagtatatggaaggtgtatgtggtatcgtttacggttattaaaaccccagccaaatattattcctacagtaaagaaaatagttctgcttgcaggatgggcattgttcttattccttgcatataaagtttccaaaacagaccgagaataccaagaatacaatccttatgaagtattaaatttggatcctggagccacagtagcagaaattaaaaaacaatatcgtttgctgtcacttaaatatcatccagataaaggaggtgatgaggttatgttcatgaggatagcaaaagcttatgctgctttaacggatgaagagtcccggaaaaattgggaagaatttggaaatccagatgggcctcaagccacaagctttggaattgccctgccagcttggatagttgaccagaaaaactcaattctggttttacttgtatatggattggcatttatggttatccttccagttgttgtgggctcttggtggtatcgctcaatacgctatagtggagaccagattctaatacgcacaacacagatttatacatactttgtttataaaacccgaaatatggatatgaaacgtcttatcatggttttggctggagcttctgaatttgatcctcagtataataaagatgccacaagcagaccaacggataatattctaataccacagctaatcagagaaattggcagcattaatttaaagaagaatgagcctccacttacctgcccatatagcctgaaggccagagttcttttactgtctcatcttgctagaatgaaaattcctgagacccttgaagaagatcagcaattcatgctaaaaaagtgtcctgccctacttcaagaaatggttaatgtaatctgccaactaatagtaatggcccggaaccgtgaagaaagggagtttcgtgctccaactttggcatccctagaaaactgcatgaagctttctcagatggccgttcagggacttcagcaatttaagtctccccttctgcagctccctcatattgaagaggacaatcttagacgggtttctaatcataagaagtataaaattaaaactatccaggatttggtgagtttaaaagaatcagatcgtcacactctactgcacttccttgaagatgaaaaatatgaagaggttatggctgtccttgggagttttccatatgtgaccatggatataaaatcacaggtgttagatgatgaagatagcaacaacatcacagtaggatccttagttacagtgttggttaagttgacaaggcaaacaatggctgaagtatttgaaaaggagcagtccatctgtgctgcagaggaacagccagcagaagatgggcagggtgaaactaacaagaacaggacaaaaggaggatggcaacagaagagtaaaggacccaagaaaactgctaaatcaaaaaaaaagaaacctttaaaaaaaaaacctacacctgtgctattaccacagtcaaagcaacagaaacaaaagcaggcaaatggagtcgttgggaatgaagctgcagtaaaggaagatgaagaagaagtttcagataagggcagtgattctgaagaagaagaaaccaatagagattcccaaagtgagaaagatgatggtagtgacagagactctgatagagagcaagatgaaaaacaaaacaaagatgatgaagcagagtggcaagaattacaacaaagcatacagcgaaaagagagagctctattggaaaccaaatcaaaaataacacatcctgtgtatagcctttactttcctgaggaaaaacaagaatggtggtggctttacattgcagataggaaggagcagacattaatatccatgccatatcatgtgtgtacgctgaaagatacagaggaggtagagctgaagtttcctgcaccaggcaagcctggaaattatcagtatactgtgtttctgagatcagactcctatatgggtttggatcagattaaaccattgaagttggaagttcatgaggctaagcctgtgccagaaaatcacccacagtgggatacagcaatagagggggatgaagaccaggaggacagtgagggctttgaagatagctttgaggaagaagaggaggaagaagaagatgatgactaagcagtactctgaatggaccacagtgtttgcacatatttgcaattttttgctgttttggaagtgtatcataaaccagaaacagtacagaactgatgttgagggaggtgtagtttttttactcttgaaatgggtgcataatataactaggcagtggcggtgccttggtacaacctgaaaaatgttaaggcttattgaaacctttcaagtaggggatggtacatttatttcatctgcaaatgataataaatcctttgttattataactgtccagaagtgtgggctatgtattatctgatcagtctatggtcccagtaaaagtaaagatgcaggaaacacagtctgtaaatgagcgacttttctttgttcagctttagttttagcaaacaccacaaatatgttttaagtaacatcgctcaagtttaagtaacatcgctcaagttgataatctcttgataagctctgttgttgacattttgcagtgatacaacagctccactcatagatttaaacttttatttttacttatcttggtcataagttggcattctctcacattccacatgatatagagggctacgttttggaattttccttttcttaattgcccagagttatcagacagattataaaaatggcttttaatggcttaaaccatttctaaacctctatcttagcagatcaatgcaggatctaattcttttgataagttctagctctaaaagtgatagtgggactgtatgttttctgatactggtggcttatgttattaaaccttttttaaaaaaggttcactctaaaagctgaactacatccttagttttcagtctacttgactctatcaggagctttttaaggaaagtaagtataacatgcaaaggaagctttttttgtattcattttggactcctgtcaataaaaatagaagtttgttgactcgttttatgtttcaatggtgtgtgtctttttactatcaggacataaatagggcaatccacttctttatttttcaactaaagattgaatagtattgtacattactgctaaagtgactgctatttctgtatactgtagaaaaacccaggagtgagagggatttcccctcatagtacaactggaaggatagtgcttgtaaagagtagagatgtgtacatgatgaatcattgagggagggtggatatttttattcctagatatggaggaaacataagtctgtagtattataaaactgattgtaataattctttcctatcaaaatctccataggtcaaaatattgttggaatactaaaatttgcaaccttgtttactttaaaaggttgccactttcagtgcagaatactaccggcatcttgttactgcaatagttggaaataaaatgtgaaaattagcaaaaccatgaatggtttttttggttctaaatttaagatgtaatatttcctataaaagggtgaaagcagtttctttctctataacctcaatcaccagtttagtgagagcctttcttggcaggcaggaggcagtgtcactgaggatttttttcatttacttcattgtacaagtaggagggtgggtttaattttcaaatcaggttctgctgtgaagcaccagtgtcttgaggcagctactgattacctaagtgtggtggcagggggtaagccagctggtgtcaagtgaaaggagggattagagaaaacaggtgtggcacgaaggcaaggaaactgagcagacaagacagaacaatgtgtagaatgcatatttcctagttttcttgaaagatttcaagaaaagttgtttttttttttctagtggctactttgccttaaagaggctttataagttcattcacacagctggcttctctggttttaagattctggagaggatgataacctagtaacaccacagtgcttaaaaaaaaaaaaaaaaaaaaaactaccatcaccagaaaattccaccagtttgttttccttttctctttgtgtgatgtgtatgtacttcccaactaagtaaaataaaatttcctctagtgagtgctttaggtaacctctttccatatggcagtagtgaaagaactgagccttcagttgatagttcttctctctccagcaagtcgctaaactccacatcccttcgtttttcctctggaatgagaataacaaactatcctagtttgcatttaatctaatggaaacttgagcaaagtttcaattttcttcctataaagaaactgacattttgtcaacaattgatgagcctatagatcatacagtgtataggaagtgaaattgaaacagttaaattatgtgatatttttctctaattggtaaagtacctattaaaatacagctgttcatgaggagacttaccacaattcaaagtgtagcagttgtgtattttagcattataatatttgattgaggccctgaggtgttaatatctcaatctcagagttagatgttcatgtcctttttgaattttttaaacatttttcataattttttttttaagttagggagcacattgagtgaagttctctgtgtagaacaataccttctgctctgcttctcccagctttcactgagggctggaaaaggacaggcctgtccagctgtactgtcccactgtgtatggggaagctcaggctctggtggaagcagggggcgtggatgtcaaacaactgatgtggaaacagggagggagagatataatgaggctctctaggcatgttatttttgaccacaagttttgttcagtttgcttcagccaatccaaaccatatactagagtgttctgtagtcacaattcttatttcaaatgtaattcagcaccttacataatttttgagaggttgtcattcatcacatatttactgagtttctatgtgccaggctctgtgactggatactggagctatcaaaatgaaaaaaatagtgttaagaactcactcgctggtgttagagcaggtagatgagtggcaatccatttaaatccatttgccttggctattatttggaatgcctttttttttttttagtctatctactgtaggcagaagaattatttctttaggggctagctgtttattttgctggcctttttttctctctttctctttttcttcttaagacggagtctcgctctgtcctccaggctggaggagtgcagtggcacgatctcagctcactgcaacctccgcctcccagcttcaagcgattcttctgcctcagcctcctgagtagctgggactgcaggtgcatgccaccacacccagctaattttttaatttttagtagagatgggattttgccacgttgtccagcctggtctcgaactcctggcctcaagtgatcagccctcctcagcctcccaaagtgctggcattacaggcatgagccactgcgcccagcctgttgggtttttttggaaaaaaaacaaaaacaacaaatcatcatcctttcctttaaaatgtttttttttttttaagaaacaattttcccacaaacggtctgatttaactccatgaaatcctctatttagactgccttaaagtgaaataactgttggtgaaccataacattttgccagctgtgtagtgattagtccaaatatgtctcaagaagttagcaccaagcattctcatccatttaaacttgatgctagggctattttgcaaaacttaaaaagatgcgatcttgtacatatttctgtaacctgagctgaaaacccaaataacaatcattgacatactttagggctattgtttcaggtgggggtgtatacatcccaggggcgtggagatgatcaatccattgaggaagtattaagatgattatttgtatttaatctcatccttttaaatttctatttttgtgtgttttataatgtacataatatattgtacaattgtacacttctattatttataaataaacatttattggtgcattaa

SEQ ID NO: 171138 - DNA, 1940 bp, Artificial Sequence
  derived and/or modified sequence
acgtctcccttagcgagctcgctggggacacgcagggggagggaaaactgagcggggcgggaactatctcctctcgcgagagctggcgacggcggcggcagcggcagaggtggcggcggcgtgtccgtgagagtggcgtgggggcggggaggagaggcggcggcggcagtgtccaagctacgccactcgggccggggcgttgggagcgggagtgcagagcgtggtcgtggcggcggcggtgagaagagcgaggcggaggagggggtgccatggccgggcagcagttccagtacgatgacagtgggaacaccttcttctacttcctcacctccttcgtggggctcatcgtgatcccggcgacatactacctctggccccgagatcagaatgccgagcaaattcgattaaagaatatcagaaaagtatatggaaggtgtatgtggtatcgtttacggttattaaaaccccagccaaatattattcctacagtaaagaaaatagttctgcttgcaggatgggcattgttcttattccttgcatataaagtttccaaaacagaccgagaataccaagaatacaatccttatgaagtattaaatttggatcctggagccacagtagcagaaattaaaaaacaatatcgtttgctgtcacttaaatatcatccagataaaggaggtgatgaggttatgttcatgaggatagcaaaagcttatgctgctttaacggatgaagagtcccggaaaaattgggaagaatttggaaatccagatgggcctcaagccacaagctttggaattgccctgccagcttggatagttgaccagaaaaactcaattctggttttacttgtatatggattggcatttatggttatccttccagttgttgtgggctcttggtggtatcgctcaatacgctatagtggagaccagattctaatacgcacaacacagatttatacatactttgtttataaaacccgaaatatggatatgaaacgtcttatcatggttttggctggagcttctgaatttgatcctcagtataataaagatgccacaagcagaccaacggataatattctaataccacagctaatcagagaaattggcagcattaatttaaagaagaatgagcctccacttacctgcccatatagcctgaaggccagagttcttttactgtctcatcttgctagaatgaaaattcctgagacccttgaagaagatcagcaattcatgctaaaaaagtgtcctgccctacttcaagaaatggttaatgtaatctgccaactaatagtaatggcccggaaccgtgaagaaagggagtttcgtgctccaactttggcatccctagaaaactgcatgaagctttctcagatggccgttcagggacttcagcaatttaagtctccccttctgcagctccctcatattgaagaggacaatcttagacgggtttctaatcataagaagtataaaattaaaactatccaggatttggtgagtttaaaagaatcagatcgtcacactctactgcacttccttgaagatgaaaaatatgaagaggttatggctgtccttgggagttttccatatgtgaccatggatataaaatcacaggtgttagatgatgaagatagcaacaacatcacagtaggatccttagttacagtgttggttaagttgacaaggcaaacaatggctgaagtatttgaaaaggagcagtccatctgtgctgcagaggaacagccagcagaagatgggcagggtgaaactaacaagaacaggacaaaaggaggatggcaacagaagagtaaaggacccaagaaaactgctaaaaaaaaaaaagaaacctttaaaaaaaaaacctacacctgtgctattaccacagtcaaagcaacagaaacaaaagcaggcaaatggagtcgttgggaa

SEQ ID NO: 171139 - DNA, 2283 bp, Artificial Sequence
  derived and/or modified sequence
atggccggccagcagttccagtacgacgacagcggcaacaccttcttctacttcctgaccagcttcgtgggcctgatcgtgatccccgccacctactacctgtggcccagagaccagaacgccgagcagatcagactgaagaacatcagaaaggtgtacggcagatgcatgtggtacagactgagactgctgaagccccagcccaacatcatccccaccgtgaagaagatcgtgctgctggccggctgggccctgttcctgttcctggcctacaaggtgagcaagaccgacagagagtaccaggagtacaacccctacgaggtgctgaacctggaccccggcgccaccgtggccgagatcaagaagcagtacagactgctgagcctgaagtaccaccccgacaagggcggcgacgaggtgatgttcatgagaatcgccaaggcctacgccgccctgaccgacgaggagagcagaaagaactgggaggagttcggcaaccccgacggcccccaggccaccagcttcggcatcgccctgcccgcctggatcgtggaccagaagaacagcatcctggtgctgctggtgtacggcctggccttcatggtgatcctgcccgtggtggtgggcagctggtggtacagaagcatcagatacagcggcgaccagatcctgatcagaaccacccagatctacacctacttcgtgtacaagaccagaaacatggacatgaagagactgatcatggtgctggccggcgccagcgagttcgacccccagtacaacaaggacgccaccagcagacccaccgacaacatcctgatcccccagctgatcagagagatcggcagcatcaacctgaagaagaacgagccccccctgacctgcccctacagcctgaaggccagagtgctgctgctgagccacctggccagaatgaagatccccgagaccctggaggaggaccagcagttcatgctgaagaagtgccccgccctgctgcaggagatggtgaacgtgatctgccagctgatcgtgatggccagaaacagagaggagagagagttcagagcccccaccctggccagcctggagaactgcatgaagctgagccagatggccgtgcagggcctgcagcagttcaagagccccctgctgcagctgccccacatcgaggaggacaacctgagaagagtgagcaaccacaagaagtacaagatcaagaccatccaggacctggtgagcctgaaggagagcgacagacacaccctgctgcacttcctggaggacgagaagtacgaggaggtgatggccgtgctgggcagcttcccctacgtgaccatggacatcaagagccaggtgctggacgacgaggacagcaacaacatcaccgtgggcagcctggtgaccgtgctggtgaagctgaccagacagaccatggccgaggtgttcgagaaggagcagagcatctgcgccgccgaggagcagcccgccgaggacggccagggcgagaccaacaagaacagaaccaagggcggctggcagcagaagagcaagggccccaagaagaccgccaagagcaagaagaagaagcccctgaagaagaagcccacccccgtgctgctgccccagagcaagcagcagaagcagaagcaggccaacggcgtggtgggcaacgaggccgccgtgaaggaggacgaggaggaggtgagcgacaagggcagcgacagcgaggaggaggagaccaacagagacagccagagcgagaaggacgacggcagcgacagagacagcgacagagagcaggacgagaagcagaacaaggacgacgaggccgagtggcaggagctgcagcagagcatccagagaaaggagagagccctgctggagaccaagagcaagatcacccaccccgtgtacagcctgtacttccccgaggagaagcaggagtggtggtggctgtacatcgccgacagaaaggagcagaccctgatcagcatgccctaccacgtgtgcaccctgaaggacaccgaggaggtggagctgaagttccccgcccccggcaagcccggcaactaccagtacaccgtgttcctgagaagcgacagctacatgggcctggaccagatcaagcccctgaagctggaggtgcacgaggccaagcccgtgcccgagaaccacccccagtgggacaccgccatcgagggcgacgaggaccaggaggacagcgagggcttcgaggacagcttcgaggaggaggaggaggaggaggaggacgacgactag

SEQ ID NO: 171140 - protein, 485 aa, Artificial Sequence
  derived and/or modified sequence
MRSRVAVRACHKVCRCLLSGFGGRVDAGQPELLTERSSPKGGHVKSHAELEGNGEHPEAPGSGEGSEALLEICQRRHFLSGSKQQLSRDSLLSGCHPGFGPLGVELRKNLAAEWWTSVVVFREQVFPVDALHHKPGPLLPGDSAFRLVSAETLREILQDKELSKEQLVAFLENVLKTSGKLRENLLHGALEHYVNCLDLVNKRLPYGLAQIGVCFHPVFDTKQIRNGVKSIGEKTEASLVWFTPPRTSNQWLDFWLRHRLQWWRKFAMSPSNFSSSDCQDEEGRKGNKLYYNFPWGKELIETLWNLGDHELLHMYPGNVSKLHGRDGRKNVVPCVLSVNGDLDRGMLAYLYDSFQLTENSFTRKKNLHRKVLKLHPCLAPIKVALDVGRGPTLELRQVCQGLFNELLENGISVWPGYLETMQSSLEQLYSKYDEMSILFTVLVTETTLENGLIHLRSRDTTMKEMMHISKLKDFLIKYISSAKNV

SEQ ID NO: 171141 - DNA, 1458 bp, Artificial Sequence
  derived and/or modified sequence
atgcggagtagggttgcagtaagagcctgtcataaggtctgtaggtgcctcctttcagggttcggcggccgcgtggatgcaggtcagccagagctgctgacagagcggtcttcccccaagggtgggcacgtgaagtcccatgccgaactcgaaggtaacggagagcacccagaagccccagggagcggtgagggatctgaggcacttttggagatctgtcagcgtcgccacttcctgtccgggtcaaaacaacagctcagcagagattcactgctgtcaggatgtcatccaggcttcgggccccttggcgtggagctgcgcaagaaccttgccgccgaatggtggaccagtgtcgtggtttttcgcgaacaggtgttccctgtcgacgcccttcaccataagccaggaccactacttcccggagactccgccttccgactcgtcagcgcagagacactgagggagattctgcaggataaagagttatccaaggagcagctggtagcattcctggagaacgtactcaaaaccagcggtaagctccgcgaaaatctgttacacggagccttagagcactacgtgaattgccttgatttggttaacaagcgtctcccctatgggctggctcagatcggcgtgtgttttcaccccgtgttcgacacaaagcagataaggaatggcgtcaagtcaattggggaaaagaccgaagcgagcttagtatggttcacaccaccacgaacgtccaatcaatggctggatttctggcttcggcacaggttgcagtggtggagaaaattcgctatgtcacccagtaatttcagtagttctgattgccaggacgaggaggggcggaagggtaataagctgtattacaactttccttggggcaaggaactgatcgaaacactgtggaacctcggcgaccacgaactgctacacatgtaccccggaaacgtgtccaaactccacggtagagatggtcggaaaaatgtcgtcccttgcgtgctctctgtcaatggagacctggaccgaggcatgctggcttacctgtatgactctttccagttaacagagaattcctttactaggaaaaaaaatctacatcggaaagttttgaagctccacccctgtctggctccaataaaggtggcgctggacgtgggccgtggtccaactttggagctgaggcaagtgtgtcagggtctatttaatgagttgctggagaacgggatttctgtgtggcctgggtatctcgagacgatgcagtcgagtctcgaacaattgtacagcaaatatgatgaaatgtccatactgttcacggtgttggtgaccgaaaccacactagagaacggactcattcacctgcgtagccgtgacactaccatgaaagagatgatgcatatcagcaagctgaaagactttctcataaagtatatctctagcgctaagaacgtctag

SEQ ID NO: 171142 - DNA, 1458 bp, Artificial Sequence
  derived and/or modified sequence
atgaggagccgggtggccgtgcgggcctgccacaaggtgtgccgctgcctgctgagcggctttggaggccgggtggatgctggccagcctgagctgctgacagagaggagcagccccaagggcggccacgtgaagagccacgccgagctggagggcaatggagagcaccctgaggcccctggcagcggggagggcagcgaggccctgctggagatctgccagaggaggcacttcctgagcggcagcaagcagcagctgagccgggacagcctgctgagcggctgccaccctggcttcggccccctgggcgtggagctgaggaagaacctggccgctgagtggtggacctctgtggtggtgttccgggagcaggtgtttcctgtggatgccctgcaccacaagccaggccccctgctgcccggggacagcgccttccggctggtgtctgctgagaccctgcgggagatcctgcaggacaaggagctgagcaaggagcagctggtggccttcctggagaatgtgctgaagaccagcggcaagctgcgggagaacctgctgcatggagccctggagcactacgtgaactgcctggacctggtgaacaagaggctgccctacggcctggcccagattggagtgtgcttccaccctgtgtttgacaccaagcagatcagaaatggagtgaagagcattggagagaagacagaggccagcctggtgtggttcaccccacccaggaccagcaaccagtggctggacttctggctgcggcaccggctgcagtggtggaggaagtttgccatgagccccagcaacttcagcagcagtgactgccaggatgaggagggcaggaaaggaaacaagctgtactacaacttcccctggggcaaggagctgattgagaccctgtggaacctgggggaccacgagctgctgcacatgtacccaggaaatgtgtccaagctgcacggcagagatggcaggaagaatgtggtgccctgtgtgctgtctgtgaatggagacctggaccggggcatgctggcctacctgtatgacagcttccagctgacagagaacagcttcaccaggaagaagaacctgcacaggaaggtgctgaagctgcacccctgcctggcccccatcaaggtggccctggatgtgggccggggccccaccctggagctgcggcaggtgtgccagggcctcttcaatgagctgctggagaatggcatctctgtgtggccaggctacctggagaccatgcagagcagcctggagcagctgtacagcaaatatgatgagatgagcatcctcttcaccgtgctggtgacagagaccaccctggagaatggcctcatccacctgcggagccgggacaccaccatgaaggagatgatgcacatcagcaagctgaaggacttcctgatcaagtacatcagcagcgccaagaatgtgtag

SEQ ID NO: 171143 - DNA, 1458 bp, Artificial Sequence
  derived and/or modified sequence
atgcggagccgggtggccgtgcgggcctgccacaaggtgtgccggtgcctgctgtcaggctttggcgggagagttgacgcaggccagcctgagctgctaaccgagcgaagctcccctaagggcggccacgtgaagtcccatgctgagctagagggaaatggcgaacatcctgaggcacccggaagtggagagggaagcgaggctctcctggaaatctgtcagcggcgacatttcctcagtggatcaaaacagcagctgtcaagggactcgctgctcagcgggtgccacccaggctttggtccattgggcgtggagctgcggaaaaatctcgctgctgaatggtggacaagcgtggtcgtattcagggagcaggtgttcccggtagacgcattgcaccataaacccggccctttactgccaggtgactccgccttccggctcgtgagcgctgagactctcagggagatcctgcaggacaaagagctgtcaaaggagcagctggtggcgtttttagaaaacgtgctaaagacatctgggaagctgcgcgaaaacctcttacacggggcattggaacactatgtcaattgtcttgacttggtgaacaagcgtcttccctatggactggcacaaatcggcgtatgctttcatcccgtgttcgataccaaacagataaggaacggggtcaagtccataggagaaaagaccgaagcttcactggtctggtttacccccccacgaacctctaaccagtggctggacttctggctgcggcacagactgcagtggtggagaaagtttgcaatgtcacctagcaatttcagttcaagcgattgccaggatgaggagggccggaagggtaataaactttactacaacttcccctggggaaaagagctaattgagacactctggaacctcggagaccatgagctgctccacatgtacccgggaaacgtgagtaagctgcacggccgtgacggtcgtaagaacgtcgtcccatgcgtccttagcgtgaacggtgaccttgatagaggaatgctcgcctatttgtatgatagctttcagttgacggagaattccttcactcgaaaaaagaacttgcaccgaaaggttctgaagctgcatccttgcttggcacccattaaggttgccctggacgtcgggcgcggccctaccctggagctgagacaagtctgtcagggcctgtttaatgagctgctcgagaatggaattagcgtttggcccggatatctcgaaactatgcagtcttccttagagcaactctacagcaaatatgatgagatgagtatcctgtttacggtgctcgtcacagaaaccacactggagaatggtctgatccatctgagatctagagatacgactatgaaggagatgatgcacatcagcaaacttaaggattttcttatcaaatatatttccagcgccaagaatgtatag

SEQ ID NO: 171144 - DNA, 1592 bp, Artificial Sequence
  derived and/or modified sequence
gcctgcgccgtggcctctccggattctgttaacggtagtggtggcttgttgggatccgttgagtgatgggagagtgtgctctttaacttcggagagagatgcgctctcgtgtagccgtcagggcctgccataaggtctgcaggtgcctgttgtctgggtttgggggtcgagtagatgcggggcagccggagctgttgacggaaaggagtagccccaaaggagggcatgtgaagtcgcacgcggagctcgaggggaacggcgagcacccagaagcccccgggtctggagagggaagcgaggcgctgttagagatctgtcagagaaggcatttcctaagtggaagcaagcagcagcttagccgggattctcttctgagtgggtgccaccccggcttcggacccttgggcgtagagttgcggaagaacctggccgcagaatggtggacctcggtggtggtgttcagggagcaggtattcccggtggacgccctccaccacaaaccaggccctttgctacccggggacagtgccttcaggttagtttctgcagaaactctacgcgaaatcttgcaagacaaagagctgagtaaggaacagctagtagcatttcttgagaacgtattaaaaacttctgggaaactacgggagaaccttcttcacggtgccttggaacactatgttaattgcctggatctggtaaacaagaggctaccttatggccttgctcagattggagtgtgttttcatcctgtttttgacactaagcagatacgaaatggtgttaaaagtattggtgagaagactgaagcttcgttagtatggtttactcctccgagaacttcaaaccagtggcttgatttctggttacgtcatcgactccagtggtggagaaagtttgccatgagtccatctaacttcagcagcagtgactgtcaggatgaagaaggccggaaaggaaacaaactttactacaattttccctggggaaaggagttaatagaaaccctgtggaacctaggagatcacgaacttttacacatgtatcctggcaatgtgtctaaattacatggccgagatggacgaaaaaatgtggttccttgtgttctctctgtaaatggggacctagaccgaggcatgctggcctacctctatgattctttccagctgacagagaactcctttacaagaaagaaaaatcttcatagaaaggtacttaaacttcacccttgtttagcccctattaaggttgctttggatgtaggaagaggccccacattggaactaagacaggtttgtcaagggctatttaatgagttactagaaaatgggatttctgtgtggcctggttatttggaaactatgcagtcctcattggaacaactttattcgaagtatgatgaaatgagtattctcttcacagttttggttactgaaactactttggagaatggattaatacatctgagaagcagagacaccacaatgaaggaaatgatgcatatatccaaattaaaagactttttgattaagtatatatcatcagctaagaatgtatagatttttatatttgtataataaatattcttctctcct

SEQ ID NO: 171145 - DNA, 1458 bp, Artificial Sequence
  derived and/or modified sequence
atgcgttcccgtgtggctgtgcgcgcatgtcacaaagtctgccggtgcctcctgtctgggttcggcggaagggtggacgccggacaacctgagctgctgaccgaaagaagctcaccgaaagggggtcacgtcaaaagccacgccgagctcgaaggcaacggggagcatcccgaggcccctggctccggggagggatccgaagcactgctggaaatatgccagcgcagacacttcctctccggatccaaacaacagctgagtcgggacagcctgttgagcggctgccatccagggttcggccctctaggggttgagcttaggaagaacctggcagctgaatggtggacatccgtcgttgtcttcagagaacaggtgtttcccgtagatgcactccaccacaagcccggaccactgcttcccggagacagcgccttccggctggtatccgcagagaccctccgtgagatattacaagataaagaactgtcaaaagaacagctggttgcctttctggaaaacgttcttaaaacaagcggaaagttgcgcgaaaatctgctgcatggggctttggagcactatgtgaactgtctcgacctcgttaacaagcgtctgccatacggcctcgcccagataggagtgtgttttcaccccgtgttcgacacgaaacaaatccggaacggtgtaaagtccatcggcgaaaagactgaagcctctctggtgtggtttacgccccctcgcacctccaatcagtggctagatttttggctaagacacagactacagtggtggcggaagttcgcaatgtcgccctcaaatttcagcagtagcgattgtcaggacgaggaaggcaggaagggaaacaagttgtactataactttccctggggcaaagagctgattgagacactgtggaacttgggtgatcacgagttgttgcacatgtaccctgggaatgtcagcaagctgcacggacgggatggcagaaaaaacgtggtgccctgtgtgctaagtgtgaacggtgacctggacaggggaatgctagcctacctatatgattcatttcagctaacggagaactccttcacgaggaagaagaatctccataggaaggtgctgaagctccatccctgcttggcccctatcaaggtggcactggacgtgggacgtgggccaacattggaactgaggcaagtatgtcaaggcttgttcaatgagcttctggagaacggtatttctgtgtggccgggatatttggaaactatgcagagcagcctggaacagttgtatagtaaatacgatgaaatgagcatcctattcaccgtgctggttactgagaccaccctggaaaacgggttgatccatttacggagccgtgacacgacaatgaaagaaatgatgcacatcagcaaattgaaggattttcttattaagtatatatcatccgctaaaaacgtgtag

SEQ ID NO: 171146 - DNA, 1458 bp, Artificial Sequence
  derived and/or modified sequence
atgagaagcagagtggccgtgagagcctgccacaaggtgtgcagatgcctgctgagcggcttcggcggcagagtggacgccggccagcccgagctgctgaccgagagaagcagccccaagggcggccacgtgaagagccacgccgagctggagggcaacggcgagcaccccgaggcccccggcagcggcgagggcagcgaggccctgctggagatctgccagagaagacacttcctgagcggcagcaagcagcagctgagcagagacagcctgctgagcggctgccaccccggcttcggccccctgggcgtggagctgagaaagaacctggccgccgagtggtggaccagcgtggtggtgttcagagagcaggtgttccccgtggacgccctgcaccacaagcccggccccctgctgcccggcgacagcgccttcagactggtgagcgccgagaccctgagagagatcctgcaggacaaggagctgagcaaggagcagctggtggccttcctggagaacgtgctgaagaccagcggcaagctgagagagaacctgctgcacggcgccctggagcactacgtgaactgcctggacctggtgaacaagagactgccctacggcctggcccagatcggcgtgtgcttccaccccgtgttcgacaccaagcagatcagaaacggcgtgaagagcatcggcgagaagaccgaggccagcctggtgtggttcaccccccccagaaccagcaaccagtggctggacttctggctgagacacagactgcagtggtggagaaagttcgccatgagccccagcaacttcagcagcagcgactgccaggacgaggagggcagaaagggcaacaagctgtactacaacttcccctggggcaaggagctgatcgagaccctgtggaacctgggcgaccacgagctgctgcacatgtaccccggcaacgtgagcaagctgcacggcagagacggcagaaagaacgtggtgccctgcgtgctgagcgtgaacggcgacctggacagaggcatgctggcctacctgtacgacagcttccagctgaccgagaacagcttcaccagaaagaagaacctgcacagaaaggtgctgaagctgcacccctgcctggcccccatcaaggtggccctggacgtgggcagaggccccaccctggagctgagacaggtgtgccagggcctgttcaacgagctgctggagaacggcatcagcgtgtggcccggctacctggagaccatgcagagcagcctggagcagctgtacagcaagtacgacgagatgagcatcctgttcaccgtgctggtgaccgagaccaccctggagaacggcctgatccacctgagaagcagagacaccaccatgaaggagatgatgcacatcagcaagctgaaggacttcctgatcaagtacatcagcagcgccaagaacgtgtag

SEQ ID NO: 171147 - protein, 664 aa, Artificial Sequence
  derived and/or modified sequence
MAAVGPPQQQVRMAHQQVWAALEVALRVPCLYIIDAIFNSYPDSSQSRFCIVLQIFLRLFGVFASSIVLILSQRSLFKFYTYSSAFLLAATSVLVNYYASLHIDFYGAYNTSAFGIELLPRKGPSLWMALIVLQLTFGIGYVTLLQIHSIYSQLIILDLLVPVIGLITELPLHIRETLLFTSSLILTLNTVFVLAVKLKWFYYSTRYVYLLVRHMYRIYGLQLLMEDTWKRIRFPDILRVFWLTRVTAQATVLMYILRMANETDSFFISWDDFWDLICNLIISGCDSTLTVLGMSAVISSVAHYLGLGILAFIGSTEEDDRRLGFVAPVLFFILALQTGLSGLRPEERLIRLSRNMCLLLTAVLHFIHGMTDPVLMSLSASHVSSFRRHFPVLFVSACLFILPVLLSYVLWHHYALNTWLFAVTAFCVELCLKVIVSLTVYTLFMIDGYYNVLWEKLDDYVYYVRSTGSIIEFIFGVVMFGNGAYTMMFESGSKIRAFMMCLHAYFNIYLQAKNGWKTFMNRRTAVKKINSLPEIKGSRLQEINDVCAICYHEFTTSARITPCNHYFHALCLRKWLYIQDTCPMCHQKVYIEDDIKDNSNVSNNNGFIPPNETPEEAVREAAAESDRELNEDDSTDCDDDVQRERNGVIQHTGAAAEEFNDDTD

SEQ ID NO: 171148 - DNA, 1995 bp, Artificial Sequence
  derived and/or modified sequence
atggcggctgtgggacccccccagcagcaggttagaatggcccaccaacaggtgtgggctgctctggaagtcgcgctgagggtgccgtgtctatacattattgatgctatattcaacagctacccagacagcagccaaagcagattctgtattgtgctacagatctttctccgcctgtttggagtgttcgccagttccatagttttgattctcagccagaggagcctcttcaagttttacacatatagctccgccttcctcctcgctgccacttcagtcttagttaactattacgccagcctgcacattgatttctacggagcctataatacatcagcctttggcatagagttgctcccgaggaaaggaccttcactttggatggctctcatcgtgttacagcttacctttggcatcggatatgtcaccctcctgcaaatccactctatatactcacaacttatcatcctggacctgttggtccccgtgattggtttaattacagaactccccttacatatacgggagacccttctttttacttcttcccttattctcacactgaacacagtgtttgtgctagctgtcaaactcaaatggttctactattcgacgcggtacgtatatctgttggtgcggcacatgtatcgaatctatgggctccagctgctcatggaggatacatggaagcgcatcaggttccccgatatactgagagttttctggttgacacgggtaacagctcaggctaccgtcctcatgtacattctacgaatggctaatgagaccgattccttcttcatttcttgggacgatttctgggacctcatttgcaatttgatcatttcaggctgcgactcaacactgacagtgcttggcatgagcgctgtcatcagtagcgtggcgcattatctcggcctgggcatcctggcttttattgggtccactgaggaagatgaccgccggctcgggtttgtggcacccgtcctttttttcatcctcgcacttcaaacagggctgtctggcctgagaccagaagagaggctgatccgcctatcaagaaatatgtgcctgctgttgaccgcagtattacatttcattcatgggatgactgatccagtgcttatgagtctttccgctagccacgtatcaagctttcgcaggcacttccctgtgctgttcgtgagcgcctgtctctttatcctgccagtgttactgtcatacgtcctctggcaccactacgccttgaacacctggctgttcgctgtcactgccttctgtgtggagctgtgccttaaagtgatcgtaagtctcacagtgtataccctcttcatgattgacgggtactacaatgtgttatgggaaaagctcgacgactatgtttattatgtccggagcacgggaagtataatcgaattcattttcggggttgttatgtttggcaacggcgcctacaccatgatgtttgagtcagggtctaagattcgcgcattcatgatgtgtcttcatgcctactttaacatatacttgcaagctaagaatgggtggaaaacttttatgaaccggaggacggccgtgaaaaaaataaacagcctcccggagataaaaggctccaggctgcaagagatcaacgacgtgtgcgctatatgttatcatgaattcactacatcagctcgaataacaccgtgcaatcactattttcacgcactctgcttgagaaaatggttgtatatacaagatacctgcccaatgtgtcaccagaaggtgtacatcgaagatgacatcaaagataactcaaatgtatcaaacaataatggctttattcccccaaacgaaaccccagaggaggcagttcgtgaggcggccgctgagagcgatagggaactgaacgaagatgattccactgattgcgatgacgacgtacagcgtgaacggaacggggtgatacagcacaccggcgccgccgccgaggagttcaatgacgacaccgattag

SEQ ID NO: 171149 - DNA, 1995 bp, Artificial Sequence
  derived and/or modified sequence
atggctgctgtgggccccccccagcagcaggtgaggatggcccaccagcaggtgtgggccgccctggaggtggccctgcgggtgccctgcctgtacatcattgatgccatcttcaacagctacccagacagcagccagagccgcttctgcatcgtgctgcagatcttcctgcggctgtttggagtgtttgccagcagcatcgtgctgatcctgagccagaggagcctcttcaagttctacacctacagcagcgccttcctgctggccgccacctctgtgctggtgaactactatgccagcctgcacatcgacttctacggggcctacaacaccagcgccttcggcatcgagctgctgcccaggaagggccccagcctgtggatggccctgattgtgctgcagctgacctttggaattggctacgtgaccctgctgcagatccacagcatctacagccagctgatcatcctggacctgctggtgcctgtgattggcctcatcacagagctgcccctgcacatccgggagaccctgctcttcaccagcagcctcatcctgaccctgaacacagtgtttgtgctggccgtgaagctgaagtggttctactacagcaccaggtatgtgtacctgctggtgcgccacatgtaccgcatctacggcctgcagctgctgatggaggacacctggaagaggatccgcttcccagacatcctgcgggtcttctggctgaccagggtgacagcccaggccaccgtgctgatgtacatcctgaggatggccaatgaaacagacagcttcttcatctcctgggatgacttctgggacctgatctgcaacctgatcatcagcggctgtgacagcaccctgactgtgctgggcatgtctgctgtgatcagctctgtggcccactacctgggcctgggcatcctggccttcatcggcagcacagaggaggatgaccggcggctgggctttgtggcccctgtgctcttcttcatcctggccctgcagacaggcctgagcggcctgcggcctgaggagcggctcatccggctgagcaggaacatgtgcctgctgctgacagctgtgctgcacttcatccacggcatgacagatcctgtgctgatgagcctgagcgccagccacgtgtcctccttcagaagacacttccctgtgctgtttgtgtctgcctgcctcttcatcctgcctgtgctgctgtcctatgtgctgtggcaccactacgccctgaacacctggctgtttgctgtgacagccttctgtgtggagctgtgcctgaaggtgattgtgtccctgactgtgtacaccctcttcatgattgatggctactacaacgtgctgtgggagaagctggatgattatgtgtactacgtgcgcagcacaggcagcatcatcgagttcatctttggagtggtgatgtttggaaatggagcctacaccatgatgtttgaaagtggcagcaagatccgggccttcatgatgtgcctgcacgcctacttcaacatctacctgcaggccaagaatggctggaagaccttcatgaacagaagaacagctgtgaagaagatcaacagcctgcctgagatcaagggcagccggctgcaggagatcaatgatgtgtgtgccatctgctaccacgagttcaccaccagcgcccgcatcaccccctgcaaccactacttccacgccctgtgcctgaggaagtggctgtacatccaggacacctgccccatgtgccaccagaaggtgtacattgaagatgacatcaaggacaacagcaatgtgagcaacaacaacggcttcatccccccaaatgagaccccagaggaggccgtgcgggaggccgctgctgagagtgaccgggagctgaatgaagatgacagcacagactgtgatgatgatgtgcagcgggagagaaatggagtcatccagcacactggagctgctgctgaggagttcaatgatgacacagactag

SEQ ID NO: 171150 - DNA, 1995 bp, Artificial Sequence
  derived and/or modified sequence
atggccgccgtgggccccccccagcagcaggtgcggatggcccaccagcaagtctgggcagcgctggaagttgcactccgggtcccctgcctgtatattatcgatgcaatttttaactcctaccctgactcatcacagtccaggttctgcattgtgttacaaatattcctgagactctttggtgtatttgcctcttcaattgtgctgatcttgagccagagatctctttttaaattctacacatacagtagcgcattcctgttagcagcgacaagcgttttggttaactattatgcatccctgcacatagatttttatggggcctataacacttcagccttcggcattgagcttttgccccgcaagggacctagcctttggatggcactgatcgtgctccaactcactttcggcataggatacgtaacactccttcaaatccacagcatatacagccagctaatcatcctggatctgcttgtcccagtaattggtctcatcaccgagttacctctgcacatcagagaaacactcctattcacgtcgtcgctgatcctgacacttaatacggtgtttgtcttggccgtgaagctgaaatggttctactattcaacccggtatgtctatctcctggttcgccatatgtaccgaatctatgggctccagctgctgatggaagacacatggaagcggatccgcttccctgatatactgcgggtcttttggctcaccagagttacagctcaggcaaccgtactgatgtatattcttagaatggcaaatgagaccgattccttctttattagctgggacgacttttgggatcttatttgcaatttgatcatttccgggtgcgactccactctgactgtactggggatgtctgccgtgatcagttcagttgcccactatttggggctaggcatcctcgccttcatcggatctacagaagaggacgatcgacgcttggggttcgtggccccagttctgtttttcatcttggccctgcagaccggactgtcaggcctgaggcctgaggagagacttatccggctgtctaggaacatgtgcctgctcctgacagccgttctacattttattcatggcatgacggatccggtgctcatgtctctgtcggcctcacatgtgagctcctttagacggcactttccggtgctatttgtttcagcgtgcttgtttatcttgcccgtgttgctttcttacgttttgtggcatcattacgccctgaatacctggttattcgcagtgacagcgttttgtgtagaattgtgcctgaaggtaattgtgtccctgacggtctacacactgtttatgattgacggatattataatgtcttgtgggagaagcttgatgattacgtatattatgtccgctccacaggctccattatcgaatttatctttggggttgtaatgtttggtaatggggcatatactatgatgtttgaatccggatctaaaattagggccttcatgatgtgcctccatgcctatttcaatatctacttacaggcaaagaacggctggaaaacgttcatgaatagacgaacagcagtcaagaagatcaactccctgccagagatcaaaggttcgcggcttcaggagataaacgacgtctgcgccatctgttatcacgagttcaccacttccgcgcgaatcacaccctgtaaccactacttccatgctctctgtctccgtaaatggctgtacatccaagatacatgccctatgtgtcaccaaaaagtgtatattgaggacgatattaaggacaactccaacgttagcaacaacaatggtttcattccccctaatgagacccccgaagaggcagttagagaagccgccgccgaaagtgatagggaattgaatgaggatgattctacggactgcgacgatgacgtgcagagagagcggaatggagtaatccagcatacaggagccgccgcagaggagtttaacgatgataccgattag

SEQ ID NO: 171151 - DNA, 1995 bp, Artificial Sequence
  derived and/or modified sequence
atggccgcagtcgggccacctcaacagcaggtgcggatggctcaccagcaggtctgggcagctctggaagtcgccttgagggtgccctgcctgtatattattgacgccatctttaattcatacccagattcatcacagtccagattttgtattgtgctgcaaatatttctgcggctcttcggggtgttcgccagctcgatagtcctcatcctttcccagaggtccctgtttaagttctacacgtattccagtgcattcctactggcagccacctcagtcctggtgaactactacgcatcactccacattgatttctacggggcatacaatacaagcgccttcggtatagaactccttcctcggaaaggccctagcttatggatggccctcatcgtgctgcagctcacatttggcatagggtatgttacactgctccagattcacagcatctattcgcagttgattatcttggatctgctcgtgccagtgattggattaattactgagctgcccctccacattcgggagactctcctgttcacttcttccctgattttgaccctgaataccgtgttcgtcctggcagttaagttgaaatggttctactatagcactcggtacgtctacttgcttgttcgccacatgtacagaatctacggactccagctgctgatggaggacacatggaagagaattaggtttccggatattctgcgagtgttttggctgaccagggtcaccgcgcaggctacagtgttaatgtacattcttcgtatggccaatgagactgacagcttttttatctcttgggatgacttttgggatctcatatgcaacttgatcattagtgggtgtgattcaactctgaccgtattgggaatgtccgccgtgatcagctccgtggcccactacttgggcctagggattctcgcattcattggttccactgaagaagatgataggcgtctggggtttgtggctccggtcctcttcttcattctagcattgcagacaggcctttcaggcctgcggccagaggagcggctgatccgtctgagccgcaatatgtgccttcttctgacagccgtgctgcattttatccacgggatgactgaccctgtgctgatgtccttgtccgcttcccacgtgtcctcattccgtagacacttccctgtgctgttcgttagcgcctgcttgtttatcctgcctgttctgctgtcctatgtgctctggcaccattatgccctgaacacatggcttttcgccgttacagcgttttgcgtagagctgtgccttaaggtgatcgtctctctgacagtatacacactgttcatgattgatggttactacaatgtcctttgggagaagctggatgattatgtgtactatgtcaggtcaactggctcgatcattgagtttatattcggagtggttatgtttggtaatggtgcatatacgatgatgtttgaatcaggttctaaaatcagagcattcatgatgtgccttcacgcatacttcaatatttatttacaggccaaaaacgggtggaagacattcatgaataggcgcacagctgtcaagaagattaactccttgccggaaatcaagggaagccgtctgcaggaaatcaatgatgtctgtgccatctgttaccatgaatttaccactagcgctcgaatcactccatgcaatcattactttcatgccctgtgtttacgcaagtggctgtatattcaggacacatgccctatgtgccaccagaaggtgtatattgaggacgacataaaagacaatagcaacgtatccaacaacaacggtttcatacccccaaacgagactcctgaagaggccgtacgagaggccgctgcagagtctgatcgggagctgaacgaagacgacagtaccgactgtgacgatgatgtgcaacgtgaacggaatggggttatccaacataccggggctgcagctgaagaattcaacgatgacactgactag

SEQ ID NO: 171152 - DNA, 2637 bp, Artificial Sequence
  derived and/or modified sequence
gactgacggcgcagcctccgggcctagccacagcagcaacggcagaggccagcgggcgaggtcaagatggtggctccgcgggcgggggaggcagtggagggaggaggagtcagaccttagccagccggaaacaccgaaacccagagacctcctggggagccgccgccgccgccctctcggccatcgctgcctccgccgcctgctccacctcgagggacgcgagcgggcggcggggctggccgtgagagagacaggagaggaaggagggcaggggcggagttgcccgccttagcccccgcccccggccgcggccccgggccctgccccgcgcggccctgcccggcccaccgagccctggtgtggcagcggctcatggcggccgtggggcccccgcagcagcaggtgcggatggcccatcagcaggtctgggcggcgctcgaagtggcgctccgggtgccctgcctttacatcatcgacgccatcttcaactcctacccggattccagccaaagccggttctgcatcgtgctccagatcttcctccggctctttggtgtatttgcatccagtattgttctgatcttgtcacaacgatcacttttcaagttttacacgtacagctcagcctttctgttagctgcaacttcagtgttggtgaattattatgcttctttgcacattgacttctatggtgcctacaacacgtcagcttttggaattgagctgcttcctcgaaaaggtccctcgctgtggatggcacttatcgttctacagctaacatttggaattggatacgttacactactccagattcattccatctattcacaattaattattttggatctcttggttcctgtaataggcttaatcacagagctaccattacacatcagagagactttactgtttacttcttccttgattctcacattaaatacagtgtttgtcctggcagtgaaactgaagtggttttattattccacacgatatgtttatcttttggtgaggcacatgtatcgaatttacggattacagttattgatggaggacacatggaagaggattcgtttcccagacatactacgagtcttttggctaacaagagttacagctcaggctacagtgttaatgtacatcttaaggatggcaaatgaaactgattccttctttatttcttgggatgatttttgggacctcatttgcaatcttataattagtgggtgcgattctacactaactgtactgggcatgagtgctgtaatttcctcagtagcccattatttggggcttggaatattggcctttattggatcaactgaggaagatgacaggcgtcttggctttgttgcacctgttttattttttattttggctcttcagactgggttaagtgggctaagaccagaagagagacttattcgcttaagtagaaacatgtgccttttattaactgcagtcctgcattttatccatggaatgacagaccctgtattaatgtctctcagtgcctctcatgtgtcatcttttcgtagacattttcctgtgctgtttgtctctgcttgcctgtttattcttcctgtcttactcagttatgttctttggcatcactatgcactaaatacatggttgtttgcagttacagcattttgtgtggaactgtgcttaaaagtaattgtttctctcactgtttatacgttattcatgattgatggctactataatgtcctctgggaaaagcttgacgattatgtctactacgttcgttcaacaggcagtattattgaatttatatttggagttgtaatgtttggaaatggggcttacactatgatgtttgagtcgggaagtaaaattcgggcttttatgatgtgcctacatgcatattttaacatctacttacaagccaaaaatggctggaagacatttatgaatcgtaggactgctgtgaagaaaattaattcacttcctgaaataaaagggagccgcttacaagaaataaatgatgtatgtgcaatctgctatcatgagtttacaacatctgctcgtattacaccgtgtaatcattatttccatgcactttgccttcggaaatggctgtacattcaagatacttgtccaatgtgccatcagaaagtatacatcgaagatgatatcaaggataattcaaatgtatctaacaacaatggatttattccacccaatgaaactccagaggaagctgtaagagaagctgctgctgaatctgacagggaattgaacgaagatgacagtacagattgtgatgatgatgttcaaagagaaagaaatggagtgattcagcacacaggcgcagcagctgaagaatttaatgatgatactgactgatgaaaatagcatttattaatgattgaggtatttgtttaaaattcagttcatccaaaatggagtaatatccttcaccttcagtgtgtaaccaagcacaaaaacagtatcaatgttgaatctgtgaatggttttccgtttactgtgatgtgctactgtaaatatacctctttaattacttctggtctctttggtgacctgtttaaatttgtgtacattattgtacatagaataaaatgttttcacatttttatgacaaaatttgaacaaata

SEQ ID NO: 171153 - DNA, 1995 bp, Artificial Sequence
  derived and/or modified sequence
atggccgccgtgggccccccccagcagcaggtgagaatggcccaccagcaggtgtgggccgccctggaggtggccctgagagtgccctgcctgtacatcatcgacgccatcttcaacagctaccccgacagcagccagagcagattctgcatcgtgctgcagatcttcctgagactgttcggcgtgttcgccagcagcatcgtgctgatcctgagccagagaagcctgttcaagttctacacctacagcagcgccttcctgctggccgccaccagcgtgctggtgaactactacgccagcctgcacatcgacttctacggcgcctacaacaccagcgccttcggcatcgagctgctgcccagaaagggccccagcctgtggatggccctgatcgtgctgcagctgaccttcggcatcggctacgtgaccctgctgcagatccacagcatctacagccagctgatcatcctggacctgctggtgcccgtgatcggcctgatcaccgagctgcccctgcacatcagagagaccctgctgttcaccagcagcctgatcctgaccctgaacaccgtgttcgtgctggccgtgaagctgaagtggttctactacagcaccagatacgtgtacctgctggtgagacacatgtacagaatctacggcctgcagctgctgatggaggacacctggaagagaatcagattccccgacatcctgagagtgttctggctgaccagagtgaccgcccaggccaccgtgctgatgtacatcctgagaatggccaacgagaccgacagcttcttcatcagctgggacgacttctgggacctgatctgcaacctgatcatcagcggctgcgacagcaccctgaccgtgctgggcatgagcgccgtgatcagcagcgtggcccactacctgggcctgggcatcctggccttcatcggcagcaccgaggaggacgacagaagactgggcttcgtggcccccgtgctgttcttcatcctggccctgcagaccggcctgagcggcctgagacccgaggagagactgatcagactgagcagaaacatgtgcctgctgctgaccgccgtgctgcacttcatccacggcatgaccgaccccgtgctgatgagcctgagcgccagccacgtgagcagcttcagaagacacttccccgtgctgttcgtgagcgcctgcctgttcatcctgcccgtgctgctgagctacgtgctgtggcaccactacgccctgaacacctggctgttcgccgtgaccgccttctgcgtggagctgtgcctgaaggtgatcgtgagcctgaccgtgtacaccctgttcatgatcgacggctactacaacgtgctgtgggagaagctggacgactacgtgtactacgtgagaagcaccggcagcatcatcgagttcatcttcggcgtggtgatgttcggcaacggcgcctacaccatgatgttcgagagcggcagcaagatcagagccttcatgatgtgcctgcacgcctacttcaacatctacctgcaggccaagaacggctggaagaccttcatgaacagaagaaccgccgtgaagaagatcaacagcctgcccgagatcaagggcagcagactgcaggagatcaacgacgtgtgcgccatctgctaccacgagttcaccaccagcgccagaatcaccccctgcaaccactacttccacgccctgtgcctgagaaagtggctgtacatccaggacacctgccccatgtgccaccagaaggtgtacatcgaggacgacatcaaggacaacagcaacgtgagcaacaacaacggcttcatcccccccaacgagacccccgaggaggccgtgagagaggccgccgccgagagcgacagagagctgaacgaggacgacagcaccgactgcgacgacgacgtgcagagagagagaaacggcgtgatccagcacaccggcgccgccgccgaggagttcaacgacgacaccgactag

SEQ ID NO: 171154 - protein, 205 aa, Artificial Sequence
  derived and/or modified sequence
MAEASSANLGSGCEEKRHEGSSSESVPPGTTISRVKLLDTMVDTFLQKLVAAGSYQRFTDCYKCFYQLQPAMTQQIYDKFIAQLQTSIREEISDIKEEGNLEAVLNALDKIVEEGKVRKEPAWRPSGIPEKDLHSVMAPYFLQQRDTLRRHVQKQEAENQQLADAVLAGRRQVEELQLQVQAQQQAWQALHREQRELVAVLREPE

SEQ ID NO: 171155 - DNA, 1082 bp, Artificial Sequence
  derived and/or modified sequence
agatttggaggttcaacttcaacatggccgaagcaagtagcgccaatctaggcagcggctgtgaggaaaaaaggcatgaggggtcgtcttcggaatctgtgccacccggcactaccatttcgagggtgaagctcctcgacaccatggtggacacttttcttcagaagctggtcgccgccggcagctaccagagattcactgactgctataagtgcttctaccagttgcagcctgcgatgacacagcaaatctatgacaagtttatagctcagttgcagacatctatccgggaggaaatctctgacatcaaagaggaggggaacctagaagctgtcttgaatgccttggataaaattgtggaagaaggcaaagtccgcaaagagccagcctggcgccccagcgggatcccagagaaggatctgcacagtgttatggcaccctacttcctgcagcaacgggacaccctgcggcgccatgtgcagaaacaggaggccgagaaccagcagctggcagatgccgtcctggcagggcggaggcaggtggaggagctgcagctacaggtccaggcccagcagcaggcctggcaggctctacacagagaacagagggagctggttgctgtgctgagggagcctgagtgaggagaccgccagccccagaagcagagggcagtcaaggtcaagagcctgtggtccagcatgcctggcctgggcgggctacctctgagaacggctgaaatggtgcccagtccatcagcagtgatggaatttgctggaggactaggccagagcaagcctcactgccactgtgcctttggggcacccttggggttggacatacaccccctttagattcctctgtttcttctacctggataattcttggccatgttctctcttctctaggttcaggtcagctctgcccctccgcccccctcctgctggttccccagcccttttccctggccctggcttggagaatctgttttcaatctccactgattgcccccttgctggccagcccaggggcctttaccatgttctctccacatccgtaaataaacttccttcactacactgtaa

SEQ ID NO: 171156 - DNA, 618 bp, Artificial Sequence
  derived and/or modified sequence
atggccgaggccagcagcgccaacctgggcagcggctgcgaggagaagagacacgagggcagcagcagcgagagcgtgccccccggcaccaccatcagcagagtgaagctgctggacaccatggtggacaccttcctgcagaagctggtggccgccggcagctaccagagattcaccgactgctacaagtgcttctaccagctgcagcccgccatgacccagcagatctacgacaagttcatcgcccagctgcagaccagcatcagagaggagatcagcgacatcaaggaggagggcaacctggaggccgtgctgaacgccctggacaagatcgtggaggagggcaaggtgagaaaggagcccgcctggagacccagcggcatccccgagaaggacctgcacagcgtgatggccccctacttcctgcagcagagagacaccctgagaagacacgtgcagaagcaggaggccgagaaccagcagctggccgacgccgtgctggccggcagaagacaggtggaggagctgcagctgcaggtgcaggcccagcagcaggcctggcaggccctgcacagagagcagagagagctggtggccgtgctgagagagcccgagtag

SEQ ID NO: 171157 - DNA, 618 bp, Artificial Sequence
  derived and/or modified sequence
atggcagaggcctcatccgctaacctgggctccggatgcgaggaaaagagacatgagggctccagttcagagagcgttccgcccgggaccacgattagcagggtcaagctgctagatactatggtggacaccttcctgcagaagctcgtggctgccgggtcctatcagaggtttacggactgctacaagtgcttctaccaactccaacctgcaatgacccaacaaatctacgacaaattcattgcccagctacagaccagcatacgggaagagatttcagacatcaaggaagaaggcaacctggaggctgtactcaatgcgctcgataaaatagtcgaagagggaaaagtcagaaaagagcctgcttggaggccttctggaatcccagaaaaggacctgcactccgtgatggcgccatattttctacagcagcgcgacactcttagaaggcacgttcaaaaacaagaggccgagaaccagcaactagcagacgctgtgttagccggtcgccggcaggtggaagaactgcagctgcaagtgcaggcccagcagcaggcctggcaggccttgcaccgggagcagcgggagctcgtcgctgtcctgagggaacccgaatag

SEQ ID NO: 171158 - DNA, 1068 bp, Artificial Sequence
  derived and/or modified sequence
aacttcaacatggccgaagcaagtagcgccaatctaggcagcggctgtgaggaaaaaaggcatgaggggtcgtcttcggaatctgtgccacccggcactaccatttcgagggtgaagctcctcgacaccatggtggacacttttcttcagaagctggtcgccgccggcagctaccagagattcactgactgctataagtgcttctaccagttgcagcctgcgatgacacagcaaatctatgacaagtttatagctcagttgcagacatctatccgggaggaaatctctgacatcaaagaggaggggaacctagaagctgtcttgaatgccttggataaaattgtggaagaaggcaaagtccgcaaagagccagcctggcgccccagcgggatcccagagaaggatctgcacagtgttatggcaccctacttcctgcagcaacgggacaccctgcggcgccatgtgcagaaacaggaggccgagaaccagcagctggcagatgccgtcctggcagggcggaggcaggtggaggagctgcagctacaggtccaggcccagcagcaggcctggcaggctctacacagagaacagagggagctggttgctgtgctgagggagcctgagtgaggagaccgccagccccagaagcagagggcagtcaaggtcaagagcctgtggtccagcatgcctggcctgggcgggctacctctgagaacggctgaaatggtgcccagtccatcagcagtgatggaatttgctggaggactaggccagagcaagcctcactgccactgtgcctttggggcacccttggggttggacatacaccccctttagattcctctgtttcttctacctggataattcttggccatgttctctcttctctaggttcaggtcagctctgcccctccgcccccctcctgctggttccccagcccttttccctggccctggcttggagaatctgttttcaatctccactgattgcccccttgctggccagcccaggggcctttaccatgttctctccacatccgtaaataaacttccttcactacactgtaa

SEQ ID NO: 171159 - DNA, 618 bp, Artificial Sequence
  derived and/or modified sequence
atggccgaggccagcagcgccaacctgggcagcggctgtgaggagaagagacatgagggcagcagcagcgagagcgtgcccccaggcaccaccatcagccgggtgaagctgctggacaccatggtggacaccttcctgcagaagctggtggccgccggcagctaccagcgcttcacagactgctacaagtgcttctaccagctgcagcctgccatgacccagcagatctatgacaagttcatcgcccagctgcagaccagcatccgggaggagatcagtgacatcaaggaggagggcaacctggaggccgtgctgaatgccctggacaagatcgtggaggagggcaaggtgaggaaggagcccgcctggaggcccagcggcatccctgagaaggacctgcacagcgtgatggccccctacttcctgcagcagagggacaccctgcggagacatgtgcagaagcaggaggccgagaaccagcagctggctgatgctgtgctggccggccggcggcaggtggaggagctgcagctgcaggtgcaggcccagcagcaggcctggcaggccctgcaccgggagcagcgggagctggtggccgtgctgcgggagcctgagtag

SEQ ID NO: 171160 - DNA, 618 bp, Artificial Sequence
  derived and/or modified sequence
atggccgaggccagcagcgccaacctgggcagcggctgcgaggagaagcggcacgagggatctagctccgaaagtgttcctcccggaacaacgatcagcagagtgaaactcctagatacaatggtagatacctttctgcagaaattggttgctgctggaagttaccagcgttttactgactgctacaagtgtttttatcagcttcagccggccatgactcagcaaatatatgacaaattcattgcgcagttgcagacctctatacgagaggagatctctgacatcaaggaagagggtaatctggaggcagtcctgaatgcactcgataaaattgtggaagagggaaaggtacgcaaggagcctgcatggcgcccctcagggatccctgagaaagaccttcatagtgtcatggcaccatatttcctccagcagagagatactcttcgcaggcacgtgcagaagcaggaggctgaaaaccagcagctggctgacgctgtgctggcagggcgaaggcaggtcgaagagttgcagctccaggtccaggcgcagcaacaggcctggcaggctctgcatagggaacagcgggaattagtagccgtgctgcgcgaacccgaatag

SEQ ID NO: 171161 - DNA, 618 bp, Artificial Sequence
  derived and/or modified sequence
atggccgaggcctctagcgcaaacttggggagcgggtgcgaggagaaacggcatgagggctcctctagcgaatctgtacctcctggcactaccatatccagagttaagctgctggatactatggtggacacctttcttcagaagcttgtggccgctgggtcctaccagcggttcactgattgttataagtgtttttaccagctgcagccagctatgactcagcaaatatatgacaaatttattgcccagttgcagacttccatcagagaagagatttctgacattaaagaggagggcaacctcgaggcggtcctgaatgccctcgacaaaatagttgaagaggggaaggtacgcaaagagccagcctggcgcccatccgggatacctgagaaagatcttcactccgtaatggcaccttacttcctgcagcagcgtgacactctaagacggcatgttcagaagcaggaagctgagaatcagcagttggccgacgccgtcctggcaggcagacgtcaagtagaagagctgcagttacaggtgcaggcccagcagcaggcatggcaggccctccaccgtgaacagagagaactggtagcggtgctgcgcgaacctgagtag

SEQ ID NO: 171162 - protein, 873 aa, Artificial Sequence
  derived and/or modified sequence
MASRRKSTTPCMVLASEQDPDLELISDLDEGPPVLTPVENTRAESISSDEEVHESVDSDNQQNKKVEGGYECKYCTFQTPDLNMFTFHVDSEHPNVVLNSSYVCVECNFLTKRYDALSEHNLKYHPGEENFKLTMVKRNNQTIFEQTINDLTFDGSFVKEENAEQAESTEVSSSGISISKTPIMKMMKNKVENKRIAVHHNSVEDVPEEKENEIKPDREEIVENPSSSASESNTSTSIVNRIHPSTASTVVTPAAVLPGLAQVITAVSAQQNSNLIPKVLIPVNSIPTYNAALDNNPLLLNTYNKFPYPTMSEITVLSAQAKYTEEQIKIWFSAQRLKHGVSWTPEEVEEARRKQFNGTVHTVPQTITVIPTHISTGSNGLPSILQTCQIVGQPGLVLTQVAGTNTLPVTAPIALTVAGVPSQNNIQKSQVPAAQPTAETKPATAAVPTSQSVKHETALVNPDSFGIRAKKTKEQLAELKVSYLKNQFPHDSEIIRLMKITGLTKGEIKKWFSDTRYNQRNSKSNQCLHLNNDSSTTIIIDSSDETTESPTVGTAQPKQSWNPFPDFTPQKFKEKTAEQLRVLQASFLNSSVLTDEELNRLRAQTKLTRREIDAWFTEKKKSKALKEEKMEIDESNAGSSKEEAGETSPADESGAPKSGSTGKICKKTPEQLHMLKSAFVRTQWPSPEEYDKLAKESGLARTDIVSWFGDTRYAWKNGNLKWYYYYQSANSSSMNGLSSLRKRGRGRPKGRGRGRPRGRPRGSKRINNWDRGPSLIKFKTGTAILKDYYLKHKFLNEQDLDELVNKSHMGYEQVREWFAERQRRSELGIELFEENEEEDEVIDDQEEDEEETDDSDTWEPPRHVKRKLSKSDD

SEQ ID NO: 171163 - DNA, 4937 bp, Artificial Sequence
  derived and/or modified sequence
acaggtcagagttgactccctgaaaagtgcagccggtttgaaatgcaagatggcggcggcgtggcgctgagaggcgcggcggcccctgcaggagaagacagactgctgctttggacctgttggtaatgatggcctgagctaaacatctaactagaagggatacccttccatttcaaagaacagaatgctaaggaagctgtggcaagtgattggagttgtgcttcaaaaatttcagaaattcagcagtattttatctgccaacaataagctctttacttgattgcaccatgagaaagctgctaatgagacttgttgagcacaaaaatggacttgaagaaccaaaagccattgttttcaaatgaagaacactgaacagttttaagcctcgatgctttttaatcaccactgagcttttcctcataacatcagaatggcaagcaggcgaaaatcaacaacaccttgcatggtccttgccagtgaacaagatccagaccttgagttgatatcagatttggatgaaggtcctcctgtgcttacacctgtagaaaacaccagagcagagagtatctcaagtgatgaagaggttcatgaatctgtggattcagacaatcagcaaaataaaaaagttgaaggtggatatgaatgtaaatattgtacttttcaaactccagatctaaatatgtttacttttcatgtggattcggaacatcccaatgtagtgctaaattcatcctatgtttgtgtcgaatgcaattttcttaccaaaaggtatgatgcactttctgagcataatctgaaatatcacccaggagaagagaattttaagttgactatggtgaaacgtaataaccagacaatctttgaacaaacaataaatgatctgacttttgatggtagttttgttaaagaggagaatgcagagcaagcagaatctacagaagtttcttcttcgggaatatctatcagtaaaactcctatcatgaaaatgatgaaaaataaagtggaaaataaacggattgcagttcatcataactcagttgaggacgttcctgaagagaaagagaatgaaatcaaaccagaccgtgaagaaattgtagaaaatccaagttcttcagcttctgaatctaatacaagtacttccattgtaaacagaatacatccaagtactgccagcacggtagtgacaccagcagcagttcttcctggattggcacaggtgataactgctgtatctgctcagcagaattctaatttgattcccaaagtcttaatccctgttaatagcattcccacctacaatgctgcattggataacaatccccttttacttaacacctacaacaagttcccttacccaacaatgtcagaaattacagttctttctgctcaagcaaaatatacagaggaacagatcaagatatggttttcagcccaacgtttaaaacatggtgttagttggactcccgaggaagtagaggaggcaagaaggaaacaattcaatggaacagtgcatactgtacctcagaccataactgttattcctacacacatttccacagggagtaatggtttaccatctattttacagacatgccaaatagttggtcagcctggtctggtccttactcaagtggctggaacaaacaccttgccagttacagcacctatagccttgacagtggcaggcgttccaagtcaaaataatatacagaaaagtcaggtacctgctgctcagcctactgcagaaacaaagccagcaacagcagcagttccaacttctcaaagtgtcaaacatgaaactgcattggtaaaccctgattcatttggcattcgggcaaaaaagacaaaagagcaactggcagaattaaaagttagctaccttaaaaatcagtttccccatgattcagaaattatcagacttatgaaaataacaggcctgacgaaaggagagattaaaaaatggtttagtgacacaaggtacaaccagagaaattcaaagagtaatcagtgcttacatctcaacaatgattcctctaccaccattattatagactccagtgatgaaaccacggaatccccaactgttggtactgcacagcctaagcaatcctggaatccttttcctgactttactccccaaaagtttaaagagaaaactgcagagcagcttcgtgtccttcaggcaagttttctcaacagctctgtacttacagatgaagaattaaataggttaagggcacaaaccaaacttaccagaagagaaatcgatgcttggtttacagagaagaagaaatcaaaagctttaaaggaagagaaaatggaaatagatgaaagtaatgcaggtagttccaaagaagaagctggagaaacttctcctgcagatgaatctggtgcacctaagtcagggagtacaggcaagatatgtaaaaaaacacctgagcagctgcacatgcttaagagtgcatttgtccggacacagtggccatcaccagaagagtatgacaagttggccaaagaaagcgggcttgctagaacagacatagttagttggtttggggacacccgttatgcttggaagaatggaaacttgaaatggtactactactatcagagcgccaattcaagtagtatgaatggtctgtcttcccttaggaaaagagggagagggagacccaaaggacggggaagaggaagaccgcgtgggcggcctagaggaagcaaaagaattaacaactgggacaggggaccatcactcataaaatttaaaactggaactgcaatacttaaggattattacctgaagcacaagtttcttaatgagcaagaccttgatgaacttgttaacaaatcacatatgggctatgagcaggtcagagagtggtttgcagaaagacagagaagatcagaattaggtatagaattatttgaggaaaatgaggaggaagatgaagttattgatgaccaggaagaggatgaagaagaaacagatgatagtgacacttgggaacctccacgacatgtgaaacggaagctgtctaaatcagatgactgaaatctgcctaaaacgttgaaggagaatcaattcttcaactcaagatgtctgatttactgtgaatttgcccaatctttgatgacattgaaaacgttttggggcatacacactcaaaaagcaggatccaatacccaaaagaaatggaacttaatgttgtgccaaagttaaactactgcagttggtggaagttctgcaatgtaaatagaacactaattaaaaaacaacttgtaaaaatgcaatttaaattttaatacagtacatttttcttctaatatgatggagacattctgaatcttagactttctgagggggtttaatgaccactagagcttgtcctcatattcagtccagtttaatactgtatgtctagtaagatgggctatatattgcctctattctttgagatgtgattaagcttagaactttgaccaaaaattttacagtaaaaattgttagaaatgggtaaaaaaaaaaaaaaaaaaaaaaccctgatttattactatgtcttatttatcagaccctgcactaagattaaaagttgtgcatgggcttatacaatttcaaatgtaaaaacagcctatttatatatgttgaaacaataagattttatggtttcactggcccttaataattggatccttcattaaacacatccatgaataccactgtttctactgttacttgttccattagaagctgatttgctttttattaaactgcaggaaattaattctgaagaaggaaaagaaactgacatggtaatttggatagggtgaagctttgaaataaatactgcaccaaaaatgtgaaaaagaatcacgtagtaaatgtatacttagtgttttcttacaatcgtggaaatcagaaatgtttatacaggtgtcagatcagaatttttaagagttatctttcagtgaaattttataacagtttcagtgaatagagaaaaaattctgaactgatcataatgagttaaaagttagcttttcacttatgaatcatgggagtgttaactgttaactcttgccgtatcaggagactgaaagttcatactaatttacaaactttgtaaagactggtgctgttcattcatattgggaagaaccctttcttttgtgaccataggaccatttttcaaaatgcgctttcttcgtagaagaaatgttcagtttaattagctttggattttaacatgtttttctgaatgaccagatgtaggcttagccagtttattttctctaatttaatggataataaatattaagctcttggttaaatgtttttcagccattgaaaatgttatgaaaaagccttgaatatgcatgctgctttcatttttataaactttttattttttaactatagctttattagtaattccaaaatgctgcaatgtagctgatttcctcactcagacagctggctttgtgggtggcttttttcatactactgttaacttttttaaaaaagaagcaatgtaaagaccgtaatgcactaagctttttttttttcttttacacgtttaaaaacttcttaaagcactctgtaatataatgattaaattgctcccttttataaacattgctaatgtggtctgagttttgtttgacaataattttaatgttctcaaaatttgaaatgtcaagtattagaaatgaagcctttgaatatagttgtttcccttgcaatatgttaactctgtgtagctgtatataactattaatttccctcatctcttttataggcctgataaaactcttctctgacgtttgctagcttttaaatatatttatttgacagagcaaaagaaccctcttctggttgattgtgaccttgaatacaaaataaaagtagtgattagtagtttaaaaaaaaaaaaaaaaaa

SEQ ID NO: 171164 - DNA, 2622 bp, Artificial Sequence
  derived and/or modified sequence
atggccagcagaagaaagagcaccaccccctgcatggtgctggccagcgagcaggaccccgacctggagctgatcagcgacctggacgagggcccccccgtgctgacccccgtggagaacaccagagccgagagcatcagcagcgacgaggaggtgcacgagagcgtggacagcgacaaccagcagaacaagaaggtggagggcggctacgagtgcaagtactgcaccttccagacccccgacctgaacatgttcaccttccacgtggacagcgagcaccccaacgtggtgctgaacagcagctacgtgtgcgtggagtgcaacttcctgaccaagagatacgacgccctgagcgagcacaacctgaagtaccaccccggcgaggagaacttcaagctgaccatggtgaagagaaacaaccagaccatcttcgagcagaccatcaacgacctgaccttcgacggcagcttcgtgaaggaggagaacgccgagcaggccgagagcaccgaggtgagcagcagcggcatcagcatcagcaagacccccatcatgaagatgatgaagaacaaggtggagaacaagagaatcgccgtgcaccacaacagcgtggaggacgtgcccgaggagaaggagaacgagatcaagcccgacagagaggagatcgtggagaaccccagcagcagcgccagcgagagcaacaccagcaccagcatcgtgaacagaatccaccccagcaccgccagcaccgtggtgacccccgccgccgtgctgcccggcctggcccaggtgatcaccgccgtgagcgcccagcagaacagcaacctgatccccaaggtgctgatccccgtgaacagcatccccacctacaacgccgccctggacaacaaccccctgctgctgaacacctacaacaagttcccctaccccaccatgagcgagatcaccgtgctgagcgcccaggccaagtacaccgaggagcagatcaagatctggttcagcgcccagagactgaagcacggcgtgagctggacccccgaggaggtggaggaggccagaagaaagcagttcaacggcaccgtgcacaccgtgccccagaccatcaccgtgatccccacccacatcagcaccggcagcaacggcctgcccagcatcctgcagacctgccagatcgtgggccagcccggcctggtgctgacccaggtggccggcaccaacaccctgcccgtgaccgcccccatcgccctgaccgtggccggcgtgcccagccagaacaacatccagaagagccaggtgcccgccgcccagcccaccgccgagaccaagcccgccaccgccgccgtgcccaccagccagagcgtgaagcacgagaccgccctggtgaaccccgacagcttcggcatcagagccaagaagaccaaggagcagctggccgagctgaaggtgagctacctgaagaaccagttcccccacgacagcgagatcatcagactgatgaagatcaccggcctgaccaagggcgagatcaagaagtggttcagcgacaccagatacaaccagagaaacagcaagagcaaccagtgcctgcacctgaacaacgacagcagcaccaccatcatcatcgacagcagcgacgagaccaccgagagccccaccgtgggcaccgcccagcccaagcagagctggaaccccttccccgacttcaccccccagaagttcaaggagaagaccgccgagcagctgagagtgctgcaggccagcttcctgaacagcagcgtgctgaccgacgaggagctgaacagactgagagcccagaccaagctgaccagaagagagatcgacgcctggttcaccgagaagaagaagagcaaggccctgaaggaggagaagatggagatcgacgagagcaacgccggcagcagcaaggaggaggccggcgagaccagccccgccgacgagagcggcgcccccaagagcggcagcaccggcaagatctgcaagaagacccccgagcagctgcacatgctgaagagcgccttcgtgagaacccagtggcccagccccgaggagtacgacaagctggccaaggagagcggcctggccagaaccgacatcgtgagctggttcggcgacaccagatacgcctggaagaacggcaacctgaagtggtactactactaccagagcgccaacagcagcagcatgaacggcctgagcagcctgagaaagagaggcagaggcagacccaagggcagaggcagaggcagacccagaggcagacccagaggcagcaagagaatcaacaactgggacagaggccccagcctgatcaagttcaagaccggcaccgccatcctgaaggactactacctgaagcacaagttcctgaacgagcaggacctggacgagctggtgaacaagagccacatgggctacgagcaggtgagagagtggttcgccgagagacagagaagaagcgagctgggcatcgagctgttcgaggagaacgaggaggaggacgaggtgatcgacgaccaggaggaggacgaggaggagaccgacgacagcgacacctgggagccccccagacacgtgaagagaaagctgagcaagagcgacgactag

SEQ ID NO: 171165 - DNA, 2622 bp, Artificial Sequence
  derived and/or modified sequence
atggcttccagacgcaaaagtacgactccatgtatggttctggccagcgagcaggacccagatctcgagctgattagcgacctagatgaagggccacctgtgctcaccccggttgaaaatacaagagcagagagtatatcctctgacgaggaggtccatgaaagcgtagatagtgacaatcagcaaaacaagaaagtggaaggcgggtatgagtgcaaatactgtacctttcaaacaccagatcttaacatgtttacatttcacgtcgactctgaacacccaaacgttgtattaaactcctcgtacgtgtgcgtcgagtgcaactttctcacaaaaagatacgacgcgctgtctgagcacaatctaaagtatcatcccggagaggagaattttaagctcaccatggtgaagcgtaacaatcagacaatctttgagcagactataaacgacctcacctttgacggaagttttgtgaaggaggaaaacgccgagcaggccgaaagtaccgaggtgagctcaagcggcatttccattagtaaaacccctattatgaagatgatgaaaaataaagtggagaacaaaagaatcgcggttcaccacaactctgttgaggatgtcccggaggaaaaggagaacgagatcaagcccgacagagaagaaatcgtagagaacccctcaagttctgccagcgaaagcaacacgtcaacatccatagtgaaccgcattcacccttcgacagccagcaccgtcgtaactcccgccgctgtgttgcctggcctggcacaggtcattaccgcggtgtctgcgcagcagaactctaacctgattccgaaagtgcttattcccgtaaatagcatccctacttataacgcggctcttgacaacaatcctctgctactgaatacctacaataagttcccatatccaacaatgtctgaaatcaccgtgctgtccgcccaagctaagtatactgaagagcaaataaaaatctggtttagcgcccagaggttaaaacatggagtgagttggacaccagaggaggttgaagaggctagacgaaagcagttcaacggcactgtacatacagtgccacaaacaatcactgttatacctacccatataagtaccggaagcaacggcctaccttcaatactccagacatgccaaattgtggggcagcctgggctagtgttgacacaggtagctgggacaaatacactcccagtcaccgccccaattgcattaacagttgcgggggtgccaagccagaataacattcaaaagtcacaggtaccagccgcgcagccgactgctgagacaaagcctgctaccgctgctgtgcccaccagccagagtgtaaagcatgagactgcccttgtcaacccggacagttttgggatcagagcgaaaaaaaccaaggagcaactggctgagttgaaggtgtcatacctgaagaatcagtttccacacgatagtgaaattatcagactcatgaaaattactggactcactaagggggagatcaaaaagtggtttagtgacacccggtataatcagcgcaacagcaaatctaaccagtgtctgcatctcaacaacgactcttcaaccaccattattattgattcctcagacgagacaaccgaaagtcctaccgtgggtactgctcaacccaaacagtcttggaatccattcccagactttaccccgcagaagttcaaagagaaaactgctgaacagctgcgcgtgctgcaagctagcttcctgaacagcagcgttctaaccgatgaggagctgaaccgactgcgtgcacaaaccaaactaacccgcagggagatcgacgcttggtttaccgaaaagaaaaagtctaaagctctgaaagaagagaagatggagattgacgaaagtaacgccggctcatccaaagaggaagccggagaaacatcacctgccgatgagtctggcgcgccgaaatccggctccaccggtaagatctgcaaaaagacccctgaacaactgcacatgctgaagtcagcattcgtgaggacacagtggccttcccccgaagagtatgacaaacttgccaaggagtccggtctggccaggacagacatcgtttcctggtttggcgatacaagatatgcatggaagaacgggaatttgaagtggtattactattaccagagtgctaactcctccagcatgaacggcctgagttccctgcggaagagaggccgcgggagacccaaaggacgcggccggggccgccctcgaggccgcccgcggggcagtaaacggatcaacaactgggaccgaggaccaagtttgataaagtttaagacaggtacagccatcctgaaggattattaccttaagcataagttccttaacgagcaggacctggatgagctagtgaacaagtcacatatgggctacgagcaggtcagggaatggtttgcagaaaggcagcgacgctcagagctcggcatcgaactctttgaggagaatgaagaagaagatgaggtgatcgacgaccaggaggaagacgaggaagaaaccgatgactctgatacatgggaacctccgcgccacgtgaaacgcaaattatcgaagagcgatgattag

SEQ ID NO: 171166 - DNA, 2622 bp, Artificial Sequence
  derived and/or modified sequence
atggcttcacgcaggaaatctactactccgtgtatggtattagcgagtgagcaggaccctgacctcgagctaatttctgatctcgatgaaggacctccagtcctgacccccgtagaaaatacgcgagccgagtcaataagtagcgatgaagaggtgcatgagtccgtggatagcgataaccagcaaaataagaaagtcgaggggggttacgaatgcaaatactgcacatttcagacaccagaccttaacatgtttacttttcatgtcgattccgagcaccccaatgtggtacttaattcaagctatgtatgtgtggagtgcaactttcttactaaacggtatgacgcgctcagcgagcataacttgaagtatcacccgggcgaagaaaattttaaacttactatggttaagcgaaataatcagacaatttttgagcagaccattaacgacctgacttttgacgggtcattcgtgaaggaggaaaacgccgagcaggctgagagcaccgaagtttcaagctccggtatttctatctctaagacccctattatgaagatgatgaagaacaaagtcgaaaataagaggatcgcagtccaccacaactccgttgaagatgtcccagaagaaaaagagaacgagattaaaccagaccgagaagaaattgtggaaaatcctagttccagtgcctcagaatcaaacacgtccacctctattgtgaaccgcatacatcccagtacagcttctacggtggttacccccgcagcagttttacctggtttagcgcaggtaattacagccgtgtccgctcagcagaatagcaatctgattccaaaggtgttgattccagtgaattctatccccacctataatgcagccctggacaataatcctcttctactaaacacctacaataagttcccgtaccccaccatgagcgaaatcacggtcttgtctgcccaggccaaatatacagaggagcagatcaagatatggttcagtgcgcaacggctgaagcatggggtgtcctggactccagaggaagtggaggaggccagacggaaacagttcaacgggacagtccataccgtgccccagactatcactgtgatccccacccacatctccacgggctccaatggcctaccatctatccttcagacatgtcagatagttgggcagccagggctggtgctgacccaggtcgctggtacaaacacactgcccgtcactgcacctattgccctcacggtggccggcgttccaagccagaataatatccagaaaagccaggtgcccgccgcacaacctactgccgaaacgaagcctgccacggcagctgtaccgactagtcaaagtgtgaaacacgagactgcacttgttaatcccgactcatttggcatccgtgcgaagaagaccaaggaacagctagctgaactcaaagtatcttacttaaagaatcagttcccacatgatagcgaaatcatccgcctgatgaaaatcacgggcctgaccaaaggggaaattaaaaaatggtttagtgatacacgttataaccaaaggaactccaaatccaatcagtgcttacacctgaataacgattccagcaccaccataataattgattcaagcgacgagacaaccgaatcccccactgttggcactgcccagcccaagcagagttggaaccccttcccagacttcacaccccagaaattcaaggaaaagacagccgagcagctgcgagtcctgcaggcgagctttcttaactcaagtgtgctgaccgatgaggagttgaaccggctgagagctcagaccaaactgacaaggcgagagattgacgcctggtttaccgagaagaagaagtccaaggccctgaaggaagagaagatggaaattgacgagtctaatgcggggagctctaaggaggaggccggagaaacaagccccgccgatgagtcgggagcccccaagtccggttctaccgggaagatttgcaagaagactcccgagcagctgcacatgttgaagtccgcatttgtgaggactcagtggcctagccccgaagagtacgacaagctggcaaaagagagcgggttggctaggaccgatatcgtgtcctggtttggcgataccagatatgcctggaaaaacggcaaccttaaatggtattattattatcagtctgcgaactcatcaagcatgaacggtctaagctctctgaggaagcggggccggggcagaccaaagggccgtggtaggggtcggcctcgggggcgccccagaggctccaagcggattaacaattgggatagaggccctagcctgatcaagttcaaaaccggtaccgctattttaaaagattactacctgaagcacaagtttttgaacgagcaagatctggacgagttggttaacaaaagtcacatggggtacgagcaagtgcgggagtggttcgctgaaagacagcggcgatcagaacttggtatcgaactgttcgaggaaaatgaggaggaggacgaagttatagatgaccaggaagaggacgaagaggagaccgatgatagcgacacatgggagcctccacgacatgtgaagcgaaagcttagcaaatccgatgactag

SEQ ID NO: 171167 - DNA, 2622 bp, Artificial Sequence
  derived and/or modified sequence
atggctagtcggcgaaagtccaccactccctgcatggtccttgcctcagagcaagaccccgatttggaactgattagcgatctggacgagggcccacccgtcctaacgcctgtggagaataccagggcggaatccatcagcagtgacgaagaagtccacgaaagtgttgattccgacaaccagcagaacaaaaaggtggaaggcggttacgaatgcaaatattgcacgtttcagacaccagaccttaatatgttcactttccacgtagatagtgaacaccccaatgtggtgctgaacagctcgtacgtctgtgtcgaatgtaactttctgaccaagcgctatgatgccttaagcgaacacaatctgaagtatcatcctggcgaggagaattttaaactgaccatggtgaaacgcaataatcaaactatcttcgagcagaccataaatgatctgacttttgacgggtcgttcgttaaagaggaaaatgcagaacaggcagaatccacggaagtgtcttcaagcggaatttctatatcaaagacccccattatgaaaatgatgaagaataaagtagagaacaagcggatcgccgtgcaccacaattccgttgaagatgttcctgaagaaaaagagaacgagataaaaccagatagggaggaaatcgtagaaaatcctagttcctccgcctcggaatctaatactagtacatcgatcgtgaatcgtattcacccctctacggcttccactgtggtgacccctgcggcagtgctccccggattggcacaggttattaccgcagtctctgcccagcagaactcaaacctgattcctaaagtgctgattccagttaattctattcctacttacaatgccgcgctcgacaacaaccccctactgttgaacacatacaacaagtttccctaccccacaatgtcagagattactgtgctgagcgcacaggcaaaatataccgaggagcagataaagatttggttttctgcgcaacgtttgaagcacggcgtctcctggacgccggaagaagttgaagaagcacgcaggaaacagttcaatggtactgtgcacaccgtcccccagaccatcacagtgattcctacacacattagcacaggcagcaacggactcccctcaattctacagacttgccagatcgtgggtcagcctggcctcgtattaacacaggttgccggtacaaacacactgcccgtgaccgctccaatcgctttgacagtcgccggtgttcccagtcagaacaatatccaaaagtctcaagttccagccgctcaacctaccgccgagaccaagccggccactgccgcagttccaacgagtcagtccgtgaagcatgagacagcactggtgaatcctgatagttttggcatacgggctaagaaaacaaaggaacagttggccgagctaaaagtgtcctatcttaagaaccagttcccccatgacagtgagatcattaggttgatgaaaatcacaggtctcaccaaaggggagattaagaaatggttctccgacacccggtacaaccagcggaatagtaagtcaaatcaatgcctacatctcaataacgactccagtaccactattataattgactcatcagacgaaacaaccgaaagccctactgtggggacagcccagccaaaacagtcgtggaatccgttccccgacttcaccccacagaagtttaaggaaaagaccgcagagcagctgagagtgttgcaggcctcttttctgaacagttccgtgctgactgacgaagaactgaatcgactgcgggcacagaccaagttaactcgtcgcgagattgatgcgtggtttacagagaagaagaagtccaaagccttaaaagaggagaaaatggaaattgacgaaagcaatgcgggttcctcaaaagaggaggcaggagaaacctcccccgccgacgaatcaggcgcccccaaaagcggctctactggcaaaatctgcaaaaagaccccagaacagctgcacatgctgaaatcagcttttgtccggactcaatggccttcccccgaggagtacgataaactcgcaaaagagagcggtttggctaggacagatattgtctcatggttcggcgatactcgttatgcttggaaaaacggcaatctaaagtggtactactactatcagagcgctaactcctctagcatgaatggactctctagcctgaggaaaagaggccggggcaggcccaagggacgcggtaggggcagaccacgaggtcgtccccggggttccaaacgcattaacaactgggataggggccctagcctgatcaaattcaaaactggaaccgctatactgaaagactattaccttaaacacaaattcctgaatgagcaggacctggacgagttagtgaacaaatctcatatggggtacgaacaagtgcgagaatggtttgctgagcgccagaggaggtcagaacttggaatcgagctctttgaagagaacgaagaagaagatgaggtaatagatgaccaggaagaggacgaggaagaaacggatgattcggacacctgggagcctcccagacacgttaagcggaagctgtctaagagcgacgattag

SEQ ID NO: 171168 - DNA, 2622 bp, Artificial Sequence
  derived and/or modified sequence
atggccagcaggaggaagagcaccaccccctgcatggtgctggccagcgagcaggaccctgacctggagctgatcagtgacctggatgagggcccccctgtgctgacccctgtggagaacaccagggctgagagcatcagcagtgatgaggaggtgcatgaatctgtggacagcgacaaccagcagaacaagaaggtggagggcggctatgagtgcaagtactgcaccttccagaccccagacctgaacatgttcaccttccacgtggacagcgagcaccccaacgtggtgctgaacagcagctatgtgtgtgtggagtgcaacttcctgaccaagagatatgatgccctgtctgagcacaacctgaagtaccaccctggagaggagaacttcaagctgaccatggtgaagaggaacaaccagaccatctttgagcagaccatcaatgacctgacctttgatggcagctttgtgaaggaggagaatgctgagcaggccgagagcacagaggtgagcagcagcggcatcagcatcagcaagacccccatcatgaagatgatgaagaacaaggtggagaacaagagaattgctgtgcaccacaacagcgtggaggatgtgcctgaggagaaggaaaatgagatcaagccagaccgggaggagatcgtggagaaccccagcagcagcgccagcgagagcaacaccagcaccagcatcgtgaaccgcatccaccccagcacagccagcacagtggtgaccccagctgctgtgctgcccggcctggcccaggtgatcacagctgtgtctgcccagcagaacagcaacctgatccccaaggtgctgatccctgtgaacagcatccccacctacaatgctgccctggacaacaaccccctgctgctgaacacctacaacaagttcccctaccccaccatgtctgagatcaccgtgctgagcgcccaggccaagtacacagaggagcagatcaagatctggttcagcgcccagaggctgaagcatggagtgtcctggaccccagaggaggtggaggaggcccggaggaagcagttcaatggaacagtgcacacagtgccccagaccatcaccgtcatccccacccacatcagcacaggcagcaatggcctgcccagcatcctgcagacctgccagatcgtgggccagcccggcctggtgctgacccaggtggccggcaccaacaccctgcctgtgacagcccccatcgccctgactgtggccggcgtgcccagccagaacaacatccagaagagccaggtgcctgctgcccagcccacagctgagaccaagccagccacagctgctgtgcccaccagccagagcgtgaagcatgaaacagccctggtgaacccagacagctttggcatccgggccaagaagaccaaggagcagctggccgagctgaaggtgtcctacctgaagaaccagttcccccatgacagcgagatcatccggctgatgaagatcaccggcctgaccaagggggagatcaagaagtggttcagtgacacccgctacaaccagaggaacagcaagagcaaccagtgcctgcacctgaacaatgacagcagcaccaccatcatcatcgacagcagtgatgagaccacagagagccccaccgtgggcacagcccagcccaagcagagctggaaccccttcccagacttcaccccccagaagttcaaggagaagacagctgagcagctgcgggtgctgcaggccagcttcctgaacagctctgtgctgacagatgaggagctgaaccggctgcgggcccagaccaagctgacccggcgggagattgatgcctggttcacagagaagaagaagagcaaggccctgaaggaggagaagatggagattgatgagagcaatgccggcagcagcaaggaggaggccggggagaccagccctgcagatgaaagtggggcccccaagagcggcagcacaggcaagatctgcaagaagaccccagagcagctgcacatgctgaagagcgcctttgtgaggacccagtggcccagccctgaggagtatgacaagctggccaaggagagcggcctggccaggacagacatcgtgtcctggtttggagacaccaggtatgcctggaagaatggaaacctgaagtggtactactactaccagagcgccaacagcagctccatgaatggcctgagcagcctgaggaagaggggccggggccggcccaagggccggggccggggccggccccggggccggccccggggcagcaagaggatcaacaactgggaccggggccccagcctcatcaagttcaagacaggaacagccatcctgaaggactactacctgaagcacaagttcctgaatgagcaggacctggatgagctggtgaacaagagccacatgggctatgagcaggtgcgggagtggtttgctgagcggcagaggagaagtgagctgggcatcgagctgtttgaggagaatgaggaggaggatgaggtgattgatgaccaggaggaggatgaggaggagacagatgacagcgacacctgggagccccccaggcatgtgaagaggaagctgagcaagagtgatgactag

SEQ ID NO: 171169 - DNA, 2622 bp, Artificial Sequence
  derived and/or modified sequence
atggccagccggcggaagagcaccaccccctgcatggtgctggccagtgagcaggatccagatttagagctgatatccgatctagacgaggggcctcctgttctgactccagttgagaacacccgggcagaatcaatctcttccgacgaggaggtgcacgagagcgtggattctgacaatcaacagaataaaaaggtagagggagggtacgaatgcaaatactgcacatttcaaacccccgatctgaatatgttcacctttcacgtagacagcgagcatcctaatgtagtattaaactcgagctatgtgtgtgttgagtgcaactttttgactaagagatatgatgccctttctgaacacaacctaaaataccacccgggtgaagagaattttaaactgactatggtcaagcgcaataatcagacaattttcgaacaaaccattaacgaccttaccttcgatggttctttcgtgaaagaggaaaatgctgaacaggcagaatctaccgaggtgtcaagtagcgggatatctataagcaagacacccataatgaaaatgatgaagaataaggtggagaacaagaggatcgccgttcaccataacagtgtagaagatgtgcccgaggagaaggagaacgagatcaaaccagaccgggaggagatcgtggaaaatccatcgtcttcggcatctgaatcaaacacaagcacatccattgtcaataggattcacccatctacggcttcaaccgttgtgacccctgccgccgtgctgcccggactggcacaagtgatcactgccgtttctgctcaacaaaacagtaatctcattccgaaagtgctcattcctgtcaacagcatcccaacatacaatgctgcactcgacaataaccccctcttgcttaacacctacaataaatttccataccctacgatgagcgagatcaccgtgctgagcgcacaggcaaagtacaccgaggagcagattaagatctggttctccgctcagcggctgaagcacggagtgagttggacacccgaggaagtggaggaggctcggagaaagcaatttaacgggaccgttcacacggtgcctcaaaccatcaccgtgattcctacccatattagcacaggctctaacgggctaccttctatcctgcaaacatgccaaatagttgggcaacccggactggtgcttacacaagtcgccggtaccaacacactgcctgtgacagctcccatcgcattaacggtcgccggcgtgccaagccagaacaatattcagaaatcccaagtgcctgctgcccaaccaaccgctgagactaaacccgcaacagctgccgtgcctacttcccagagcgtgaaacacgaaacagccctcgtgaaccccgactcctttggaatccgagctaagaagaccaaagaacaattggctgaactcaaagtgtcatacctgaagaatcagtttcctcacgacagcgaaattatcaggctgatgaaaataacaggccttacgaaaggagagatcaagaagtggtttagcgataccaggtacaatcaacgaaattccaagtctaatcaatgtctgcatctcaacaacgacagcagtaccaccataattattgatagcagcgatgaaaccacggaaagcccgaccgtgggcaccgctcaacctaaacagagctggaacccctttcccgactttacgcctcagaagttcaaggaaaagaccgccgagcaattgagggttcttcaggcgagctttttgaactcaagcgttctgactgacgaagagttaaaccgcctacgcgcgcagaccaagcttacccgaagggagattgatgcatggttcaccgagaagaaaaagagtaaggcactcaaggaagaaaagatggagatcgacgaaagcaacgcagggtccagcaaggaggaagccggtgagaccagcccagcagatgaaagcggcgctcccaagagtggcagcactgggaagatttgtaagaaaaccccggagcagttgcatatgctgaaaagtgcctttgtccgcacacagtggccttctcccgaggaatatgacaagctcgccaaggaaagcggcctggctcgcactgatatcgtgagctggttcggcgatacgcggtacgcgtggaaaaacggcaaccttaaatggtactactattatcagagtgctaactcatctagcatgaacgggttgtctagcctgagaaagagaggacggggccggccaaaaggtcgagggcgtgggaggccccgggggcgtccaagaggatccaaacgaatcaacaactgggataggggtccttccctgattaaatttaaaaccggaacagccatactcaaggattactacctgaaacacaaattcctcaatgaacaggacctagatgagctggtgaacaagtcccacatgggctatgaacaggtgagggagtggtttgcagagcggcagcgccggagcgaactgggcatagagctcttcgaggagaacgaagaagaggacgaagttattgacgaccaggaggaggatgaggaagaaaccgatgatagcgacacctgggaaccccctcgccatgtgaaaagaaagctgtccaaatctgacgattag

SEQ ID NO: 171170 - DNA, 2622 bp, Artificial Sequence
  derived and/or modified sequence
atggccagccggcggaagagcaccaccccctgcatggtgctggcctccgagcaggaccccgacctcgagctcattagtgatttagacgagggcccccccgtgctgaccccagtcgaaaacacccgcgcagaaagtatcagtagtgacgaggaggtgcacgagtccgtcgattctgataaccagcagaataaaaaggtggaggggggctacgagtgcaagtattgcacttttcagacccctgacctgaatatgttcacatttcatgtggactccgagcatcccaatgtggtgctgaattcttcctatgtgtgcgttgaatgtaacttcctcacgaagcggtacgacgctctgagtgagcacaatctcaagtatcacccgggcgaagagaactttaaattgactatggttaagcgaaacaaccagaccatctttgagcaaacaatcaacgacctgaccttcgatgggagcttcgttaaggaggagaatgctgagcaggctgagagcacggaggtgtcctcatcgggaatcagcatcagtaagacccccattatgaaaatgatgaagaataaggttgagaacaagcgcattgcggtccaccataattccgttgaggatgttccagaggagaaagaaaacgagataaaaccggaccgagaggagatcgtggaaaacccatcaagctcagcctctgagtctaatacctccaccagcatcgtaaaccgcatccacccttcaaccgcatccaccgtggtgacgcccgctgccgtactgccgggcctcgcccaagttattacggccgtctctgctcagcagaattccaatctgatccccaaagtgctgatccccgtaaatagcatacctacttataatgcagctctggacaacaatccgctcctcctgaatacctacaataagtttccctatcccaccatgtccgaaatcacggtcctcagcgcccaggccaagtatactgaagagcagattaagatctggtttagcgcgcagcggttgaaacatggcgtgagttggactcctgaagaggtggaggaggcacggcgcaaacagttcaacggcacagttcataccgtgcctcagactatcaccgtgattcctacacacatatccaccggctccaacggcctgccctcaatcctgcagacctgtcagatcgttggccagccagggctggtcttgacacaagtggctgggacgaatacgctaccagttactgctcccattgccctaacagttgcaggggtgccatcccagaataacatccagaaatctcaagtccctgctgcccagcccacagctgaaacgaaaccggccacggcagcagtgccgacaagccaatccgtgaaacatgagactgccttggtaaatccggatagtttcggaatcagggctaaaaagaccaaagagcagctggccgagttaaaggtgagctatctgaagaaccagttcccacacgactctgaaataatccgattgatgaagatcactggcctcactaaaggtgagataaagaaatggtttagcgataccagatataatcagaggaattccaagagcaaccagtgccttcacctaaacaacgatagctctactaccatcatcatcgacagctccgacgagaccactgagagtccaaccgtggggaccgcccagccgaaacagtcgtggaacccattccccgatttcaccccacagaagtttaaagagaaaacagcagaacagctgcgagtgttacaggcatcgttcttgaattcttccgtcctgactgatgaggaattaaatagactcagagcccagaccaaactgaccagaagagaaatcgatgcatggtttaccgagaagaaaaagtccaaagcccttaaggaggagaagatggaaattgacgagtccaacgccgggagttctaaagaggaggctggcgagacctccccagctgacgagagcggcgcaccaaagtctggttctactggcaaaatatgcaagaaaactcctgagcagttgcatatgctgaagtcggcctttgtgcggacccagtggccgtctcctgaggagtatgacaaactggctaaggaaagcgggctcgctagaactgacatcgtctcttggtttggagataccaggtacgcgtggaagaatggcaatctcaaatggtactattattaccagtcagccaattctagttcaatgaacggtttatcctcccttcggaagcgaggaagaggccgaccaaaggggaggggcaggggcagacctaggggaaggccccgggggtcaaagcgcataaataattgggatcgcggtccatctttgatcaagttcaagacaggcacggctatcctgaaagactattacctgaaacacaagtttctgaatgaacaggatctagacgagctggtgaacaagtcacatatgggctacgaacaggttcgcgaatggtttgctgaacgtcagcgccgctcagaactcggaatcgaattatttgaggagaatgaagaagaggacgaagtgatcgatgatcaggaagaggacgaggaggagaccgacgattcagacacgtgggagccaccaagacatgttaagaggaagctcagtaaatccgatgattag

SEQ ID NO: 171171 - DNA, 2622 bp, Artificial Sequence
  derived and/or modified sequence
atggccagccggcggaagagcaccaccccctgcatggtgctggccagcgaacaggaccccgacctcgagctgatttcagatctggatgagggtcctcccgtattaacccctgtggagaacacacgggccgaatccatttcgtctgacgaagaagtccatgaatctgtggattctgataaccaacagaataagaaggttgagggtgggtacgagtgtaaatactgtacatttcagacaccagacctcaatatgtttacctttcacgtggacagcgagcaccccaacgtagtgcttaactcctcttatgtgtgtgtagaatgtaatttccttacaaagagatatgatgccctgagcgaacacaacctgaaataccaccccggcgaggaaaacttcaagcttactatggtcaaacgaaacaatcaaaccattttcgaacaaactatcaacgacctgacctttgacgggtcgtttgttaaggaggagaatgccgaacaagcagagtcaacagaagtaagcagcagtggcatttctatatccaagactcccattatgaagatgatgaaaaataaggtggagaataaacgcatagctgtccatcataattccgttgaggacgtgccagaagagaaggagaacgagattaagcctgacagagaggaaattgtggagaatccgagctcgagcgccagtgaatcaaacaccagcaccagtatagtcaaccggatacatccgtccactgctagtacagtggtgacaccagcagccgttcttcccgggctcgcccaggtgataacagccgtgtcggcccagcaaaatagtaaccttataccaaaagtactgattcccgtgaacagcataccaacttataatgccgctctggataataatcccctcctgcttaatacgtataacaagttcccatatccaacaatgtctgagatcaccgtcttgtcagcacaagccaagtacacagaggagcaaataaagatttggttctccgctcagagactcaagcatggcgtcagctggacacctgaggaggttgaagaagcccggcgcaagcagttcaacggaactgtgcacaccgtgccccagaccatcacagtaataccaacccacatatcaactgggtctaatgggttgcctagtattctccagacatgccaaatagtgggccaacctggtctcgttctgacgcaggttgctggtacgaatacactgccagtcaccgctccgatcgccctgaccgttgccggagtgccctcacaaaataacatccagaaatctcaggtcccagcagctcagcccaccgcggagaccaagcccgccactgcggctgttccaaccagccaaagtgtaaaacacgaaaccgcgctggtaaatccggactctttcgggattcgcgctaaaaaaacaaaggagcagctggcggagctgaaggtctcgtatttgaagaaccagttcccccatgactctgaaataatcaggctgatgaagattacgggacttacgaaaggcgaaatcaaaaaatggttctctgacacccggtataatcagcgcaatagtaagtccaatcaatgcttacatctgaacaacgattccagtacaacaatcattatcgacagctccgacgagaccacagagtcaccgacagtgggaaccgctcaacccaagcagtcatggaatcccttcccagacttcacgccccagaagtttaaagagaagacggcagagcagctgagggtgttacaggctagcttcctgaacagcagcgtgcttacagatgaggagttaaaccgcctccgagcccagaccaagttgacccgccgagaaatcgatgcttggtttaccgaaaagaagaagagcaaggccctcaaggaagaaaaaatggagattgacgaatctaacgctggctcttcaaaagaggaagcgggggagacctcccccgccgacgagtcaggggcacccaagtctggaagcacaggaaagatttgtaagaaaacacctgaacagttgcacatgctcaagagtgcatttgttaggacacagtggccctccccagaagagtacgacaagctggcaaaggagagcgggctggcaagaacagacatcgtatcctggttcggcgacacaaggtacgcctggaagaatggaaaccttaaatggtactactactatcaatccgcaaactccagtagcatgaatgggctgagctccctgcgcaagcgtgggagagggcgtcccaaaggacgcgggcgcggacgccctcgggggaggcctcgcgggtcaaagaggattaataattgggaccgtggtcccagcctaattaaatttaagaccggcaccgcgattctcaaggactattatctcaagcataagttcctgaacgaacaagatctcgatgagttggtgaacaagagccacatgggctacgagcaggtgcgcgaatggttcgcagaacgacaacgtcgaagcgaactgggaattgaactgttcgaggagaacgaagaggaggatgaggttatcgacgaccaggaagaggacgaagaagagaccgatgattccgacacttgggagcccccacgccatgtgaaacgcaagctctcgaaatcagacgactag

SEQ ID NO: 171172 - DNA, 2622 bp, Artificial Sequence
  derived and/or modified sequence
atggccagccggagaaagagcaccactccctgtatggtgctagcaagcgaacaagatcccgatttagaattgatctcagatttagatgagggcccaccagtacttacgccagtagaaaacactcgggctgagtctattagcagtgatgaagaggtgcacgagtccgttgacagcgacaatcagcagaacaagaaggtggaggggggttacgagtgtaaatattgtacttttcaaacgccagatttgaacatgtttacttttcacgtggatagtgaacatcccaatgttgtgttaaactcctcctatgtatgcgtggaatgcaatttcttgacgaaacggtacgacgcactcagtgagcacaacctgaaatatcaccccggagaagaaaatttcaaactgacgatggtgaagcgcaataaccaaactattttcgagcagacgatcaatgaccttacatttgatggttccttcgtaaaagaggaaaatgcagagcaggccgagtccactgaggtgtcaagcagcgggattagtatcagcaagacgcccatcatgaaaatgatgaagaacaaagtggagaataaacggatcgccgtgcatcataactcagtagaagacgtcccggaagagaaggaaaacgaaattaagccagacagggaagagattgtggagaatccctcctcctccgcaagcgagagtaacacctcgacatccattgtgaacagaatccatcccagtactgcaagtacggtcgtcaccccagccgctgttctgcccggactcgcccaggtcattactgcagtctctgcacagcaaaacagcaaccttatccccaaagttctgataccggtgaacagcattccgacatataacgctgctctggataacaatccactgctacttaatacgtacaacaagttcccgtacccaaccatgtctgaaattaccgtactgtctgctcaagctaaatacaccgaggaacagattaagatctggttctctgcccagagactaaaacacggcgtgagctggacgcccgaagaggtcgaagaagccaggcgaaagcaatttaacgggacagtgcacacagtgcctcaaactattaccgtcatccccacacacatttcgaccgggtctaatggcctgccatcaattctgcagacctgccagatcgttggccagccaggcctcgttctcacccaggttgcaggcacaaatacactcccagttacggcacctattgctctaactgtagctggcgtgccgtcacagaataatatccaaaaatcgcaggtcccagccgctcagcccacagccgagaccaagcccgcaaccgcagccgtaccgacctcccagtccgttaaacatgagaccgcgcttgtgaatcctgattcttttgggatccgcgcaaaaaaaactaaagaacaactcgctgagcttaaggtatcatacttaaaaaaccagttcccgcatgattcagaaatcatcagattaatgaaaattacgggcctgacgaaaggggagatcaaaaagtggttctcagatacgcgttacaaccagcgaaacagcaagtccaatcagtgcctgcatctcaataacgactctagcaccacaattattatcgacagcagcgatgaaacgaccgagagccccaccgtgggaacagcgcagccaaagcagagctggaatcctttcccggatttcacccctcaaaaatttaaggagaaaaccgcagaacagttgagggttcttcaggcctcctttctcaactccagcgtgctgacggacgaggaactgaatcgactgcgcgcacagacaaaactgaccagaagagagattgacgcctggttcaccgagaaaaaaaaatccaaagcgctaaaagaggagaaaatggagatagacgaatccaacgctgggtcaagcaaagaggaggccggtgagacctcgcccgctgacgagagcggagcgccaaaatctggtagtacgggaaaaatttgtaaaaagactcccgagcagcttcatatgctcaaatcagccttcgttcgcacacaatggccttctccagaggaatacgataagctggcgaaggaatctggcctcgcgaggacagacatagtgtcttggtttggggacacacgctacgcgtggaagaacggtaacctcaagtggtattattactatcaaagcgccaattcctccagcatgaatggcctgagcagtctgagaaaacgcggacggggacgtcctaagggccgtggccgtggaaggcctagaggtcggcctagaggctccaagagaattaacaactgggacaggggacccagtttgataaaattcaagaccggaacagccatcctaaaagattattatttgaaacacaagtttcttaacgagcaggatctggacgaactggtgaacaagagccacatggggtacgaacaggtaagagaatggtttgctgagcgtcagaggcgatctgagctgggcattgaactctttgaggaaaacgaggaggaggacgaggtgattgacgaccaagaggaagacgaggaggaaaccgatgactctgatacctgggagccaccgaggcatgtgaaaaggaaattatcgaagtcagatgactag

SEQ ID NO: 171173 - DNA, 2622 bp, Artificial Sequence
  derived and/or modified sequence
atggcttctaggcgaaagtccacaacgccctgtatggttctggcttcagaacaggacccagacctggagttgatcagcgatttggatgaaggccctcctgttcttaccccggtagaaaataccagggctgaaagtatttcctccgatgaggaagtccatgaatcggtggatagcgataatcagcagaacaaaaaggttgaaggcggatatgagtgtaagtactgcacattccagactcccgatttgaacatgttcacattccacgtggattccgaacatcccaacgtagtactgaactcctcatatgtttgcgttgagtgcaatttcttaactaagcggtatgatgccttatccgagcacaacttaaagtaccaccccggtgaggaaaacttcaagctgacaatggtcaagagaaacaatcaaactatcttcgagcagacgatcaatgatttaacttttgacggcagcttcgtgaaggaagaaaacgcagaacaggccgagagtaccgaagtgagctcttcgggcatctcaatatctaagacccctatcatgaaaatgatgaagaacaaagtggagaacaagcgaatcgccgttcatcataacagtgtggaggacgtgcccgaagagaaagaaaacgaaatcaagcctgaccgcgaagagattgtcgaaaatccgtcatccagtgcctcggagtcaaacacctccacaagcatagtgaaccgcatacaccccagcactgctagtactgtggtcaccccagccgctgtattgcccggtttagcacaggttataacagctgtttccgcgcaacagaactccaacctgatccctaaggtcctgatccccgtaaactccattcccacttacaacgcggctctggacaacaaccccttgctcctcaatacctacaataaatttccatatcctacgatgtcagaaattaccgtgctcagcgcccaggcaaaatacacagaggagcagatcaaaatttggttttctgcccagcgattgaagcatggggtgagctggacacccgaagaggtggaagaagcaagacggaagcagttcaatggaacagttcatacagtgccccagacaattaccgtcatccctacccacatcagcactggcagcaacggcctgccttctattttacagacgtgtcaaatcgtaggtcagcccggactggtcctgacacaagtcgctggcaccaacaccctgcctgtcacggcgccaattgcactgacggtagccggagtgcccagtcagaataacattcagaagagccaggtaccagctgcccaacctacagctgagactaagcctgcaacagctgcagttcctacctcccagtctgtcaagcatgaaacagccctggtaaaccctgattccttcggcatccgggcaaagaaaaccaaggagcagctcgccgagttgaaagtttcctacctgaaaaatcaatttccacatgactccgaaattatccggcttatgaagattacgggacttacaaagggagaaattaaaaagtggttttccgatacccgatacaaccaacgcaacagtaaatctaatcagtgtcttcacctgaacaatgattccagcacgaccatcattatcgactccagtgatgagacaaccgaaagcccaacagtcggaacagcacagccaaaacagtcatggaacccctttcctgacttcactcctcagaagttcaaggagaagactgccgagcagctcagagtgctacaggcttcctttcttaattctagcgtcttaacagatgaagaactgaaccgacttagagctcaaaccaaactgactagacgcgagatagacgcttggtttaccgaaaaaaaaaagagtaaagcactgaaagaagagaagatggagattgacgaatccaatgccggaagctctaaggaagaggccggagaaacttcacctgctgacgagagtggcgctcctaagagcggctccacaggcaagatctgcaagaagaccccggaacagctccatatgctgaagagtgcatttgtcaggactcagtggcccagcccggaagagtacgataaactcgctaaagagagtggtcttgcaaggaccgacatcgtgtcttggtttggggacacccgctatgcatggaagaacggaaacctgaagtggtactattattaccagagcgcaaactcctcttccatgaatggcttatcttctctacggaagcgcggacgcggtcgccctaagggtcgtggtagaggccgtcccaggggtcggcctcgcggtagcaagaggatcaataactgggataggggccctagtctcataaagtttaaaaccgggaccgccatccttaaggattactatcttaaacacaaatttctcaatgagcaagacctggacgagctcgtcaacaaatctcacatgggctacgagcaggtccgagagtggtttgcagaacgtcagaggcgctcggaactgggcatagagttgttcgaagagaacgaggaagaagatgaggtcatcgacgatcaggaggaggatgaggaggaaaccgacgacagcgatacctgggagccccctcgacatgttaagcggaagttatcgaagtccgatgattag

SEQ ID NO: 171174 - DNA, 2622 bp, Artificial Sequence
  derived and/or modified sequence
atggcgtccaggaggaagagcaccacaccgtgcatggtgttggcgagtgagcaggacccggatctcgagttaatttccgatctagatgaaggaccgcctgtccttactcccgtggagaacactagggcagagtcgatctcctcagacgaggaagtccacgaaagtgtggattctgataaccaacagaataaaaaggtggaaggcggatatgagtgcaagtattgtactttccagactcctgatttgaatatgtttacgttccacgtagactccgagcatccaaacgtggtactgaactctagttatgtctgtgtggagtgcaacttcctgacaaagagatatgacgcattgagcgagcataatctgaagtaccatcccggagaggaaaactttaagctgacaatggtaaaacgaaacaaccaaactatcttcgaacaaacaatcaatgatctaacttttgatggctcttttgttaaggaggaaaatgccgaacaggccgagagtaccgaggtaagcagctccggcatctcaatttccaaaacccccattatgaagatgatgaaaaataaagtggagaataaaaggatagctgttcatcacaactctgtggaggacgtcccggaagagaaagagaatgagatcaaacccgacagagaggagatcgtggagaaccccagttcctccgcctccgagtcaaacacctccacttctattgtgaaccgtatacaccctagcaccgcttccacagtggtcaccccagcagctgtgttacccggactggctcaggtgatcactgccgtatctgcccagcaaaactctaacttgattcccaaggtcctgattccagtcaattcaatccctacttataatgcagcactggataataaccctctgcttctcaatacatataataaatttccctaccctacaatgtccgaaatcactgtgctctctgcacaagcaaagtatactgaagaacagatcaaaatttggttttctgcccaacgcctgaaacatggagtgagttggactcctgaagaggtcgaggaagcacgaagaaaacagttcaatgggactgtccacaccgtgccccaaacaatcactgtcattccgactcacatctcaacgggatccaacgggctcccttcaattttacagacatgccagattgtgggacaacctggcttagttctcacacaagtagctggtacaaatacactgccagttacggcccctatcgctctgaccgttgctggcgtgccaagccagaacaacatacagaaatcacaggttccggcagcccaacccacggcagaaacgaagccagccacggccgcagtaccaacttcccagtcagtaaagcatgaaaccgcgctagtgaacccagattcattcggcattagagccaagaagacaaaggagcaactggctgaactcaaagtctcttatttaaaaaaccagttcccccacgacagcgagataatccggctcatgaagatcactggactgaccaaaggagagattaagaagtggttctctgacacccggtataatcaacgtaactcaaaatctaaccagtgtctgcacctgaacaacgacagctccaccaccatcatcattgattcctccgacgagacaaccgaaagcccaacggtggggactgcgcagcccaagcagagctggaatccctttccagatttcacaccacagaagttcaaggagaaaaccgcagaacaactgcgcgtgttgcaggcttcctttctgaactcctccgttttaactgacgaggagctcaaccgacttcgggctcagaccaagctgaccagacgagagatcgatgcgtggttcactgagaaaaaaaagtcaaaggccctgaaagaggagaagatggaaatagacgaatccaacgcagggagctccaaagaggaagccggagaaacatctccagcagatgaatctggggctcccaagagtgggtccaccggcaagatttgcaaaaagacccctgagcagcttcatatgctgaagtcggcctttgtgcgcacacagtggcccagcccggaggaatacgataaacttgcaaaagaaagcgggctggctcggacagatatagtatcctggtttggagacactcgttatgcatggaaaaatggcaatctgaaatggtactattactatcaatccgccaacagcagctccatgaatggattaagctcacttagaaagagaggcaggggccgacccaagggacggggtagggggagaccaaggggcaggcccagaggatccaagcggatcaacaactgggaccggggaccaagtttgatcaagttcaagacgggcaccgctattctgaaggattattatttaaagcataagtttctgaacgagcaagatctggatgagttggtgaataagtcacacatgggatatgaacaggttcgtgaatggtttgcagaaagacagagacgatcggaactagggattgaactgttcgaagagaacgaggaggaagatgaagttatcgacgaccaggaggaggacgaagaagaaactgacgactccgacacctgggaacccccacggcatgtgaagagaaaattaagcaagtccgacgattag

SEQ ID NO: 171175 - DNA, 5014 bp, Artificial Sequence
  derived and/or modified sequence
acaggtcagagttgactccctgaaaagtgcagccggtttgaaatgcaagatggcggcggcgtggcgctgagaggcgcggcggcccctgcaggtagtggcgcgagccggctccgcgaccagcgggcccggagactctgggctgcgggtgggaactggagcgcagagtccgcggccggcacgggaaaggagaagacagactgctgctttggacctgttggtaatgatggcctgagctaaacatctaactagaagggatacccttccatttcaaagaacagaatgctaaggaagctgtggcaagtgattggagttgtgcttcaaaaatttcagaaattcagcagtattttatctgccaacaataagctctttacttgattgcaccatgagaaagctgctaatgagacttgttgagcacaaaaatggacttgaagaaccaaaagccattgttttcaaatgaagaacactgaacagttttaagcctcgatgctttttaatcaccactgagcttttcctcataacatcagaatggcaagcaggcgaaaatcaacaacaccttgcatggtccttgccagtgaacaagatccagaccttgagttgatatcagatttggatgaaggtcctcctgtgcttacacctgtagaaaacaccagagcagagagtatctcaagtgatgaagaggttcatgaatctgtggattcagacaatcagcaaaataaaaaagttgaaggtggatatgaatgtaaatattgtacttttcaaactccagatctaaatatgtttacttttcatgtggattcggaacatcccaatgtagtgctaaattcatcctatgtttgtgtcgaatgcaattttcttaccaaaaggtatgatgcactttctgagcataatctgaaatatcacccaggagaagagaattttaagttgactatggtgaaacgtaataaccagacaatctttgaacaaacaataaatgatctgacttttgatggtagttttgttaaagaggagaatgcagagcaagcagaatctacagaagtttcttcttcgggaatatctatcagtaaaactcctatcatgaaaatgatgaaaaataaagtggaaaataaacggattgcagttcatcataactcagttgaggacgttcctgaagagaaagagaatgaaatcaaaccagaccgtgaagaaattgtagaaaatccaagttcttcagcttctgaatctaatacaagtacttccattgtaaacagaatacatccaagtactgccagcacggtagtgacaccagcagcagttcttcctggattggcacaggtgataactgctgtatctgctcagcagaattctaatttgattcccaaagtcttaatccctgttaatagcattcccacctacaatgctgcattggataacaatccccttttacttaacacctacaacaagttcccttacccaacaatgtcagaaattacagttctttctgctcaagcaaaatatacagaggaacagatcaagatatggttttcagcccaacgtttaaaacatggtgttagttggactcccgaggaagtagaggaggcaagaaggaaacaattcaatggaacagtgcatactgtacctcagaccataactgttattcctacacacatttccacagggagtaatggtttaccatctattttacagacatgccaaatagttggtcagcctggtctggtccttactcaagtggctggaacaaacaccttgccagttacagcacctatagccttgacagtggcaggcgttccaagtcaaaataatatacagaaaagtcaggtacctgctgctcagcctactgcagaaacaaagccagcaacagcagcagttccaacttctcaaagtgtcaaacatgaaactgcattggtaaaccctgattcatttggcattcgggcaaaaaagacaaaagagcaactggcagaattaaaagttagctaccttaaaaatcagtttccccatgattcagaaattatcagacttatgaaaataacaggcctgacgaaaggagagattaaaaaatggtttagtgacacaaggtacaaccagagaaattcaaagagtaatcagtgcttacatctcaacaatgattcctctaccaccattattatagactccagtgatgaaaccacggaatccccaactgttggtactgcacagcctaagcaatcctggaatccttttcctgactttactccccaaaagtttaaagagaaaactgcagagcagcttcgtgtccttcaggcaagttttctcaacagctctgtacttacagatgaagaattaaataggttaagggcacaaaccaaacttaccagaagagaaatcgatgcttggtttacagagaagaagaaatcaaaagctttaaaggaagagaaaatggaaatagatgaaagtaatgcaggtagttccaaagaagaagctggagaaacttctcctgcagatgaatctggtgcacctaagtcagggagtacaggcaagatatgtaaaaaaacacctgagcagctgcacatgcttaagagtgcatttgtccggacacagtggccatcaccagaagagtatgacaagttggccaaagaaagcgggcttgctagaacagacatagttagttggtttggggacacccgttatgcttggaagaatggaaacttgaaatggtactactactatcagagcgccaattcaagtagtatgaatggtctgtcttcccttaggaaaagagggagagggagacccaaaggacggggaagaggaagaccgcgtgggcggcctagaggaagcaaaagaattaacaactgggacaggggaccatcactcataaaatttaaaactggaactgcaatacttaaggattattacctgaagcacaagtttcttaatgagcaagaccttgatgaacttgttaacaaatcacatatgggctatgagcaggtcagagagtggtttgcagaaagacagagaagatcagaattaggtatagaattatttgaggaaaatgaggaggaagatgaagttattgatgaccaggaagaggatgaagaagaaacagatgatagtgacacttgggaacctccacgacatgtgaaacggaagctgtctaaatcagatgactgaaatctgcctaaaacgttgaaggagaatcaattcttcaactcaagatgtctgatttactgtgaatttgcccaatctttgatgacattgaaaacgttttggggcatacacactcaaaaagcaggatccaatacccaaaagaaatggaacttaatgttgtgccaaagttaaactactgcagttggtggaagttctgcaatgtaaatagaacactaattaaaaaacaacttgtaaaaatgcaatttaaattttaatacagtacatttttcttctaatatgatggagacattctgaatcttagactttctgagggggtttaatgaccactagagcttgtcctcatattcagtccagtttaatactgtatgtctagtaagatgggctatatattgcctctattctttgagatgtgattaagcttagaactttgaccaaaaattttacagtaaaaattgttagaaatgggtaaaaaaaaaaaaaaaaaaaaaaccctgatttattactatgtcttatttatcagaccctgcactaagattaaaagttgtgcatgggcttatacaatttcaaatgtaaaaacagcctatttatatatgttgaaacaataagattttatggtttcactggcccttaataattggatccttcattaaacacatccatgaataccactgtttctactgttacttgttccattagaagctgatttgctttttattaaactgcaggaaattaattctgaagaaggaaaagaaactgacatggtaatttggatagggtgaagctttgaaataaatactgcaccaaaaatgtgaaaaagaatcacgtagtaaatgtatacttagtgttttcttacaatcgtggaaatcagaaatgtttatacaggtgtcagatcagaatttttaagagttatctttcagtgaaattttataacagtttcagtgaatagagaaaaaattctgaactgatcataatgagttaaaagttagcttttcacttatgaatcatgggagtgttaactgttaactcttgccgtatcaggagactgaaagttcatactaatttacaaactttgtaaagactggtgctgttcattcatattgggaagaaccctttcttttgtgaccataggaccatttttcaaaatgcgctttcttcgtagaagaaatgttcagtttaattagctttggattttaacatgtttttctgaatgaccagatgtaggcttagccagtttattttctctaatttaatggataataaatattaagctcttggttaaatgtttttcagccattgaaaatgttatgaaaaagccttgaatatgcatgctgctttcatttttataaactttttattttttaactatagctttattagtaattccaaaatgctgcaatgtagctgatttcctcactcagacagctggctttgtgggtggcttttttcatactactgttaacttttttaaaaaagaagcaatgtaaagaccgtaatgcactaagctttttttttttcttttacacgtttaaaaacttcttaaagcactctgtaatataatgattaaattgctcccttttataaacattgctaatgtggtctgagttttgtttgacaataattttaatgttctcaaaatttgaaatgtcaagtattagaaatgaagcctttgaatatagttgtttcccttgcaatatgttaactctgtgtagctgtatataactattaatttccctcatctcttttataggcctgataaaactcttctctgacgtttgctagcttttaaatatatttatttgacagagcaaaagaaccctcttctggttgattgtgaccttgaatacaaaataaaagtagtgattagtagttt

SEQ ID NO: 171176 - DNA, 4955 bp, Artificial Sequence
  derived and/or modified sequence
gcgcggaggacgcgcgcgcgggagggccccgccttggccggctctctcccttccccctccgcccccggacggccgctggggcgcgcgcctctcctcgcacccccaccctgagtccccacactccgcggggccaccgagctgctgaggcccctttgcgggcccgccgagcggttccgggtttagggttcacaggtcagagttgactccctgaaaagtgcagccggtttgaaatgcaagatggcggcggcgtggcgctgagaggcgcggcggcccctgcaggagaagacagactgctgctttggacctgttggtaatgatggcctgagctaaacatctaactagaagggatacccttccatttcaaagaacagaatgctaaggaagctgtggcaagtgattggagttgtgcttcaaaaatttcagaaattcagcagtattttatctgccaacaataagctctttacttgattgcaccatgagaaagctgctaatgagacttgttgagcacaaaaatggacttgaagaaccaaaagccattgttttcaaatgaagaacactgaacagttttaagcctcgatgctttttaatcaccactgagcttttcctcataacatcagaatggcaagcaggcgaaaatcaacaacaccttgcatggtccttgccagtgaacaagatccagaccttgagttgatatcagatttggatgaaggtcctcctgtgcttacacctgtagaaaacaccagagcagagagtatctcaagtgatgaagaggttcatgaatctgtggattcagacaatcagcaaaataaaaaagttgaaggtggatatgaatgtaaatattgtacttttcaaactccagatctaaatatgtttacttttcatgtggattcggaacatcccaatgtagtgctaaattcatcctatgtttgtgtcgaatgcaattttcttaccaaaaggtatgatgcactttctgagcataatctgaaatatcacccaggagaagagaattttaagttgactatggtgaaacgtaataaccagacaatctttgaacaaacaataaatgatctgacttttgatggtagttttgttaaagaggagaatgcagagcaagcagaatctacagaagtttcttcttcgggaatatctatcagtaaaactcctatcatgaaaatgatgaaaaataaagtggaaaataaacggattgcagttcatcataactcagttgaggacgttcctgaagagaaagagaatgaaatcaaaccagaccgtgaagaaattgtagaaaatccaagttcttcagcttctgaatctaatacaagtacttccattgtaaacagaatacatccaagtactgccagcacggtagtgacaccagcagcagttcttcctggattggcacaggtgataactgctgtatctgctcagcagaattctaatttgattcccaaagtcttaatccctgttaatagcattcccacctacaatgctgcattggataacaatccccttttacttaacacctacaacaagttcccttacccaacaatgtcagaaattacagttctttctgctcaagcaaaatatacagaggaacagatcaagatatggttttcagcccaacgtttaaaacatggtgttagttggactcccgaggaagtagaggaggcaagaaggaaacaattcaatggaacagtgcatactgtacctcagaccataactgttattcctacacacatttccacagggagtaatggtttaccatctattttacagacatgccaaatagttggtcagcctggtctggtccttactcaagtggctggaacaaacaccttgccagttacagcacctatagccttgacagtggcaggcgttccaagtcaaaataatatacagaaaagtcaggtacctgctgctcagcctactgcagaaacaaagccagcaacagcagcagttccaacttctcaaagtgtcaaacatgaaactgcattggtaaaccctgattcatttggcattcgggcaaaaaagacaaaagagcaactggcagaattaaaagttagctaccttaaaaatcagtttccccatgattcagaaattatcagacttatgaaaataacaggcctgacgaaaggagagattaaaaaatggtttagtgacacaaggtacaaccagagaaattcaaagagtaatcagtgcttacatctcaacaatgattcctctaccaccattattatagactccagtgatgaaaccacggaatccccaactgttggtactgcacagcctaagcaatcctggaatccttttcctgactttactccccaaaagtttaaagagaaaactgcagagcagcttcgtgtccttcaggcaagttttctcaacagctctgtacttacagatgaagaattaaataggttaagggcacaaaccaaacttaccagaagagaaatcgatgcttggtttacagagaagaagaaatcaaaagctttaaaggaagagaaaatggaaatagatgaaagtaatgcaggtagttccaaagaagaagctggagaaacttctcctgcagatgaatctggtgcacctaagtcagggagtacaggcaagatatgtaaaaaaacacctgagcagctgcacatgcttaagagtgcatttgtccggacacagtggccatcaccagaagagtatgacaagttggccaaagaaagcgggcttgctagaacagacatagttagttggtttggggacacccgttatgcttggaagaatggaaacttgaaatggtactactactatcagagcgccaattcaagtagtatgaatggtctgtcttcccttaggaaaagagggagagggagacccaaaggacggggaagaggaagaccgcgtgggcggcctagaggaagcaaaagaattaacaactgggacaggggaccatcactcataaaatttaaaactggaactgcaatacttaaggattattacctgaagcacaagtttcttaatgagcaagaccttgatgaacttgttaacaaatcacatatgggctatgagcaggtcagagagtggtttgcagaaagacagagaagatcagaattaggtatagaattatttgaggaaaatgaggaggaagatgaagttattgatgaccaggaagaggatgaagaagaaacagatgatagtgacacttgggaacctccacgacatgtgaaacggaagctgtctaaatcagatgactgaaatctgcctaaaacgttgaaggagaatcaattcttcaactcaagatgtctgatttactgtgaatttgcccaatctttgatgacattgaaaacgttttggggcatacacactcaaaaagcaggatccaatacccaaaagaaatggaacttaatgttgtgccaaagttaaactactgcagttggtggaagttctgcaatgtaaatagaacactaattaaaaaacaacttgtaaaaatgcaatttaaattttaatacagtacatttttcttctaatatgatggagacattctgaatcttagactttctgagggggtttaatgaccactagagcttgtcctcatattcagtccagtttaatactgtatgtctagtaagatgggctatatattgcctctattctttgagatgtgattaagcttagaactttgaccaaaaattttacagtaaaaattgttagaaatgggtaaaaaaaaaaaaaaaaaaaaaaccctgatttattactatgtcttatttatcagaccctgcactaagattaaaagttgtgcatgggcttatacaatttcaaatgtaaaaacagcctatttatatatgttgaaacaataagattttatggtttcactggcccttaataattggatccttcattaaacacatccatgaataccactgtttctactgttacttgttccattagaagctgatttgctttttattaaactgcaggaaattaattctgaagaaggaaaagaaactgacatggtaatttggatagggtgaagctttgaaataaatactgcaccaaaaatgtgaaaaagaatcacgtagtaaatgtatacttagtgttttcttacaatcgtggaaatcagaaatgtttatacaggtgtcagatcagaatttttaagagttatctttcagtgaaattttataacagtttcagtgaatagagaaaaaattctgaactgatcataatgagttaaaagttagcttttcacttatgaatcatgggagtgttaactgttaactcttgccgtatcaggagactgaaagttcatactaatttacaaactttgtaaagactggtgctgttcattcatattgggaagaaccctttcttttgtgaccataggaccatttttcaaaatgcgctttcttcgtagaagaaatgttcagtttaattagctttggattttaacatgtttttctgaatgaccagatgtaggcttagccagtttattttctctaatttaatggataataaatattaagctcttggttaaatgtttttcagccattgaaaatgttatgaaaaagccttgaatatgcatgctgctttcatttttataaactttttattttttaactatagctttattagtaattccaaaatgctgcaatgtagctgatttcctcactcagacagctggctttgtgggtggcttttttcatactactgttaacttttttaaaaaagaagcaatgtaaagaccgtaatgcactaagctttttttttttcttttacacgtttaaaaacttcttaaagcactctgtaatataatgattaaattgctcccttttataaacattgctaatgtggtctgagttttgtttgacaataattttaatgttctcaaaatttgaaatgtcaagtattagaaatgaagcctttgaatatagttgtttcccttgcaatatgttaactctgtgtagctgtatata

SEQ ID NO: 171177 - DNA, 3357 bp, Artificial Sequence
  derived and/or modified sequence
aaaaaatcagacttccacttgaagcaattgcatcttttaggattaatgtggctcagcggagctctgctgtgcttttaggattactgtggctcagcggagctctgcacaaagggtccgcgactgggatgggggtggggagtgaacgtcaaggggcccaggagcgctcgagcgtccaaggcccggcgtgtggagcagctggagggagaagacagactgctgctttggacctgttggtaatgatggcctgagctaaacatctaactagaagggatacccttccatttcaaagaacagaatgctaaggaagctgtggcaagtgattggagttgtgcttcaaaaatttcagaaattcagcagtattttatctgccaacaataagctctttacttgattgcaccatgagaaagctgctaatgagacttgttgagcacaaaaatggacttgaagaaccaaaagccattgttttcaaatgaagaacactgaacagttttaagcctcgatgctttttaatcaccactgagcttttcctcataacatcagaatggcaagcaggcgaaaatcaacaacaccttgcatggtccttgccagtgaacaagatccagaccttgagttgatatcagatttggatgaaggtcctcctgtgcttacacctgtagaaaacaccagagcagagagtatctcaagtgatgaagaggttcatgaatctgtggattcagacaatcagcaaaataaaaaagttgaaggtggatatgaatgtaaatattgtacttttcaaactccagatctaaatatgtttacttttcatgtggattcggaacatcccaatgtagtgctaaattcatcctatgtttgtgtcgaatgcaattttcttaccaaaaggtatgatgcactttctgagcataatctgaaatatcacccaggagaagagaattttaagttgactatggtgaaacgtaataaccagacaatctttgaacaaacaataaatgatctgacttttgatggtagttttgttaaagaggagaatgcagagcaagcagaatctacagaagtttcttcttcgggaatatctatcagtaaaactcctatcatgaaaatgatgaaaaataaagtggaaaataaacggattgcagttcatcataactcagttgaggacgttcctgaagagaaagagaatgaaatcaaaccagaccgtgaagaaattgtagaaaatccaagttcttcagcttctgaatctaatacaagtacttccattgtaaacagaatacatccaagtactgccagcacggtagtgacaccagcagcagttcttcctggattggcacaggtgataactgctgtatctgctcagcagaattctaatttgattcccaaagtcttaatccctgttaatagcattcccacctacaatgctgcattggataacaatccccttttacttaacacctacaacaagttcccttacccaacaatgtcagaaattacagttctttctgctcaagcaaaatatacagaggaacagatcaagatatggttttcagcccaacgtttaaaacatggtgttagttggactcccgaggaagtagaggaggcaagaaggaaacaattcaatggaacagtgcatactgtacctcagaccataactgttattcctacacacatttccacagggagtaatggtttaccatctattttacagacatgccaaatagttggtcagcctggtctggtccttactcaagtggctggaacaaacaccttgccagttacagcacctatagccttgacagtggcaggcgttccaagtcaaaataatatacagaaaagtcaggtacctgctgctcagcctactgcagaaacaaagccagcaacagcagcagttccaacttctcaaagtgtcaaacatgaaactgcattggtaaaccctgattcatttggcattcgggcaaaaaagacaaaagagcaactggcagaattaaaagttagctaccttaaaaatcagtttccccatgattcagaaattatcagacttatgaaaataacaggcctgacgaaaggagagattaaaaaatggtttagtgacacaaggtacaaccagagaaattcaaagagtaatcagtgcttacatctcaacaatgattcctctaccaccattattatagactccagtgatgaaaccacggaatccccaactgttggtactgcacagcctaagcaatcctggaatccttttcctgactttactccccaaaagtttaaagagaaaactgcagagcagcttcgtgtccttcaggcaagttttctcaacagctctgtacttacagatgaagaattaaataggttaagggcacaaaccaaacttaccagaagagaaatcgatgcttggtttacagagaagaagaaatcaaaagctttaaaggaagagaaaatggaaatagatgaaagtaatgcaggtagttccaaagaagaagctggagaaacttctcctgcagatgaatctggtgcacctaagtcagggagtacaggcaagatatgtaaaaaaacacctgagcagctgcacatgcttaagagtgcatttgtccggacacagtggccatcaccagaagagtatgacaagttggccaaagaaagcgggcttgctagaacagacatagttagttggtttggggacacccgttatgcttggaagaatggaaacttgaaatggtactactactatcagagcgccaattcaagtagtatgaatggtctgtcttcccttaggaaaagagggagagggagacccaaaggacggggaagaggaagaccgcgtgggcggcctagaggaagcaaaagaattaacaactgggacaggggaccatcactcataaaatttaaaactggaactgcaatacttaaggattattacctgaagcacaagtttcttaatgagcaagaccttgatgaacttgttaacaaatcacatatgggctatgagcaggtcagagagtggtttgcagaaagacagagaagatcagaattaggtatagaattatttgaggaaaatgaggaggaagatgaagttattgatgaccaggaagaggatgaagaagaaacagatgatagtgacacttgggaacctccacgacatgtgaaacggaagctgtctaaatcagatgactgaaatctgcctaaaacgttgaaggagaatcaattcttcaactcaagatgtctgatttactgtgaatttgcccaatctttgatgacattgaaaacgttttggggcatacacactcaaaaagcaggatccaatacccaaaagaaatggaacttaatgttgtgccaaagttaaactactgcagttggtggaagttctgc

SEQ ID NO: 171178 - protein, 515 aa, Artificial Sequence
  derived and/or modified sequence
MGHNGSWISPNASEPHNASGAEAAGVNRSALGEFGEAQLYRQFTTTVQVVIFIGSLLGNFMVLWSTCRTTVFKSVTNRFIKNLACSGICASLVCVPFDIILSTSPHCCWWIYTMLFCKVVKFLHKVFCSVTILSFPAIALDRYYSVLYPLERKISDAKSRELVMYIWAHAVVASVPVFAVTNVADIYATSTCTEVWSNSLGHLVYVLVYNITTVIVPVVVVFLFLILIRRALSASQKKKVIIAALRTPQNTISIPYASQREAELHATLLSMVMVFILCSVPYATLVVYQTVLNVPDTSVFLLLTAVWLPKVSLLANPVLFLTVNKSVRKCLIGTLVQLHHRYSRRNVVSTGSGMAEASLEPSIRSGSQLLEMFHIGQQQIFKPTEDEEESEAKYIGSADFQAKEIFSTCLEGEQGPQFAPSAPPLSTVDSVSQVAPAAPVEPETFPDKYSLQFGFGPFELPPQWLSETRNSKKRLLPPLGNTPEELIQTKVPKVGRVERKMSRNNKVSIFPKVDS

SEQ ID NO: 171179 - DNA, 2816 bp, Artificial Sequence
  derived and/or modified sequence
tgggggcgtcctccttcgtccccgcccggctgtcaagctgtgttctagcggccgagggaccgaggggggctaagaaagggggcgcccagccatgcagaggcaaaaaggcgctgcggaacggggtccccgtcgccagtgctgaggcaggaggtcggagccacaagtgaggggctgggaagcaggacccagcacgggcgtcttggcaggcggccgggcgcagggccaggctgctggggacgctcagggctttccacccaagccatgggcgctgtcgggcactcgggggtcccctcgtggctccggccactcggcgtgggcattacgttggcttcacatcgccatccagcctcgaagccaacaggactgaaaaatagcttcggccaaacgttctcctcccgctaaggagaggggtcgagtgcgtcagcccgaggggactggagagggatgccctagccctcgaggggcggaggacccgcggttgaaggaggcagcgggagcggagagcgccctccttgaccatcgaatgcctccttctgtgtttccattcctgtcgagtgggctgggccacgctgaccaccctggaggagggacggacgacgctcggcgggctctgaccgtgccgccttcttgtggctgctgactgggatccaggagggagtgggcatggggcgcagccgcgcctccctccctccccgcctcccgggcgccggggttggcgatgtggagacgtgaggggacccgtcggctgctccggcttctccaggactccgccaggcgcccgcgcgtccctcctcacccggaggaggagaggctccgcgcggggctccgaggcgggcggcgcgcggagccggagtcccagcctcgccatgggacataacgggagctggatctctccaaatgccagcgagccgcacaacgcgtccggcgccgaggctgcgggtgtgaaccgcagcgcgctcggggagttcggcgaggcgcagctgtaccgccagttcaccaccaccgtgcaggtcgtcatcttcataggctcgctgctcggaaacttcatggtgttatggtcaacttgccgcacaaccgtgttcaaatctgtcaccaacaggttcattaaaaacctggcctgctcggggatttgtgccagcctggtctgtgtgcccttcgacatcatcctcagcaccagtcctcactgttgctggtggatctacaccatgctcttctgcaaggtcgtcaaatttttgcacaaagtattctgctctgtgaccatcctcagcttccctgctattgctttggacaggtactactcagtcctctatccactggagaggaaaatatctgatgccaagtcccgtgaactggtgatgtacatctgggcccatgcagtggtggccagtgtccctgtgtttgcagtaaccaatgtggctgacatctatgccacgtccacctgcacggaagtctggagcaactccttgggccacctggtgtacgttctggtgtataacatcaccacggtcattgtgcctgtggtggtggtgttcctcttcttgatactgatccgacgggccctgagtgccagccagaagaagaaggtcatcatagcagcgctccggaccccacagaacaccatctctattccctatgcctcccagcgggaggccgagctgcacgccaccctgctctccatggtgatggtcttcatcttgtgtagcgtgccctatgccaccctggtcgtctaccagactgtgctcaatgtccctgacacttccgtcttcttgctgctcactgctgtttggctgcccaaagtctccctgctggcaaaccctgttctctttcttactgtgaacaaatctgtccgcaagtgcttgatagggaccctggtgcaactacaccaccggtacagtcgccgtaatgtggtcagtacagggagtggcatggctgaggccagcctggaacccagcatacgctcgggtagccagctcctggagatgttccacattgggcagcagcagatctttaagcccacagaggatgaggaagagagtgaggccaagtacattggctcagctgacttccaggccaaggagatatttagcacctgcctggagggagagcaggggccacagtttgcgccctctgccccacccctgagcacagtggactctgtatcccaggtggcaccggcagcccctgtggaacctgaaacattccctgataagtattccctgcagtttggctttgggccttttgagttgcctcctcagtggctctcagagacccgaaacagcaagaagcggctgcttccccccttgggcaacaccccagaagagctgatccagacaaaggtgcccaaggtaggcagggtggagcggaagatgagcagaaacaataaagtgagcatttttccaaaggtggattcctagcaaggattgtaaattcttggaagcaacggggagcttccatattcccaccagagtgtgggaatgctgtggccatgtgattgtatgatctccttgcaactcagtgtgagttgattcctccaatatgggccagatgcttttgaatgatagggaaatctacataaaatccagtgtcctctttattgagggagtatatgtatccatctcagtgatccatgtccttagtgaagtccacattattctctgtggggacaagagctgggcagttttgaatgggtcttgaggtgggtaccccatgtgcactttctgaggatgcctcacttccctgggctctgcagagaacacacagagagaagactttcagagctcacaggagcagggagcaggagcactctaagggaattc

SEQ ID NO: 171180 - DNA, 1548 bp, Artificial Sequence
  derived and/or modified sequence
atgggccacaacggttcttggatcagccctaatgcatctgaaccccataatgccagcggtgccgaggccgcaggcgtaaaccgtagcgccctgggtgaatttggagaggcacagttatatcgccagttcacaaccaccgtacaggttgtgatctttatcggatcccttctgggcaactttatggtgctctggtcaacctgtaggaccactgtattcaagagcgtgactaatagattcataaaaaatctggcctgtagcggcatttgtgcatctctggtgtgtgttcccttcgatattattctcagcacctctccacactgctgttggtggatttataccatgttattttgtaaagtagtcaagttcctccacaaggtgttttgtagcgtgaccatcctgagctttcccgcgatcgccctggaccgatattatagtgtgctgtatccacttgagaggaagatctcagatgccaagtcccgcgaattagtgatgtacatatgggctcacgccgttgtggccagtgttcccgtgttcgccgttacaaacgtggccgacatttatgctactagcacatgcactgaagtctggtctaactctctggggcatcttgtgtacgtgctggtgtacaacataacaactgtaatcgtaccagtcgttgtggtcttcctgttcctcatactaatcaggcgggccctttccgcttcccaaaagaaaaaggtgattatcgccgccctacgcacaccacagaacacaataagtatcccttacgcctcacagcgtgaggctgaactccacgccacactgcttagcatggttatggtcttcatcctctgcagcgtgccatacgccaccctggtcgtatatcagacagtccttaatgttccggatacatctgtttttctgctactgaccgctgtgtggctgcctaaggtgtctctgcttgcaaacccagtactctttctcactgtcaacaagagcgtccgcaaatgcctgattgggactctcgtacaacttcaccataggtactcacggcgcaatgtcgtgagtaccggcagtggcatggccgaggctagcctggaaccttctataaggtccggcagtcaactgctggagatgttccacataggccagcagcagattttcaagccgacagaagacgaggaagaatccgaagccaagtacattgggtcggccgatttccaagctaaagagatattttcaacatgcttggagggcgaacaggggccccagtttgccccctctgcccctccgttgtcaaccgtggactccgtctcacaagtggctccagcggcgccagtcgaacccgagacctttcctgacaagtattcactgcaatttggattcggccccttcgagctccccccgcagtggttgtccgagacccgtaactccaagaagaggttactacctcccttaggtaacacaccagaggagctgatccagactaaggtgcccaaagtaggacgggttgaacgcaaaatgtcccgaaataataaagtcagcatcttcccaaaggttgactcttag

SEQ ID NO: 171181 - DNA, 1548 bp, Artificial Sequence
  derived and/or modified sequence
atgggtcataatggtagctggattagccctaacgctagcgagccccacaacgcgtcaggagctgaggccgccggcgtaaaccggagcgccctgggtgaatttggggaagcacagctttataggcaatttaccactactgtgcaggtggtgatcttcatcggaagcctcttaggtaattttatggtcctgtggagcacctgccgtaccactgttttcaagtcagttactaatcgattcattaagaacttggcttgtagtggtatctgcgcctccctggtatgcgtgcctttcgacatcatcctatccacaagcccgcattgctgttggtggatctataccatgttattttgcaaggtggtaaagtttctgcataaagtgttttgttctgtcaccatcctttctttccccgcgattgctctggacagatattacagcgtactctatccattggaaaggaaaatttcagacgcaaagagcagagagttggtaatgtacatttgggcacatgctgtggtggcctctgtcccggtctttgcggtgactaacgtagcagacatatacgccacctctacttgcaccgaagtgtggtcaaattctttaggccacctggtctatgttctggtgtataacatcactacagtgatcgttccagtcgtggtcgtcttcctgtttctgatcttgattagaagagccctaagtgcctcacagaaaaagaaggtaatcatcgctgctctgcggacgccccagaatacgatctctattccctacgcttcccagcgagaggctgagctacatgccaccctgctctcgatggtgatggtctttatactctgcagtgttccatacgccactctggtcgtgtatcagactgtgctgaatgtgccagacaccagcgtcttcctgcttctgactgctgtctggctgcccaaggtctctctgctcgccaatccagtactgtttcttacggtgaataagagtgtcagaaagtgccttatcggaaccttagtccaactgcaccataggtacagcagaagaaacgtggtgtcgacagggtccggcatggcagaggcttctctggagccatcaattcggtcaggaagccagctactcgagatgtttcatattgggcaacagcaaattttcaaacccacagaagacgaagaggagagtgaagctaaatacatcggcagtgctgacttccaggctaaagagatatttagcacttgtcttgagggagaacagggcccccagtttgctccaagcgctccgcctctgtccaccgtggatagcgtgagccaggtcgctccagctgccccagtcgaacctgaaacctttcccgacaaatactctctacaatttggtttcggacccttcgaactgccgccccaatggttgtcagagactcgaaactcaaagaaaagattgctgcccccattagggaatacccctgaggagttgatccagaccaaggttcctaaggtcggacgggttgagcgcaaaatgtcacgtaacaataaggtgtccatctttccgaaggtggactcttag

SEQ ID NO: 171182 - DNA, 1548 bp, Artificial Sequence
  derived and/or modified sequence
atgggccacaacggctcctggatcagccccaatgccagcgagccccacaatgccagcggggctgaggccgccggcgtgaacagaagtgccctgggggagtttggagaggcccagctgtaccggcagttcaccaccaccgtgcaggtggtgatcttcatcggcagcctgctgggcaacttcatggtgctgtggagcacctgcaggaccaccgtcttcaagtctgtgaccaaccgcttcatcaagaacctggcctgcagcggcatctgtgccagcctggtgtgtgtgccctttgacatcatcctgagcaccagcccccactgctgctggtggatctacaccatgctgttctgcaaggtggtgaagttcctgcacaaggtgttctgcagcgtgaccatcctgtccttccctgccatcgccctggaccgctactacagcgtgctgtaccccctggagaggaagatcagtgatgccaagagccgggagctggtgatgtacatctgggcccatgctgtggtggcctctgtgcctgtgtttgctgtgaccaacgtggccgacatctatgccaccagcacctgcacagaggtgtggagcaacagcctgggccacctggtgtatgtgctggtgtacaacatcaccaccgtgattgtgcctgtggtggtggtgttcctgttcctgatcctgatcagaagagccctgagcgccagccagaagaagaaggtgatcatcgccgccctgcggaccccccagaacaccatcagcatcccctatgccagccagcgggaggccgagctgcacgccaccctgctgtccatggtgatggtgttcatcctgtgcagcgtgccctatgccaccctggtggtgtaccagacagtgctgaatgtgcctgacaccagcgtcttcctgctgctgacagctgtgtggctgcccaaggtgtccctgctggccaaccctgtgctcttcctgactgtgaacaagtctgtgaggaaatgtctcatcggcaccctggtgcagctgcaccaccgctacagcagaagaaatgtggtgtccacaggcagcggcatggccgaggccagcctggagcccagcatccgcagcggcagccagctgctggagatgttccacatcggccagcagcagatcttcaagcccacagaagatgaggaggagagcgaggccaagtacatcggcagcgctgacttccaggccaaggagatcttcagcacctgcctggagggggagcagggcccccagtttgcccccagcgccccacccctgagcacagtggacagcgtgtcccaggtggccccagctgcccctgtggagcctgagaccttcccagacaagtacagcctgcagtttggatttggcccctttgagctgcccccccagtggctgtctgagaccaggaacagcaagaagaggctgctgccccccctgggcaacaccccagaggagctgatccagaccaaggtgcccaaggtgggccgggtggagaggaagatgagcaggaacaacaaggtgtccatcttccccaaggtggacagctag

SEQ ID NO: 171183 - DNA, 1548 bp, Artificial Sequence
  derived and/or modified sequence
atgggccacaacggcagctggatcagccccaacgccagcgagccccacaatgcaagtggcgctgaagctgccggggtgaacaggtccgcacttggtgaattcggggaggctcaactttacaggcagtttacaaccacagtgcaggtggtaatatttatcgggtctctcctggggaacttcatggtgctttggtctacctgccggacgaccgtgttcaaatcagtgacaaaccggtttatcaaaaacctggcgtgctcagggatctgcgcaagtctggtttgtgttccgtttgatatcatcctatccacatctccccattgctgttggtggatctacactatgctgttctgcaaagtggtgaaatttctacataaggtattctgctcagtgaccattctgagttttcccgccattgcactcgataggtattactcagtgctgtatccccttgagcggaagatctctgacgccaaaagtagggagctggtgatgtatatttgggcccacgcagtcgttgcatcggtaccagtgttcgcagtgacaaacgtggccgatatctatgctacatccacttgtaccgaggtctggtcaaatagtttaggtcacctggtatatgttcttgtctataatattaccacagtcattgtgcccgtcgtggttgtattccttttcctgatcctcatcaggcgcgctctgagcgcttcacaaaaaaaaaaggtaatcatcgccgctttgcggacaccacagaataccatctctattccctacgctagccagcgggaagctgagcttcacgctactctcctttccatggtgatggtgtttattctgtgttccgtgccttacgcgacgctggttgtgtatcagactgtactcaacgtaccagatacatcggtgtttctgctgctgacagccgtgtggcttcctaaggtgtccctcctggccaatccagtcctcttccttactgttaacaaatccgtgagaaaatgtctgataggcaccctggttcagctgcaccataggtactcacggagaaacgttgtaagtaccggcagtggtatggctgaggcctctcttgaaccatccatccgttcgggaagtcagctgttagagatgtttcacataggccagcagcagatctttaaaccgaccgaggatgaggaagaatctgaagcaaaatatatcggtagcgcggactttcaggccaaggagatttttagcacatgtctggaaggcgagcaggggccccagttcgctccttcagcccctccattatccacagtggacagcgtgtcacaggtagcgcccgcagctcccgtggaacctgaaaccttccccgataaatactctcttcagtttggattcggaccgttcgagctcccccctcagtggctatcggagacccgcaacagcaagaaacggctgctccctcctcttggaaatacaccggaagagctgattcagactaaagtcccaaaggtcggacgggtcgaaaggaaaatgtcgcggaacaataaagtgtccattttcccaaaggtggacagctag

SEQ ID NO: 171184 - DNA, 1548 bp, Artificial Sequence
  derived and/or modified sequence
atgggccacaacggcagctggatcagccccaacgccagcgagccccataatgcctcgggtgctgaggctgctggggtcaaccgatcggccctgggtgaattcggcgaagcccaattgtatagacagttcactaccaccgtgcaggtggtgatcttcatcggctccttgcttggaaatttcatggtcttatggagtacctgtaggactacagtctttaaatctgtaactaatcgcttcattaagaatctcgcatgctccggcatttgcgcatcgctcgtttgtgtgccttttgacatcattttaagcacgtctccccactgctgttggtggatatatactatgcttttttgcaaggtagtaaagttcttgcataaagttttctgctcggttaccattttgtcatttcccgcaatcgcacttgaccgatactactctgttttatatcccctggaaagaaagatttccgatgctaaatctcgggaacttgtcatgtatatctgggcacacgctgtggttgccagcgtcccggtatttgccgttaccaacgtagccgacatttacgccactagcacatgcacagaggtctggtccaattcacttgggcatttggtgtatgtcttggtttacaacattaccaccgttatagtgcccgttgtagtggtgtttctttttctgattctgattaggagggcactttccgcttctcagaaaaaaaaggtgataatcgcggcgctcaggacccctcagaataccattagcatcccctatgccagtcaacgggaggccgagttgcacgcaactctcctgagtatggtcatggtattcatcctttgttccgtgccttacgccaccctcgttgtttatcagaccgtgttgaacgttcccgacacctcggtgtttttactccttaccgcagtctggcttcccaaggtgtccctgctcgccaatccagtgctgtttttaaccgttaacaaatcagtgagaaagtgtcttattggaaccttggtgcagcttcaccaccgatactcaaggagaaacgtggtatccaccggatcaggtatggccgaggcctccctggagccttctatccggtccggtagtcaactgctcgagatgttccacattgggcagcagcaaattttcaagcctactgaggacgaggaggagtccgaggccaagtatattggaagcgctgatttccaggcaaaggagatcttctccacatgtctggaaggggaacaaggaccacaattcgctccttcggctccgcctctaagcaccgttgatagcgtcagtcaagtagcacccgctgcccctgtggaaccggaaacattcccggataaatatagcttgcagtttggctttggaccttttgagctcccaccccaatggttgagtgaaactcggaactccaagaagcgcctacttccccctctgggcaacacaccagaagagcttatacaaactaaagtacccaaagtgggcagagtggagagaaaaatgagtagaaacaataaagtttctatctttcccaaagtggatagttag

SEQ ID NO: 171185 - DNA, 1548 bp, Artificial Sequence
  derived and/or modified sequence
atgggccataacggatcgtggatctcccccaatgccagtgagccccacaacgcttctggggctgaggctgctggcgtgaaccggtctgccctaggagagtttggcgaagctcagctgtatcgccagtttactactactgttcaagtggttattttcatcggcagtttattggggaatttcatggttctctggagtacctgccggacaacggttttcaaaagtgtgacgaatcgatttatcaagaaccttgcatgtagtggcatctgcgcctccctggtttgcgttccctttgacatcatcctgtcaacttcaccccactgttgctggtggatttatacaatgctgttttgcaaagtcgtgaagtttctgcacaaagtgttttgctcagtaaccatcctgagtttcccggcaatcgccctggaccggtactattccgtactgtatcccctggagcgaaaaatttctgatgccaaaagccgcgaactggttatgtatatatgggcccacgcggtcgttgcctcagtgcccgtttttgctgttaccaatgtagcagacatatacgccactagcacttgcaccgaagtgtggtccaactccctgggccatctggtctatgtgttggtgtataatattaccaccgttatagtgcctgtcgtcgtagtcttcctttttctcattctgatcagaagggctctgtccgcttcccagaaaaaaaaagtaatcatcgccgctctgcggacgccccagaatactatctccattccatacgcatcccagcgcgaagctgagttacacgccactctcctctcaatggttatggtttttattttatgttcagtgccctacgctacattagtcgtgtatcagacagtcctgaatgtgccagacacttctgttttcctgctcttaaccgcggtctggctgcccaaagtgtccctcctggctaatccagtgctctttttgacagttaataagagcgtgcgcaaatgtctgatcggaaccctggtgcagctccaccaccggtatagtcgaagaaatgttgtcagcactggctcaggtatggcggaagccagtctggaacccagtatccgatccggttcccagttgttagaaatgttccatataggacaacagcagatctttaagcccacagaggatgaagaagagtcagaggcgaagtacattggatccgccgactttcaggccaaggaaatcttcagcacctgcttggagggcgagcagggaccgcagttcgccccatctgcgccaccactgtcgaccgttgacagtgttagtcaggtggcacccgctgctcccgtagagcccgagacttttccagacaagtatagcctgcaatttggcttcgggccattcgagctcccaccacagtggctcagtgaaacacgcaatagtaaaaaacggcttcttccaccactgggaaatacgccagaggagctgatccagactaaagtgcccaaggtcggtcgggtggagcggaagatgtcaaggaacaataaggtttctatctttccaaaagttgactcatag

SEQ ID NO: 171186 - DNA, 1548 bp, Artificial Sequence
  derived and/or modified sequence
atggggcataatggctcatggatctcacccaacgcctccgaaccacataacgcttccggtgccgaagcagccggagtgaacagaagtgcactcggtgaattcggtgaggcgcagctataccgccagttcactactacggtgcaggtggtgatatttatcggtagtctgctcgggaatttcatggtactctggagtacttgccgcactacagtgttcaagagtgtgacaaatcgcttcatcaaaaatctggcctgttctggcatttgcgccagcttggtatgtgtgcctttcgatattattctgagcacgagtccacattgttgttggtggatttacacaatgctgttttgcaaggttgtaaaattcctacataaggtgttctgcagcgtgacaatcctgtcttttcccgctattgcactggacagatactattctgtcttgtatcccctggaaaggaaaatcagcgacgccaagagtcgggagcttgtcatgtatatctgggcccatgctgtcgtggcttcagtgcctgtgtttgcagtgactaatgtcgccgacatatacgcaacttctacttgcacagaggtttggagcaactcgctcggccatcttgtgtacgtactcgtgtataatataaccaccgtgattgtgccagtggtggtggtcttcctctttctgatcctgattcgcagggcactgagtgcatcccagaaaaaaaaagtgataattgccgctcttagaactcctcagaataccatcagcattccttatgcttcccaaagggaagcagaattacatgcaactctgctttcaatggttatggtgtttattttgtgctccgtgccatacgctactcttgtagtctatcagacagtgttgaatgtgcccgacacttcagtgttccttctgctcaccgctgtctggctacctaaggtctcactcctggcaaatcctgtgctcttcctcacagtgaataagtctgtacggaaatgtctgattggtaccctggtgcagctacaccatagatatagtagaagaaatgtggtgtccaccggatccggcatggccgaggcatctttggaaccatcaattcgctccgggagccagttgctggagatgttccacataggacagcaacaaatttttaagccaaccgaagacgaggaagaatccgaggcgaagtacattggctcggcggatttccaggcaaaggagatcttcagtacttgcctggaaggcgagcagggccctcaatttgcaccttccgcccctcccctatccacagtggatagtgtgtcacaggtggctcccgcagcccctgtcgagccagagacttttccagacaagtatagcctgcagtttggattcggccctttcgagctgcccccacagtggttgagcgaaaccagaaactcaaagaaacgtctgcttccccctctggggaatacccccgaggaactgatccagaccaaagtgccaaaggtcggcagggtggaaaggaaaatgagtcgcaataacaaggtgtctatcttccctaaggtggatagctag

SEQ ID NO: 171187 - DNA, 1548 bp, Artificial Sequence
  derived and/or modified sequence
atgggccacaacggcagctggatcagccccaacgccagcgagccccacaacgccagcggcgccgaggccgccggcgtgaacagaagcgccctgggcgagttcggcgaggcccagctgtacagacagttcaccaccaccgtgcaggtggtgatcttcatcggcagcctgctgggcaacttcatggtgctgtggagcacctgcagaaccaccgtgttcaagagcgtgaccaacagattcatcaagaacctggcctgcagcggcatctgcgccagcctggtgtgcgtgcccttcgacatcatcctgagcaccagcccccactgctgctggtggatctacaccatgctgttctgcaaggtggtgaagttcctgcacaaggtgttctgcagcgtgaccatcctgagcttccccgccatcgccctggacagatactacagcgtgctgtaccccctggagagaaagatcagcgacgccaagagcagagagctggtgatgtacatctgggcccacgccgtggtggccagcgtgcccgtgttcgccgtgaccaacgtggccgacatctacgccaccagcacctgcaccgaggtgtggagcaacagcctgggccacctggtgtacgtgctggtgtacaacatcaccaccgtgatcgtgcccgtggtggtggtgttcctgttcctgatcctgatcagaagagccctgagcgccagccagaagaagaaggtgatcatcgccgccctgagaaccccccagaacaccatcagcatcccctacgccagccagagagaggccgagctgcacgccaccctgctgagcatggtgatggtgttcatcctgtgcagcgtgccctacgccaccctggtggtgtaccagaccgtgctgaacgtgcccgacaccagcgtgttcctgctgctgaccgccgtgtggctgcccaaggtgagcctgctggccaaccccgtgctgttcctgaccgtgaacaagagcgtgagaaagtgcctgatcggcaccctggtgcagctgcaccacagatacagcagaagaaacgtggtgagcaccggcagcggcatggccgaggccagcctggagcccagcatcagaagcggcagccagctgctggagatgttccacatcggccagcagcagatcttcaagcccaccgaggacgaggaggagagcgaggccaagtacatcggcagcgccgacttccaggccaaggagatcttcagcacctgcctggagggcgagcagggcccccagttcgcccccagcgccccccccctgagcaccgtggacagcgtgagccaggtggcccccgccgcccccgtggagcccgagaccttccccgacaagtacagcctgcagttcggcttcggccccttcgagctgcccccccagtggctgagcgagaccagaaacagcaagaagagactgctgccccccctgggcaacacccccgaggagctgatccagaccaaggtgcccaaggtgggcagagtggagagaaagatgagcagaaacaacaaggtgagcatcttccccaaggtggacagctag

SEQ ID NO: 171188 - protein, 264 aa, Artificial Sequence
  derived and/or modified sequence
MRLRPLPLVVVPGLLQLLFCDSKEVVHATEGLDWEDKDAPGTLVGNVVHSRIISPLRLFVKQSPVPKPGPMAYADSMENFWDWLANITEIQEPLARTKRRPIVKTGKFKKMFGWGDFHSNIKTVKLNLLITGKIVDHGNGTFSVYFRHNSTGLGNVSVSLVPPSKVVEFEVSPQSTLETKESKSFNCRIEYEKTDRAKKTALCNFDPSKICYQEQTQSHVSWLCSKPFKVICIYIAFYSVDYKLVQKVCPDYNYHSETPYLSSG

SEQ ID NO: 171189 - DNA, 795 bp, Artificial Sequence
  derived and/or modified sequence
atgaggctgaggcctcttccgctggtggttgttcccggactcctgcagctgctattttgcgacagtaaggaagtggtgcacgcaaccgaaggcctcgactgggaagacaaggatgccccagggacattggtcggaaatgtggtccatagtcgaataattagtcccctgcgcctgtttgttaaacagagtccagtgcccaaacccggacccatggcctatgcggacagtatggaaaacttctgggattggcttgccaacataaccgagatccaagagcccttggctcgaactaaaaggaggcctattgtcaaaacagggaaatttaagaagatgtttggatggggtgatttccactcaaatataaaaactgtgaagctgaacttgctgatcacggggaaaatcgtggaccatgggaacggaacattcagcgtctactttaggcacaacagcactggactcgggaacgtctcagtgtcgcttgtgcctcctagtaaggtggtggaattcgaagtgagtccccaatcaactcttgagacaaaggaaagcaaatcatttaattgtcgtattgaatacgaaaagaccgatagagcaaagaaaacggccctctgcaatttcgatcccagcaagatctgctaccaggaacagacccagtcgcacgtctcctggctatgtagtaagcctttcaaggttatttgtatttacatagctttctatagtgttgactataagctcgttcagaaggtgtgccccgattataattatcactcagaaaccccctatctaagcagcggttag

SEQ ID NO: 171190 - DNA, 795 bp, Artificial Sequence
  derived and/or modified sequence
atgaggctacgccctctgcccttggtggtggtcccgggtttgctgcaattgctgttctgcgatagtaaggaggtggtgcacgccacagaggggctagactgggaagacaaagatgctcccgggacgttggttggcaatgtcgtacattcaaggattattagtccactaaggctgttcgtaaagcagtctccagtccctaagcctggaccaatggcatatgccgacagcatggagaatttttgggattggctcgctaatatcaccgagattcaggagcctctggcacggacgaagagaaggcccattgtgaagacaggcaaattcaagaagatgtttggctggggagatttccactctaatattaaaactgttaaactaaacctactaatcaccggtaagatagtcgaccatggcaacggtacattttcagtttatttcaggcataacagcactggactggggaacgtcagtgtgtcactagtccctccatccaaagtagtggaatttgaagtaagcccccagagcacattggaaaccaaagagtccaaatctttcaactgtcgcatcgagtatgagaagacggaccgtgctaagaaaacagccctctgcaattttgatccatcaaagatttgttatcaggaacagactcagtctcacgtgtcctggttatgctccaagcctttcaaagttatttgtatctatattgccttttactccgtggactacaaactggtgcaaaaggtctgtcccgactacaactaccacagcgagactccctacctcagctctggttag

SEQ ID NO: 171191 - DNA, 795 bp, Artificial Sequence
  derived and/or modified sequence
atgagacttcgcccattgccacttgtcgttgtgcccggactgctgcagctgctattttgtgactccaaagaagttgttcacgctacagagggccttgattgggaggacaaggacgcacccggaactttggtcggcaacgtggtgcattcccggatcatatctccattaagactgttcgtgaaacaaagccctgtcccgaagcctggtcctatggcctatgctgatagcatggagaatttctgggactggctggctaacattaccgagattcaggagcccctagcacgtaccaaacgccggccaattgtaaagacagggaaattcaaaaaaatgttcggctggggcgactttcactccaatataaagactgtgaagctaaatctcttaatcacagggaagatcgtcgatcacggcaatgggacattttcagtgtatttccggcacaatagtaccggtttgggcaacgtgagtgtatcactagtaccgccatcaaaggtcgtcgagtttgaagtctctcctcagtccacactagaaacaaaagaatccaaatctttcaactgtagaattgaatatgagaaaaccgatcgcgccaagaagactgccctgtgcaactttgatccaagcaagatatgttatcaagaacagactcagtctcacgtcagctggctatgcagcaaaccatttaaagtgatctgtatttacatcgccttctactctgttgactacaaattggtacaaaaagtttgcccagattacaattatcactctgaaacaccatatctgtctagcggctag

SEQ ID NO: 171192 - DNA, 1052 bp, Artificial Sequence
  derived and/or modified sequence
agcgccgcgctgtgtccctggcgtcctcagtcctgccccgcgaagtggagatgcgcgagaggcaggcgagggcgcgcagctcgtgaaaagccgcgccagccggcaccatgcgcctgcggccgctgcccctcgtggtggtccctggcttgctgcagctgctattttgtgacagtaaggaagtggtgcatgccacggaggggctggattgggaagacaaagatgctccagggacgttggtcggcaacgtggtgcactcaaggatcatcagtcccctgcgcctgtttgttaaacagtctccggtgcccaagcccggccccatggcgtacgcagacagcatggaaaacttttgggattggctggccaacatcacggagattcaggagccattggcaagaactaaacggaggccaatagtaaaaacaggaaaatttaagaaaatgtttggatggggtgactttcattccaacattaaaactgtcaaactcaatctcctcatcacagggaaaattgttgaccatggaaatggaaccttcagtgtgtatttccgacataattcaacaggcctgggcaatgtttcagtgagcttggtaccaccctccaaggtggtggaatttgaagtttccccccagtctaccttggagaccaaggaatccaaatctttcaattgtcgcattgagtatgaaaaaacagatcgggcgaaaaagaccgccctgtgcaactttgacccatccaagatctgctaccaggagcagactcagagccatgtgtcttggttgtgctccaagcccttcaaggtcatttgcatttacattgccttttacagtgttgattataaactcgtgcaaaaggtgtgccctgactacaattaccatagtgagaccccatacttatcttctggctgatcttcctgctgtggtggaaatgagggatacatatgtatttgattagaatgacaaagaaacaagcccagctctttatgataaaggatcccttttgtttctggcagtgaacaatagttccctatcaggttttcaaatttaaaaaaagaaaaa

SEQ ID NO: 171193 - DNA, 795 bp, Artificial Sequence
  derived and/or modified sequence
atgagactgagacccctgcccctggtggtggtgcccggcctgctgcagctgctgttctgcgacagcaaggaggtggtgcacgccaccgagggcctggactgggaggacaaggacgcccccggcaccctggtgggcaacgtggtgcacagcagaatcatcagccccctgagactgttcgtgaagcagagccccgtgcccaagcccggccccatggcctacgccgacagcatggagaacttctgggactggctggccaacatcaccgagatccaggagcccctggccagaaccaagagaagacccatcgtgaagaccggcaagttcaagaagatgttcggctggggcgacttccacagcaacatcaagaccgtgaagctgaacctgctgatcaccggcaagatcgtggaccacggcaacggcaccttcagcgtgtacttcagacacaacagcaccggcctgggcaacgtgagcgtgagcctggtgccccccagcaaggtggtggagttcgaggtgagcccccagagcaccctggagaccaaggagagcaagagcttcaactgcagaatcgagtacgagaagaccgacagagccaagaagaccgccctgtgcaacttcgaccccagcaagatctgctaccaggagcagacccagagccacgtgagctggctgtgcagcaagcccttcaaggtgatctgcatctacatcgccttctacagcgtggactacaagctggtgcagaaggtgtgccccgactacaactaccacagcgagaccccctacctgagcagcggctag

SEQ ID NO: 171194 - DNA, 795 bp, Artificial Sequence
  derived and/or modified sequence
atgcgcctgaggcctttacctctggtggttgtgccaggtctgctgcaactgctgttctgcgatagtaaggaagtggttcatgccaccgaaggcctggattgggaggataaggacgcacctggaaccctggtaggaaacgtggttcatagcagaatcatctcccctctccgtttgtttgtaaaacagtcacccgtaccaaagccaggtcccatggcttatgcagatagtatggaaaacttctgggactggctggcgaatattactgagattcaagagcctctggcccgtactaagaggagaccaattgtgaagaccggcaaattcaagaaaatgttcggatggggggactttcatagcaacattaagactgtcaagctgaatctcctgatcacagggaaaattgtggaccatgggaacgggaccttcagtgtgtactttcgacataatagtactgggctgggcaacgtgtccgtctctctggttccccctagtaaggtcgtagaatttgaggtcagtccacagagcacgttagagacaaaggagtccaagtcttttaactgccgcatcgagtatgagaagacggaccgcgctaagaagacggctctgtgcaatttcgatccttccaaaatttgctatcaggaacagactcagtcccacgtgtcgtggctgtgctctaagccctttaaggtcatatgcatctatatcgcattttatagcgtcgattacaagctggttcagaaggtttgtcctgactataactaccatagcgagactccgtacctgagcagcggctag

SEQ ID NO: 171195 - DNA, 795 bp, Artificial Sequence
  derived and/or modified sequence
atgaggctgcggcccctgcccctggtggtggtgcccggcctgctgcagctgctcttctgtgacagcaaggaggtggtgcacgccacagagggcctggactgggaggacaaggatgcccctggcaccctggtgggcaatgtggtgcacagccgcatcatcagccccctgcggctgtttgtgaagcagagccctgtgcccaagccaggccccatggcctatgctgacagcatggagaacttctgggactggctggccaacatcacagagatccaggagcccctggcccggaccaagagaagacccatcgtgaagacaggcaagttcaagaagatgtttggctggggagacttccacagcaacatcaagacagtgaagctgaacctgctgatcaccgggaagatcgtggaccatggaaatggcaccttctctgtgtacttccgccacaacagcacaggcctgggcaatgtgtctgtgtccctggtgccccccagcaaggtggtggagtttgaggtgagcccccagagcaccctggagaccaaggagagcaagagcttcaactgcagaattgaatatgagaagacagaccgggccaagaagacagccctgtgcaactttgaccccagcaagatctgctaccaggagcagacccagagccacgtgtcctggctgtgcagcaagcccttcaaggtgatctgcatctacatcgccttctacagcgtggactacaagctggtgcagaaggtgtgcccagactacaactaccacagcgagaccccctacctgagcagtggatag

SEQ ID NO: 171196 - DNA, 795 bp, Artificial Sequence
  derived and/or modified sequence
atgcggctgcggcccctgcccctggtggtggtgcccggcctgctgcagcttctgttctgtgattctaaggaggtcgtgcacgccacagagggtctcgactgggaggataaggatgctccagggaccctggttggaaacgtcgtccattctcgaatcatatccccactccggctgtttgtgaaacagagccctgtgcctaagccgggtccaatggcctacgctgacagtatggagaacttttgggattggcttgctaacataacagagattcaggagcctctggcccgtaccaagcgtcgtcccatcgtgaagacgggaaagtttaaaaaaatgttcggttggggcgatttccactctaacataaagaccgtgaaactgaatcttttgattactggcaaaattgtcgatcatggaaatggaaccttcagtgtctatttcagacacaacagcaccggtctcggaaatgtgtctgtatccctggtgcccccttccaaggtggttgaatttgaggtctcaccccagtctacgcttgagacaaaagagagcaaaagcttcaattgcaggatagaatacgaaaaaactgaccgggcaaaaaaaacggcgctgtgcaatttcgacccatctaagatctgttatcaggagcagactcagagccatgttagctggttgtgcagcaagccattcaaagtcatctgcatttacattgcattctacagtgtggattataagttggtgcagaaggtgtgccccgactacaactaccacagtgagaccccttacttaagtagtggatag

SEQ ID NO: 171197 - RNA, 795 nt, Artificial Sequence
  derived and/or modified sequence
augaggcuacgcccucugcccuuggugguggucccggguuugcugcaauugcuguucugcgauaguaaggagguggugcacgccacagaggggcuagacugggaagacaaagaugcucccgggacguugguuggcaaugucguacauucaaggauuauuaguccacuaaggcuguucguaaagcagucuccagucccuaagccuggaccaauggcauaugccgacagcauggagaauuuuugggauuggcucgcuaauaucaccgagauucaggagccucuggcacggacgaagagaaggcccauugugaagacaggcaaauucaagaagauguuuggcuggggagauuuccacucuaauauuaaaacuguuaaacuaaaccuacuaaucaccgguaagauagucgaccauggcaacgguacauuuucaguuuauuucaggcauaacagcacuggacuggggaacgucagugugucacuagucccuccauccaaaguaguggaauuugaaguaagcccccagagcacauuggaaaccaaagaguccaaaucuuucaacugucgcaucgaguaugagaagacggaccgugcuaagaaaacagcccucugcaauuuugauccaucaaagauuuguuaucaggaacagacucagucucacguguccugguuaugcuccaagccuuucaaaguuauuuguaucuauauugccuuuuacuccguggacuacaaacuggugcaaaaggucugucccgacuacaacuaccacagcgagacucccuaccucagcucugguuag

SEQ ID NO: 171198 - RNA, 795 nt, Artificial Sequence
  derived and/or modified sequence
augagacuucgcccauugccacuugucguugugcccggacugcugcagcugcuauuuugugacuccaaagaaguuguucacgcuacagagggccuugauugggaggacaaggacgcacccggaacuuuggucggcaacguggugcauucccggaucauaucuccauuaagacuguucgugaaacaaagcccugucccgaagccugguccuauggccuaugcugauagcauggagaauuucugggacuggcuggcuaacauuaccgagauucaggagccccuagcacguaccaaacgccggccaauuguaaagacagggaaauucaaaaaaauguucggcuggggcgacuuucacuccaauauaaagacugugaagcuaaaucucuuaaucacagggaagaucgucgaucacggcaaugggacauuuucaguguauuuccggcacaauaguaccgguuugggcaacgugaguguaucacuaguaccgccaucaaaggucgucgaguuugaagucucuccucaguccacacuagaaacaaaagaauccaaaucuuucaacuguagaauugaauaugagaaaaccgaucgcgccaagaagacugcccugugcaacuuugauccaagcaagauauguuaucaagaacagacucagucucacgucagcuggcuaugcagcaaaccauuuaaagugaucuguauuuacaucgccuucuacucuguugacuacaaauugguacaaaaaguuugcccagauuacaauuaucacucugaaacaccauaucugucuagcggcuag

SEQ ID NO: 171199 - protein, 642 aa, Artificial Sequence
  derived and/or modified sequence
MDKLKCPSFFKCREKEKVSASSENFHVGENDENQDRGNWSKKSDYLLSMIGYAVGLGNVWRFPYLTYSNGGGAFLIPYAIMLALAGLPLFFLECSLGQFASLGPVSVWRILPLFQGVGITMVLISIFVTIYYNVIIAYSLYYMFASFQSELPWKNCSSWSDKNCSRSPIVTHCNVSTVNKGIQEIIQMNKSWVDINNFTCINGSEIYQPGQLPSEQYWNKVALQRSSGMNETGVIVWYLALCLLLAWLIVGAALFKGIKSSGKVVYFTALFPYVVLLILLVRGATLEGASKGISYYIGAQSNFTKLKEAEVWKDAATQIFYSLSVAWGGLVALSSYNKFKNNCFSDAIVVCLTNCLTSVFAGFAIFSILGHMAHISGKEVSQVVKSGFDLAFIAYPEALAQLPGGPFWSILFFFMLLTLGLDSQFASIETITTTIQDLFPKVMKKMRVPITLGCCLVLFLLGLVCVTQAGIYWVHLIDHFCAGWGILIAAILELVGIIWIYGGNRFIEDTEMMIGAKRWIFWLWWRACWFVITPILLIAIFIWSLVQFHRPNYGAIPYPDWGVALGWCMIVFCIIWIPIMAIIKIIQAKGNIFQRLISCCRPASNWGPYLEQHRGERYKDMVDPKKEADHEIPTVSGSRKPE

SEQ ID NO: 171200 - DNA, 1929 bp, Artificial Sequence
  derived and/or modified sequence
atggacaagctgaagtgccccagcttcttcaagtgcagagagaaggagaaggtgagcgccagcagcgagaacttccacgtgggcgagaacgacgagaaccaggacagaggcaactggagcaagaagagcgactacctgctgagcatgatcggctacgccgtgggcctgggcaacgtgtggagattcccctacctgacctacagcaacggcggcggcgccttcctgatcccctacgccatcatgctggccctggccggcctgcccctgttcttcctggagtgcagcctgggccagttcgccagcctgggccccgtgagcgtgtggagaatcctgcccctgttccagggcgtgggcatcaccatggtgctgatcagcatcttcgtgaccatctactacaacgtgatcatcgcctacagcctgtactacatgttcgccagcttccagagcgagctgccctggaagaactgcagcagctggagcgacaagaactgcagcagaagccccatcgtgacccactgcaacgtgagcaccgtgaacaagggcatccaggagatcatccagatgaacaagagctgggtggacatcaacaacttcacctgcatcaacggcagcgagatctaccagcccggccagctgcccagcgagcagtactggaacaaggtggccctgcagagaagcagcggcatgaacgagaccggcgtgatcgtgtggtacctggccctgtgcctgctgctggcctggctgatcgtgggcgccgccctgttcaagggcatcaagagcagcggcaaggtggtgtacttcaccgccctgttcccctacgtggtgctgctgatcctgctggtgagaggcgccaccctggagggcgccagcaagggcatcagctactacatcggcgcccagagcaacttcaccaagctgaaggaggccgaggtgtggaaggacgccgccacccagatcttctacagcctgagcgtggcctggggcggcctggtggccctgagcagctacaacaagttcaagaacaactgcttcagcgacgccatcgtggtgtgcctgaccaactgcctgaccagcgtgttcgccggcttcgccatcttcagcatcctgggccacatggcccacatcagcggcaaggaggtgagccaggtggtgaagagcggcttcgacctggccttcatcgcctaccccgaggccctggcccagctgcccggcggccccttctggagcatcctgttcttcttcatgctgctgaccctgggcctggacagccagttcgccagcatcgagaccatcaccaccaccatccaggacctgttccccaaggtgatgaagaagatgagagtgcccatcaccctgggctgctgcctggtgctgttcctgctgggcctggtgtgcgtgacccaggccggcatctactgggtgcacctgatcgaccacttctgcgccggctggggcatcctgatcgccgccatcctggagctggtgggcatcatctggatctacggcggcaacagattcatcgaggacaccgagatgatgatcggcgccaagagatggatcttctggctgtggtggagagcctgctggttcgtgatcacccccatcctgctgatcgccatcttcatctggagcctggtgcagttccacagacccaactacggcgccatcccctaccccgactggggcgtggccctgggctggtgcatgatcgtgttctgcatcatctggatccccatcatggccatcatcaagatcatccaggccaagggcaacatcttccagagactgatcagctgctgcagacccgccagcaactggggcccctacctggagcagcacagaggcgagagatacaaggacatggtggaccccaagaaggaggccgaccacgagatccccaccgtgagcggcagcagaaagcccgagtag

SEQ ID NO: 171201 - DNA, 1929 bp, Artificial Sequence
  derived and/or modified sequence
atggataaactgaaatgcccgtctttctttaaatgcagggagaaggagaaagtgagcgcttcctccgaaaacttccatgtgggcgagaacgacgaaaaccaggatcgaggtaattggtcgaagaaaagcgactacctgctgtccatgattgggtatgcagtgggacttgggaatgtatggcgcttcccctatctgacctactctaacgggggaggcgcctttctcatcccctacgccatcatgctcgccctggccgggctgcccctatttttcttagaatgtagtctggggcagttcgcttcactcgggcccgtgagtgtatggaggattctcccacttttccagggtgtcggtatcacgatggtgctgatctcaatctttgttaccatttactacaacgttatcattgcttattccctgtactacatgtttgcaagcttccaatctgaacttccatggaagaattgctcgagctggtctgataaaaactgctcaagaagtcctattgtcacccactgtaatgtgtccacagttaacaagggtatacaggagattatccagatgaacaagtcttgggttgatattaacaactttacctgcatcaacgggtctgagatctaccagccaggccagctcccttcagagcaatactggaataaggtggccctgcagcgctcctctggtatgaacgaaactggggtaatcgtgtggtaccttgcattgtgtctgctactggcatggttgatcgtaggcgccgccctgtttaagggtatcaaaagctccgggaaagtggtctattttaccgcactgttcccttatgtggtgttactaatattgctggtgcgaggcgctaccctggagggcgcgtcaaagggcatcagttactacattggtgcccaatctaatttcaccaaattgaaggaggcagaggtctggaaggatgctgctacccaaattttttatagccttagtgtggcatggggcggcctggtggccctctccagctataacaagttcaagaacaactgtttcagcgacgctattgtcgtgtgcctgacgaactgtcttacatccgtgtttgcgggcttcgctattttttctatcctcggccacatggcacatatctctggcaaggaggtatcccaagtggtcaagagtgggtttgacctcgccttcattgcttaccctgaagcactagcacagctccccggtggcccgttttggtccatcctcttttttttcatgcttctgacactcgggttggattctcaattcgcgtcgatcgaaaccataacaacaactattcaggacctgtttcccaaggtcatgaaaaaaatgcgcgtgcccatcaccttaggttgctgcctcgtgcttttcctgttaggcctggtctgtgtgactcaggcaggtatttactgggtccacctgatagatcatttctgcgccggctgggggattctgattgccgccattcttgagctggtgggaatcatatggatttatggcggcaatcgcttcatagaagacaccgaaatgatgatcggagcgaaacgttggatattctggttgtggtggcgcgcttgctggttcgtcatcacccctatcctcttaattgccattttcatctggagtctagtacagttccaccgacccaattatggcgctataccttatcctgattggggagtagccctgggctggtgcatgattgtattctgcataatctggattccgataatggccattataaagattatccaggccaaagggaacatctttcagcggctgatctcttgttgccgtccagcgagtaactggggtccttatctggaacagcatcgaggggagcggtacaaagatatggtagacccgaagaaggaagccgaccatgagattcctaccgtctccggaagccggaaacccgagtag

SEQ ID NO: 171202 - DNA, 1929 bp, Artificial Sequence
  derived and/or modified sequence
atggacaagctgaagtgccccagcttcttcaagtgccgggagaaggagaaggtgtctgccagcagcgagaacttccacgtgggagaaaatgatgagaaccaggaccggggcaactggagcaagaagagtgactacctgctgtccatgattggctatgctgtgggcctgggcaatgtgtggaggttcccctacctgacctacagcaatggaggaggagccttcctgatcccctatgccatcatgctggccctggccggcctgcccctcttcttcctggagtgcagcctgggccagtttgccagcctgggccctgtgtctgtgtggaggatcctgcccctcttccagggcgtgggcatcaccatggtgctgatcagcatctttgtgaccatctactacaacgtcatcatcgcctacagcctgtactacatgtttgccagcttccagagcgagctgccctggaagaactgcagctcctggagcgacaagaactgcagccgcagccccatcgtgacccactgcaatgtgtccacagtgaacaagggcatccaggagatcatccagatgaacaagtcctgggtggacatcaacaacttcacctgcatcaatggcagcgagatctaccagcccggccagctgcccagcgagcagtactggaacaaggtggccctgcagaggagcagcggcatgaatgagaccggggtgattgtgtggtacctggccctgtgcctgctgctggcctggctgattgtgggcgccgccctcttcaagggcatcaagagcagcggcaaggtggtgtacttcaccgccctcttcccctacgtggtgctgctgatcctgctggtgcggggggccaccctggagggcgccagcaagggcatctcctactacatcggggcccagagcaacttcaccaagctgaaggaggccgaggtgtggaaggatgctgccacccagatcttctacagcctgtctgtggcctggggcggcctggtggccctgagcagctacaacaagttcaagaacaactgcttcagtgatgccatcgtggtgtgcctgaccaactgcctgacctctgtgtttgctggctttgccatcttcagcatcctgggccacatggcccacatcagcggcaaggaggtgtcccaggtggtgaagagcggctttgacctggccttcatcgcctacccagaggccctggcccagctgcccggcggccccttctggagcatcctcttcttcttcatgctgctgaccctgggcctggacagccagtttgccagcattgagaccatcaccaccaccatccaggacctcttccccaaggtgatgaagaagatgagggtgcccatcaccctgggctgctgcctggtgctcttcctgctgggcctggtgtgtgtgacccaggccggcatctactgggtgcacctgattgaccacttctgtgccggctggggcatcctgattgctgccatcctggagctggtgggcatcatctggatctatggaggcaaccgcttcatcgaggacacagagatgatgattggagccaagcgctggatcttctggctgtggtggagggcctgctggtttgtgatcacccccatcctgctgattgccatcttcatctggagcctggtgcagttccaccggcccaactatggagccatcccctacccagactggggcgtggccctgggctggtgcatgattgtgttctgcatcatctggatccccatcatggccatcatcaagatcatccaggccaagggcaacatcttccagaggctcatcagctgctgcaggcctgccagcaactggggcccctacctggagcagcacagaggagagcgctacaaggacatggtggaccccaagaaggaggccgaccacgagatccccaccgtgtctggcagcaggaagccagagtag

SEQ ID NO: 171203 - DNA, 1929 bp, Artificial Sequence
  derived and/or modified sequence
atggacaagctgaagtgccccagcttcttcaagtgccgggagaaggaaaaggtgtctgcgagctcagaaaattttcacgttggggaaaacgacgagaatcaggatcggggcaactggtctaaaaaatcagattacctcctcagtatgataggctacgcagtcgggttaggcaacgtgtggcgattcccatacttgacctactctaatggaggcggtgctttcctgatcccatacgctataatgcttgctttggctggattgccactgttcttcctggaatgctcacttgggcaatttgccagcttagggcctgtgtcagtgtggaggatcctccctctattccagggagtcggcataacaatggtcctcatcagcattttcgttaccatctattacaatgtgatcatagcatacagtctgtactatatgttcgcctcattccagagcgagcttccctggaagaactgcagctcatggtctgataaaaactgttctaggagtcccattgtgacccactgtaacgttagcacagtgaataagggtattcaggaaattatccagatgaacaaatcctgggtggacattaataactttacatgtatcaacggaagcgagatttaccagccgggtcagttaccatccgagcagtactggaacaaagtggcacttcagcgctccagcggtatgaacgagacaggagtgatcgtgtggtatcttgccttgtgccttcttctggcttggttgatagtgggcgccgccctcttcaagggaattaaatccagtgggaaagtggtctacttcactgccttatttccatacgtggttcttctaatactactcgtgaggggtgcaacgctggaaggagccagcaaagggatttcgtactacatcggcgcccagtccaacttcacaaagttgaaggaagctgaagtttggaaggatgccgcaacacagattttttattctctatcagtcgcctggggcggcctcgtggcactgtcaagttacaataaatttaagaataactgtttctcagatgcaatcgtggtatgcctgactaactgccttacaagcgtatttgctggattcgcgatcttttctatactcggacacatggcccatattagcggtaaagaggtgagccaggtggtcaaaagtggctttgacctggcattcatagcatacccggaggccctagctcagctgcccggcggtcccttctggtctatattgttttttttcatgctacttacactgggactggactctcagtttgcttccattgagaccataaccactaccatacaagacctcttccccaaggtaatgaagaagatgagagtgcctattacgctggggtgttgtttggtgctcttcttactcgggctggtttgcgtgacgcaggctgggatttactgggttcacctgattgaccatttctgcgcggggtggggcatactcattgcggcgattctggagttggtcggtataatctggatttacggcgggaaccgctttatcgaggacaccgagatgatgataggtgcaaagaggtggatattctggctgtggtggcgggcctgttggttcgtcatcacccctatcctcctcattgcaatctttatctggtccctggtacagtttcaccgcccaaactatggcgccatcccctatcctgactggggcgtggccttggggtggtgtatgattgtcttctgcatcatctggataccgataatggccataatcaagattattcaggccaagggaaacatttttcagcggctcatctcttgttgcagaccagcctcaaattgggggccctatctggaacagcaccggggagagaggtataaggatatggtggatcccaagaaagaggctgaccatgagattcccaccgtgtcgggctccagaaaacctgaatag

SEQ ID NO: 171204 - DNA, 1929 bp, Artificial Sequence
  derived and/or modified sequence
atggataaactgaaatgtccttcattctttaaatgcagagagaaagaaaaagtgagcgcgtcttccgaaaatttccacgtgggtgaaaatgacgagaatcaagatcgcggtaattggagtaagaaaagcgactacctcctgagtatgattgggtatgctgtcggtctggggaatgtgtggaggttcccttacctgacttactctaacggaggcggtgcttttctaataccatatgccatcatgctcgcactggctggactccccctcttcttcttagagtgcagcctggggcagtttgctagcctgggaccagtcagcgtctggcgtatcctcccactgtttcaaggagtgggcattactatggtgctgatctccatctttgtcacaatttactacaatgtgatcatagcgtactccttgtactatatgttcgcttcctttcagagtgagctgccatggaagaactgttcctcttggagcgataaaaattgttctcgttctcctattgtgacccactgtaatgtgtctacagtcaacaagggcattcaagaaattatccagatgaataagagttgggtagacattaataactttacatgcatcaatgggagcgaaatttatcagcctgggcaattgccctccgagcagtattggaacaaagtcgctctgcagcgctcctctggtatgaacgaaacgggagtgatcgtctggtacttggccctctgtctcctgctcgcctggttgatagtgggggcagctctctttaaagggataaaaagctcagggaaagtcgtgtatttcacagcactgtttccttatgttgtgctgttgattctgttggtgcgaggcgcaacactagagggggcaagcaagggtatcagctactacattggcgctcagtccaatttcaccaaactcaaggaggccgaagtgtggaaggatgccgctacccagatcttctacagcttgagtgtggcctgggggggtctggtagccctgtcaagctataataaatttaaaaataactgttttagtgatgcgattgttgtttgcctaaccaactgtctcaccagcgtgtttgcaggtttcgcaattttctctatactgggccacatggctcacatatccggaaaggaggttagtcaagtcgtgaagtccggcttcgatctcgcttttattgcgtacccggaagccctggcccaactcccaggtggccctttctggtccattttgttcttttttatgcttctcacccttggcctcgactcccagttcgcctccattgagacaattactactaccatacaggacctgttccccaaggtcatgaaaaagatgagagtaccgatcacactgggttgttgcctggttctgttcctgctggggctcgtctgcgttacacaagccggtatctattgggttcacctcatcgatcacttttgtgcaggttggggcatactgattgcggctatcctcgagctggtgggcatcatttggatatacggcggtaatcgattcattgaggataccgagatgatgatcggggcaaaaagatggatattttggttgtggtggcgggcatgttggttcgttattaccccaatcctcctcatcgctatatttatttggagcctcgtgcagtttcacagaccaaattatggtgcaattccgtatccggactggggggtcgcgttgggttggtgcatgatcgttttctgtattatctggatccctatcatggccatcatcaagatcatacaagccaagggcaatatcttccagcgccttatcagctgctgtcggccagcgagcaattggggtccctacctggagcagcatagaggcgagaggtacaaggacatggtcgatcccaaaaaagaggctgatcacgaaatccctacagtgagcggaagtcgcaaacctgaatag

SEQ ID NO: 171205 - DNA, 4521 bp, Artificial Sequence
  derived and/or modified sequence
taggaacaggggagagtgcacctgctaccagtcaagctcagccagactgcaagaggaggcgaggcggagccagccgagggagtgaaccatggacaagttgaaatgcccgagtttcttcaagtgcagggagaaggagaaagtgtcggcttcatcagagaatttccatgttggtgaaaatgatgagaatcaggaccgtggtaactggtccaaaaaatcggattatcttctatctatgattggatacgcagtgggattaggaaatgtgtggagatttccatatctgacctacagcaatggtggaggcgccttcttgataccttatgcaattatgttagcattggctggtttacctttgttctttctggagtgttcactgggacaatttgctagcttaggtccagtttcagtttggaggattcttccattgtttcaaggtgtgggaattacaatggtcctgatctccatttttgtgacaatctattacaatgtcataattgcctatagtctttactacatgtttgcttcttttcaaagtgaactaccatggaaaaattgttcttcgtggtcagataaaaactgtagcagatcaccaatagtaactcactgtaatgtgagtacagtgaataaaggaatacaagagatcatccaaatgaataaaagctgggtagacatcaacaattttacctgcatcaacggcagtgaaatttatcagccagggcagcttcccagtgaacaatattggaataaagtggcgctccaacggtcaagtggaatgaatgagactggagtaattgtttggtatttagcactttgtcttcttctggcttggctcatagttggagcagcactatttaaaggaatcaaatcgtctggcaaggtggtatattttacagctcttttcccctatgtggtcctactcatcctgttagtacgaggtgcaactctggagggtgcttcaaaaggcatttcatactatattggagcccagtcaaattttacaaaacttaaggaagctgaggtatggaaagatgctgccactcagatattttactccctttcagtggcttggggtggcttagttgctctatcatcttacaataagttcaaaaacaactgcttctctgatgccattgtggtttgtttgacaaactgtctcactagcgtgtttgctggatttgctattttttctatattgggacacatggcccatatatctggaaaggaagtttctcaagttgtaaaatcaggttttgatttggcattcattgcctatccagaggctctagcccaactcccaggtggtccattttggtccatattattttttttcatgcttttaactttgggtctcgattctcagtttgcttcgattgaaacgatcacaacaacaattcaagatttatttcccaaagtgatgaagaaaatgagggttcccataactttgggctgctgcttggttttgtttctccttggtctcgtctgtgtgactcaggctggaatttactgggttcatctgattgaccacttctgtgctggatggggcattttaattgcagctatactggagctagttggaatcatctggatttatggagggaacagattcattgaggatacagaaatgatgattggagcaaagaggtggatattctggctatggtggagagcttgctggtttgtaattacgcctatccttttgattgcaatatttatctggtcattggtgcaatttcatagacctaattatggcgcaattccataccctgactggggagttgctttaggctggtgtatgattgttttctgcattatttggattccaattatggctatcataaaaataattcaggctaaaggaaacatctttcaacgccttataagttgctgcagaccagcttctaactggggtccatacctggaacaacatcgtggggaaagatataaagacatggtagatcctaaaaaagaggctgaccatgaaatacctactgttagtggcagcagaaaaccggaatgagatctcattgaaaaaaatatatgattgtataatgtgattttttttagaatagggggaaccttatttatttgtgtgttaactgaataggaaaatgtacatactatgttcatgatagtgtgatttttttcacatttaagcaggaatgcaatataaaaatgtgaatctcttaattctcagccatgtgcttattatatttctttttagattgtctatctgtataacacacacacacacacctaagagtctctatttcacaattatatttttgtaaatagtatatgcatttttaatacattggaggctttattttgaactaatttcttagagaatagttatattttctattacacaagtttaaaaatattattaacttgtattttcttaatatacaatctatcttttccacaaatatgagtgggaaataaatcagcacatttgaaagaaagtgttaaaactgaaggcctcacttaattagaaacgtgataaatatatggacaaatggactatacatactataagaggactgtagtttaatactttttacccaaatatgtttaaaaacttcgtgcatttgttacagctcatgttttctatatgaacttagtcattaatgttctttataaaaagtgaaataagatggaaaaataaggatcctacagccagtaagtgataaatctagaaaattgagttttgagtacctcttttcccatatacaatcttccttccttaggtaatttggaagaaaactatgacccatttaatttctattgtgtttcacaaaattaagtgttgttcattatactctctgaaatataggtttaatttcaaatagaatatggacttaaatgttaatgagaaaatggctttaatcaattctagcattttattactgtaatacagggctgatagagtgattttgtcttatatgagtaagttactacttacaggtgataacttgcatactattggaagataaacttgtcaaacttgtcaagaatgagaaaagccaaattagaaaatcctatgtcctagtttccttaccaaggataattaaatatatcactaagagctttatatattgattatatattgttgacaactggtttaagcatcatagcctatgatgataaacactgcctatatatgtaaatagcttttcatcaattcttaaatttcttaacctaggcttcagggagcatatgaaaccaaaattatatggaacattttctgtgtgtacatgtacatgcatttttctagggagagagtccgtaggtttatcagaatatcaaggaaaactgtgacccaaagaagtttaagaatcacatacagtgctgctggctttttgtgcttggcaaatgagtgacaatagaagaaataatttttcttacacattttaaaacgttttctcttccttgtgattgaagatgaaaggagtaagaaattaaggcatttgtttaatttatactggtaacttatttaggggggaggggacatgaaggtaggtaaataggtaggcctctaattgaaccacctctctaagttatgtacgtatatataagctgaaattgtgtttgacattctgagggttttctttttcttttttctttttttttttttttggtggggggctgggggtcagagtcttgttctgttgcctgggctggagtgcagtggcatgatctcagctcactgcaacctctgccttctggattcaagtgattctcctgcctcagcctcttgagtagctgggactacaggtgcccgccaccacaccagctaatttttgtatttttagtagaggcgaagtttccccatgttggccaggctggtcttgaactcccgacctcaagtgatctgtctacctcggcctcctaaagtgctgagattacaggtgtgagccaccgtgcccggcccattctaagggttttctttgaagacaggtcaaatgctgttagtaagtttcaggagattgttaattcctcagttataccagattttataaaatatttgagaatagatggctaacaagaggttagaaatacttttccttaattttaatccacagtatgttacatgcattctaccactacattttggtgctatttaaggtgtgcaattttctataggtgacttttgcaattcagggaagatttgggcatattaaatgaaagaatatctaattgggggaggtgtgaagggaaagaaattcttttcaaaagctgaccacaaagagtagttaaaagtttttgtcactatcttcacaagtgtgtaaagcacagatttcaacagagtgcttggcatattgtagggtgctcaatggtggtttttattattattactcagattccacagtggcaagaaacatcattctacataatggaaaacatttacatcaaatcccacttactttaatgcgaacttggagataatttatggtattgtattgtaaaccattaatgaaaactttttcacagttgagtgaaattaaaatcactatatctcaa

SEQ ID NO: 171206 - DNA, 1338 bp, Artificial Sequence
  derived and/or modified sequence
atggaaagagcgccccccgatggccccctgaacgctagcggagccctcgctggggaggctgcagcagccggcggagctagaggattctctgctgcatggactgccgtccttgccgccctgatggccctgttgattgtggccacagttctcggtaacgcactagttatgctggcattcgtggctgatagctctttaaggacgcaaaataacttctttctgttgaatctggccatcagcgacttcctcgtgggggcgttctgcatccccctgtatgtaccatatgtgctgacaggcagatggacatttggccgcggcctttgcaaactgtggttagtcgtcgattatcttttatgcacatcttctgcatttaatatcgttcttatttcttatgataggtttctgtcggtcactcgagcggtctcctacagagcacagcagggagacacacgtcgggcagttaggaagatgcttcttgtgtgggttctcgcctttctgctctacggaccggcgatcctcagctgggagtacttgtccggaggctctagcatcccagaaggtcattgctatgctgaattcttctacaactggtatttcttgatcactgctagcactctggagttctttacgcccttcctcagcgttaccttttttaacttatccatctatctgaacatccagcgacggactcgattgcgactggatggggcaagggaagcagctggtccggagcctccccctgaagcccaacctagtcctcctccaccccccggttgctggggctgttggcagaaagggcatggtgaggctatgcctctgcatcgatacggagtaggggaagcggctgtaggcgctgaagcaggagaggcaaccctggggggcggtggggggggaggtagcgtggctagcccgactagctctagcgggtcatcgtcccggggcacagaacgtccccgctccctaaaacgtgggtcaaagccgtccgcttcatccgctagcctggagaaaaggatgaaaatggtgtcccagtcatttacgcagaggttccgcctgtccagggatagaaaggtggccaagtccctggccgtgatcgtctccatcttcggcttgtgttgggcaccatatacactcttaatgattatcagggctgcatgccatggccactgtgttcccgactactggtacgagaccagcttttggctcctgtgggctaattcagcagttaatccagttctgtaccccctctgtcatcattccttccggcgggccttcacaaaactcctgtgtccacagaaattgaagattcagccacattcaagcctggaacactgctggaagtag

SEQ ID NO: 171207 - DNA, 1248 bp, Artificial Sequence
  derived and/or modified sequence
atggaacgggcgcctcccgacgggccacttaatgctagcggcgcacttgctggcgaagccgcagctgccggtggcgccaggggcttcagtgcagcttggaccgcagtgcttgcagccttaatggctttgctaatcgtcgctactgtgctggggaatgctttggttatgttagcattcgttgctgatagctctcttcggacccagaataacttttttcttctaaacctcgcaatctccgattttctcgtcggcgctttttgcatcccactgtacgtgccatatgtcctgaccggccggtggacgtttggccgcggattgtgcaagctatggcttgtggtggactacctgctgtgtacgtcttcagcattcaacattgttcttatcagctatgatcgctttctctccgtgacacgagcagtgagctatcgcgcacagcagggcgacacccggcgcgctgtcagaaagatgttattagtctgggttctggcatttctgctatacggccctgcaatcctgtcctgggagtatctttcaggaggttctagcatccctgaagggcactgttatgccgaatttttctataattggtattttctcatcacagcttcaactttggaattcttcactccttttctgagcgtcaccttcttcaatctgtctatttatttaaatatccagcgaagaacccggttacggctgaaagggcacggggaagcaatgccactccaccggtatggagtgggggaggctgcggtgggggccgaggctggcgaggcaacgctggggggaggcggtggtggggggtccgtggcctcccctacatcctcgtccggtagctccagccggggaactgagcggccacggtcacttaagagagggagcaaaccaagtgcgtcaagtgcatctctcgagaaacgtatgaagatggtctctcagtctttcacccagagatttcggctgagcagagatagaaaggtcgctaagagtctcgctgtcatcgtgtcaatctttggactatgctgggccccctacactctgctcatgataattcgtgctgcctgccatggccactgcgtccctgattactggtatgagacttcattttggttgctgtgggcaaatagtgccgtgaatcccgttctgtaccccctctgccatcacagttttcgtcgtgccttcactaagcttctctgtcctcaaaaactcaaaatacaaccacatagcagcctcgaacactgctggaagtag

SEQ ID NO: 171208 - DNA, 1338 bp, Artificial Sequence
  derived and/or modified sequence
atggagcgggcccccccagatggccccctgaatgccagcggggccctggccggggaggccgctgctgctggaggagcccggggcttctctgctgcctggacagctgtgctggccgccctgatggccctgctgattgtggccaccgtgctgggcaatgccctggtgatgctggcctttgtggccgacagcagcctgcggacccagaacaacttcttcctgctgaacctggccatcagtgacttcctggtgggcgccttctgcatccccctgtatgtgccctacgtgctgaccggccgctggaccttcggccggggcctgtgcaagctgtggctggtggtggactacctgctgtgcaccagcagcgccttcaacatcgtgctgatctcctatgaccgcttcctgtctgtgaccagggctgtgtcctaccgggcccagcagggcgacacccggcgggctgtgaggaagatgctgctggtgtgggtgctggccttcctgctgtatggccctgccatcctgtcctgggagtacctgagcggcggcagcagcatccctgagggccactgctacgccgagttcttctacaactggtacttcctgatcacagccagcaccctggagttcttcacccccttcctgtctgtgaccttcttcaacctgagcatctacctgaacatccagaggaggacccggctgcggctggatggagcccgggaggccgccggccctgagcccccacctgaggcccagcccagccccccacctcctcctggctgctggggctgctggcagaagggccacggggaggccatgcccctgcacagatatggagtgggggaggccgctgtgggcgctgaggccggggaggccaccctgggcggcggcggcggcggcggctctgtggccagccccaccagcagcagcggcagcagcagccggggcacagagcggcccaggagcctgaagaggggcagcaagcccagcgccagcagcgccagcctggagaagaggatgaagatggtgtcccagagcttcacccagcgcttccggctgagccgggacaggaaggtggccaagagcctggccgtgattgtgtccatcttcggcctgtgctgggccccctacaccctgctgatgatcatccgggccgcctgccacggccactgtgtgcctgactactggtatgagaccagcttctggctgctgtgggccaacagcgctgtgaaccctgtgctgtaccccctgtgccaccacagcttccggcgggccttcaccaagctgctgtgcccccagaagctgaagatccagccccacagcagcctggagcactgctggaagtag

SEQ ID NO: 171209 - DNA, 1248 bp, Artificial Sequence
  derived and/or modified sequence
atggagcgggcccccccagatggccccctgaatgccagcggggccctggccggggaggccgctgctgctggaggagcccggggcttctctgctgcctggacagctgtgctggccgccctgatggccctgctgattgtggccaccgtgctgggcaatgccctggtgatgctggcctttgtggccgacagcagcctgcggacccagaacaacttcttcctgctgaacctggccatcagtgacttcctggtgggcgccttctgcatccccctgtatgtgccctacgtgctgaccggccgctggaccttcggccggggcctgtgcaagctgtggctggtggtggactacctgctgtgcaccagcagcgccttcaacatcgtgctgatctcctatgaccgcttcctgtctgtgaccagggctgtgtcctaccgggcccagcagggcgacacccggcgggctgtgaggaagatgctgctggtgtgggtgctggccttcctgctgtatggccctgccatcctgtcctgggagtacctgagcggcggcagcagcatccctgagggccactgctacgccgagttcttctacaactggtacttcctgatcacagccagcaccctggagttcttcacccccttcctgtctgtgaccttcttcaacctgagcatctacctgaacatccagaggaggacccggctgcggctgaagggccacggggaggccatgcccctgcacagatatggagtgggggaggccgctgtgggcgctgaggccggggaggccaccctgggcggcggcggcggcggcggctctgtggccagccccaccagcagcagcggcagcagcagccggggcacagagcggcccaggagcctgaagaggggcagcaagcccagcgccagcagcgccagcctggagaagaggatgaagatggtgtcccagagcttcacccagcgcttccggctgagccgggacaggaaggtggccaagagcctggccgtgattgtgtccatcttcggcctgtgctgggccccctacaccctgctgatgatcatccgggccgcctgccacggccactgtgtgcctgactactggtatgagaccagcttctggctgctgtgggccaacagcgctgtgaaccctgtgctgtaccccctgtgccaccacagcttccggcgggccttcaccaagctgctgtgcccccagaagctgaagatccagccccacagcagcctggagcactgctggaagtag

SEQ ID NO: 171210 - DNA, 1338 bp, Artificial Sequence
  derived and/or modified sequence
atggagcgggccccccccgacggccccctgaacgccagcggcgccttagcaggggaggcagccgcagcgggtggtgccaggggtttcagcgcggcatggaccgcagtcctggctgccctgatggccctgcttatcgtagctacagtgttaggtaatgcgttggttatgttggcgttcgtcgcagactccagccttaggacacaaaacaacttctttctgctcaacctcgctataagtgattttctcgtaggcgcattttgtatccccttgtatgtcccttacgtgctcacaggtcgctggacgttcggcagaggcctgtgtaaactctggctggtcgtagattacctcttatgcacctcttccgcattcaacattgtgctaatttcatatgatcggtttctttctgttaccagagccgtgagctacagagcccaacagggggacaccaggcgggctgtccggaaaatgctgctggtatgggtgctcgcttttttgctgtatggacccgcaatcctgagttgggagtatctgtctggcgggagcagtatcccggaggggcactgttacgctgaatttttttacaactggtactttctgatcacagcctctaccctggaattttttacaccttttctcagcgtaaccttcttcaacctgtcaatctacctcaatatccagcgccgcaccaggctgcggttggacggggcccgggaggctgctgggccagagccaccacccgaggcacagccgagtcctccaccacctccaggctgttggggttgttggcaaaaagggcacggtgaggccatgcctcttcatcggtacggggtgggcgaagctgcagtgggcgcagaagccggagaagcaacgctcggaggcggcggcggtggcgggagcgtggcgagtccgacatcatcttccggctcatccagccgtggtacggagaggcccaggagtttgaagcgcggttccaaacctagtgcttcatctgcatcactggaaaagcgcatgaaaatggtctcacagagtttcactcagaggttcaggctttctagagatcgaaaagttgccaaatcgcttgccgtgatcgtgtcaatttttggcttgtgttgggcaccttatactcttctcatgataatccgggcagcatgtcacggccattgcgttcccgattattggtacgagacatccttttggctactctgggccaattccgctgtgaatcccgtgctttacccattgtgccaccacagtttccggcgcgcttttactaaactgctgtgtccccagaagcttaagattcagccacattcatccctggagcactgctggaaatag

SEQ ID NO: 171211 - DNA, 1248 bp, Artificial Sequence
  derived and/or modified sequence
atggagcgggccccccccgacggccccctgaacgccagcggcgccctggccggagaggcggcagcagccgggggcgctcggggattttctgctgcttggaccgcggtgcttgcggctctaatggcactactcatagtcgctactgttttggggaatgctctagtgatgttagcattcgtggctgacagtagcttaagaactcaaaataactttttcctcctgaacctggcaatcagtgacttcctcgtgggtgccttctgtattccactttacgtaccatatgtcctcacgggtcgctggacatttggcagggggttatgtaagctgtggctcgtggtcgattacctgttgtgcacctcaagtgcgtttaacattgtgctaatctcctacgatagattcctgtctgtgactcgggctgtcagctatcgagctcaacaaggagacacccgccgggcagtgagaaaaatgttactggtttgggtgttagccttccttctctacggcccagccatcttaagctgggagtatctgtcggggggcagttctatcccggaaggtcattgttacgctgagttcttttacaactggtacttcctgataacagccagtacccttgagtttttcacacccttcctgtcagtaactttctttaatctgagcatatatctgaatattcagcggagaacaagactacggctcaaagggcatggcgaggcaatgcccctgcatcgctacggggtgggtgaggcagccgtaggagctgaagccggggaggctaccctcggcggcggcggcggtggagggtctgtggcgtcgcctacttcttcctccgggagttcctctcgaggcactgagcggcctcggtcattgaagcgggggtctaagccgtctgcctcttctgcctctctcgagaagaggatgaaaatggttagccagtcattcacccagaggtttaggttgtctcgggaccggaaagtggccaaatccctcgccgtgattgtaagcatctttggcttgtgctgggccccctacacactgttgatgatcatccgtgccgcttgtcacggacactgcgtacccgactattggtacgagacatcattctggttgctctgggcgaattctgccgtgaacccggtgctgtacccactctgccatcacagcttcaggagagcgttcaccaagctgctgtgcccacaaaagctaaagatccagccacattctagcctggagcactgttggaagtag

SEQ ID NO: 171212 - DNA, 1338 bp, Artificial Sequence
  derived and/or modified sequence
atggagcgcgcaccacccgatgggccactcaatgcttctggcgcactcgccggtgaagccgcagcggcaggaggggctagaggctttagtgccgcttggaccgccgtgctggctgcattaatggccctgctgatcgtggccactgtgcttggcaacgcccttgttatgctggccttcgttgctgacagtagccttaggacccaaaataatttctttttgctgaatctggctatttcagacttcctggtgggcgctttctgcataccactgtacgtcccctatgtgcttactggcagatggacatttggtaggggactgtgtaagctgtggctggtggtagactacttgctgtgcacatcctccgcgttcaatattgtcctgatcagttacgacagatttctctcagtgacacgcgcagtgtcctacagagcccagcaaggggacacaaggagagcagtccggaaaatgctgcttgtatgggtgcttgcatttttgctctatggtcccgcaatcctgagctgggagtatctgtctgggggttcctctatccccgaaggacattgttacgccgaattcttctacaattggtacttcctcatcacagcgtccactttggagttctttacccctttcctgagcgtgactttctttaacctgtcaatctaccttaatattcagaggcggactcggctgaggctggatggggctcgggaagccgcaggaccagagcctccccctgaagcacagccaagtccaccccctccgccaggctgctggggctgttggcagaaaggccacggggaggcaatgcccttgcacaggtatggtgtgggtgaggccgctgtaggagcagaagctggagaggctacactcggtggaggcggtggcggtggcagcgtcgcctcccccacgtcctcttccgggtcatcttcacgcggaacagaacggcctcggtcactaaagcgcggtagtaagccaagcgccagtagcgctagtttagaaaagcgtatgaaaatggtgtctcagtcatttacacaacgattcaggctgtctcgggatcgaaaggtagccaaatccctggccgtgattgtatctatctttggactgtgctgggcaccctataccctattgatgattattagagctgcttgccacggacattgcgttcctgactactggtacgaaacttcgttttggctcctgtgggccaacagtgccgtgaatcccgtgctgtatccgctgtgccatcatagcttccgacgcgcttttaccaagctgctttgtccccaaaaactgaaaattcagcctcactccagcctagagcattgttggaaatag

SEQ ID NO: 171213 - DNA, 1248 bp, Artificial Sequence
  derived and/or modified sequence
atggagcgcgcaccccctgacgggccacttaatgctagcggggcactcgccggagaagccgctgccgcaggtggcgctcgcggtttctcagcagcatggacagccgtactggccgcactgatggcattgttaatagttgccaccgtgctggggaatgctctcgtgatgctcgcttttgtggcagatagtagcctgcggacccagaacaattttttccttctgaacttggctatcagcgacttcctcgtgggcgctttctgcataccactatatgtgccatacgttcttacaggtcggtggaccttcggtcgtgggctttgcaaactgtggctcgtcgtcgattatctgctatgtacctccagcgctttcaacatcgtgttaatcagctatgaccggtttttgtctgtaacacgcgctgtttcctaccgggctcagcagggggatactagaagagcggtaagaaaaatgttattggtgtgggttttggccttccttctctatgggccagccatcctgtcctgggaatacttgtccggcggttcaagcattccagaaggacactgctacgctgagttcttctataactggtacttcttgataactgcctctacccttgaattttttacacctttcctaagcgttacttttttcaatctttcaatctatctcaatatccaaaggagaacacgcctaaggttaaaggggcacggggaggctatgcccctccaccgctacggcgttggggaagctgctgtgggcgctgaagccggtgaagccacactcggtggcggtggcggtgggggaagcgtggcaagtcctaccagttctagtgggtcgagcagcagaggaacagaacgtccccgaagtcttaagagaggttcaaaacctagcgcttcctctgctagtctggagaaaaggatgaagatggtttcgcaatcattcactcagagattccggctcagccgagatcgcaaggtcgcaaagtcccttgcggtaattgtcagcatattcgggctgtgttgggccccttacactcttctgatgatcattagagcggcatgccacggacactgcgtgcctgactattggtacgaaactagtttttggctcctgtgggccaactccgcagtcaaccctgttctataccccctgtgccatcactcatttaggcgcgcattcacaaagctgctgtgcccacaaaaattgaaaatccagccccatagtagcttggagcactgttggaaatag

SEQ ID NO: 171214 - DNA, 1338 bp, Artificial Sequence
  derived and/or modified sequence
atggagagagccccccccgacggccccctgaacgccagcggcgccctggccggcgaggccgccgccgccggcggcgccagaggcttcagcgccgcctggaccgccgtgctggccgccctgatggccctgctgatcgtggccaccgtgctgggcaacgccctggtgatgctggccttcgtggccgacagcagcctgagaacccagaacaacttcttcctgctgaacctggccatcagcgacttcctggtgggcgccttctgcatccccctgtacgtgccctacgtgctgaccggcagatggaccttcggcagaggcctgtgcaagctgtggctggtggtggactacctgctgtgcaccagcagcgccttcaacatcgtgctgatcagctacgacagattcctgagcgtgaccagagccgtgagctacagagcccagcagggcgacaccagaagagccgtgagaaagatgctgctggtgtgggtgctggccttcctgctgtacggccccgccatcctgagctgggagtacctgagcggcggcagcagcatccccgagggccactgctacgccgagttcttctacaactggtacttcctgatcaccgccagcaccctggagttcttcacccccttcctgagcgtgaccttcttcaacctgagcatctacctgaacatccagagaagaaccagactgagactggacggcgccagagaggccgccggccccgagcccccccccgaggcccagcccagccccccccccccccccggctgctggggctgctggcagaagggccacggcgaggccatgcccctgcacagatacggcgtgggcgaggccgccgtgggcgccgaggccggcgaggccaccctgggcggcggcggcggcggcggcagcgtggccagccccaccagcagcagcggcagcagcagcagaggcaccgagagacccagaagcctgaagagaggcagcaagcccagcgccagcagcgccagcctggagaagagaatgaagatggtgagccagagcttcacccagagattcagactgagcagagacagaaaggtggccaagagcctggccgtgatcgtgagcatcttcggcctgtgctgggccccctacaccctgctgatgatcatcagagccgcctgccacggccactgcgtgcccgactactggtacgagaccagcttctggctgctgtgggccaacagcgccgtgaaccccgtgctgtaccccctgtgccaccacagcttcagaagagccttcaccaagctgctgtgcccccagaagctgaagatccagccccacagcagcctggagcactgctggaagtag

SEQ ID NO: 171215 - DNA, 1248 bp, Artificial Sequence
  derived and/or modified sequence
atggagagagccccccccgacggccccctgaacgccagcggcgccctggccggcgaggccgccgccgccggcggcgccagaggcttcagcgccgcctggaccgccgtgctggccgccctgatggccctgctgatcgtggccaccgtgctgggcaacgccctggtgatgctggccttcgtggccgacagcagcctgagaacccagaacaacttcttcctgctgaacctggccatcagcgacttcctggtgggcgccttctgcatccccctgtacgtgccctacgtgctgaccggcagatggaccttcggcagaggcctgtgcaagctgtggctggtggtggactacctgctgtgcaccagcagcgccttcaacatcgtgctgatcagctacgacagattcctgagcgtgaccagagccgtgagctacagagcccagcagggcgacaccagaagagccgtgagaaagatgctgctggtgtgggtgctggccttcctgctgtacggccccgccatcctgagctgggagtacctgagcggcggcagcagcatccccgagggccactgctacgccgagttcttctacaactggtacttcctgatcaccgccagcaccctggagttcttcacccccttcctgagcgtgaccttcttcaacctgagcatctacctgaacatccagagaagaaccagactgagactgaagggccacggcgaggccatgcccctgcacagatacggcgtgggcgaggccgccgtgggcgccgaggccggcgaggccaccctgggcggcggcggcggcggcggcagcgtggccagccccaccagcagcagcggcagcagcagcagaggcaccgagagacccagaagcctgaagagaggcagcaagcccagcgccagcagcgccagcctggagaagagaatgaagatggtgagccagagcttcacccagagattcagactgagcagagacagaaaggtggccaagagcctggccgtgatcgtgagcatcttcggcctgtgctgggccccctacaccctgctgatgatcatcagagccgcctgccacggccactgcgtgcccgactactggtacgagaccagcttctggctgctgtgggccaacagcgccgtgaaccccgtgctgtaccccctgtgccaccacagcttcagaagagccttcaccaagctgctgtgcccccagaagctgaagatccagccccacagcagcctggagcactgctggaagtag

SEQ ID NO: 171216 - DNA, 2659 bp, Artificial Sequence
  derived and/or modified sequence
cggctgcacggtcgcaccggcagcggctcaggctccggctcctctcccgctgcagcagccgcgctgccggccccactgggctcggatccggccccggccccctcggcaccgcctgctctggccccggccccggccccgcggaccatgcgctgggcgcccccaggggaacccgacccggccaagggcccgcaaagacgaggctcccgggccggggcccctcccggccgcccagctctcggccggcgccctgccccgcgtcccggagccgcgtgagcctgcggggccatggagcgcgcgccgcccgacgggccgctgaacgcttcgggggcgctggcgggcgaggcggcggcggcgggcggggcgcgcggcttctcggcagcctggaccgcggtgctggccgcgctcatggcgctgctcatcgtggccacggtgctgggcaacgcgctggtcatgctcgccttcgtggccgactcgagcctccgcacccagaacaacttcttcctgctcaacctcgccatctccgacttcctcgtcggcgccttctgcatcccactgtatgtaccctacgtgctgacaggccgctggaccttcggccggggcctctgcaagctgtggctggtagtggactacctgctgtgcacctcctctgccttcaacatcgtgctcatcagctacgaccgcttcctgtcggtcacccgagcggtctcataccgggcccagcagggtgacacgcggcgggcagtgcggaagatgctgctggtgtgggtgctggccttcctgctgtacggaccagccatcctgagctgggagtacctgtccgggggcagctccatccccgagggccactgctatgccgagttcttctacaactggtacttcctcatcacggcttccaccctggagttctttacgcccttcctcagcgtcaccttctttaacctcagcatctacctgaacatccagaggcgcacccgcctccggctggatggggctcgagaggcagccggccccgagccccctcccgaggcccagccctcaccacccccaccgcctggctgctggggctgctggcagaaggggcacggggaggccatgccgctgcacaggtatggggtgggtgaggcggccgtaggcgctgaggccggggaggcgaccctcgggggtggcggtgggggcggctccgtggcttcacccacctccagctccggcagctcctcgaggggcactgagaggccgcgctcactcaagaggggctccaagccgtcggcgtcctcggcctcgctggagaagcgcatgaagatggtgtcccagagcttcacccagcgctttcggctgtctcgggacaggaaagtggccaagtcgctggccgtcatcgtgagcatctttgggctctgctgggccccatacacgctgctgatgatcatccgggccgcctgccatggccactgcgtccctgactactggtacgaaacctccttctggctcctgtgggccaactcggctgtcaaccctgtcctctaccctctgtgccaccacagcttccgccgggccttcaccaagctgctctgcccccagaagctcaaaatccagccccacagctccctggagcactgctggaagtgagtggcccaccagagcctccctcagccacgcctctctcagcccaggtctcctgggcatctggccctgctgccccctacccggctcgttcccccaggggtgagccccgccgtgtctgtggccctctcttaatgccacggcagccaccctgccatggaggcgccttcctgggttggccagagggcccctcactggctggactggaggctgggtggccggccctgccccccacattctggctccaccgggagggacagtctggaggtcccagacatgctgcccaccccctgctggtgcccacccttcgcagttactggttggtgttcttcccaaagcaagcacctgggtgtgctccaggcttcctgccctagcagtttgcctctgcacgtgcacacacctgcacacccctgcacacacctgcacaccgtccctctccccggacaagcccaggacactgcctttgctgccttctgtctcttgcataagcctcaggcctggccctttcacccctcttcccaccaactctctctgcccccaaaagtgtcaaggggccctaggaacctcgaagctgttctctgcttttccattctgggtgttttcagaaagatgaagaagaaaacatgtctgtgaacttgatgttcctgggatgtttaatcaagagagacaaaattgctgaggagctcagggctggattggcaggtgtgggctcccacgccctcctccctccgctaaggcttccggctgagctgtgccagctgcttctgcccaccccgcctctgggctcacaccagccctggtggccaagcctgccccggccactctgtttgctcacccaggacctctgggggttgttgggaggagggggcccggctgggcccgagggtcccaaggcgtgcaggggcggtccagaggaggtgcccgggcaggggccgcttcgccatgtgctgtgcacccgtgccacgcgctctgcatgctcctctgcctgtgcccgctgcgctgccctgcaaaccgtgaggtcacaataaagtgtattttttta

SEQ ID NO: 171217 - DNA, 1545 bp, Artificial Sequence
  derived and/or modified sequence
cgcgttgcgctccggctgcacggtcgcaccggcagcggctcaggctccggctcctctcccgctgcagcagccgcgctgccggccccactgggctcggatccggccccggccccctcggcaccgcctgctctggccccggccccggccccgcggaccatgcgctgggcgcccccaggggaacccgacccggccaagggcccgcaaagacgaggctcccgggccggggcccctcccggccgcccagctctcggccggcgccctgccccgcgtcccggagccgcgtgagcctgcggggccatggagcgcgcgccgcccgacgggccgctgaacgcttcgggggcgctggcgggcgaggcggcggcggcgggcggggcgcgcggcttctcggcagcctggaccgcggtgctggccgcgctcatggcgctgctcatcgtggccacggtgctgggcaacgcgctggtcatgctcgccttcgtggccgactcgagcctccgcacccagaacaacttcttcctgctcaacctcgccatctccgacttcctcgtcggcgccttctgcatcccactgtatgtaccctacgtgctgacaggccgctggaccttcggccggggcctctgcaagctgtggctggtagtggactacctgctgtgcacctcctctgccttcaacatcgtgctcatcagctacgaccgcttcctgtcggtcacccgagcggtctcataccgggcccagcagggtgacacgcggcgggcagtgcggaagatgctgctggtgtgggtgctggccttcctgctgtacggaccagccatcctgagctgggagtacctgtccgggggcagctccatccccgagggccactgctatgccgagttcttctacaactggtacttcctcatcacggcttccaccctggagttctttacgcccttcctcagcgtcaccttctttaacctcagcatctacctgaacatccagaggcgcacccgcctccggctgaaggggcacggggaggccatgccgctgcacaggtatggggtgggtgaggcggccgtaggcgctgaggccggggaggcgaccctcgggggtggcggtgggggcggctccgtggcttcacccacctccagctccggcagctcctcgaggggcactgagaggccgcgctcactcaagaggggctccaagccgtcggcgtcctcggcctcgctggagaagcgcatgaagatggtgtcccagagcttcacccagcgctttcggctgtctcgggacaggaaagtggccaagtcgctggccgtcatcgtgagcatctttgggctctgctgggccccatacacgctgctgatgatcatccgggccgcctgccatggccactgcgtccctgactactggtacgaaacctccttctggctcctgtgggccaactcggctgtcaaccctgtcctctaccctctgtgccaccacagcttccgccgggccttcaccaagctgctctgcccccagaagctcaaaatccagccccacagctccctggagcactgctggaagtga

SEQ ID NO: 171218 - protein, 186 aa, Artificial Sequence
  derived and/or modified sequence
MAGLTDLQRLQARVEELERWVYGPGGARGSRKVADGLVKVQVALGNISSKRERVKILYKKIEDLIKYLDPEYIDRIAIPDASKLQFILAEEQFILSQVALLEQVNALVPMLDSAHIKAVPEHAARLQRLAQIHIQQQDQCVEITEESKALLEEYNKTTMLLSKQFVQWDELLCQLEAATQVKPAEE

SEQ ID NO: 171219 - protein, 161 aa, Artificial Sequence [sequence omitted]

SEQ ID NO: 171220 - protein, 104 aa, Artificial Sequence
  derived and/or modified sequence
MAGLTDLQRLQARVEELERWVYGPGGARGSRKVADGLVKVQVALGNISSKRERVKILYKKIEDLIKYLDPEYIDRIAIPDASKLQFILAERSSLSFPRLHSWSR

SEQ ID NO: 171221 - protein, 172 aa, Artificial Sequence
  derived and/or modified sequence
MAGLTDLQRLQARVEELERWVYGPGGARGSRKVADGLVKVQVALGNISSKRERVKILYKKIEDLIKYLDPEYIDRIAIPDASKLQFILAGNAGLHVYMHLRMWVVGEVKHRDGLSIQSSGGYKPWMLLSGIVAWFWVEDPMDPLVDIEYSIPLHQLQAMVPATVGASPVFYQ

SEQ ID NO: 171222 - DNA, 561 bp, Artificial Sequence
  derived and/or modified sequence
atggcgggcctgacagacctccaacgtctgcaggctcgtgtggaggaactggagcgctgggtgtatggccccggaggagctcgcggatcccgcaaggtggccgacgggctagtcaaagtccaggtcgcccttggaaatatttcctccaaaagggagagggtgaagattctttataagaagatcgaagatcttattaagtatctcgacccagaatatattgatcgaatcgccattccagacgcttctaaattacagtttatcctagcggaggaacagtttattctgtcccaagtggctttactggaacaggtgaacgcgttggtgcccatgctggactccgcccatatcaaagctgtaccagagcatgcggcaaggctgcagcgcctggcccagatccacatccaacagcaagatcagtgtgtcgaaatcacagaggaatctaaagctctgctggaagagtataacaaaacaaccatgctgctgtccaagcagttcgtgcagtgggatgaactcctttgccagctcgaagcagcaacccaagtcaaacccgcagaagagtag

SEQ ID NO: 171223 - DNA, 561 bp, Artificial Sequence
  derived and/or modified sequence
atggccggcctgacagacctgcagaggctgcaggcccgggtggaggagctggagcgctgggtgtatggccctgggggcgcccggggcagcaggaaggtggctgatggcctggtgaaggtgcaggtggccctgggcaacatcagcagcaagcgggagcgggtgaagatcctgtacaagaagattgaggacctgatcaagtacctggaccctgagtacatcgaccgcatcgccatcccagatgccagcaagctgcagttcatcctggccgaggagcagttcatcctgagccaggtggccctgctggagcaggtgaatgccctggtgcccatgctggacagcgcccacatcaaggctgtgcctgagcacgccgcccggctgcagaggctggcccagatccacatccagcagcaggaccagtgtgtggagatcacagaggagagcaaggccctgctggaggagtacaacaagaccaccatgctgctgagcaagcagtttgtgcagtgggatgagctgctgtgccagctggaggccgccacccaggtgaagccagctgaggagtag

SEQ ID NO: 171224 - DNA, 561 bp, Artificial Sequence
  derived and/or modified sequence
atggccggcctgaccgacctgcagcggctgcaggcccgggtggaggaactggaacggtgggtatacggccctggaggagcgaggggttctaggaaggtcgctgatgggctggtaaaagttcaggtggcgttgggtaatatctcatcaaagagggaacgcgtaaagattctctataaaaagatcgaagacttgattaagtatctggatccagaatacatagatcggatagcgatccctgatgcttctaaattgcagttcatcctggctgaagaacaatttatcctcagtcaagtggctctgctggagcaagtcaacgccttagtgcctatgctggatagcgcccatatcaaagccgtgccagagcacgctgcccggctacagcgcctggcacagattcatattcagcagcaggaccaatgtgttgaaatcactgaggaatccaaagccctgcttgaagaatacaataagacaactatgctgctgtccaaacagttcgtgcaatgggacgaacttctatgccagcttgaagccgcgactcaagttaagcccgcagaggaatag

SEQ ID NO: 171225 - DNA, 561 bp, Artificial Sequence
  derived and/or modified sequence
atggcaggtcttaccgatttacagcgcttacaggcgcgagtcgaggaactcgagcgctgggtgtacggacctggaggtgctcgaggaagtcgaaaggtggccgacggcttggttaaggtgcaagttgcgttggggaatatttcttctaagcgggaaagagtgaagattctgtataagaagatcgaggacctgatcaagtacctagatcccgaatacatcgaccgtattgctattcccgatgcctctaagctgcagtttatcctagccgaagagcagtttatactgagccaggtggccctgctggaacaggtgaacgcacttgtacccatgctggactccgcccacattaaagctgtgcccgaacacgcagctaggctgcagcgactggcgcagatacatattcaacagcaggaccagtgcgtggaaataaccgaagagtccaaggcgctcttagaggaatacaacaagactaccatgctgctgagtaaacagttcgtccaatgggatgagctgttatgtcagctagaagccgcaacacaggttaagcccgctgaagaatag

SEQ ID NO: 171226 - DNA, 561 bp, Artificial Sequence
  derived and/or modified sequence
atggccggcctgaccgacctgcagagactgcaggccagagtggaggagctggagagatgggtgtacggccccggcggcgccagaggcagcagaaaggtggccgacggcctggtgaaggtgcaggtggccctgggcaacatcagcagcaagagagagagagtgaagatcctgtacaagaagatcgaggacctgatcaagtacctggaccccgagtacatcgacagaatcgccatccccgacgccagcaagctgcagttcatcctggccgaggagcagttcatcctgagccaggtggccctgctggagcaggtgaacgccctggtgcccatgctggacagcgcccacatcaaggccgtgcccgagcacgccgccagactgcagagactggcccagatccacatccagcagcaggaccagtgcgtggagatcaccgaggagagcaaggccctgctggaggagtacaacaagaccaccatgctgctgagcaagcagttcgtgcagtgggacgagctgctgtgccagctggaggccgccacccaggtgaagcccgccgaggagtag

SEQ ID NO: 171227 - DNA, 808 bp, Artificial Sequence
  derived and/or modified sequence
tgggtcggtagtagcgatggcgggtctgactgacttgcagcggctacaggcccgagtggaagagctggagcgctgggtgtacgggccgggcggggcgcgcggctcacggaaggtggctgacggcctggtcaaggtgcaggtggctttggggaacatttccagcaagagggagagggtgaagattctctacaaaaagattgaagatctgatcaagtacctggatcctgagtacatcgaccgcattgccatacctgatgcctctaagctgcaattcatcctagcagaggagcagtttatcctttcccaggttgcactcctggagcaggtgaatgccttggtgcccatgctggacagtgctcacatcaaagccgttcctgagcatgctgcccgcctgcagcgcttggcccagatccacattcagcagcaggaccagtgtgtggaaatcactgaggagtccaaggctctcctggaggaatacaacaagactacaatgcttctctccaagcaattcgtgcagtgggatgagctactttgccagctagaggccgccacgcaagtgaagccagcagaggagtgatagctgctccccatcccaaagtgggcctgggcagtcaggctccagggccctatgccaacctgcctttgttacaaggcagaggaagctttgtatttattggcttcaaggcccacctctctgtactctgggctctaaagttggaggtcaggttacctgaggtttgcaatttgcaacacccaccctccccccaatcagtgttcttatttcagtgacaataaaccatagagatga

SEQ ID NO: 171228 - protein, 195 aa, Artificial Sequence
  derived and/or modified sequence
MGSRASTLLRDEELEEIKKETGFSHSQITRLYSRFTSLDKGENGTLSREDFQRIPELAINPLGDRIINAFFPEGEDQVNFRGFMRTLAHFRPIEDNEKSKDVNGPEPLNSRSNKLHFAFRLYDLDKDEKISRDELLQVLRMMVGVNISDEQLGSIADRTIQEADQDGDSAISFTEFVKVLEKVDVEQKMSIRFLH

SEQ ID NO: 171229 - DNA, 588 bp, Artificial Sequence
  derived and/or modified sequence
atgggcagcagagccagcaccctgctgagagacgaggagctggaggagatcaagaaggagaccggcttcagccacagccagatcaccagactgtacagcagattcaccagcctggacaagggcgagaacggcaccctgagcagagaggacttccagagaatccccgagctggccatcaaccccctgggcgacagaatcatcaacgccttcttccccgagggcgaggaccaggtgaacttcagaggcttcatgagaaccctggcccacttcagacccatcgaggacaacgagaagagcaaggacgtgaacggccccgagcccctgaacagcagaagcaacaagctgcacttcgccttcagactgtacgacctggacaaggacgagaagatcagcagagacgagctgctgcaggtgctgagaatgatggtgggcgtgaacatcagcgacgagcagctgggcagcatcgccgacagaaccatccaggaggccgaccaggacggcgacagcgccatcagcttcaccgagttcgtgaaggtgctggagaaggtggacgtggagcagaagatgagcatcagattcctgcactag

SEQ ID NO: 171230 - DNA, 3284 bp, Artificial Sequence
  derived and/or modified sequence
cattcggggctggaactcgaacgctgacgttggctcctgagccgggcgctgcctcgcgcctgattggcgggtcctcggggccgccctccccagcgcaccacccctgggttccctcccgggtccgcagtggaaacactgccctctcccttcttgacccctagcccttccttccctccctccttccctcctgtcgccgtctcttctggcgccgctgctcccggaggagctcccggcacggcgatgggttctcgggcctccacgttactgcgggacgaagagctcgaggagatcaagaaggagaccggcttttcccacagtcaaatcactcgcctctacagccggttcaccagcctggacaaaggagagaatgggactctcagccgggaagatttccagaggattccagaacttgccatcaacccactgggggaccggatcatcaatgccttctttccagagggagaggaccaggtaaacttccgtggattcatgcgaactttggctcatttccgccccattgaggataatgaaaagagcaaagatgtgaatggacccgaaccactcaacagccgaagcaacaaactgcactttgcttttcgactatatgatttggataaagatgaaaagatctcccgtgatgagctgttacaggtgctacgcatgatggtcggagtaaatatctcagatgagcagctgggcagcatcgcagacaggaccattcaggaggctgatcaggatggggacagtgccatatctttcacagaatttgttaaggttttggagaaggtggatgtagaacagaaaatgagcatccgatttcttcactaaaggagaccaaactgttccttgcggtctagtatttaagaactggaacttgaaagtcctccttctaccaactccacctccaccccctcattccccttctcccaaagtactactgctgttgcatgacaaccccaaatatgttctgtcaacacaaacctgcctttggtgtataaacagggcattacagaatggtacaccctatatatttctgttcagtatccattcactagttcttcatttataaatatcatcttccccattctgctgctgaatgccacacatccatccagtctgagaaagtgagagaggcaatcatgccaagaacaagccagcaaagctctttcaccagatgtagactgtagccctgctgccttccctccagcgagtctgccagcatgcttcttcatcctttttatatgttctttgcttcctacttccctgtcttccaacatactgttcacttactctggcagtctttctgcttttcattaagcctcaaaatctcctctgttctacttggcaccacaagctatgtcctatatatgtatttctgacttggcaggatagttcaggggtctggcagtttttatttaccttcattattaaatgggcctctgggatgttgcctcttcaggagctttttggtaatcaatacttctctcagaagtatgagaccatcctctgcactctgctctgtcatcaaaggctgctgggtggagataccctttttgaaaggtggccttggtgagaggtatggagccaagtcttctaggttgcttgcccacatcactctatctctggcctctgattctcaactttgtacctgtgtggctcctcttgttagtgcaatgttgactgttgaaaaagcagcagtatgcttacaggtttgcttagtttggggacaccgttaccaccagaatggctgctctgacaatatgcctagggactttctcatggcttttatttaataaggaggctgggcaccctataaagcctcatgcattcacacctttgcagcatggtttatgcctcagtgttatgtgcactggaatgttttccacttcacatttccaagtagaaatattagtgttacggaagtgcctaatatcccagtccaaatttttttttttttttttttttttttttgagacagagtcttgctctgtcacccaggctggagtgcagtggtgcgatcgctcactgcaacctcagcctcctggatttaagtgattctcctgcctcagcctcccaagtagctgggattacaggtgtgcaccaccatgcccggctaattttttgtatttttagtggagacagggtttcaccatgttggccaggctggtctcgaactcctgacctcgtgatccgcctgcctcagcctcccaaagtgctgggattacaggtgtgagccaccacgcctggccccagtccaaaatatttaaagattgtttccttagtgtcttgaagttttgcacaaaattcttttttttgagatggagtctcactctgtcacccaggctggagtgcagtggcgtgatcttggctcactgcaacctctgcctcctgggttcaagcaattctcccacctcagcctcccaagtagctgggattacagacgtgtgccaccatacctgggtaatttttgcatttttagtggagagggagtttcaccatgttggccaggttggtcttgaactcctgacctcaggtgatcctcctgcctcggcctcccaaagtgctgggattacaggcatgagccaccgtgctcagccgcaaaattctttatgaattttacacttggcaaatgttaatgacggaagccatagtctgctcctaatacatgtccaaagcattgactgttgtgtcattagctgcctggttacattagctccctggcttcttgtttagaccactgctaatcccttaaaaacaagaggtctggcactagtagcacaacctaaggtggcattacagatctttgagcgagccacagcaacttttctgccaagtcagcttagtttagacttcagtgaatcaggctattgctatcctaatgtatgtctctatgagtgtatttagccacacatctgcccttggttgactttctgactcattgcttgcttgcttgtttccttgctttggaaaactattgaagattgctaaaaaataccactgcaaagtgatggaaaagggtggagaacaggggagtagccaggctggatggctcaaatataaatgaatgaggaattctttatgaagtatcagtcagattttatgattaagtgatgtaatataggaattatgtaaaagggaagaatgtctgatactgatctattagagaggtactttagaggcttcttgattggcataaagttcctaaggttatagattttccccccttttggctgtatagcaaagtgttttaatccacggttgtgccttattgttccattaaaatt

SEQ ID NO: 171231 - DNA, 588 bp, Artificial Sequence
  derived and/or modified sequence
atgggctctagggcgagtaccttgctgagagatgaggagctcgaggaaataaaaaaagagactgggttctctcattcacagatcaccagactgtactctagatttacgtccctagataagggggagaacgggaccttgtctcgggaggattttcagcggatccccgaattggccattaaccccctgggggatcgtatcattaacgctttcttcccagaaggggaggatcaggtgaatttcagaggcttcatgcgtacactggcccatttccggcctatcgaagacaatgaaaagagcaaggacgttaacgggccagaacctctgaattcaagaagtaataaattacatttcgccttccgcctgtatgacctggacaaggatgaaaagatctctagggatgaactcctgcaggtcctgagaatgatggttggggtcaatatctcggatgagcagcttgggtctatcgccgatagaaccattcaggaagcagaccaggacggagactccgcgatttcgttcactgagtttgtgaaggtgttggaaaaggtggacgtagagcagaagatgagtatccgcttcctgcactag

SEQ ID NO: 171232 - DNA, 588 bp, Artificial Sequence
  derived and/or modified sequence
atgggcagccgggccagcaccctgctgagagatgaggagctggaggagatcaagaaggagaccggcttcagccacagccagatcacccggctgtacagccgcttcaccagcctggacaagggggagaatggcaccctgagccgggaggacttccagagaattcctgagctggccatcaaccccctgggggaccgcatcatcaatgccttcttcccagaaggagaggaccaggtgaacttccggggcttcatgaggaccctggcccacttccggcccatcgaggacaatgagaagagcaaggatgtgaatggacctgagcccctgaacagccgcagcaacaagctgcactttgccttccggctgtatgacctggacaaggatgagaagatcagcagagatgagctgctgcaggtgctgaggatgatggtgggcgtgaacatcagtgatgagcagctgggcagcattgctgacaggaccatccaggaggccgaccaggatggagacagcgccatctccttcacagaatttgtgaaggtgctggagaaggtggatgtggagcagaagatgagcatccgcttcctgcactag

SEQ ID NO: 171233 - DNA, 588 bp, Artificial Sequence
  derived and/or modified sequence
atgggcagccgggccagcaccctgctgcgggacgaggagctggaggagataaaaaaagaaactgggttcagtcactcccagatcaccagattgtattccagattcacaagtctagataaaggcgaaaatggtacactatctagggaggattttcagcgaatccccgagttggctattaacccgttgggcgatagaatcatcaacgcttttttccctgaaggcgaggaccaggtgaatttccgcggctttatgaggacgcttgctcactttagacctattgaagacaacgagaagtcaaaggatgttaatgggcccgaacctctaaattccagaagtaataaactgcatttcgctttcaggctgtacgatctggataaggacgagaagatatctagggacgagctcctgcaagttctacgtatgatggtgggtgtgaacatctccgacgagcaattaggttctatcgcggataggaccattcaggaagctgatcaagacggcgacagtgccattagcttcacggaatttgtcaaggttctcgagaaagtggacgtcgagcagaagatgagtattcgattcctgcattag

SEQ ID NO: 171234 - DNA, 588 bp, Artificial Sequence
  derived and/or modified sequence
atgggttcgcgagcgagtacactgctcagggatgaggaactcgaggagattaaaaaggagacgggtttcagtcacagccagatcacacgcttgtactcacgcttcactagccttgataaaggcgagaatggcactctatctagggaggacttccagcggattcccgaacttgctatcaaccccctgggagaccgcatcatcaatgcctttttccctgagggtgaggatcaagtgaactttcggggattcatgcgcactctggctcacttcaggcctatcgaggacaatgaaaagtcaaaggatgtaaatggtcctgagcccttgaattctaggtctaacaaactgcatttcgctttccgcctgtacgacctggacaaggatgagaagatctctagggatgaactgctgcaagttctgaggatgatggttggcgtgaatatttcagacgagcaattgggcagcatagctgaccgaactatacaggaggccgatcaggacggcgattcagcgataagtttcaccgagtttgtcaaggtgctagaaaaagtggacgtggagcagaagatgagcatcagatttctacattag

SEQ ID NO: 171235 - protein, 867 aa, Artificial Sequence
  derived and/or modified sequence
MAQQGQQGQMASGDSNLNFRMVAEIQNVEGQNLQEQVCPEPIFRFFRENKVEIASAITRPFPFLMGLRDRSFISEQMYEHFQEAFRNLVPVTRVMYCVLSELEKTFGWSHLEALFSRINLMAYPDLNEIYRSFQNVCYEHSPLQMNNVNDLEDRPRLLPYGKQENSNACHEMDDIAVPQEALSSSPRCEPGFSSESCEQLALPKAGGGDAEDAPSLLPGGGVSCKLAIQIDEGESEEMPKLLPYDTEVLESNGMIDAARTYSTAPGEKQGEEEGRNSPRKRNQDKEKYQESPEGRDKETFDLKTPQVTNEGEPEKGLCLLPGEGEEGSDDCSEMCDGEEPQEASSSLARCGSVSCLSAETFDLKTPQVTNEGEPEKELSLLPGEGEEGSDDCSEMCDGEERQEASSSLARRGSVSSELENHPMNEEGESEELASSLLYDNVPGAEQSAYENEKCSCVMCFSEEVPGSPEARTESDQACGTMDTVDIANNSTLGKPKRKRRKKRGHGWSRMRMRRQENSQQNDNSKADGQVVSSEKKANVNLKDLSKIRGRKRGKPGTRFTQSDRAAQKRVRSRASRKHKDETVDFKAPLLPVTCGGVKGILHKKKLQQGILVKCIQTEDGKWFTPTEFEIKGGHARSKNWRLSVRCGGWPLRWLMENGFLPDPPRIRYRKKKRILKSQNNSSVDPCMRNLDECEVCRDGGELFCCDTCSRVFHEDCHIPPVEAERTPWNCIFCRMKESPGSQQCCQESEVLERQMCPEEQLKCEFLLLKVYCCSESSFFAKIPYYYYIREACQGLKEPMWLDKIKKRLNEHGYPQVEGFVQDMRLIFQNHRASYKYKDFGQMGFRLEAEFEKNFKEVFAIQETNGNN

SEQ ID NO: 171236 - DNA, 2604 bp, Artificial Sequence
  derived and/or modified sequence
atggctcagcagggacagcagggccaaatggcctctggggactctaatctaaatttccgcatggtggctgagatccaaaatgtcgaaggacagaaccttcaggaacaggtgtgccccgagcccatctttaggttctttcgcgagaataaagtcgagatcgcctctgcaattacccgtccattcccatttctaatgggacttagagatcgaagttttattagtgaacagatgtatgaacacttccaggaagctttcaggaaccttgttccagtgacccgagttatgtactgtgtcctctcagaactggagaagacttttggatggtcacatctcgaagctctcttctccaggattaatcttatggcctaccccgaccttaatgagatctatcggagctttcaaaatgtctgttacgaacatagcccattgcaaatgaataacgttaacgacttagaagacagaccacggctgttgccttacggcaaacaggagaattccaatgcttgccacgaaatggacgacattgcagtgcctcaggaggcactaagctctagcccaagatgtgagccgggattctcaagcgagtcttgtgagcaattggccctgcccaaggcaggagggggcgatgctgaagatgcaccatccctgctccccggggggggggtcagctgcaaacttgccatccagattgacgagggtgagtccgaggagatgcccaaactactgccttacgacaccgaagtactggaatccaacggcatgattgacgctgctaggacttactcgaccgctccaggggagaaacagggtgaggaagagggtagaaattctccaagaaaaagaaaccaggataaggagaagtaccaggagtctcccgaagggcgggacaaggagacctttgacctgaagactccacaggtgacaaacgagggagaacctgaaaaggggctctgccttctccctggagagggtgaggaaggaagcgatgactgtagcgaaatgtgcgatggggaggagcctcaggaagcctccagcagtctcgcgcgatgcgggtccgtgtcctgtctgagtgctgagacctttgacctgaaaaccccacaagttacaaatgagggtgaacccgaaaaagagttgtcactgttgcctggcgaaggagaagagggcagtgatgattgctctgaaatgtgcgatggagaggagcggcaggaggcttccagctcactggctagaaggggctccgtttccagtgagctcgaaaatcaccccatgaatgaagaaggagagagtgaggaactggcctcatcgctgctctatgataacgtcccaggtgccgaacaaagtgcctatgaaaatgagaagtgcagttgcgtgatgtgtttttccgaagaggtgcccggttcccccgaggccaggacagaatctgaccaggcttgtggcacgatggataccgtggacatcgccaataattccaccctgggtaaaccgaagcgaaaaagaagaaaaaagcgcgggcacggatggtcccggatgcgaatgcggcgccaggaaaactctcagcagaacgacaatagcaaagccgatggtcaggtggtgtcctcagaaaagaaggccaacgttaacctcaaagatttgagcaaaatccgaggccggaagagaggaaaacctggaacaaggtttactcagagcgaccgcgccgcgcagaagcgggtgagatctagagcctctagaaagcacaaagacgagaccgtcgactttaaagcccctctcttgcctgtcacttgcggcggtgtgaaggggattctccacaagaagaaactccagcagggcattctggtgaagtgcatccagacagaggatggaaaatggttcacaccaacagaattcgagattaagggcgggcatgcccgaagtaagaactggaggttgtcggtacggtgtggagggtggcccctgcgttggttgatggagaatggatttctccccgatccgcctaggatccgctaccggaagaaaaaaagaatactaaaaagccagaataatagctccgtggatccttgcatgcgcaacctagatgagtgcgaggtgtgcagggatggcggagagttgttttgttgtgatacctgcagcagggttttccacgaggactgccacattccacctgtcgaggcggaacgtaccccttggaattgcatcttttgtcggatgaaggaaagcccaggttctcagcagtgctgccaggagagcgaggtccttgagcgccagatgtgtccagaggaacaactcaagtgtgagtttctgctgctgaaagtctattgctgctcagagagttcgttctttgccaagattccctattattactatattagggaagcatgccagggactaaaagaaccgatgtggctggacaagattaagaaacggctaaacgagcacggctatccccaggtggaggggtttgtgcaggatatgagactgatctttcagaaccatagggctagttacaagtacaaagattttgggcagatgggatttaggcttgaggccgagttcgagaagaatttcaaggaagtgttcgcaatccaggagacaaatggcaacaattag

SEQ ID NO: 171237 - DNA, 2604 bp, Artificial Sequence
  derived and/or modified sequence
atggcccagcagggccagcagggccagatggccagcggggacagcaacctgaacttcaggatggtggccgagatccagaatgtggagggccagaacctgcaggagcaggtgtgcccagagcccatcttccgcttcttccgggagaacaaggtggagatcgccagcgccatcacccggcccttccccttcctgatgggcctgcgggaccgctccttcatcagcgagcagatgtatgagcacttccaggaggccttcaggaacctggtgcctgtgaccagggtgatgtactgtgtgctgtctgagctggagaagaccttcggctggagccacctggaggccctcttcagccgcatcaacctgatggcctacccagacctgaatgagatctaccgctccttccagaatgtgtgctatgagcacagccccctgcagatgaacaacgtgaatgacctggaggaccggccccggctgctgccctacggcaagcaggagaacagcaatgcctgccacgagatggatgacattgctgtgccccaggaggccctgagcagcagcccccgctgtgagcccggcttcagcagcgagagctgtgagcagctggccctgcccaaggccggcggcggagatgctgaagatgcccccagcctgctgcccggcggcggcgtgtcctgcaagctggccatccagattgatgaaggagagagcgaggagatgcccaagctgctgccctatgacacagaggtgctggagagcaatggcatgattgatgctgcccggacctacagcacagcccctggagagaagcagggcgaggaggagggcaggaacagccccaggaagaggaaccaggacaaggagaagtaccaggagagccctgagggccgggacaaggagacctttgacctgaagaccccccaggtgaccaatgaaggagagcctgagaagggcctgtgcctgctgcctggagagggggaggagggcagtgatgactgcagcgagatgtgtgatggagaggagccccaggaggccagcagcagcctggcccgctgtggctctgtgtcctgcctgtctgctgagacctttgacctgaagaccccccaggtgaccaatgaaggagagcctgagaaggagctgagcctgctgcccggggagggggaggagggcagtgatgactgcagcgagatgtgtgatggagaggagcggcaggaggccagcagcagcctggcccggcggggctctgtgagcagcgagctggagaaccaccccatgaatgaggagggggagagcgaggagctggccagcagcctgctgtatgacaacgtgcctggagctgagcagagcgcctatgaaaatgagaagtgcagctgtgtgatgtgcttcagcgaggaggtgcccggcagccctgaggccaggacagaaagtgaccaggcctgtggcaccatggacacagtggacatcgccaacaacagcaccctgggcaagcccaagaggaagaggaggaagaagaggggccacggctggagcaggatgaggatgaggcggcaggagaacagccagcagaatgacaacagcaaggcagatggccaggtggtgtcctctgagaagaaggccaacgtgaacctgaaggacctgagcaagatccggggcaggaagaggggcaagccaggcacccgcttcacccagagcgacagagctgcccagaagagggtgcgcagccgggccagcaggaagcacaaggatgagaccgtggacttcaaggcccccctgctgcctgtgacctgtggcggcgtgaagggcatcctgcacaagaagaagctgcagcagggcatcctggtgaagtgcatccagacagaagatggcaagtggttcacccccacagaatttgagatcaagggcggccacgcccggagcaagaactggaggctgtctgtgcgctgtggcggctggcccctgcgctggctgatggagaatggcttcctgcctgaccccccacgcatccgctacaggaagaagaagaggatcctgaagagccagaacaacagctctgtggacccctgcatgaggaacctggatgaatgtgaggtgtgcagagatggaggagagctgttctgctgtgacacctgcagcagggtcttccacgaggactgccacatcccccctgtggaggccgagaggaccccctggaactgcatcttctgcaggatgaaggagagccctggcagccagcagtgctgccaggagagcgaggtgctggagcggcagatgtgcccagaggagcagctgaagtgtgagttcctgctgctgaaggtgtactgctgcagcgagagcagcttctttgccaagatcccctactactactacatccgggaggcctgccagggcctgaaggagcccatgtggctggacaagatcaagaagaggctgaatgaacatggctacccccaggtggagggctttgtgcaggacatgaggctcatcttccagaaccaccgggccagctacaagtacaaggactttggccagatgggcttccggctggaggccgagtttgagaagaacttcaaggaggtgtttgccatccaggagaccaacggcaacaactag

SEQ ID NO: 171238 - DNA, 2604 bp, Artificial Sequence
  derived and/or modified sequence
atggcccagcagggccagcagggccagatggccagcggcgacagcaatcttaatttcagaatggttgctgagatccagaatgtcgaaggccagaacttgcaggaacaggtctgtcctgaaccgatttttagattctttcgggagaataaggtagagatcgcatccgcaattacccgccccttcccattcctgatgggtttacgggataggtccttcatctcagagcagatgtacgagcactttcaagaggcttttcgaaacctggtgcctgtgacccgggtgatgtactgcgtgctttcagaactggagaagacgttcgggtggagccaccttgaggccctttttagtagaattaatctgatggcttatcccgatctgaatgagatataccgctccttccagaacgtatgttacgagcacagccccctccaaatgaacaacgtgaatgatctggaagaccgtcccagactgttgccttacggcaagcaggaaaattccaacgcttgccacgaaatggatgacattgcagtccctcaagaggccttgtcctcctccccccgctgcgaaccggggttcagttcagagtcctgtgaacagttagcgctaccaaaggctggcggaggcgacgcagaagacgcaccaagtcttctcccaggcgggggcgtatcctgcaagctggccatccaaatcgatgagggcgagtctgaggaaatgcccaagctgctcccctatgacactgaagtcctcgagtctaacggcatgattgatgccgctcgaacctatagcacggctccgggagagaaacagggggaggaagaagggaggaattctccaagaaagcgcaatcaagataaggaaaagtatcaagaatcccccgagggacgcgataaagaaaccttcgatctcaagacacctcaagtaacaaatgaaggggaaccggagaagggcctatgtctcctgcctggagagggcgaggaaggaagtgacgactgttcagaaatgtgtgacggagaagagccgcaggaggccagttcttctcttgccagatgtggttccgtttcttgcttgagcgctgaaacttttgatctcaaaaccccacaggtgactaatgaaggggaaccagaaaaagagctaagtctgctacccggcgagggggaagaaggaagtgatgactgcagcgagatgtgtgacggggaggaacgacaggaggcttcatccagccttgctaggcgtggcagcgtgtcctccgagctcgaaaaccaccctatgaatgaggagggagaatcagaagagctcgcctctagcctgctctatgacaacgttccgggggccgaacagtccgcctatgaaaacgaaaagtgcagctgcgtcatgtgtttctcagaagaggtccctgggtcccccgaggctcgtactgaatcagaccaggcctgtgggaccatggatactgtagacatcgcaaacaatagcactctcgggaaacctaagcgtaagaggcgcaagaagagaggccacggttggtccaggatgcgcatgcgcaggcaggaaaatagccagcagaatgataacagcaaggccgatggccaggttgtgagtagtgagaagaaggctaacgtgaatctgaaggacctcagtaagatcaggggtcggaagagaggcaaacctggaacgaggttcacccaaagcgacagagcagcccagaaacgggtgagatctcgggcgtcaagaaagcataaggatgaaacagtagactttaaagctccccttcttccagttacatgtgggggtgtgaaagggattctgcacaagaagaagttacagcagggtatccttgttaagtgtatccagaccgaagacgggaaatggttcacccctacagaattcgagataaaggggggccatgctcggtccaagaattggagactgagcgtgcgatgcggaggttggccactcaggtggcttatggagaatgggttcctcccagacccacctcgcattagataccggaagaagaaaagaatactaaagagccagaacaactccagcgttgatccttgcatgcgtaacctagacgaatgtgaggtgtgccgggacgggggagaattgttctgttgtgacacctgttccagggttttccatgaggattgtcatatccctccagtggaggccgagagaacaccttggaactgcatcttctgtagaatgaaggagtccccagggtctcagcaatgttgtcaggagtctgaggtcttggagcggcagatgtgccccgaggaacagcttaagtgtgaatttctgttactgaaggtgtattgctgttctgagtcctcatttttcgccaagatcccttattactactacatcagggaggcatgtcagggactgaaagagcccatgtggttggataaaatcaaaaagagacttaatgagcacggataccctcaggttgaagggttcgttcaagatatgagactgatattccagaaccatagggctagctataagtacaaagattttggccagatgggcttccgcttagaagctgaatttgagaagaattttaaggaggtgttcgctatccaggaaacgaatgggaataattag

SEQ ID NO: 171239 - DNA, 3246 bp, Artificial Sequence
  derived and/or modified sequence
cttttcttttcctctttgactgagcaccgaggggcagttggcagcttcacctcagagctgcaggaaggaacggggcagtgaaaatcgaatcgggtgtgatcctaggccaagctcatggcccagcagggccagcaggggcagatggcaagtggagacagcaatctcaacttcaggatggtcgcagagatccagaacgtagagggtcagaacctgcaggagcaggtttgccctgagcccattttcaggttcttcagagaaaacaaggtggagattgcaagtgcaataacaaggccatttcctttccttatgggcctccgagaccgctccttcatctccgagcagatgtatgaacattttcaagaagcttttagaaacctggtcccagtgacaagagtgatgtattgtgtactcagtgaactggagaagacatttggctggtcacatctggaagcattgttcagcaggattaacctgatggcctatcctgatttaaacgagatttacagaagcttccagaatgtatgctatgaacactcacctctccaaatgaataatgtaaacgatttagaagatagacccagattactaccatatggtaaacaagagaacagcaatgcctgtcatgaaatggatgatatagcagtgcctcaggaagccttgagctcctcgccaaggtgtgagccaggtttctcttcagagtcttgtgagcagttagctctcccaaaggctggtggaggagatgctgaagatgcacccagcctactaccaggtgggggagtgtcctgtaaacttgctatacaaatagatgaaggagaatcagaagaaatgcccaagttactgccttatgatacagaagttctagaaagcaacgggatgatagatgcggcaaggacatacagcacagcaccaggggagaaacagggagaggaggaaggcaggaacagtcccagaaaaagaaaccaagacaaggagaagtaccaagagagtccagagggaagagacaaagagacctttgatctaaaaactccccaagtcactaatgaaggagaaccagagaaggggctctgtctactaccaggtgaaggagaagagggcagtgatgactgttcagaaatgtgtgatggagaagagccccaggaagcctctagctccctagcaagatgtgggtcagtttcttgtttatctgcagagacctttgatctaaagactccccaagtcactaatgaaggagaaccagagaaggagctcagtctactaccaggtgaaggagaagagggcagtgatgactgttcggaaatgtgtgatggagaagagcgccaggaagcctctagctccctagcaagacgtgggtcagtgtctagtgaactagaaaatcacccaatgaatgaagaaggagaatcagaagagcttgcttctagcctgctatatgataatgtaccaggagcggagcaatcagcatatgaaaatgagaagtgttcctgtgtcatgtgtttctcagaagaggtgccaggaagcccagaagcaaggacggaaagtgatcaagcgtgtggcacaatggatactgtggatattgcaaacaactccactttgggaaaacccaagaggaaaagaagaaaaaagagggggcatggctggagcagaatgagaatgagaaggcaggaaaacagccaacaaaatgataatagcaaagccgacggccaggtggtctccagtgaaaagaaggcgaacgtgaatctgaaagacctttccaagattagggggagaaagagaggcaaacctggaacccgcttcactcagagtgacagagctgcacagaaaagagtccgatcaagagcttcaagaaagcacaaagatgaaactgtggattttaaggctcctttgcttccagtgacctgtggtggggtgaagggaattttacataagaagaaattgcagcaaggaatcttggtgaagtgtatacagactgaggatggaaaatggttcacccccacggaatttgaaatcaaaggaggccatgcaagatcaaagaactggaggctgagtgtgcgctgtggcgggtggcccctacgatggctgatggagaatggatttctgcctgatcctccaagaatacgttacaggaaaaaaaagagaatactgaagtctcaaaacaatagctcagttgacccttgtatgagaaacctggatgagtgtgaggtgtgccgggacggaggggagctgttctgttgcgacacttgttcaagagtcttccatgaggactgtcacatcccgcctgtggaagctgagaggaccccgtggaattgcatcttctgcaggatgaaggagtctccgggaagccaacagtgttgtcaggaatctgaggtcctggagaggcagatgtgtcctgaggaacagttgaaatgtgagttcctcctcttgaaagtctattgctgttctgagagctccttttttgccaagattccatactattattatattagagaggcgtgtcaaggcctgaaggagcccatgtggttggataaaatcaagaaaaggctgaatgagcacggttacccccaagtggaggggtttgtacaagacatgcgcctcatcttccagaaccacagggcctcttacaagtacaaggattttggccaaatgggatttagactggaggctgagtttgagaagaatttcaaggaagtgtttgctattcaggaaacaaatgggaacaattgactggattagtggatgctgaaagcattcagcaaatggcaccctaaaatatgccgctggtttgccactgacttcaaaatgaggtcacttgggcacagcacatgcagggaggggcttttctctgagcctccttcatctgcccaaagacaaatcctcaaaaggaaattcaatcatcatgaatcacaaccccaagtatctcatcagccagggaagagtaagtgggatcacagggaaggatgttggcagcgacaccatcccatacaggctcttacctcttctcctgagggctgctccagacaacatttattacccagaagaccttttgtctgaaaaccagccaagctttattcaggacacacttcttgccttcactttcccacttccgtggccacctccatgcagaagccctaagcccacattctttcgatagctcacggtggtgcatgagtgtccatcatctgactcttctcggagtctcatattttgtgggactcctgtgcaaacatatgttattaaaatttttttcctcct

SEQ ID NO: 171240 - DNA, 2604 bp, Artificial Sequence
  derived and/or modified sequence
atggctcagcaaggccagcagggacagatggcttccggagactcaaacctcaacttccggatggtggcagagatccagaatgtggagggtcagaacctacaagaacaggtttgtcctgaaccaatattcaggttctttcgagagaataaagtggaaatcgcgagcgccataactaggccatttccctttttgatgggtctgcgggatcggtcttttatttctgagcaaatgtacgaacacttccaggaggcattccggaacctcgtcccggtaactcgggtgatgtactgcgtgctttccgaacttgagaagaccttcgggtggagccacctggaagcactcttctccagaattaatctgatggcctaccctgatctgaacgagatttataggtctttccagaacgtgtgttatgagcactcccccctgcagatgaacaacgtcaatgacttagaggacaggccacggctgttgccatacgggaaacaagagaattccaacgcttgtcacgagatggacgacatagctgtgccacaggaggccctcagttcatcaccgagatgcgagccgggttttagctcagaaagctgtgaacagctggcactgcccaaggcaggaggtggcgatgctgaggatgcccctagtctgctgccagggggtggggtctcctgcaaactagccatccaaattgatgagggggaatcagaagaaatgcctaaactactgccctatgatacagaagtgctggaatctaacggtatgatcgatgctgcccgtacatacagtacagccccaggagagaagcagggggaggaggaggggaggaacagtccaagaaagcggaatcaggacaaggagaaatatcaggagagccccgagggaagagataaggagacctttgatctgaagacccctcaggtcaccaacgagggcgagcccgagaaaggactatgtttgctacctggggagggcgaagagggttccgacgactgtagcgaaatgtgtgatggagaagaacctcaggaggcgtcgtcatctctcgcccgttgtgggtctgtatcgtgcctatctgctgagacattcgacctgaaaacaccccaggttaccaatgaaggcgagccagagaaagagctcagtctcctgcctggagaaggagaagaaggaagcgatgactgttccgaaatgtgcgatggcgaggagcgccaggaggcctcttcttcactcgcaaggaggggttctgtttcttctgaactggaaaatcatccaatgaacgaagagggcgagtcagaggagctggcgagctcactactgtatgacaatgtgcccggagccgaacaaagcgcatacgagaatgaaaagtgcagctgcgttatgtgcttttcggaggaggttcctggtagccctgaggccaggacggaaagcgaccaagcctgcggcaccatggacactgtggatatcgcaaacaattcgactctcggtaagccaaagcgcaaacgcaggaaaaaacggggacacggctggtcccggatgagaatgcgtcgccaggagaactcccagcagaatgataacagcaaggctgacggccaggtcgtctcttccgagaagaaggcaaacgtcaatctcaaggacctctcaaaaattcggggacgcaaaagaggaaagcctgggacacgcttcacccagagcgacagagccgcacagaagcgggtcagatccagagcctctcgcaaacataaggatgagaccgtagacttcaaggctccactactgcccgtcacctgtgggggagttaaaggcattctgcataagaagaagctgcagcagggaatcctcgtgaaatgcatccagaccgaggacggaaagtggtttacccccacggaatttgaaatcaagggtggacacgccaggagcaagaactggcggctgtccgtgcgctgcggtggttggcccctcaggtggttgatggaaaacggattcctgccagatcccccacggataagataccgaaagaagaagaggattttgaagagtcaaaataactcttcagtcgatccctgtatgcggaatctggacgaatgtgaagtctgtagagacggcggtgagttattttgctgcgatacctgttcccgtgtcttccatgaagactgtcatattcctcctgttgaagctgaacgtacgccttggaactgtattttctgtagaatgaaggagtctccaggaagtcagcagtgctgtcaagagtctgaagtcctagagcgtcagatgtgtcctgaggaacagctgaagtgtgaattcctcctgctaaaagtgtattgctgctcagaatcctccttctttgccaagataccgtactactactatatccgtgaagcttgtcaaggtctaaaggagcctatgtggttggacaagatcaagaagcgccttaatgagcatggataccctcaggtggaggggtttgttcaagatatgcggttgatctttcagaaccatagggcttcttataaatacaaggacttcggccagatgggcttccgactagaagcagaattcgagaagaacttcaaagaagtgtttgccattcaggagacaaatggaaacaactag

SEQ ID NO: 171241 - DNA, 2604 bp, Artificial Sequence
  derived and/or modified sequence
atggcccagcagggccagcagggccagatggccagcggcgacagcaacctgaacttcagaatggtggccgagatccagaacgtggagggccagaacctgcaggagcaggtgtgccccgagcccatcttcagattcttcagagagaacaaggtggagatcgccagcgccatcaccagacccttccccttcctgatgggcctgagagacagaagcttcatcagcgagcagatgtacgagcacttccaggaggccttcagaaacctggtgcccgtgaccagagtgatgtactgcgtgctgagcgagctggagaagaccttcggctggagccacctggaggccctgttcagcagaatcaacctgatggcctaccccgacctgaacgagatctacagaagcttccagaacgtgtgctacgagcacagccccctgcagatgaacaacgtgaacgacctggaggacagacccagactgctgccctacggcaagcaggagaacagcaacgcctgccacgagatggacgacatcgccgtgccccaggaggccctgagcagcagccccagatgcgagcccggcttcagcagcgagagctgcgagcagctggccctgcccaaggccggcggcggcgacgccgaggacgcccccagcctgctgcccggcggcggcgtgagctgcaagctggccatccagatcgacgagggcgagagcgaggagatgcccaagctgctgccctacgacaccgaggtgctggagagcaacggcatgatcgacgccgccagaacctacagcaccgcccccggcgagaagcagggcgaggaggagggcagaaacagccccagaaagagaaaccaggacaaggagaagtaccaggagagccccgagggcagagacaaggagaccttcgacctgaagaccccccaggtgaccaacgagggcgagcccgagaagggcctgtgcctgctgcccggcgagggcgaggagggcagcgacgactgcagcgagatgtgcgacggcgaggagccccaggaggccagcagcagcctggccagatgcggcagcgtgagctgcctgagcgccgagaccttcgacctgaagaccccccaggtgaccaacgagggcgagcccgagaaggagctgagcctgctgcccggcgagggcgaggagggcagcgacgactgcagcgagatgtgcgacggcgaggagagacaggaggccagcagcagcctggccagaagaggcagcgtgagcagcgagctggagaaccaccccatgaacgaggagggcgagagcgaggagctggccagcagcctgctgtacgacaacgtgcccggcgccgagcagagcgcctacgagaacgagaagtgcagctgcgtgatgtgcttcagcgaggaggtgcccggcagccccgaggccagaaccgagagcgaccaggcctgcggcaccatggacaccgtggacatcgccaacaacagcaccctgggcaagcccaagagaaagagaagaaagaagagaggccacggctggagcagaatgagaatgagaagacaggagaacagccagcagaacgacaacagcaaggccgacggccaggtggtgagcagcgagaagaaggccaacgtgaacctgaaggacctgagcaagatcagaggcagaaagagaggcaagcccggcaccagattcacccagagcgacagagccgcccagaagagagtgagaagcagagccagcagaaagcacaaggacgagaccgtggacttcaaggcccccctgctgcccgtgacctgcggcggcgtgaagggcatcctgcacaagaagaagctgcagcagggcatcctggtgaagtgcatccagaccgaggacggcaagtggttcacccccaccgagttcgagatcaagggcggccacgccagaagcaagaactggagactgagcgtgagatgcggcggctggcccctgagatggctgatggagaacggcttcctgcccgacccccccagaatcagatacagaaagaagaagagaatcctgaagagccagaacaacagcagcgtggacccctgcatgagaaacctggacgagtgcgaggtgtgcagagacggcggcgagctgttctgctgcgacacctgcagcagagtgttccacgaggactgccacatcccccccgtggaggccgagagaaccccctggaactgcatcttctgcagaatgaaggagagccccggcagccagcagtgctgccaggagagcgaggtgctggagagacagatgtgccccgaggagcagctgaagtgcgagttcctgctgctgaaggtgtactgctgcagcgagagcagcttcttcgccaagatcccctactactactacatcagagaggcctgccagggcctgaaggagcccatgtggctggacaagatcaagaagagactgaacgagcacggctacccccaggtggagggcttcgtgcaggacatgagactgatcttccagaaccacagagccagctacaagtacaaggacttcggccagatgggcttcagactggaggccgagttcgagaagaacttcaaggaggtgttcgccatccaggagaccaacggcaacaactag

SEQ ID NO: 171242 - protein, 340 aa, Artificial Sequence
  derived and/or modified sequence
MLEAPGPSDGCELSNPSASRVSCAGQMLEVQPGLYFGGAAAVAEPDHLREAGITAVLTVDSEEPSFKAGPGVEDLWRLFVPALDKPETDLLSHLDRCVAFIGQARAEGRAVLVHCHAGVSRSVAIITAFLMKTDQLPFEKAYEKLQILKPEAKMNEGFEWQLKLYQAMGYEVDTSSAIYKQYRLQKVTEKYPELQNLPQELFAVDPTTVSQGLKDEVLYKCRKCRRSLFRSSSILDHREGSGPIAFAHKRMTPSSMLTTGRQAQCTSYFIEPVQWMESALLGVMDGQLLCPKCSAKLGSFNWYGEQCSCGRWITPAFQIHKNRVDEMKILPVLGSQTGKI

SEQ ID NO: 171243 - DNA, 1023 bp, Artificial Sequence
  derived and/or modified sequence
atgctggaggcccccggccccagcgacggctgcgagctgagcaaccccagcgccagcagagtgagctgcgccggccagatgctggaggtgcagcccggcctgtacttcggcggcgccgccgccgtggccgagcccgaccacctgagagaggccggcatcaccgccgtgctgaccgtggacagcgaggagcccagcttcaaggccggccccggcgtggaggacctgtggagactgttcgtgcccgccctggacaagcccgagaccgacctgctgagccacctggacagatgcgtggccttcatcggccaggccagagccgagggcagagccgtgctggtgcactgccacgccggcgtgagcagaagcgtggccatcatcaccgccttcctgatgaagaccgaccagctgcccttcgagaaggcctacgagaagctgcagatcctgaagcccgaggccaagatgaacgagggcttcgagtggcagctgaagctgtaccaggccatgggctacgaggtggacaccagcagcgccatctacaagcagtacagactgcagaaggtgaccgagaagtaccccgagctgcagaacctgccccaggagctgttcgccgtggaccccaccaccgtgagccagggcctgaaggacgaggtgctgtacaagtgcagaaagtgcagaagaagcctgttcagaagcagcagcatcctggaccacagagagggcagcggccccatcgccttcgcccacaagagaatgacccccagcagcatgctgaccaccggcagacaggcccagtgcaccagctacttcatcgagcccgtgcagtggatggagagcgccctgctgggcgtgatggacggccagctgctgtgccccaagtgcagcgccaagctgggcagcttcaactggtacggcgagcagtgcagctgcggcagatggatcacccccgccttccagatccacaagaacagagtggacgagatgaagatcctgcccgtgctgggcagccagaccggcaagatctag

SEQ ID NO: 171244 - DNA, 1023 bp, Artificial Sequence
  derived and/or modified sequence
atgctggaagctcccgggcctagtgacggatgcgaactctccaacccaagcgcatcgagggtttcttgtgcagggcagatgctggaagtgcaaccaggcctgtatttcgggggagcggccgccgtggcggaacctgatcacctccgggaagccggcataaccgcagtgctgactgttgatagtgaggaacctagttttaaagccggccctggcgtggaggacttgtggcgcttgtttgtgccagccctcgacaaacccgagaccgatcttttgagtcatctggataggtgtgttgcattcattggacaggctagagccgagggtagagcagtccttgtgcactgtcacgccggcgtctcacgttccgtggccattataactgctttcctgatgaaaacggaccagctgccgtttgaaaaggcatatgaaaagctgcagattttaaaacctgaggctaagatgaatgaaggatttgagtggcaattgaaactgtatcaggctatggggtacgaagtagatactagtagcgccatctacaagcaataccgcctacagaaagtgaccgaaaaatatcctgaactgcagaaccttccccaggagctttttgctgtggatccaaccacagtatcacaaggcctcaaggatgaagtcctttacaagtgtagaaaatgcagaaggagcctcttccgtagcagctctatccttgaccaccgggagggcagcggcccaatagccttcgcgcataagcgaatgactccctcatctatgctgaccaccgggcggcaagcacagtgcacaagttatttcattgaacctgtgcagtggatggagtctgccctcctgggtgtcatggatggacagcttctatgccccaaatgttcagccaaactgggcagctttaactggtatggcgagcagtgttcctgtggccgatggattacccccgccttccagatacataagaatcgagtggacgaaatgaaaattctgccagtgctgggctctcagaccggaaaaatttag

SEQ ID NO: 171245 - DNA, 1270 bp, Artificial Sequence
  derived and/or modified sequence
ggcaggaagccgccttgtctctgggcgcggccatgttggaggctccgggcccgagtgatggctgcgagctcagcaaccccagcgccagcagagtcagctgtgccgggcagatgctggaagtgcagccaggattgtatttcggtggggccgcggccgtcgcggagccagatcacctgagggaagcgggcatcacggccgtgctaacagtggactcggaggagcccagcttcaaggcggggcctggggtcgaggatctatggcgcctcttcgtgccagcgctggacaaacccgagacggacctactcagccatctggaccggtgcgtggccttcatcggtcaggcccgcgctgagggccgtgcggtgttggtgcactgtcatgcaggagtcagtcgaagtgtggccataataactgcttttctcatgaagactgaccaacttccctttgaaaaagcctatgaaaagctccagattctcaaaccagaggctaagatgaatgaggggtttgagtggcaactgaaattataccaggcaatgggatacgaagtggatacctctagtgcaatttataagcaatatcgtttacaaaaggttacagagaagtatccagaattgcagaatttacctcaagaactctttgctgttgacccaactaccgtttcacaaggattgaaagatgaggttctctacaagtgtagaaagtgcaggcgatcattatttcgaagttctagtattctggatcaccgtgaaggaagtggacctatagcctttgcccacaagagaatgacaccatcttccatgcttaccacagggaggcaagctcaatgtacatcttatttcattgaacctgtacagtggatggaatctgctttgttgggagtgatggatggacagcttctttgcccaaaatgcagtgccaagttgggttccttcaactggtatggtgaacagtgctcttgtggtaggtggataacacctgcttttcaaatacataagaatagagtggatgaaatgaaaatattgcctgttttgggatcacaaacaggaaaaatatgaacatgatattttatagcttgggaagaaacttgcagatgatatgtgctgcctttgcttcttatcattcatggcagattgtttgtgctttcaacatttcatttgaaatgggagaagataaaatcacttgatgtaacctggaaactatgctttacatggcaatcaaagccttttgatcatgtacattttatttgatattaaaatcttttataaccaga

SEQ ID NO: 171246 - DNA, 1023 bp, Artificial Sequence
  derived and/or modified sequence
atgctggaggcccctggccccagtgatggctgtgagctgagcaaccccagcgccagccgggtgtcctgtgccggccagatgctggaggtgcagcccggcctgtactttggaggagctgctgctgtggccgagccagaccacctgcgggaggccggcatcacagctgtgctgactgtggacagcgaggagcccagcttcaaggccggccctggggtggaggacctgtggaggctgtttgtgcctgccctggacaagccagagacagacctgctgagccacctggacagatgtgtggccttcatcggccaggcccgggcagagggccgggctgtgctggtgcactgccacgccggcgtgagccgctctgtggccatcatcacagccttcctgatgaagacagaccagctgccctttgagaaggcctatgagaagctgcagatcctgaagccagaggccaagatgaatgaaggatttgagtggcagctgaagctgtaccaggccatgggctatgaggtggacaccagcagcgccatctacaagcagtaccgcctgcagaaggtgacagagaagtacccagagctgcagaacctgccccaggagctgtttgctgtggaccccaccaccgtgtcccagggcctgaaggatgaggtgctgtacaagtgcaggaaatgtagaagaagcctcttccgcagcagcagcatcctggaccaccgggagggcagcggccccatcgcctttgcccacaagaggatgacccccagctccatgctgaccaccggccggcaggcccagtgcaccagctacttcatcgagcctgtgcagtggatggagagcgccctgctgggcgtgatggatggccagctgctgtgccccaagtgcagcgccaagctgggcagcttcaactggtatggagagcagtgcagctgtggccgctggatcaccccagccttccagatccacaagaacagagtggatgagatgaagatcctgcctgtgctgggcagccagacaggcaagatctag

SEQ ID NO: 171247 - DNA, 1023 bp, Artificial Sequence
  derived and/or modified sequence
atgctggaggcccccggccccagcgacggctgcgagctgagcaacccctcagcatcgagggtctcttgtgcgggacagatgttagaggtacagcctgggctgtattttgggggcgcagccgctgttgctgagccagatcatctccgcgaggcgggaatcactgcagtgctgacggtggactcggaagagccttctttcaaggctggacctggagtagaggatctgtggcgtctgttcgtccccgctttagacaaacccgaaaccgatcttttgtcacatctggatcgctgcgttgcgtttattgggcaagctagagcagagggccgagcagtgcttgtgcattgccacgctggagtctccagatccgtggccattatcaccgccttcctcatgaaaacagaccagctgcctttcgagaaggcctacgagaaacttcaaattctcaagcctgaagcgaaaatgaatgaaggcttcgagtggcaattgaaactatatcaagcgatgggctatgaggtggacactagcagtgccatatataagcagtaccggctacagaaggtaaccgagaagtaccctgaactgcagaacctgccccaggaactgtttgccgtcgaccctaccacggtgagtcagggactgaaggatgaggtgctgtataagtgccgcaaatgtcggagaagcttgttccggtcttcaagcatccttgaccatagagagggctccggacccattgccttcgctcataaacggatgacgccgtctagtatgttgactaccgggaggcaagcgcagtgtacttcctactttattgagcctgtacaatggatggaatctgcacttctcggagtcatggacggacaactgctctgcccaaaatgctcagccaagctgggcagtttcaattggtatggggagcagtgtagctgtgggcgttggatcacccccgcgtttcagattcacaaaaaccgggttgacgaaatgaaaatcctgccagttctaggatctcagacaggcaagatttag

SEQ ID NO: 171248 - DNA, 1023 bp, Artificial Sequence
  derived and/or modified sequence
atgcttgaagctccaggccctagtgatggatgtgagttgagcaaccctagcgcttctcgcgtatcgtgcgctggacagatgctggaagtccagcccggtctgtacttcggtggggcagccgctgtcgcagagcctgaccatctgagagaggctggcattacagccgtcctgaccgttgactccgaggagccatccttcaaggctgggcctggcgtcgaagacctctggcgtctgtttgtccccgctttggacaaacccgaaacagatctgctgagccacctcgatcggtgcgtggcctttataggccaagcgagagccgaggggagggctgtattggtgcattgccacgctggtgtcagcagaagcgtcgctattatcacagcttttcttatgaagactgatcagttgccattcgaaaaagcctacgaaaaactgcagatcttaaagccagaggccaagatgaatgagggattcgaatggcagctaaagctttatcaggcgatgggctatgaggtagacacaagcagcgcaatctataaacagtataggctgcagaaggtcacagaaaagtatccagaactccagaaccttccccaggagctcttcgctgtggacccgactacggtcagccaaggcctaaaggacgaagtactttacaagtgtagaaagtgcagacgctcactattcagatcctccagcatcctcgaccacagggaggggtcaggccctatcgcatttgcacacaagcgcatgactccctcaagtatgttgacaacaggaagacaggcccagtgcacgtcatatttcatcgagccagtgcagtggatggaaagtgcccttttaggtgtcatggatggtcaactgctttgcccaaagtgctcggcaaaactcggcagctttaattggtacggagaacagtgcagttgcggtcgctggataacaccggctttccagatccacaagaaccgggtggacgaaatgaagattttaccagttttgggctctcagacagggaaaatctag

SEQ ID NO: 171249 - protein, 258 aa, Artificial Sequence
  derived and/or modified sequence
MHRRGVGAGAIAKKKLAEAKYKERGTVLAEDQLAQMSKQLDMFKTNLEEFASKHKQEIRKNPEFRVQFQDMCATIGVDPLASGKGFWSEMLGVGDFYYELGVQIIEVCLALKHRNGGLITLEELHQQVLKGRGKFAQDVSQDDLIRAIKKLKALGTGFGIIPVGGTYLIQSVPAELNMDHTVVLQLAEKNGYVTVSEIKASLKWETERARQVLEHLLKEGLAWLDLQAPGEAHYWLPALFTDLYSQEITAEEAREALP

SEQ ID NO: 171250 - DNA, 777 bp, Artificial Sequence
  derived and/or modified sequence
atgcacaggcgcggggtgggcgctggcgccattgcaaagaaaaaactggcagaagccaaatataaggaacgaggaacagtattagccgaagatcagttggcccagatgagtaagcagctggatatgttcaaaaccaacctggaagaattcgcaagtaagcataagcaggagatcagaaagaaccctgaatttagagttcagttccaagatatgtgcgcaactatcggcgtagatcccctagcaagtggtaagggtttttggagtgagatgttaggcgtcggcgatttttattacgagttaggcgtgcagatcatcgaagtgtgtcttgccttgaaacatcgaaacggtggcctaatcacactagaggagctgcaccagcaagtgctgaaaggcagggggaagtttgctcaagatgttagccaggatgacctgatcagagccataaagaaacttaaggctctgggaaccgggttcgggatcatcccggtcggggggacatatctgatccagagtgtgcctgcggaactcaacatggatcatacagtggtgcttcagctggccgagaaaaacgggtatgtgactgttagcgagattaaggcatctctgaagtgggagacagagcgcgctcgccaagtgctggagcacctgctgaaggagggcctggcctggctggatctgcaagctccgggtgaagcccactactggctacccgctttatttactgatctctatagtcaggagataaccgctgaagaggcaagggaagctctgccatag

SEQ ID NO: 171251 - DNA, 777 bp, Artificial Sequence
  derived and/or modified sequence
atgcacagaagaggagtgggcgctggggccatcgccaagaagaagctggccgaggccaagtacaaggagcggggcaccgtgctggccgaggaccagctggcccagatgagcaagcagctggacatgttcaagaccaacctggaggagtttgccagcaagcacaagcaggagatcaggaagaaccctgagttccgggtgcagttccaggacatgtgtgccaccatcggcgtggaccccctggccagcggcaagggcttctggagcgagatgctgggcgtgggggacttctactatgagctgggcgtgcagatcatcgaggtgtgcctggccctgaagcacagaaatggaggcctcatcaccctggaggagctgcaccagcaggtgctgaagggccggggcaagtttgcccaggatgtgtcccaggatgacctgatccgggccatcaagaagctgaaggccctgggcaccggcttcggcatcatccctgtgggcggcacctacctgatccagagcgtgcctgctgagctgaacatggaccacacagtggtgctgcagctggccgagaagaatggctacgtgacagtgtctgagatcaaggccagcctgaagtgggagacagagcgggcccggcaggtgctggagcacctgctgaaggagggcctggcctggctggacctgcaggcccctggagaggcccactactggctgcctgccctcttcacagacctgtacagccaggagatcacagctgaggaggcccgggaggccctgccctag

SEQ ID NO: 171252 - DNA, 777 bp, Artificial Sequence
  derived and/or modified sequence
atgcaccggcggggcgtgggcgccggcgccatcgccaagaagaagttagctgaggcaaagtataaggagagaggtaccgtgctggctgaggaccagctcgcacagatgtctaagcagcttgacatgttcaagactaacctggaagaattcgcttccaaacataagcaggagatccgcaagaatccagagttccgggtgcagtttcaggatatgtgtgccaccattggcgtcgacccccttgcaagcggtaagggattttggtccgaaatgcttggtgtgggagacttttactacgagttgggagttcagatcattgaggtgtgcctggccctcaaacacaggaatggagggctgatcacactggaggagctgcatcagcaggtcttgaaagggaggggcaagtttgctcaggatgtatcacaggacgacctaatccgggcaataaagaagctaaaagcgcttggtaccggctttggcatcatacccgtgggtggcacttatctgatccagagcgtgcctgcggagcttaacatggatcacaccgtggtgctccaactcgccgaaaagaatggctacgtcaccgtgtccgaaataaaggccagcctcaaatgggagacggagcgcgccaggcaagttctcgagcacctcttgaaggagggtctggcttggctggatcttcaagcccccggcgaagctcattattggctgcccgccctcttcactgacctgtacagccaggagatcaccgccgaggaggctcgagaagcactcccctag

SEQ ID NO: 171253 - DNA, 777 bp, Artificial Sequence
  derived and/or modified sequence
atgcaccgtcgaggggtgggtgccggagcaattgcgaaaaaaaaactcgctgaagctaaatacaaagagaggggcacagtcctagctgaagaccaactggcgcagatgtccaagcaactggatatgtttaagactaacctggaagagtttgctagtaagcacaaacaagaaatccggaagaatcctgaattccgagttcagttccaggacatgtgcgccacaatcggggtagatccattggcgtcaggcaagggattctggtcagagatgctgggggtcggagacttctactacgaactcggggtccaaatcatcgaggtgtgcctcgccctgaagcaccgtaacggaggtttgatcactctagaggagcttcaccagcaggtgctgaagggccgtggaaaattcgctcaggacgtgagtcaagacgacctgatccgcgctattaagaagttaaaggccctagggacgggttttggaattattcctgttggcggtacatatttaatccagtcggtacctgcagagctgaacatggatcatacagttgtcctgcagctggctgagaaaaacggctatgtaacagtgagcgaaattaaagcttctcttaaatgggagactgagcgcgctcgccaagtgcttgaacacctcctcaaggagggtctggcatggctagacctgcaggccccaggagaagctcattactggctgcctgccctgttcacagacttatacagccaagagattacagctgaggaagctcgcgaggctctcccctag

SEQ ID NO: 171254 - DNA, 2319 bp, Artificial Sequence
  derived and/or modified sequence
atttgatgacctccaggcagtggagaggcagtcgaggaagaccagggccccaggcgcctacgtgggtggaatgcacaaggttggccttggctgccggggctccatgtcccagcactagccaaggagggcctcagccgcgcttgaatactcgtgctttcctcgccgcgaggctttgcgaatcttggccactagctaaaggcggggtcgccgggccggtaggaactggagacactcagcctcgcggcaggaaatgcggctcgtggcttccggcgcgtgcagatgacgcgcggctcgggcttccgccttggggagccggcggcggagtccgggacgtggagacccggggtcccggcagccgggcggcccgcgggcccagggtggggatgcaccgccgcggggtgggagctggcgccatcgccaagaagaaacttgcagaggccaagtataaggagcgagggacggtcttggctgaggaccagctagcccagatgtcaaagcagttggacatgttcaagaccaacctggaggaatttgccagcaaacacaagcaggagatccggaagaatcctgagttccgtgtgcagttccaggacatgtgtgcaaccattggcgtggatccgctggcctctggaaaaggattttggtctgagatgctgggcgtgggggacttctattacgaactaggtgtccaaattatcgaagtgtgcctggcgctgaagcatcggaatggaggtctgataactttggaggaactacatcaacaggtgttgaagggaaggggcaagttcgcccaggatgtcagtcaagatgacctgatcagagccatcaagaaactaaaggcacttggcactggcttcggcatcatccctgtgggcggcacttacctcattcagtctgttccagctgagctcaatatggatcacaccgtggtgctgcagctggcagagaagaatggctacgtgactgtcagtgagatcaaagccagtcttaaatgggagaccgagcgagcgcggcaagtgctggaacacctgctgaaggaagggttggcgtggctggacttacaggccccaggggaggcccactactggctgccagctctcttcactgacctctactcccaggagattacagctgaggaggccagagaagccctcccctgactgcatgtggaagggcacacagcagcaggcagggaggaggcggaggtggcaaataaacctgggcaattttgtttatacaaaaaatagaaaaaaagttccaagtttttctttcttccctcattcttttatttttgaaaagtgccttcacgttgcatttttattggaggaaaacctcgctcgttcagtaagcataatctgattaacacagagaacggcaagcacatataaaatgatttttgtaggtcatctgcaagttcatggaagagctgggcctagaatgtgggttgtttcctggcctgtctagtctttgtagctgtgagacatagattacagcctatgctaattcaaaccttttaaataaaatgttccttatctcaaactagctggtcctaatggaccagtaaataatattcactttcagtctcttctggcttcctctgtagaggctctaggttatgacagagttagctgtgagtatgaaggaaatagaagtcaatgtccaatcgtggctaaattggaggaaagaaaacaatggaatctgaggggaatcaaacaatagttagggaatgttctattttcttaaattccctactagctttctcaccctcctgtagtgattgccaggtccctctagcctcagtagtgggaaagggagtcatttactgaacacctaccctgtgccattttacatacagctcacttaaatttcaccaagtaggcagccttcaacatcacaggtgattcaatcaaagtaatttgccaggggccgccagcttcagccgagctaaagctggtgcctaggcctattaacccgagcccatgccttcatgtatcactgcatagtacagaatggcagcacatactgtgtgtagacatttttctacacacgtggtcagccaagagtaaaagcctctgcatcagaaagcaagaatctcctatagcaagtagaagtggtgatgagggaagaggccagagttgtttaaggctcccaaagtccttatggtctaaaggctaagatcctaaaagtgctagtttagtactggaaatctgaaaactcaatggtttttccatactgagacccttcctttagcaggatatagcctgggcccatctcttcctctgcctatccttgtaggacatgctcactccaagctctgga

SEQ ID NO: 171255 - DNA, 777 bp, Artificial Sequence
  derived and/or modified sequence
atgcacagaagaggcgtgggcgccggcgccatcgccaagaagaagctggccgaggccaagtacaaggagagaggcaccgtgctggccgaggaccagctggcccagatgagcaagcagctggacatgttcaagaccaacctggaggagttcgccagcaagcacaagcaggagatcagaaagaaccccgagttcagagtgcagttccaggacatgtgcgccaccatcggcgtggaccccctggccagcggcaagggcttctggagcgagatgctgggcgtgggcgacttctactacgagctgggcgtgcagatcatcgaggtgtgcctggccctgaagcacagaaacggcggcctgatcaccctggaggagctgcaccagcaggtgctgaagggcagaggcaagttcgcccaggacgtgagccaggacgacctgatcagagccatcaagaagctgaaggccctgggcaccggcttcggcatcatccccgtgggcggcacctacctgatccagagcgtgcccgccgagctgaacatggaccacaccgtggtgctgcagctggccgagaagaacggctacgtgaccgtgagcgagatcaaggccagcctgaagtgggagaccgagagagccagacaggtgctggagcacctgctgaaggagggcctggcctggctggacctgcaggcccccggcgaggcccactactggctgcccgccctgttcaccgacctgtacagccaggagatcaccgccgaggaggccagagaggccctgccctag

SEQ ID NO: 171256 - protein, 262 aa, Artificial Sequence
  derived and/or modified sequence
MAPALLLIPAALASFILAFGTGVEFVRFTSLRPLLGGIPESGGPDARQGWLAALQDRSILAPLAWDLGLLLLFVGQHSLMAAERVKAWTSRYFGVLQRSLYVACTALALQLVMRYWEPIPKGPVLWEARAEPWATWVPLLCFVLHVISWLLIFSILLVFDYAELMGLKQVYYHVLGLGEPLALKSPRALRLFSHLRHPVCVELLTVLWVVPTLGTDRLLLAFLLTLYLGLAHGLDQQDLRYLRAQLQRKLHLLSRPQDGEAE

SEQ ID NO: 171257 - protein, 262 aa, Artificial Sequence
  derived and/or modified sequence
  misc_feature (1)..(1): Xaa can be any naturally occurring amino acid
XESGREATGEGDLSSKLGTQGLEFWRGGRVRTEGAEKGGDRSILNARQGWLAALQDRSILAPLAWDLGLLLLFVGQHSLMAAERVKAWTSRYFGVLQRSLYVACTALALQLVMRYWEPIPKGPVLWEARAEPWATWVPLLCFVLHVISWLLIFSILLVFDYAELMGLKQVYYHVLGLGEPLALKSPRALRLFSHLRHPVCVELLTVLWVVPTLGTDRLLLAFLLTLYLGLAHGLDQQDLRYLRAQLQRKLHLLSRPQDGEAE

SEQ ID NO: 171258 - DNA, 789 bp, Artificial Sequence
  derived and/or modified sequence
atggcccccgccctgctgctgatccccgccgccctggccagcttcatcctggccttcggcaccggcgtggagttcgtgagattcaccagcctgagacccctgctgggcggcatccccgagagcggcggccccgacgccagacagggctggctggccgccctgcaggacagaagcatcctggcccccctggcctgggacctgggcctgctgctgctgttcgtgggccagcacagcctgatggccgccgagagagtgaaggcctggaccagcagatacttcggcgtgctgcagagaagcctgtacgtggcctgcaccgccctggccctgcagctggtgatgagatactgggagcccatccccaagggccccgtgctgtgggaggccagagccgagccctgggccacctgggtgcccctgctgtgcttcgtgctgcacgtgatcagctggctgctgatcttcagcatcctgctggtgttcgactacgccgagctgatgggcctgaagcaggtgtactaccacgtgctgggcctgggcgagcccctggccctgaagagccccagagccctgagactgttcagccacctgagacaccccgtgtgcgtggagctgctgaccgtgctgtgggtggtgcccaccctgggcaccgacagactgctgctggccttcctgctgaccctgtacctgggcctggcccacggcctggaccagcaggacctgagatacctgagagcccagctgcagagaaagctgcacctgctgagcagaccccaggacggcgaggccgagtag

SEQ ID NO: 171259 - DNA, 789 bp, Artificial Sequence
  derived and/or modified sequence
tgagagagcggcagagaggccaccggcgagggcgacctgagcagcaagctgggcacccagggcctggagttctggagaggcggcagagtgagaaccgagggcgccgagaagggcggcgacagaagcatcctgaacgccagacagggctggctggccgccctgcaggacagaagcatcctggcccccctggcctgggacctgggcctgctgctgctgttcgtgggccagcacagcctgatggccgccgagagagtgaaggcctggaccagcagatacttcggcgtgctgcagagaagcctgtacgtggcctgcaccgccctggccctgcagctggtgatgagatactgggagcccatccccaagggccccgtgctgtgggaggccagagccgagccctgggccacctgggtgcccctgctgtgcttcgtgctgcacgtgatcagctggctgctgatcttcagcatcctgctggtgttcgactacgccgagctgatgggcctgaagcaggtgtactaccacgtgctgggcctgggcgagcccctggccctgaagagccccagagccctgagactgttcagccacctgagacaccccgtgtgcgtggagctgctgaccgtgctgtgggtggtgcccaccctgggcaccgacagactgctgctggccttcctgctgaccctgtacctgggcctggcccacggcctggaccagcaggacctgagatacctgagagcccagctgcagagaaagctgcacctgctgagcagaccccaggacggcgaggccgagtag

SEQ ID NO: 171260 - DNA, 789 bp, Artificial Sequence
  derived and/or modified sequence
atggcccccgcactgctgctgatccccgcagcactcgcctccttcattctggcgtttgggactggagtggagttcgttagatttacgagtctccggcctctgctggggggaattcccgagtcaggcggcccagacgcaaggcaagggtggctcgccgcccttcaagatcgaagcatcctagctcccctggcgtgggacctcggactactgttactttttgtaggccagcactctttgatggccgcagagagagttaaagcatggaccagccgctactttggggtcttgcagaggagcctgtacgtggcatgcacagctttggccctgcagctggtgatgcgctattgggaaccaattcccaaaggccctgtgctgtgggaagctcgcgctgagccgtgggcgacgtgggtccctctgctttgcttcgtgctgcatgtaatttcttggctcttgatattttccatcctgcttgttttcgactacgccgaacttatgggcttgaagcaggtgtactaccatgtcttgggtctaggggaaccacttgccctgaaatcacccagggccctcagattgttttcccacctgaggcatcccgtctgtgttgaattgcttactgtgttatgggttgttccaacgttgggcacagatcgtttgctgttggccttcttgttgaccctctacctgggtctggcccatggactagatcagcaggatctgcgttatctccgagcccaactgcagaggaaactgcatcttctcagtagaccccaagatggtgaagctgagtag

SEQ ID NO: 171261 - DNA, 789 bp, Artificial Sequence
  derived and/or modified sequence
atggctccagcactgctgcttatccctgcagcattagcttcatttatcctggccttcggaaccggggtagagttcgtccgctttacctcgttacggccactgttggggggaattccggaaagcggagggcctgatgcaagacagggatggctagcagccctccaggaccgatcaatcctcgccccactggcgtgggacctgggactactgctgctcttcgttggacagcatagtctcatggctgctgaaagagtgaaagcatggacgtcacgctactttggggtcttacagaggagcttatatgtcgcgtgcacagccttggctcttcaactggtgatgaggtactgggaacctatccccaaaggtcctgtactgtgggaggctcgtgccgaaccctgggctacttgggtccctctcttgtgttttgtcctgcatgttatcagctggctgctgatttttagcatcttgctggtgtttgactatgcggaactaatggggttgaaacaagtttattaccacgtcttgggcctgggcgaacctcttgccctcaagagcccacgcgccctgcgccttttttctcacctccggcatccagtatgcgtcgagctgctcaccgtcctgtgggtagtgccaaccctaggcaccgatcggctcctgttggcgttcttactgactctctatctgggactggcgcatggcctggatcagcaagatttacgatatttgcgggctcagctccagaggaagcttcatttgctgtcccggccccaagatggggaggcagaatag

SEQ ID NO: 171262 - DNA, 789 bp, Artificial Sequence
  derived and/or modified sequence
atggcccctgccctcctcctgatccctgccgcgctggcaagctttattcttgcttttggtacaggagtcgaattcgtgcggtttactagtcttagacccctcctgggcggtatccctgaaagtggaggcccagatgccaggcagggatggttagccgccctacaagataggtctatcttggctcctctggcctgggacctcggcttgctgcttctcttcgtcgggcagcacagcctcatggcggccgagcgggtaaaggcctggacatcaaggtatttcggggtgctccagcggtccctgtacgtggcctgcacggccctggccctgcaactggtcatgcggtactgggagcctatcccaaaaggcccagtgctgtgggaagcgagagcagagccatgggctacttgggtgcccttgctgtgctttgtgttgcacgtcatctcttggctgctgatttttagtatcctgctggtgtttgactatgctgaactgatgggcctgaagcaggtgtactatcacgttcttggcctcggcgagccgctagcattgaaaagcccacgtgctctgagactcttttctcacctaagacatcctgtgtgtgttgagttactgactgtcctctgggtcgtccctacactaggaacagaccgtttgctgctcgctttcctcctaaccttatacttggggttggcccacggactcgatcagcaggacctgcgttaccttcgcgctcaacttcagaggaagcttcacctactgtccagaccacaggatggcgaggctgaatag

SEQ ID NO: 171263 - DNA, 789 bp, Artificial Sequence
  derived and/or modified sequence
tgagagagtggacgagaagccactggcgagggtgacctgagttctaaactcgggactcagggacttgagttttggcgtggcgggagggtacggacagagggcgctgagaaaggcggcgaccgtagcatactaaatgcgagacaggggtggctggcggccctgcaggacaggagtatactggccccccttgcttgggatcttggcctgcttttgctgttcgtcggccagcactccctgatggcagctgagagagtgaaggcatggacatcccgttatttcggcgtgctccaacgctccctttacgtagcctgtacagcattagcactacagttggtaatgcgttattgggaacctataccaaagggccctgtgttatgggaggcccgggccgaaccatgggctacgtgggttccactcttgtgctttgtgctgcacgtcattagttggctgctgatcttttcgatcctccttgtcttcgattacgccgaattaatgggactgaaacaggtgtattaccatgttcttggtctgggcgaacccctggccttaaaaagtcctagagccctgcggctcttttcccacctgcgccaccctgtatgtgtcgaattactcacggtgttgtgggtggtgcctactctgggaacagacaggttactgctagcttttctgctcacactctacctcgggctggctcatgggctcgatcagcaggacttgaggtacctaagggcacagctgcagaggaagctccatctgctgtccaggcctcaagatggtgaagctgaatag

SEQ ID NO: 171264 - DNA, 789 bp, Artificial Sequence
  derived and/or modified sequence
atggctcccgctctcctgctgataccggcagcactggcttccttcatcctcgccttcggtaccggcgttgagtttgtccgcttcaccagtctccggcctctgcttggcgggatcccagagtccggtgggcctgatgcccgccagggttggctggcagccctgcaagaccgctcgattctggctccgctagcttgggacctgggtctgctcctgttatttgtaggccagcattctctcatggccgccgaaagggtgaaagcatggacctccaggtacttcggggttctgcaaaggtctctgtacgtcgcttgcaccgcgcttgccctgcagctggttatgagatattgggagcctattccgaaaggccctgtgctttgggaggcacgggcagagccttgggcgacatgggtgccgttactttgcttcgtgctgcacgttatttcttggctactcatcttttccattttgctggtgttcgattacgccgaattgatgggactcaagcaggtctattaccatgtgctgggcttgggcgagccacttgcactgaagtccccccgcgcactgcgtcttttctcccatctgcgacatccggtgtgtgtcgaactgctaactgtgttgtgggttgtccccacactgggaaccgaccgtctgctgctggcctttctgttaacattatacctggggctggctcacggactggaccagcaagacttgcggtacctgagagcacagttacagcgaaagctgcatctgttgtcccggccacaagatggggaggccgagtag

SEQ ID NO: 171265 - DNA, 789 bp, Artificial Sequence
  derived and/or modified sequence
atggcccccgccctgttattaatacccgccgctctcgcttcctttatcttagctttcgggactggcgtggaattcgtgagattcacctcactccgacctcttctcggcgggatcccggagtcggggggtccagacgctcggcaggggtggttggccgctcttcaggatcgctccatcctcgcgccgctcgcatgggacctggggctgctcctgcttttcgttggccaacactccctaatggccgcagaacgcgtgaaagcatggaccagccggtacttcggcgtactgcagcgcagtctgtacgtggcctgtactgctctcgccctccagctggtcatgcgctattgggagccaattccaaaggggccggtgctatgggaggctagggccgaaccttgggcaacctgggtgccgctactgtgtttcgtgctgcatgtcatctcatggctgcttatttttagtatactgttggtttttgactacgccgagctgatgggactgaaacaggtgtattatcacgttctgggccttggggagccactggctctaaaatctccaagggctctccggttattttcccaccttagacacccggtttgtgtcgagcttctgaccgtgctctgggtagttccaaccctcgggacagataggttgcttttggctttcctgctgacgctgtatcttggcttagcacacggactggaccagcaggatttaaggtacctaagggcccagcttcagcggaaattacacttgctgtcacgcccacaggacggggaggcagaatag

SEQ ID NO: 171266 - DNA, 789 bp, Artificial Sequence
  derived and/or modified sequence
atggctcctgccctcttgctaatacccgctgcccttgcctcattcatactagccttcggaaccggtgtcgagtttgtgcgttttacttctttgagacctctgttgggcggaattcccgaaagcggtggcccagacgccagacagggatggctggctgcattacaggaccgctccatccttgccccattagcttgggacctcggcctcctgctgctttttgtggggcagcactcacttatggccgcagagagggttaaagcttggacttctagatacttcggcgtactgcagcgctcactctacgtggcatgtacggcactggccctgcagctggtgatgcgctactgggagccgatccctaaaggtcctgttctctgggaggctagggccgagccctgggctacttgggttcctctgctctgcttcgttcttcacgtgatatcttggctgttgattttttccattctattagtgtttgactacgccgagctgatggggctgaaacaggtgtattaccacgtgcttgggctgggagaacccctcgcactaaagtctccaagagccctccgcctattcagccacttacgccatcctgtctgtgtggaactgttaacggttttatgggtggtcccaacattaggcaccgacagactgctgttggcgttcctgttaaccctctatctgggtctggcgcatggtctggaccagcaggacctgcgctatctccgcgctcaattgcagcgcaagctgcacttgctcagccgcccacaagacggtgaagctgagtag

SEQ ID NO: 171267 - DNA, 789 bp, Artificial Sequence
  derived and/or modified sequence
taagagagtggtcgggaagcgactggggagggtgacctgtcatccaagctgggcacacaaggtctggagttctggcgcggcggtcgcgtgcggacggagggcgccgagaaagggggggatcgctcaattcttaatgccagacagggttggttggcagcccttcaggatagatccatactggcccctctggcgtgggacttgggcttacttctactgtttgttggacagcactcacttatggccgcagaaagggtaaaggcatggacttctcgttatttcggggtgttgcagagatctctgtacgtggcctgcacggcgctggccttgcaattggtgatgaggtactgggagcccatccccaaagggcccgtgctgtgggaggcacgcgcggagccatgggctacctgggtgcctctgttgtgttttgtgctgcacgtgatctcttggttgctgatcttttcgatcctcttagtgttcgattatgctgaactcatgggactgaagcaagtgtactaccacgtgctgggcctgggggaaccattagcactgaagtcccccagagccctccgtctattctcccaccttaggcatccagtatgtgtcgagctgttgaccgtgctatgggtagtgcccactctgggcaccgaccgactcctgctggcttttctcctgacgttgtatctaggtctagcgcacggactggatcagcaggacctccggtatctcagggcccaactacaacgaaagctgcacctgttgagccggccacaagatggcgaagcagagtag

SEQ ID NO: 171268 - DNA, 789 bp, Artificial Sequence
  derived and/or modified sequence
atggcgcctgcgcttctcctcattcctgccgccctcgctagtttcatactggcgttcggcacaggcgtcgaatttgttcggttcactagccttcggcctctgctgggaggcatccccgaatcaggggggcctgatgccagacagggttggctcgccgccctccaggatcgctcgatactggctcccctcgcttgggacctcggcctgttgctgcttttcgtggggcagcactccctgatggccgccgagcgcgtgaaagcgtggacaagcagatacttcggggtgttgcaaaggagtctatacgtggcctgcaccgcattagccctgcagctggtgatgaggtattgggaaccaatacctaaaggtcccgttctgtgggaagcacgggcggagccttgggccacctgggtccctttgctttgtttcgtgctgcatgtaatcagctggctcttgatcttttcaattctcctggtatttgactacgctgaacttatgggactaaagcaggtgtactatcacgtattgggactgggggagcccctggccctgaaaagcccgagagctctgaggctcttctcacatctacggcacccagtctgcgtggagctgctcaccgtgctctgggtagtgccaactttaggaactgacaggcttcttcttgcattcctcctaacactgtacctgggattagcccatggcttagaccaacaggatctgaggtatcttagagcccaactccagcgcaaactgcatttgctgtcacggcctcaggacggcgaggcagagtag

SEQ ID NO: 171269 - DNA, 789 bp, Artificial Sequence
  derived and/or modified sequence
tgagagtcgggcagggaggctaccggcgagggggacttgagctccaagcttggaacacaaggtcttgagttttggcgcggcggcagggtgcgcacagaaggcgcggaaaagggcggcgaccggtcaatcttgaacgcacggcagggatggctggctgctctgcaggatagatctatcctggcgccccttgcctgggacctaggactgcttcttctcttcgtgggacagcacagtttaatggcggccgagcgcgttaaggcatggacctcacgatactttggtgtgctccagcggagcctgtacgtggcatgcacggcgctcgccctccaacttgtcatgcggtactgggaaccgattcctaagggtcccgtactgtgggaagccagggccgagccatgggccacgtgggttccattgctttgcttcgtgctacacgtgatatcatggctccttattttctcaatcctactcgtgttcgactatgccgagttgatgggattgaagcaagtgtattaccacgtgctgggcttgggggagcccttggccctgaaatcgcccagagccctgcgcctattcagtcacttgcggcatccggtctgcgtcgagctccttacagtactgtgggtcgtgcccaccctcgggacagatcggttactgttagctttcttactgaccctctacctgggcttggcccatgggttggatcagcaggacctgcgctacctgagggcccagttgcagaggaaacttcaccttctctcaaggcctcaggatggggaggccgaatag

SEQ ID NO: 171270 - DNA, 789 bp, Artificial Sequence
  derived and/or modified sequence
taggaaagtggtagagaggcgactggcgaaggagatctttcatcaaagttgggtactcagggcctggagttttggcgcggggggcgggtgaggactgagggagcggagaaagggggagacagaagcatactgaatgccaggcaaggctggctagccgctcttcaggatcggtccatccttgcacccctggcttgggatttaggtctgctgctgctgtttgtgggccagcacagtttgatggcggccgagcgggttaaagcctggacaagccgctattttggggtactgcagcgctcactgtatgtcgcttgtacagctctggctttacagttggtcatgcggtattgggaaccaatcccaaaagggccagtgctatgggaggcaagagcggaaccgtgggccacatgggtcccactcctctgtttcgttctacatgttatatcgtggcttttgatattcagcatcctgctggtgtttgactacgcggagctcatgggactgaaacaggtgtattatcatgtgctcggattaggtgaacctctcgctctcaaatcaccaagggcattgcgacttttcagtcacctgaggcatcccgtctgtgtcgagctgctgaccgtattatgggtggtccctacactaggaactgatagactgctgctggcatttcttttgacattgtatctggggttggcacacgggcttgatcagcaggatctacgttacctgagagcccagctgcagcggaagcttcatctactaagcaggccacaagacggtgaggctgagtag

SEQ ID NO: 171271 - DNA, 789 bp, Artificial Sequence
  derived and/or modified sequence
atggccccagctcttctactaattccagctgcccttgcttcctttatcctcgcttttggcaccggcgttgagtttgttcggtttactagcttgcggccactgctgggtggcatcccagaatctgggggcccagacgcccgccagggctggttggccgccctccaggaccggagcattctggcacctttggcgtgggacctcggcctcctgctgctgtttgtaggacagcacagtcttatggccgctgagagggtgaaggcatggacaagcagatactttggagtgcttcagaggagtctgtatgtggcatgtaccgctctcgcgctccagttggttatgcgatattgggagccaattcccaagggtccggtcctctgggaagcacgggctgagccttgggctacttgggtccccctgctctgtttcgtgcttcacgtgatcagctggctgctcatcttcagtatcttattagtgtttgattacgccgagctgatggggcttaaacaagtgtactatcacgtgctggggctgggggagcctctggccctgaaaagcccgcgggcacttcgactgttcagtcatctgcgccatccagtttgtgtggaattactgacagtcctatgggtggtgcccacacttgggactgatcggctgcttcttgcctttctcctaaccctctatctcgggttagcccatgggctcgaccagcaggatctcaggtatctgcgggcacagctccagcgcaagcttcacctattgtcaagaccccaagatggcgaggccgaatag

SEQ ID NO: 171272 - DNA, 789 bp, Artificial Sequence
  derived and/or modified sequence
tgagaatccggtcgtgaggcaactggggaaggtgatttgagttcgaagctgggcactcagggtctagagttttggaggggcggtcgggttagaacggaaggtgcggaaaaaggcggagatcggtctatcttgaacgccaggcaagggtggctggctgccctccaagacaggagcatcctcgccccactggcttgggatctaggtctgctcctcttatttgtgggacaacatagcttgatggccgcagagagggtgaaggcctggacctcccggtattttggcgtactgcagagatctctctatgtagcttgcacagctctggccctccaactcgtgatgcgttactgggaacctatacctaaaggaccagtgttatgggaagccagggccgaaccatgggcgacctgggttccactgttatgcttcgtcctgcacgtcatctcatggctcctaattttttcgattctactcgtcttcgactacgctgaacttatgggcctgaagcaggtttactaccacgtgctcggcttaggggagcctctggccctcaaaagtcctagagccttgcgactgtttagccaccttcgtcatcccgtctgtgtagagctgctgactgtgctgtgggtagtgccaacactgggtacagacaggctactcctggccttcttgctgacgctctacctggggctcgctcatgggttagatcagcaagacttgcgatacctccgcgctcaactccagagaaagcttcaccttctgtctagacctcaggacggtgaagcagagtag

SEQ ID NO: 171273 - DNA, 789 bp, Artificial Sequence
  derived and/or modified sequence
taagagagtgggagagaggccaccggagaaggagatttatcaagcaagctggggacacagggtctcgaattctggcgcggcggtagggtgcgaaccgaaggggccgaaaagggaggagatcggagcatcctgaatgcgcgacaaggttggctggcggccctccaggatcgctcaatccttgccccactcgcttgggacctaggcctcctgctcctgtttgtgggccaacacagcttaatggctgcagaaagggtgaaggcttggaccagtcggtacttcggggtcctgcagaggtccctgtacgtggcctgcacagcgctggccctccagctggtaatgagatactgggaaccgattccaaagggaccagtcctatgggaagctagagccgagccatgggcgacatgggtacccttgctttgttttgtcctgcatgtgatttcttggttgttgatcttctctattctgttggttttcgactatgccgaattaatgggtttaaaacaggtctactatcacgtcttgggcctgggcgagcctttagcgctgaagtcgccacgcgctttacgcctcttctcccacctcaggcaccccgtctgcgtggaactgctgaccgtcctttgggtggttcctacactcggaactgatcggttactgctggcttttctgttgaccttatatctcggccttgcccacggtttggatcagcaggatctcagatatctgagggcgcaattgcaaagaaaactgcatctcctctcacgcccacaagatggggaggccgagtag

SEQ ID NO: 171274 - DNA, 789 bp, Artificial Sequence
  derived and/or modified sequence
tgagaaagtggtcgcgaggctaccggtgaaggcgacttatcaagcaagttgggcactcaaggcctggaattctggcggggcggacgggttagaacggagggggctgagaagggaggggaccgttctattttaaatgctcgccagggctggctggccgctttgcaagacagatccattctagccccactggcttgggacctgggacttctgttgcttttcgtagggcagcattctctgatggccgcagagcgcgtgaaagcctggacctcccgctacttcggtgtacttcaaaggagcctgtacgtagcatgtacagcactggcgctgcagctggttatgcggtattgggaaccaatcccaaagggacccgtcctttgggaagctagagcagaaccatgggcgacatgggtgcctctgctgtgctttgtgttacatgtgatatcatggctgctcatcttctcaatattgctcgtgttcgactatgccgagctgatggggttgaagcaggtgtattatcatgttctgggcctgggcgaacctttggcactgaagtcgccgcgagctctcaggttgtttagccaccttagacatcctgtctgtgtagagctgctaaccgttttatgggtggtgcctaccctaggcaccgaccgtctgctcctagcctttctcctgacactctatttgggcctcgctcacggactggatcagcaggatctcaggtatctgcgggcccagctccagcgaaagctgcacctattaagccggccacaagacggggaggcagagtag

SEQ ID NO: 171275 - DNA, 789 bp, Artificial Sequence
  derived and/or modified sequence
atggccccagccctgctgctgatcccagctgccctggccagcttcatcctggcctttggaactggagtggagtttgtgcgcttcaccagcctgcggcccctgctgggcggcatccctgagagcggcggcccagatgcccggcagggctggctggccgccctgcaggacaggagcatcctggcccccctggcctgggacctgggcctgctgctgctgtttgtgggccagcacagcctgatggctgctgagcgggtgaaggcctggaccagccgctactttggagtgctgcagaggagcctgtatgtggcctgcacagccctggccctgcagctggtgatgagatactgggagcccatccccaagggccctgtgctgtgggaggcccgggcagagccctgggccacctgggtgcccctgctgtgctttgtgctgcacgtgatctcctggctgctgatcttcagcatcctgctggtgtttgattatgcagagctgatgggcctgaagcaggtgtactaccacgtgctgggcctgggggagcccctggccctgaagagcccccgggccctgcggctcttcagccacctgcggcaccctgtgtgtgtggagctgctgactgtgctgtgggtggtgcccaccctgggcacagaccggctgctgctggccttcctgctgaccctgtacctgggcctggcccacggcctggaccagcaggacctgcgctacctgcgggcccagctgcagaggaagctgcacctgctgagccggccccaggatggagaggccgagtag

SEQ ID NO: 171276 - DNA, 789 bp, Artificial Sequence
  derived and/or modified sequence
tgagaaagtggccgggaggccaccggggagggggacctgagcagcaagctgggcacccagggcctggagttctggaggggcggccgggtgaggacagagggcgctgagaagggcggggacaggagcatcctgaatgcccggcagggctggctggccgccctgcaggacaggagcatcctggcccccctggcctgggacctgggcctgctgctgctgtttgtgggccagcacagcctgatggctgctgagcgggtgaaggcctggaccagccgctactttggagtgctgcagaggagcctgtatgtggcctgcacagccctggccctgcagctggtgatgagatactgggagcccatccccaagggccctgtgctgtgggaggcccgggcagagccctgggccacctgggtgcccctgctgtgctttgtgctgcacgtgatctcctggctgctgatcttcagcatcctgctggtgtttgattatgcagagctgatgggcctgaagcaggtgtactaccacgtgctgggcctgggggagcccctggccctgaagagcccccgggccctgcggctcttcagccacctgcggcaccctgtgtgtgtggagctgctgactgtgctgtgggtggtgcccaccctgggcacagaccggctgctgctggccttcctgctgaccctgtacctgggcctggcccacggcctggaccagcaggacctgcgctacctgcgggcccagctgcagaggaagctgcacctgctgagccggccccaggatggagaggccgagtag

SEQ ID NO: 171277 - DNA, 1755 bp, Artificial Sequence
  derived and/or modified sequence
atttgccattcttagcaactggccagtcaacaactcaactttataatgggaaaactagacgagctgagattcaacccacgtgagcggctgcagagccgctacccttaacagctctctctcgggattctaacattcccttctgtgacggagagacagcaggccgggacacgcatcccaggacggatccacagctggatggggaaggctgcgccaggcgggccggaagcctggcggtggcgtgcaggagccccgccctcctgggctggattcagccgggggcggggccgcgggcggggcctgtggcagcgggaatcccgaccccgcccctttccccacccctccatttctcgccatggcccctgcactgctcctgatccctgctgccctcgcctctttcatcctggcctttggcaccggagtggagttcgtgcgctttacctcccttcggccacttcttggagggatcccggagtctggtggtccggatgcccgccagggatggctggctgccctgcaggaccgcagcatccttgcccccctggcatgggatctggggctcctgcttctatttgttgggcagcacagcctcatggcagctgaaagagtgaaggcatggacatcccggtactttggggtccttcagaggtcactgtatgtggcctgcactgccctggccttgcagctggtgatgcggtactgggagcccatacccaaaggccctgtgttgtgggaggctcgggctgagccatgggccacctgggtgccgctcctctgctttgtgctccatgtcatctcctggctcctcatctttagcatccttctcgtctttgactatgctgagctcatgggcctcaaacaggtatactaccatgtgctggggctgggcgagcctctggccctgaagtctccccgggctctcagactcttctcccacctgcgccacccagtgtgtgtggagctgctgacagtgctgtgggtggtgcctaccctgggcacggaccgtctcctccttgctttcctccttaccctctacctgggcctggctcacgggcttgatcagcaagacctccgctacctccgggcccagctacaaagaaaactccacctgctctctcggccccaggatggggaggcagagtgaggagctcactctggttacaagccctgttcttcctctcccactgaattctaaatccttaacatccaggccctggctgcttcatgccagaggcccaaatccatggactgaaggagatgccccttctactacttgagactttattctctgggtccagctccataccctaaattctgagtttcagccactgaactccaaggtccacttctcaccagcaaggaagagtggggtatggaagtcatctgtcccttcactgtttagagcatgacactctccccctcaacagcctcctgagaaggaaaggatctgccctgaccactcccctggcactgttacttgcctctgcgcctcaggggtccccttctgcaccgctggcttccactccaagaaggtggaccagggtctgcaagttcaacggtcatagctgtccctccaggccccaaccttgcctcaccactcccggccctagtctctgcacctccttaggccctgcctctgggctcagaccccaacctagtcaaggggattctcctgctcttaactcgatgacttggggctccctgctctcccgaggaagatgctctgcaggaaaataaaagtcagcctttttctacata

SEQ ID NO: 171278 - DNA, 1416 bp, Artificial Sequence
  derived and/or modified sequence
acccctccatttctcgccatggcccctgcactgctcctgatccctgctgccctcgcctctttcatcctggcctttggcaccggagtggagttcgtgcgctttacctcccttcggccacttcttggagggatcccggagtctggtggtccggatgcccgccagggatggctggctgccctgcaggaccgcagcatccttgcccccctggcatgggatctggggctcctgcttctatttgttgggcagcacagcctcatggcagctgaaagagtgaaggcatggacatcccggtactttggggtccttcagaggtcactgtatgtggcctgcactgccctggccttgcagctggtgatgcggtactgggagcccatacccaaaggccctgtgttgtgggaggctcgggctgagccatgggccacctgggtgccgctcctctgctttgtgctccatgtcatctcctggctcctcatctttagcatccttctcgtctttgactatgctgagctcatgggcctcaaacaggtatactaccatgtgctggggctgggcgagcctctggccctgaagtctccccgggctctcagactcttctcccacctgcgccacccagtgtgtgtggagctgctgacagtgctgtgggtggtgcctaccctgggcacggaccgtctcctccttgctttcctccttaccctctacctgggcctggctcacgggcttgatcagcaagacctccgctacctccgggcccagctacaaagaaaactccacctgctctctcggccccaggatggggaggcagagtgaggagctcactctggttacaagccctgttcttcctctcccactgaattctaaatccttaacatccaggccctggctgcttcatgccagaggcccaaatccatggactgaaggagatgccccttctactacttgagactttattctctgggtccagctccataccctaaattctgagtttcagccactgaactccaaggtccacttctcaccagcaaggaagagtggggtatggaagtcatctgtcccttcactgtttagagcatgacactctccccctcaacagcctcctgagaaggaaaggatctgccctgaccactcccctggcactgttacttgcctctgcgcctcaggggtccccttctgcaccgctggcttccactccaagaaggtggaccagggtctgcaagttcaacggtcatagctgtccctccaggccccaaccttgcctcaccactcccggccctagtctctgcacctccttaggccctgcctctgggctcagaccccaacctagtcaaggggattctcctgctcttaactcgatgacttggggctccctgctctcccgaggaagatgctctgcaggaaaataaaagtcagcctttttct

SEQ ID NO: 171279 - DNA, 1401 bp, Artificial Sequence
  derived and/or modified sequence
tgaaagcggccgagaagctacaggggagggagacctgagttctaaattaggaactcaaggattagagttttggagaggcgggagagtgaggactgagggagccgaaaagggcggtgaccggagtattctaaatgcccgccagggatggctggctgccctgcaggaccgcagcatccttgcccccctggcatgggatctggggctcctgcttctatttgttgggcagcacagcctcatggcagctgaaagagtgaaggcatggacatcccggtactttggggtccttcagaggtcactgtatgtggcctgcactgccctggccttgcagctggtgatgcggtactgggagcccatacccaaaggccctgtgttgtgggaggctcgggctgagccatgggccacctgggtgccgctcctctgctttgtgctccatgtcatctcctggctcctcatctttagcatccttctcgtctttgactatgctgagctcatgggcctcaaacaggtatactaccatgtgctggggctgggcgagcctctggccctgaagtctccccgggctctcagactcttctcccacctgcgccacccagtgtgtgtggagctgctgacagtgctgtgggtggtgcctaccctgggcacggaccgtctcctccttgctttcctccttaccctctacctgggcctggctcacgggcttgatcagcaagacctccgctacctccgggcccagctacaaagaaaactccacctgctctctcggccccaggatggggaggcagagtgaggagctcactctggttacaagccctgttcttcctctcccactgaattctaaatccttaacatccaggccctggctgcttcatgccagaggcccaaatccatggactgaaggagatgccccttctactacttgagactttattctctgggtccagctccataccctaaattctgagtttcagccactgaactccaaggtccacttctcaccagcaaggaagagtggggtatggaagtcatctgtcccttcactgtttagagcatgacactctccccctcaacagcctcctgagaaggaaaggatctgccctgaccactcccctggcactgttacttgcctctgcgcctcaggggtccccttctgcaccgctggcttccactccaagaaggtggaccagggtctgcaagttcaacggtcatagctgtccctccaggccccaaccttgcctcaccactcccggccctagtctctgcacctccttaggccctgcctctgggctcagaccccaacctagtcaaggggattctcctgctcttaactcgatgacttggggctccctgctctcccgaggaagatgctctgcaggaaaataaaagtcagcctttttctacata

SEQ ID NO: 171280 - DNA, 789 bp, Artificial Sequence
  derived and/or modified sequence
atggcccccgccctgctgctgatccccgccgccctggccagcttcattctcgccttcggaacaggcgttgagttcgtcagatttacatctctccgacccctcctgggcggcattccagagtctgggggcccagacgctagacaaggttggctagctgctcttcaggatcgctccattctcgctcccctggcttgggacctggggcttctcttgctgttcgtaggccagcactcactgatggccgctgaaagagtcaaggcctggacatcaagatatttcggcgtgctgcagaggagcctttacgtggcgtgcaccgccctggcgctacagctggtgatgcgctactgggagccaatcccaaaggggccggtgctctgggaggcaagggccgagccctgggcgacctgggtccctctcctttgttttgttttacatgtgattagctggctgctgattttttccatcttgttggtctttgactatgccgaactcatgggcctcaaacaagtctactatcacgtcctgggtctcggcgaacctctggcgttgaaatcacctcgcgcattacgtctcttttcccacctgaggcatcctgtttgcgtagagctgcttaccgtactctgggtggtgccaaccctaggtaccgataggctcttgttagctttcctgttaacgctgtatttggggctggcccacggtctcgaccagcaggatctgcggtatctgagggcccaactccaacgcaagttacatttgctgtctcgccctcaagatggggaagcagagtag

SEQ ID NO: 171281 - DNA, 789 bp, Artificial Sequence
  derived and/or modified sequence
atggcccccgccctgctgctgatccccgccgccctggccagcttcatcttagcttttggaaccggcgttgaatttgtgagatttacctccttacgacctctgctcggaggaattccagagagcggtggcccggatgccagacaggggtggctggctgcgctacaggaccgatcaatcctggccccactggcatgggacctggggctcctgttgctttttgttggtcagcatagcctcatggccgctgaaagggtgaaggcctggacgtcccgttactttggcgttctgcagcgaagtctatatgtggcctgcactgccttggcactgcagctcgtgatgagatattgggagccaatacccaaaggccccgtgctctgggaggctagagcagaaccgtgggccacttgggtccccctactttgtttcgttctgcatgtaatctcatggctcctgatctttagcattttgctggtgttcgactacgccgaactgatgggcctgaagcaagtttactatcacgtgcttggcctcggtgagccactggctctgaagtccccccgggccctgaggctgttctctcatctgcgccatcctgtctgtgtggagctgttaactgtgctctgggtcgtcccaacacttggaacagatagactgctgctggctttcctgctaaccctctatcttggtctcgctcacggccttgaccagcaggacctgcggtacctccgtgcacagcttcagcgtaagctgcatctgctttctaggcctcaagacggagaagctgaatag

SEQ ID NO: 171282 - DNA, 789 bp, Artificial Sequence
  derived and/or modified sequence
atggcccccgccctgctgctgatccccgccgccctggccagcttcatcctagcctttgggactggtgtggaatttgtgcgtttcaccagtctgagaccattactgggaggaatccccgaatccggcggacccgacgccaggcaggggtggcttgctgcacttcaggatcgcagtattctcgctccgttagcatgggatttgggcctactgctcctgtttgtggggcagcactccctgatggccgctgagcgggtaaaggcctggacctcccgctatttcggcgtgctgcaacgctccctctacgttgcttgtacagcgctcgcgttgcagctggtgatgaggtattgggaacccataccaaaaggcccagtcctatgggaagcgcgggcagagccatgggccacttgggtgccacttctgtgttttgtgctgcacgtcatttcttggctcctgatcttctcaattctattggtgttcgactatgctgagctaatgggtctgaaacaggtgtactaccatgtgttggggctgggggaacctctggccctgaaatctccacgcgcccttagactgttttcccacctccgacaccccgtttgtgtggagctactgaccgtgctgtgggtcgtgccgactctgggaaccgacagactgcttctcgccttcttattaacgttgtatcttggtctggcacatgggttagatcagcaggacctccggtacttaagagcccagctacagcggaaactgcacctgctgagccgacctcaggacggtgaggccgaatag

SEQ ID NO: 171283 - DNA, 789 bp, Artificial Sequence
  derived and/or modified sequence
tgagagagcggccgggaggccaccggcgagggcgacctgagcagcaagctggggacccagggcctggagttttggcgcggtggtcgggtaagaaccgagggagcggagaaggggggtgataggtccatactgaacgctaggcaaggctggctcgccgccctgcaggatcgttccattctggcgccattggcgtgggatctgggccttctcttactcttcgtcgggcaacacagcctgatggctgccgagagggttaaagcttggacctcaagatacttcggggtgttgcagcgctctctgtacgtagcctgtacagctctagccctgcagcttgtgatgagatattgggagcccattccaaagggaccagtcctgtgggaagcacgcgctgagccgtgggccacctgggtccctctactgtgctttgtcctgcatgtgatatcgtggctattaatcttctctatccttctagtgtttgattacgccgagcttatgggcctgaaacaggtttactatcacgtgttaggactgggggagccactggcattaaagtcgcctcgtgctttgaggctgttctcccatcttcgccacccagtgtgcgtggaactccttacagtcttgtgggtagtccccactctgggaaccgataggctccttctcgccttcttgctgaccttgtatctcggtctcgcacatggtttagatcagcaggatctgcgttacctgcgcgcccagctgcagagaaaactgcacctgctcagtcggccacaggatggagaggctgaatag

SEQ ID NO: 171284 - DNA, 789 bp, Artificial Sequence
  derived and/or modified sequence
atggcccccgccctgctgctgatccccgccgccctggccagcttcatcctcgcgtttggaactggagtggaatttgtgaggtttacgagtctacgaccattgctggggggcatccccgagtcaggcggtcctgatgccagacaagggtggttggccgccttgcaagacaggtccatcctcgctccactcgcttgggacttgggactgctcctgttgttcgtgggacaacactccctcatggccgcggaaagagtaaaagcgtggacctctcgatacttcggtgtgcttcaaagatctctctacgtcgcctgcacagcccttgcgctccaacttgttatgaggtattgggagcctatcccaaaaggtcctgtcctgtgggaggctcgggctgaaccctgggcaacatgggtgcctttgctgtgctttgtccttcacgtcatcagttggctcctgatatttagtatcctgttagtgttcgactatgcggagctgatggggctgaaacaagtttactaccacgtcctcggcctgggcgagccgctcgcactcaagagcccccgagcgctccggctttttagtcacctgcgccacccagtgtgtgtggagctgctgactgtgctgtgggtcgtgccgacgctcggcaccgatagactcctgctggctttccttcttacactatatttgggtttagcacacggactggatcagcaggatttaagatatctgcgggcccagctccaacgcaaactgcacttgctgagccggcctcaagacggcgaagccgaatag

SEQ ID NO: 171285 - DNA, 789 bp, Artificial Sequence
  derived and/or modified sequence
atggcccccgccctgctgctgatccccgccgccctggccagcttcattctggccttcggaaccggggtcgaatttgtgcgatttacatcattaaggccacttttgggaggtatccccgagagcggcggtcctgacgcccgtcagggctggttggctgcgcttcaggatcgctccattctggccccactcgcatgggatcttgggcttctgttgctctttgtcggccaacattccctcatggccgccgagcgtgtaaaggcatggacaagcagatattttggggtcttgcagcgctctttgtatgtcgcttgtacggccctggcgctgcagctcgtaatgcggtactgggagcctattcctaaaggccctgtcctttgggaagccagagcagagccttgggccacctgggttcctttattgtgcttcgtgttacacgtcatctcttggctgctcatcttttcgatcctgctggtgttcgactacgctgaactgatggggctgaagcaggtgtattatcacgtcctcggcttaggagagccactcgccctcaaatcaccccgcgccctgcggctattcagtcacttgcggcaccctgtatgcgtggagttattgactgtgctgtgggtcgtgcccaccctgggcacggataggttgctactggctttcctgctaacactttatttagggttagcccacggactggaccagcaggatctgcgctatttgcgcgcccaactgcagagaaaactacatctgctgtctaggccacaggacggcgaggcagaatag

SEQ ID NO: 171286 - DNA, 789 bp, Artificial Sequence
  derived and/or modified sequence
atggcccccgccctgctgctgatccccgccgccctggccagcttcattctcgcgtttggaaccggcgtggagtttgtacgcttcacatctctcaggccgctgcttgggggcatccctgaaagcggcgggcccgatgctcggcagggatggctagccgctctgcaggaccgctctatcctggccccgctggcatgggatctgggcctgcttctgctctttgtcggtcagcactcactcatggcagccgagcgggtaaaggcctggaccagcaggtatttcggtgttctacagcggtcactatacgtcgcatgcaccgccttggcgctgcagctcgtcatgcgatactgggagcccatcccaaagggtcccgtgctgtgggaggcccgcgcagagccatgggctacatgggttccgcttctgtgttttgtgctgcacgtgatttcctggctcctgatattttcaatcctgctcgtgtttgactacgccgaacttatggggctgaagcaggtctactaccacgtactaggactaggggaaccactggcccttaaaagtccccgtgcccttcgcctatttagccatctgagacaccctgtctgcgttgagcttctgacagtcctgtgggtcgtgcccacactcgggaccgataggcttttgctggccttcttattgaccctctatctgggtttagcccacgggctagatcagcaggacctgaggtacctgcgcgcgcaactgcagcgcaagctgcatctcctgagtcggccccaggacggcgaggccgagtag

SEQ ID NO: 171287 - DNA, 789 bp, Artificial Sequence
  derived and/or modified sequence
tgagagagcggccgggaggccaccggcgagggcgacctgagcagcaaactgggaacccagggactggaattttggagaggaggccgagtgcgcaccgagggcgccgagaaaggaggtgatcgatccatactaaacgctcggcagggttggctcgcagctctacaggatcggagcatactggctcctttggcatgggacctgggcctactcctcttgtttgttggccagcatagcctaatggctgctgagcgggtgaaggcctggacaagtagatacttcggtgtcctgcagcggtctctgtacgtggcctgtactgccctggctttacaactggtgatgcggtactgggagcccatacctaagggaccagtgttgtgggaagcccgcgcagaaccttgggccacctgggtccccttgttgtgttttgtgctgcacgtcattagctggcttttaatattcagtattctcctcgtgttcgattacgccgaactcatgggacttaagcaggtctactaccatgtacttggcctgggagaacccttagctctcaagagccccagagcgctgcgactgtttagccacctgagacatcccgtatgtgtagagctgctcacggttttgtgggtggttcccacactggggaccgataggttgctcctggcattcctcctgaccctgtacctgggcttagcccacggtttggatcagcaagatcttcgctaccttagggcacaattacagaggaaactgcatctgttatcacgcccgcaggatggcgaggctgagtag

SEQ ID NO: 171288 - DNA, 789 bp, Artificial Sequence
  derived and/or modified sequence
atggcccccgccctgctgctgatccccgccgccctggccagcttcattctcgctttcggcacaggagtagaatttgtcagattcacctctctgaggcccctgctcggaggaatccctgaatccggtgggcccgacgcgcgtcaggggtggctggcagctctgcaggacagaagtatcttggccccactggcctgggacctggggttactgctgctgtttgtcgggcagcacagccttatggcggccgagagagtgaaagcctggacttctaggtactttggagtgttgcagaggtccctgtacgtggcctgcacagctctggctttgcaattggttatgcggtattgggagccaatcccaaaagggcccgttctatgggaggcccgagctgagccttgggcaacttgggtgcccctcctgtgcttcgtcctgcatgtcatcagttggctcctgatcttcagtatactcctcgtcttcgattacgcagagctcatggggcttaagcaggtgtattaccacgtcttggggctcggtgaaccactcgcgctcaagagtccacgcgccctgagactgttctcacatctgaggcatcctgtgtgcgtagagttgcttaccgtgttatgggtagtccccaccctcggcacagatcgcctgctgttggccttcctgctcaccctctatttgggtctggctcacggacttgaccagcaggacctgcgctacctgagagctcagttgcagcgtaagttgcatctgctctcgagaccgcaggacggcgaagccgagtag

SEQ ID NO: 171289 - DNA, 789 bp, Artificial Sequence
  derived and/or modified sequence
tgagagagcggccgggaggccaccggcgagggcgacctgagcagcaagctgggaactcaggggctggagttctggagagggggaagagtgagaactgagggggctgagaagggtggagaccggagcatcctcaacgctagacaaggatggctggccgccctgcaggatcgcagtatcttggcacctctcgcctgggatctcggcctgcttcttctgtttgtgggccagcattccctgatggcggcggaaagagtgaaggcttggacatcacggtattttggtgtgctgcagcgttcactatacgtagcatgtacagctcttgcccttcagctcgtaatgagatactgggaacccatcccaaaagggcctgtgctttgggaagccagagctgagccctgggccacatgggttccactgctctgctttgtgctgcacgtgatcagctggctgctgattttttctatcttgctggtcttcgattacgccgagctcatgggtctgaaacaggtttattatcacgtgttagggctgggggaacccctggctctcaagtctcctagggctttgcgcctttttagccacctgcgccacccagtttgcgtagagctacttacagtcctttgggtggtacctacgctgggcactgaccgattactcctagccttcctgctaacattgtatctcggcctggctcatggactggaccagcaggatttgcgctatctacgggcacagctgcaaagaaagcttcacctgctgtcccggccccaggacggagaggccgaatag

SEQ ID NO: 171290 - DNA, 789 bp, Artificial Sequence
  derived and/or modified sequence
tgagagagcggccgggaggccaccggcgagggcgacctgagcagcaagctgggcacccaggggctggaattctggagaggcggccgcgtcagaacagagggagccgagaaagggggggatagaagcattctgaacgctaggcagggatggctcgcagctcttcaggatagaagcattctcgcaccgctggcatgggacctcgggctgcttctcctgtttgtaggccagcacagcctcatggccgccgaacgagtcaaggcatggaccagccggtacttcggcgtgttgcagcgctcactctacgtggcatgcacagcactggccctgcagctagtgatgcgttactgggaacctatcccaaaaggccctgtgttatgggaggctcgtgccgaaccttgggcaacgtgggttcccctcctatgcttcgtgctccatgttatcagctggctcctcattttttcaatcctcctggtttttgactacgccgaactcatgggacttaagcaggtgtattaccatgtgctggggttaggggagcccctggctctaaagtccccaagggctctgaggctgttttcccatctgcgccaccccgtgtgtgtggagctgctgactgttttgtgggtcgtgccaactctgggtaccgacaggctcctgctggccttccttcttacattgtacctggggttggctcacgggctcgatcagcaggatctcaggtacttgcgtgctcaattacaacggaagctacacttgctatctcggccgcaggacggagaggccgagtag

SEQ ID NO: 171291 - DNA, 789 bp, Artificial Sequence
  derived and/or modified sequence
atggcccccgccctgctgctgatccccgccgccctggccagcttcattctcgcattcggcacaggtgttgagttcgtaagattcacctccctccgaccactactgggcggcattcccgagagcggaggtccagacgccagacagggttggttggccgcactccaggacagatccattcttgcccccctcgcctgggacctcggccttttactgttgtttgtgggccagcactcgctgatggccgctgaacgcgtcaaggcctggacatctaggtattttggtgttctacagcgcagcctctacgtggcctgcactgctctggctctacagctggtcatgcgctactgggagcccatccccaagggccctgtgctgtgggaggctcgggctgagccttgggcaacttgggtccccctgctgtgtttcgtgctgcatgtgattagctggctgctaatcttttcaatcctcttagtgtttgactatgccgagttgatggggctgaagcaggtttattaccacgttctgggtctcggagagccacttgctctgaaatccccccgggccctgcgactgttttcacacttaagacaccccgtctgcgtggaactcctgacggtgctttgggtagttccaactctgggcacagaccggctgcttctggcatttcttctgactctctatttagggttagcacacggcctggaccagcaggacctgagatatcttagagcccagctgcagcgtaagcttcacctgctttcacgtccccaggatggagaagccgaatag

SEQ ID NO: 171292 - DNA, 789 bp, Artificial Sequence
  derived and/or modified sequence
tgagagagcggccgggaggccaccggcgagggcgacctgagcagcaaactgggaacacagggtctagaattttggcgaggcggtagggttcgaacggaaggcgcagagaaagggggagaccgctctatattaaatgcacgccaggggtggcttgctgccctgcaagaccgctcaatcctggcccctctcgcatgggaccttggcctattactactctttgtgggtcaacacagcctgatggccgccgaaagagtcaaagcctggaccagtcggtacttcggtgtattgcagcgcagtttatacgtggcttgtaccgctcttgccctgcagctagtcatgcgatactgggagcccatcccgaaggggccagtgctgtgggaggcccgtgccgagccgtgggctacttgggttcctctgctttgttttgtgctgcatgtgatctcctggctgctcatcttttctattctgttggtgtttgattacgcggaacttatgggtttgaaacaagtctactatcatgtgctggggctgggcgagcccctggcgctgaagtcgcctcgggctttacgcctttttagtcacctgcgccaccctgtgtgcgtggagctgctcacagtattatgggtcgtccctacccttggtaccgaccggctgctgttagctttcttgctaaccctctatctcggcctagctcatggactggaccaacaggatttgcggtatctgagggcacagctccagcgcaagctgcatttactgagcaggccgcaggatggtgaggcagaatag

SEQ ID NO: 171293 - DNA, 789 bp, Artificial Sequence
  derived and/or modified sequence
tgagagagcggccgggaggccaccggcgagggcgacctgagcagcaagttgggaactcaggggctggagttctggagaggggggcgggtcaggacagagggagctgaaaaaggaggcgatcgctcaatccttaatgccaggcaagggtggcttgcagccctgcaggataggtctatcctcgcaccactggcctgggacttgggactgctcctcttattcgtgggtcagcactctctcatggcggccgagcgcgtcaaagcgtggacctcacggtattttggcgtgctgcaaaggtctctctacgtggcctgtactgccctggcgctgcagctggttatgagatactgggagcccatcccaaaaggcccagtgctctgggaagccagggcagagccatgggcaacatgggtgcccctgctttgttttgtgctgcatgtgatttcctggctcctgattttcagcatcttactggtctttgattacgctgagttgatggggttaaagcaggtttattaccacgttctgggattgggcgaaccattagcactgaagagcccaagggctcttaggctgttttcacacctccgccatccagtttgcgtggaactgctcactgtgttgtgggtcgtacccactttgggaaccgacagactgcttttggccttcttgcttactctgtatctggggctggctcacggcctggaccagcaggatctacggtacctgcgggcgcagctgcagcgtaaactccatcttctgagccgtccacaggacggcgaggcagaatag

SEQ ID NO: 171294 - DNA, 789 bp, Artificial Sequence
  derived and/or modified sequence
tgagagagcggccgggaggccaccggcgagggcgacctgagcagcaagctgggtacacagggtctcgagttttggagaggcggtcgggtacggacagagggcgccgagaaaggaggagatcggagcatactgaatgctagacagggatggctggctgccctgcaagatcgctcaatcctggccccactggcctgggacctagggctgcttctgctcttcgtgggacaacattccctgatggctgccgagcgagtgaaggcctggacatctaggtactttggtgtcctgcagcgaagcctgtatgtcgcttgtactgcactggctttgcaactggtgatgcgctactgggagccaatcccaaaggggccggtgttgtgggaagccagggccgagccttgggcaacctgggtaccccttctgtgtttcgtactacacgttatctcttggctgctgatattctctatactgttggtcttcgactatgctgaactcatggggcttaagcaggtgtactatcacgtccttggcctaggcgagcccttggcactgaagtcgccacgcgcactacggcttttctcgcatctgcggcacccggtctgtgtcgaattgctgacagtcctttgggtggtccccactctgggtaccgaccgccttctcctggccttcttgctcactttgtaccttggtctcgcccatgggttagaccagcaggatctgcggtaccttagagcacagttacagcggaagctgcatctgctgtccagacctcaggacggggaggctgaatag

SEQ ID NO: 171295 - DNA, 789 bp, Artificial Sequence
  derived and/or modified sequence
atggcacctgcgttacttttgatccccgcagcccttgccagcttcattctggctttcggaaccggcgttgagtttgtaaggttcacgtccctccggcctctgcttggtgggatcccagaaagcgggggacctgacgcccgacaagggtggctggctgccctccaggacaggtcaattctggcacctttggcctgggatctgggcttgcttctcctgttcgtcgggcagcacagcctgatggctgctgagagagtgaaggcttggacctcccgctacttcggggtgctgcagagaagtctgtacgttgcttgcacggccctggcattacagttggtaatgagatactgggagcccatccccaaaggaccagtcctgtgggaagcacgtgccgaaccctgggccacatgggtacccttattatgttttgtattacatgtcatctcttggctgttgatcttttccattctgctcgtctttgactacgctgagctgatgggccttaaacaagtgtactatcatgtactaggcctcggcgagccactggccctgaaatccccgcgtgccctcaggttgttttcacacctgagacatccggtttgtgtagagctgctgacagtcctttgggtggtgcccactttaggaaccgataggttattgctggcattcctgcttaccctgtatctggggctcgcccacggcctggaccagcaggatttacgctatctgcgagcacagctgcagagaaagttgcacttactgagccgaccacaggatggtgaggccgaatag

SEQ ID NO: 171296 - DNA, 789 bp, Artificial Sequence
  derived and/or modified sequence
atggcgcctgctctgctgctgatcccagctgcgttggccagcttcattctggccttcggaaccggggtggaatttgtcaggttcacgagcctcagacctctgctcggcggtatccccgagtctggtggtcccgacgcaaggcaaggatggcttgctgctcttcaggaccgttcaattctagcaccacttgcctgggatctgggcttgctccttctgtttgtgggacagcattccctgatggccgcagaacgggtgaaagcatggacatcccgttacttcggcgtcctgcagcgcagtctgtacgtggcctgtactgctctggccttgcaactcgtgatgagatattgggagcccatccccaaggggccagtgctgtgggaggccagggctgaaccatgggctacatgggtgcctttgctctgcttcgtgctacatgtgattagctggttgctcatcttctcgatcctgctggtgttcgattacgccgagctgatgggcctaaaacaagtttactatcacgtgctcggccttggcgagcccctcgcattgaaatcgccacgagcattgcggctcttctcacacctgaggcatccagtctgcgttgagctgctcactgtgctgtgggtggtgccaacgctcgggacagatagattgctcttagcgtttctgctgactctctacctcggtctggcgcatggtctggatcagcaggatctcagatacctgagagcccaattgcagcgtaagttgcacctgctgtcccgcccacaggatggtgaggccgagtag

SEQ ID NO: 171297 - DNA, 789 bp, Artificial Sequence
  derived and/or modified sequence
atggcacccgcactgctgctcattcctgccgcacttgctagctttattctcgcattcgggacaggggtcgaatttgtgcgcttcacctcgcttcgcccactgctcggtgggattcctgagtccggaggacctgatgccagacagggctggctcgcagccctgcaggatcgatcaatcttagctcctcttgcttgggaccttggccttctgctgctatttgtcgggcagcactcattgatggctgccgagagggtaaaagcttggacttcacggtacttcggtgtgctccagcgctccttatacgtggcatgtacggccctagcgctgcagctggtcatgcggtactgggagcccatccctaaaggcccagtgctgtgggaggcccgagcagaaccctgggccacttgggtgccactcttgtgctttgtcctgcacgtgatctcttggctgttaattttcagcatcctgctggtttttgactacgccgaactgatgggcttaaaacaggtgtattatcatgtcctgggactcggagagcccctggcgctgaagagtcctagagccctgcgcctcttttctcaccttcgtcacccagtctgtgtagaacttctcacagttctgtgggttgtgcctacattgggaacagacaggctgctgctggcttttctcttaacattgtacctgggcttggcccacggacttgatcaacaggacctgcgatatctgagggcgcagctgcagcgaaagctgcacctgctttcccgtcctcaggacggggaggccgagtag

SEQ ID NO: 171298 - DNA, 789 bp, Artificial Sequence
  derived and/or modified sequence
taggaatccggcagggaagccaccggggagggcgacctcagttcgaagctggggactcagggcctggagttctggagaggcggtcgcgtgcggactgagggcgctgaaaagggaggagatagatcgatcttaaatgcacggcagggctggctcgccgcactgcaagatagaagcattctggctcccctagcatgggacctgggcctgctcttacttttcgtggggcagcactctttaatggcagcagagagggtaaaggcctggactagtcgttactttggcgtcctgcagagaagcttatacgtggcatgtacggccctcgccctgcaactggtgatgcgatactgggaacccatccctaaaggtccggttctatgggaggctcgcgcagagccctgggccacgtgggtgccattgctctgcttcgtgctgcatgtgatatcttggctgctgatattttccatactgctcgtcttcgactatgccgaactaatgggactgaaacaagtgtattaccatgtgcttggactcggcgaacccctcgccttaaagagccctcgagcattgagactgtttagccatctccgccatcctgtgtgcgtggagctgctgacagtgttgtgggttgtaccaacactgggaacagatcggcttttattggctttcctgttgacactgtatctcggcctggcccacggtctggaccagcaggatttacggtatttgagggcccaacttcagcggaaactgcacctgctaagccgacctcaagatggagaggccgaatag

SEQ ID NO: 171299 - DNA, 789 bp, Artificial Sequence
  derived and/or modified sequence
atggcaccagccctcctgctgatccccgctgcgttggcttcgtttatcttggcatttgggaccggagtcgagttcgtgaggtttacctctctgaggcctctcctgggcggtatccctgaatccggaggccctgacgctcgccagggctggcttgcagctttacaggaccgatctatattagcaccactggcctgggacctgggattgcttctcttattcgtgggccagcactcccttatggctgccgagagggtgaaggcgtggacatcaagatactttggggtgcttcaaagatctttgtacgtggcatgtactgccctggcgttgcaactggttatgagatactgggaacccattcctaaaggtcccgtcctgtgggaagcgagagctgagccttgggctacttgggttcctctcttgtgcttcgtgctacatgtgataagctggcttctaattttctcgatcctactggtattcgattatgctgaacttatgggtctgaagcaggtgtactatcacgtgcttgggctgggcgagccgctggctttaaaatccccacgggctctcaggctgttcagccacctgaggcaccctgtatgtgtagagctgctgaccgtattgtgggtcgtgcctactctcgggaccgatcggttgctactcgccttcctgctgacactctaccttggtttggcccacggacttgatcaacaggacctgcgataccttagagcgcaactccaaagaaaactgcacctgctctctcgaccccaagacggcgaagcagaatag

SEQ ID NO: 171300 - DNA, 789 bp, Artificial Sequence
  derived and/or modified sequence
atggcccctgccttattgctcattccagccgctttggccagttttattctggccttcggcactggtgtcgaatttgtaaggttcacgtctttgcggccactgctgggtggtattcccgagtccggcggtccagatgcacggcagggttggttagccgcacttcaagatcgaagcatcttggcgcctttagcatgggacctgggattacttctgttgttcgtgggccagcactccctcatggctgcagaacgcgtgaaagcttggacctcgagatacttcggggtactccaacggtctttgtatgttgcttgtaccgctctcgcccttcagcttgtgatgcggtactgggaacccatcccaaagggcccagtgctgtgggaggcgagagctgagccctgggccacatgggtccccctgctttgcttcgtcttacacgttattagctggctgctgatttttagcattctgttagtcttcgactatgctgagctgatggggctaaagcaggtgtactatcatgtcctggggctcggagaacccttagccctgaagtctccccgagctcttaggttgttttctcatctccggcaccctgtctgcgtcgaactgctaactgtcctgtgggtcgttcccaccctgggaactgataggctgttgctggcctttctgcttaccctctatctgggcctggctcacgggctcgaccagcaggatctgcggtacttgcgtgcccagctgcaacgcaagctgcacttgttatcacgtccacaagatggcgaggcagaatag

SEQ ID NO: 171301 - DNA, 789 bp, Artificial Sequence
  derived and/or modified sequence
atggcacctgctcttctcctgatcccagccgcactagcgtccttcatcctggctttcggcacaggggtggagtttgttcgattcacatcacttagaccactgctcggtggtattcccgagagcgggggaccagacgctagacagggctggctggctgcactgcaagaccgctcgattctggccccactcgcctgggaccttggactgttattactcttcgtgggccagcactccttaatggccgctgagagagtcaaggcatggacatcgcgctactttggggtactccagcggtccttgtatgtcgcatgcactgccctcgccttacagctcgttatgagatactgggaacccatccctaaaggtcctgtcctctgggaggctcgggctgagccatgggctacctgggtaccactgctgtgttttgtgctgcacgtgatttcctggcttctaattttcagcatcctgttggttttcgattatgccgagctgatgggcctcaaacaagtctactatcatgtcttaggattgggcgagcctctcgcactgaagagtcctcgcgcactgagattgttttcacacttgaggcaccccgtgtgtgtggagcttctgaccgtactatgggtggtaccaacgttgggaacagacagactgctgctggcgttcctcctcacactgtacctcggtctggctcacgggctcgatcaacaggacctgcgttatttgagagcgcaactccagagaaagttgcatttactctcacggcctcaagatggggaggctgaatag

SEQ ID NO: 171302 - DNA, 789 bp, Artificial Sequence
  derived and/or modified sequence
tgagagtccggacgcgaagctacaggcgagggggatttgtcgtccaagctgggcacacaggggctggaattttggagaggagggagggtacgtaccgagggcgctgagaaaggaggcgaccgaagtatacttaacgctcgccagggttggctggctgccttgcaggacagatctattctggcacccctggcatgggacctgggtctgctgctgttgttcgtggggcagcactccctaatggcagcagagagagtgaaagcctggaccagccgttacttcggtgtcttgcagcggtccttgtacgtggcctgtacagctctggctctgcagctcgttatgagatattgggaaccaattcctaagggcccagtcctatgggaggccagagcagagccatgggccacctgggtgccccttctttgctttgtgttgcacgtgatttcctggctgttgatcttttctattctcttggtttttgattacgctgagctgatgggcctcaagcaggtatattaccacgttctgggtttgggagagcccttggctcttaagagccccagggccttgcggctcttctctcacctgcgccacccagtatgcgtcgagctcctgactgtgctatgggttgtaccaacactgggtacggacaggctccttctagcattcttactcacactgtatctagggctggcgcacggcctggaccaacaagacttaaggtacttgagggcacaacttcagaggaagctgcatctgttgtctagaccccaggatggcgaggcagaatag

SEQ ID NO: 171303 - DNA, 789 bp, Artificial Sequence
  derived and/or modified sequence
atggctcccgctctgctgctcatccccgctgctttggccagttttattcttgcattcgggactggggtggagttcgtgcgattcaccagtctacgcccactgctggggggaatccccgaatctgggggacctgacgccagacagggttggctggctgccttgcaggacaggagtatcctcgctcctctagcatgggacctggggctgctgctcctgtttgtaggccagcacagccttatggcagcagagcgggtgaaggcgtggacttcgcgttactttggggtattgcagcgaagcctgtacgtggcctgcaccgccctggctcttcagctggtgatgcgctattgggagccaatccccaaggggcctgtgttatgggaagcacgggctgagccatgggccacctgggtgcccctcctgtgctttgtgctgcatgtcattagctggctacttatcttcagtatcctcctggtgttcgattacgcagagttgatggggctcaaacaagtgtattaccatgtgctcggtctgggcgaacccctcgccctgaagtcccccagggctttgcggctgttctcccatttgcggcacccagtttgcgttgaattgctgaccgtgttgtgggtcgtgcccacacttggtaccgatcggctcttgctagcttttctcctgaccctgtatctgggactagcgcatggtctggaccagcaagatttgcgctacctgcgcgcacagcttcaacgaaaacttcatcttctctcaaggccccaagatggggaagctgagtag

SEQ ID NO: 171304 - DNA, 789 bp, Artificial Sequence
  derived and/or modified sequence
tgagagtcaggtcgtgaagcaacgggtgaaggcgacctttccagcaaactgggcactcagggtctggagttctggcggggtggtagggtcaggactgaaggcgctgaaaagggcggtgatcggtcaatcctcaatgccaggcagggttggttggccgcactgcaggatcggtctatcttggcacccctcgcctgggacctgggcctcctgctgttgttcgtcggccagcattctctgatggccgctgagagagtgaaagcttggaccagcaggtatttcggagtcctgcagcgaagtttgtatgttgcgtgtactgcactagcactgcaacttgtgatgaggtactgggagcccatccccaagggtcccgtgttatgggaagcccgagcagaaccttgggctacatgggtgccgctgctgtgtttcgtgttgcacgtgatctcttggctgctcattttctccattctattggtgttcgactatgccgagctaatgggactgaagcaggtatattatcacgtcctcggattgggagaaccgctcgccctcaagtccccacgcgctttacgcctattctcacacttaaggcatccagtgtgcgtagagttgctgactgtgctctgggtggtgccaacccttggcactgacagactgttattggccttccttctaaccctctatttaggactggcacacggtctcgaccaacaggatctgcggtacctgagggcccagttgcagagaaaactgcacctcctttcgagaccccaggacggagaggctgagtag

SEQ ID NO: 171305 - DNA, 789 bp, Artificial Sequence
  derived and/or modified sequence
tgagagtcagggagggaagctacgggggaaggtgatttatccagtaagttggggacacagggtctcgaattttggcggggtggaagggtgagaacggagggagctgaaaagggcggtgacaggagcattcttaacgctcggcagggttggctcgccgctcttcaagacagaagtattcttgcgccactggcttgggacttagggcttcttctcctcttcgtgggacaacatagcctgatggcagccgagagagtgaaggcatggacctcccgctattttggcgtgcttcagcggtcactgtacgtcgcttgtaccgctctcgccctgcagctggtgatgcggtactgggagcccataccaaagggcccagtgttgtgggaggccagagccgagccttgggcaacgtgggtgcctctgctctgctttgtcttacacgtgatcagctggctgttgatttttagtattctcctagtctttgactacgctgaactcatgggcctgaagcaggtttactatcacgtgctaggcctcggtgaacccctcgccctgaaatctccgagagcactgcggttgtttagtcatctgcgccacccggtgtgtgtggagcttttaaccgtgctctgggtcgtacccacactcggtactgaccggcttttactggcctttctgctgacgctctacttggggttggcccacggtttggaccagcaggacttgaggtatctgcgcgctcagttgcaaagaaaacttcacctgctgagccgtccacaggatggggaagccgagtag

SEQ ID NO: 171306 - DNA, 789 bp, Artificial Sequence
  derived and/or modified sequence
atggcgcctgctctgctacttataccggctgcacttgcttcgtttattcttgctttcggcacgggagtggagttcgtgaggtttacctcactcaggccactgctaggtggcattcccgaatccggcggacctgatgctcgccagggatggttggcagcactacaggatcgcagtatattagcaccactggcctgggatcttggtttgctcttactgttcgttggacaacactctcttatggcagcggaaagggttaaggcttggacttcccgttacttcggtgttctgcagagaagcttgtatgtggcgtgcaccgcattagcgctgcagctcgtcatgaggtactgggaacctatccccaagggacccgtgctttgggaggccagagcggaaccatgggccacctgggtcccattgctgtgtttcgtccttcacgttattagctggctccttatattttccatcctgctggtcttcgactacgccgagctaatgggcttgaagcaggtctactaccacgtcctaggtcttggggaaccacttgcacttaaaagcccacgagccctgcggctgttcagccatctgcgccacccagtttgcgtggaattgttgacggtgttgtgggttgtgcctacactcggaaccgaccggctgctgctcgccttcctactcaccctgtaccttgggctagcgcacgggctcgaccagcaggacctacggtatctgagagctcagctgcagcggaaactgcacctgctttctcgccctcaagacggcgaagctgaatag

SEQ ID NO: 171307 - DNA, 789 bp, Artificial Sequence
  derived and/or modified sequence
taagagtccgggagggaagccactggtgaaggagacctttcatcaaaacttggcacacagggactggagttctggagagggggtagggtgaggactgagggtgccgaaaaaggaggggatagatcaatccttaacgccaggcaggggtggctagctgctctgcaggaccgcagtatcttagccccattggcctgggacctaggtctactgctgttattcgttggacagcactcgctcatggcagctgagagggtgaaggcatggacttcacgttactttggtgttctgcagaggagcctttatgtggcgtgcacagctctagctctccaattagtcatgcggtattgggaaccaatacccaaaggaccagttttgtgggaagcaagggccgagccatgggccacctgggtccccctgctgtgctttgtgctccacgtgatcagttggctgctaattttttctatcctactcgtctttgattacgccgagttgatgggactgaagcaggtgtattaccacgtgcttgggctcggagagcccctcgcgctcaaatcgcctagggccttacggttatttagtcacttacggcatcccgtgtgtgtggaactccttacagttctatgggtcgtccccactttggggacagaccggctactcctcgctttcttgttgactctgtaccttggccttgcccatggcctcgaccagcaagaccttcgttatcttcgagctcagcttcagagaaagctgcacttactgagtcgaccacaggatggcgaagcagagtag

SEQ ID NO: 171308 - DNA, 789 bp, Artificial Sequence
  derived and/or modified sequence
taagaatccgggagggaagccactggggagggagatctgagctctaaattgggaactcaggggctagaattttggaggggcggaagagtccggacggagggcgctgaaaagggaggggacaggagcatcttaaacgctcgacagggctggcttgccgcactgcaggacaggagcatcctggcccctcttgcttgggacctgggacttttgctgctgttcgtggggcagcatagcctgatggccgctgaacgggtgaaggcatggacatctagatacttcggcgtactgcagaggagcctttacgtggcctgtaccgccctagctttgcagctggtgatgaggtattgggagcccatcccgaaagggcctgttctttgggaagcccgagcggagccttgggccacttgggtgccacttctgtgctttgtgttgcatgtgatatcttggctactgattttctctattcttctcgtgtttgactacgcggagctgatggggctcaagcaggtgtactatcacgtgctgggactgggagaacctctggccctgaagtcccctcgggctttgcgccttttcagccacctgagacatccggtgtgcgtggagctgctcactgttctttgggtggtgcctacactgggcacagacaggctgctgctcgctttcttgcttacactatacctggggctagcgcacggtttagatcagcaggatctccgttatctgagagcacaactccaacgaaagctccatctgcttagccgcccacaggacggcgaggcagagtag

SEQ ID NO: 171309 - DNA, 789 bp, Artificial Sequence
  derived and/or modified sequence
tgagagagtggcagggaggccactggagagggagacctaagcagcaaactgggcacacaggggctggaattctggcggggtggcagagtcagaacagaaggggctgagaaggggggtgatcgctctatcctcaatgcgaggcaggggtggctggccgcactgcaggatcgaagtatcctggcccctctcgcttgggacctgggattgttactgctatttgtggggcagcacagcctgatggccgcagagcgtgtgaaggcttggacatcacgatactttggcgtgctgcagagatcactttacgttgcctgtacagctcttgcccttcaattggtcatgagatattgggagccaattcctaagggtcccgttctgtgggaggctagggcagagccttgggccacttgggtgcctcttctctgtttcgtcctgcacgtaatatcttggttgctgatctttagtatacttttggtgtttgactatgccgagcttatgggactgaagcaagtgtattaccatgtgttaggactgggcgagcctctggctctgaaatcaccgagagccctacgcctcttcagtcatttaagacaccccgtgtgcgtcgaactgctgacagttctgtgggtggtgccgactctgggaacagacaggctattgctcgcattcttgctcactttgtacctgggccttgcccacgggctggatcagcaagacctacgatacctccgggctcaacttcaacgaaaactacacttgctcagtcgaccacaggatggggaagcagaatag

SEQ ID NO: 171310 - protein, 1075 aa, Artificial Sequence
  derived and/or modified sequence
MLKPQPLQQPSQPQQPPPTQQAVARRPPGGTSPPNGGLPGPLATSAAPPGPPAAASPCLGPVAAAGSGLRRGAEGILAPQPPPPQQHQERPGAAAIGSARGQSTGKGPPQSPVFEGVYNNSRMLHFLTAVVGSTCDVKVKNGTTYEGIFKTLSSKFELAVDAVHRKASEPAGGPRREDIVDTMVFKPSDVMLVHFRNVDFNYATKDKFTDSAIAMNSKVNGEHKEKVLQRWEGGDSNSDDYDLESDMSNGWDPNEMFKFNEENYGVKTTYDSSLSSYTVPLEKDNSEEFRQRELRAAQLAREIESSPQYRLRIAMENDDGRTEEEKHSAVQRQGSGRESPSLASREGKYIPLPQRVREGPRGGVRCSSSRGGRPGLSSLPPRGPHHLDNSSPGPGSEARGINGGPSRMSPKAQRPLRGAKTLSSPSNRPSGETSVPPPPAVGRMYPPRSPKSAAPAPISASCPEPPIGSAVPTSSASIPVTSSVSDPGVGSISPASPKISLAPTDVKELSTKEPGRTLEPQELARIAGKVPGLQNEQKRFQLEELRKFGAQFKLQPSSSPENSLDPFPPRILKEEPKGKEKEVDGLLTSEPMGSPVSSKTESVSDKEDKPPLAPSGGTEGPEQPPPPCPSQTGSPPVGLIKGEDKDEGPVAEQVKKSTLNPNAKEFNPTKPLLSVNKSTSTPTSPGPRTHSTPSIPVLTAGQSGLYSPQYISYIPQIHMGPAVQAPQMYPYPVSNSVPGQQGKYRGAKGSLPPQRSDQHQPASAPPMMQAAAAAGPPLVAATPYSSYIPYNPQQFPGQPAMMQPMAHYPSQPVFAPMLQSNPRMLTSGSHPQAIVSSSTPQYPSAEQPTPQALYATVHQSYPHHATQLHAHQPQPATTPTGSQPQSQHAAPSPVQHQAGQAPHLGSGQPQQNLYHPGALTGTPPSLPPGPSAQSPQSSFPQPAAVYAIHHQQLPHGFTNMAHVTQAHVQTGITAAPPPHPGAPHPPQVMLLHPPQSHGGPPQGAVPQSGVPALSASTPSPYPYIGHPQGEQPGQAPGFPGGADDRIREFSLAGGIWHGRAEGLQVGQDARVLGGE

SEQ ID NO: 171311 - DNA, 3228 bp, Artificial Sequence
  derived and/or modified sequence
atgctcaagccccagcctcttcagcagccctcacagccccagcaaccacctcccactcagcaggccgtagctagacgacctccaggcggcacctcgcctccaaacggtggactgccaggtcccctcgccacatcagctgccccacccggtccaccggccgcggcctctccctgccttggcccagtggcggcagctggctctggtctgcgacgaggggccgaggggatcctggcccctcagcctcctccccctcagcagcatcaagaaagaccgggagccgcagctattggttccgcgagaggacagtcaactgggaagggacccccacagtccccagtcttcgaaggggtctacaataactctagaatgcttcattttttaactgccgtggtcggaagcacatgcgacgtgaaggtgaaaaatggcacaacctacgagggaattttcaaaacactatcctccaaattcgagctcgcggtggacgccgtgcatagaaaagcttcggagcccgccggcggccccaggagggaagatatcgtggacaccatggtctttaagccctctgatgtgatgctggtgcacttcagaaacgtagactttaattatgccaccaaggataagtttaccgacagcgccattgccatgaactccaaagttaatggcgaacacaaagaaaaggtcctccaacgctgggagggcggagactccaattccgacgattacgacctggaatcggatatgagcaatgggtgggatccaaacgagatgtttaagttcaacgaggagaactacggcgtcaaaacaacatatgattcttcattgtcatcttacaccgtcccactcgagaaagataacagcgaggagtttcgccagcgagagttgcgcgcggcccagctcgctcgcgagatcgagtcatccccccagtaccggcttcgcatcgccatggagaacgacgatggccggactgaagaagaaaagcactccgccgtccagcgacaggggagcggccgcgagtctccaagtctcgcatctcgtgagggtaaatacattccactgccacagagggtccgggaagggcctcgtggcggggttaggtgcagctcttccagaggaggacgccccggcttgtcctctttaccacccagggggccacaccacctagacaactccagccccgggcccggttcagaggcgcgcggcatcaacggaggaccatctagaatgagtcccaaagctcaaagacctttgcggggggcgaagacgttatcctctccttctaacagaccaagtggtgagaccagtgttccccccccacctgctgtcgggcggatgtaccctcccaggtctcctaaatcagccgctccagcccctatctcagcttcatgccctgaaccaccaatcggctctgccgttcccacatcatctgcttcaatcccagttacctcctctgtgtcggaccccggcgttggttccataagtcctgcttcaccaaagatttctctggcaccgacagacgtgaaggagctctctacaaaggagcctggaaggacattagaaccacaagagcttgcccgcatagctggaaaagtgcctggcctccagaatgagcaaaagcgcttccagctggaggagctgcgcaagtttggggctcaatttaagctgcagccgtcttcctctcccgaaaacagcctcgacccatttcccccacggattctgaaagaagagcccaaaggcaaagagaaggaagtggatggtttactaacgagtgagcccatgggtagtccggtaagtagcaaaactgagtccgtgagtgataaggaagataagccccctctagcaccgtccggagggacggaaggacctgagcagcctccaccaccttgcccctcccagaccggatcacccccagtagggctgattaagggggaagataaggacgaaggccctgttgcagaacaagttaagaaaagcacactgaatccgaacgccaaagaatttaatccaacaaagcctctactctctgtgaacaagtccaccagtaccccaacgtctccaggacccagaacccattccacaccctctattcccgttctgacagcaggacagagcgggctatatagtcctcagtatatcagttatatcccgcagatacacatgggtcctgctgttcaggctcctcagatgtacccctatcccgtctccaactccgtgcccggccagcaagggaagtacaggggcgctaaaggctctttacctccacagcggtctgaccagcaccagcccgcgtccgcccccccaatgatgcaggccgcagctgctgctgggccacctctggtcgctgccaccccctattcaagctatataccttacaatccccaacagttccccgggcagcctgcaatgatgcagcctatggcacactacccatcacagcccgtttttgccccgatgttgcagagcaaccccaggatgctgacgagcggctctcatccccaagcaatcgtctcaagctcaaccccccagtatccatcagcagagcagccaacacctcaggccctgtacgcaacagttcaccagtcctatccgcatcatgcaacgcagctacatgctcatcagccccagccagcgactaccccgactgggtcccagcctcagtctcagcacgctgccccgagtcccgtccaacatcaggctggacaggcacctcatttagggtcaggtcaaccccagcagaacctctatcatcccggggctctgacgggaacccctccatcactgccgcccggcccaagcgcccagtctccgcagtcctcatttccacagccggccgcagtatacgctatacaccatcagcagctgcctcacgggttcaccaacatggctcatgtgactcaggcccatgtccagactggtattaccgcagccccgcctccccaccctggcgccccgcaccccccccaggtgatgctgctgcaccccccccagtcccatggaggacctccacaaggggccgttccccagagtggcgtgccagctctgtcagcatctacccccagcccttatccctacattgggcatccccaaggagagcagcccggccaggccccaggttttcctgggggcgccgacgatagaattcgcgaatttagtctagcaggagggatttggcatggccgcgctgagggacttcaggtgggccaagacgctagggtgttagggggtgaatag

SEQ ID NO: 171312 - DNA, 3228 bp, Artificial Sequence
  derived and/or modified sequence
atgctgaagccccagcccctgcagcagcccagccagccccagcagcccccacccacccagcaggccgtggcccggcggcccccaggcggcaccagccccccaaatggaggcctgcccggccccctggccaccagcgctgcccctcctggccccccagctgctgccagcccctgcctgggccctgtggccgctgctggcagcggcctgcggagaggagctgagggcatcctggccccccagcccccaccaccccagcagcaccaggagaggcctggagctgctgccatcggcagcgcccggggccagagcacaggcaagggccccccccagagccctgtgtttgagggcgtgtacaacaacagcaggatgctgcacttcctgacagctgtggtgggcagcacctgtgatgtgaaggtgaagaatggcaccacctatgagggcatcttcaagaccctgagcagcaagtttgagctggccgtggatgctgtgcacaggaaggccagcgagcctgctgggggccccaggagagaagatattgtggacaccatggtgttcaagcccagtgatgtgatgctggtgcacttcagaaatgtggacttcaactatgccaccaaggacaagttcacagattctgccatcgccatgaacagcaaggtgaatggagagcacaaggagaaggtgctgcagcgctgggagggcggggacagcaacagtgatgattatgacctggagagtgacatgagcaatggctgggaccccaatgagatgttcaagttcaatgaggagaactacggcgtgaagaccacctatgacagcagcctgagcagctacacagtgcccctggagaaggacaacagcgaggagttccggcagcgggagctgcgggccgcccagctggcccgggagattgagagcagcccccagtaccgcctgagaattgccatggagaatgatgatggccgcacagaggaggagaagcacagcgctgtgcagaggcagggcagcggccgggagagccccagcctggccagccgggagggcaagtacatccccctgccccagagggtgcgggagggcccccggggcggcgtgcgctgcagcagcagcagaggaggccggcccggcctgagcagcctgcccccccggggcccccaccacctggacaacagcagccctggccctggcagcgaggcccggggcatcaatggaggccccagcaggatgagccccaaggcccagaggcccctgcggggggccaagaccctgagcagccccagcaaccggcccagcggggagacctctgtgcccccacctcctgctgtgggccgcatgtacccacccaggagccccaagtctgctgccccagcccccatcagcgccagctgcccagagccccccatcggcagcgctgtgcccaccagcagcgccagcatccctgtgaccagctctgtgtctgaccccggggtgggcagcatcagccctgccagccccaagatcagcctggcccccacagatgtgaaggagctgagcaccaaggagcccggccgcaccctggagccccaggagctggccagaattgctgggaaggtgcccggcctgcagaatgagcagaagcgcttccagctggaggagctgaggaagtttggagcccagttcaagctgcagcccagcagcagccctgagaacagcctggaccccttccccccacgcatcctgaaggaggagcccaagggcaaggagaaggaggtggatggcctgctgaccagcgagcccatgggcagccctgtgagcagcaagacagagagcgtgtctgacaaggaggacaagccacccctggcccccagcggcggcacagagggccctgagcagcccccaccaccctgccccagccagacaggcagcccccctgtgggcctcatcaagggggaggacaaggatgagggccctgtggccgagcaggtgaagaagagcaccctgaaccccaatgccaaggagttcaaccccaccaagcccctgctgtctgtgaacaagagcaccagcacccccaccagccctggccccaggacccacagcacccccagcatccctgtgctgacagctggccagagcggcctgtacagcccccagtacatctcctacatcccccagatccacatgggccctgctgtgcaggccccccagatgtacccctaccctgtgagcaacagcgtgcccggccagcagggcaagtacagaggagccaagggcagcctgcccccccagaggagtgaccagcaccagcctgccagcgccccacccatgatgcaggccgctgctgctgctggcccccccctggtggccgccaccccctacagcagctacatcccctacaacccccagcagtttcctggccagcctgccatgatgcagcccatggcccactaccccagccagcctgtgtttgcccccatgctgcagagcaaccccaggatgctgaccagcggcagccacccccaggccatcgtgagcagcagcaccccccagtaccccagcgctgagcagcccaccccccaggccctgtatgccaccgtgcaccagagctacccccaccacgccacccagctgcacgcccaccagccccagcctgccaccacccccaccggcagccagccccagagccagcacgccgcccccagccctgtgcagcaccaggccggccaggccccccacctgggcagcggccagccccagcagaacctgtaccaccctggggccctgaccggcaccccacccagcctgcccccaggccccagcgcccagagcccccagagcagcttcccccagcctgctgctgtgtatgccatccaccaccagcagctgccccacggcttcaccaacatggcccacgtgacccaggcccacgtgcagacaggcatcacagctgcccccccaccccaccctggggccccccaccccccccaggtgatgctgctgcaccccccccagagccatggaggccccccccagggcgctgtgccccagagcggcgtgcctgccctgagcgccagcacccccagcccctacccctacatcggccacccccagggcgagcagcccggccaggcccctggcttccctggaggagcagatgaccgcatccgggagttcagcctggccggcggcatctggcacggccgggcagagggcctgcaggtgggccaggatgcccgggtgctgggcggggagtag

SEQ ID NO: 171313 - DNA, 3228 bp, Artificial Sequence
  derived and/or modified sequence
atgctgaagccccagcccctgcagcagcccagccagccccagcagccccctccaacccaacaggcagttgcccgtcggccccctggaggaactagtccaccaaatgggggcttgccaggcccactagccaccagcgctgccccacccggcccgcccgctgccgcatctccttgcctggggcccgtcgccgccgctggcagtggtctcagacgcggagcggagggaatcctggctccccagccccccccgccacagcaacatcaggaacgacctggtgctgcagccatcggatctgcccgaggccagtcgactgggaagggaccgccacagtcacccgttttcgagggcgtgtacaataacagtcgcatgctccatttcctgacagcagtagtgggttccacatgcgacgtgaaagtgaaaaatgggaccacgtacgagggaatctttaaaaccctgtcctcaaagttcgagcttgccgtagacgctgtgcaccggaaggcgtccgagcctgcaggggggccccgtcgggaagatatagtggacactatggtttttaagcccagcgatgtcatgctggtccactttagaaacgttgacttcaattacgcaacgaaggataaattcaccgactccgcaatcgcaatgaattccaaggtcaatggcgaacataaagaaaaagtgctgcagaggtgggaggggggggacagcaatagcgatgattacgatctggagtccgatatgtctaatggatgggaccccaatgagatgttcaaattcaacgaagaaaactacggcgtcaagaccacatatgattctagcctgtctagctatactgtgcctctagaaaaagacaactctgaggaatttcgccaacgagaactacgcgctgctcagctggcaagagagatagagagctccccgcagtacaggttgcgtatcgcaatggagaacgacgacggacgcactgaggaggagaaacatagcgccgtacagagacagggatctggccgagagagcccatccctggcatcccgcgaaggcaaatacattcctctgccccaaagagtgcgggagggtcctagaggcggggtgagatgctcatcttcacggggcggaagaccaggcctttcttcattacccccaagaggtccccatcaccttgacaacagttctccaggaccaggctctgaggcacgaggcattaatggcggcccaagtcgaatgtctccaaaggcccagaggccgctgcggggcgcaaagaccttaagtagcccctcaaacaggccaagcggcgaaacaagcgtcccaccccctcccgccgtaggcagaatgtatccaccacggtccccaaagtctgctgcccctgcccctatcagcgcctcttgcccagagcctcccattgggtctgctgtgcccacaagttctgcttctattccagtcaccagctctgtgtctgatccgggtgttgggtctatctctcccgccagtcccaagattagtctggcccctaccgatgttaaggaattgagtaccaaagaacccggaagaacactcgaaccacaggagctcgctcgcattgcgggtaaggtccccggccttcagaatgagcagaagcgctttcagctggaggaactgagaaagttcggagcccagtttaagcttcagccctccagcagcccggagaattcacttgatccctttcccccacgcatactcaaagaagagcccaaaggcaaggagaaggaggtcgacggccttcttacatccgaaccaatgggatccccagtgtcttcaaagactgagagcgtcagcgacaaagaagataaaccacctttggctcccagcggtgggaccgagggccctgaacagccgcctcccccttgcccctcccagacagggagccctcctgtcgggctaattaaaggggaggacaaggatgaaggacccgtggcagagcaagtgaagaaatctactctgaatccaaacgctaaggagttcaatcctaccaagcctctgctatccgtaaataaaagtacatctaccccaacaagccccgggccacgcacccactcaacacctagcatccccgtgctcactgcagggcaatcagggctgtactctccacaatatattagctacatcccgcagatccacatggggcccgcagtccaagccccacagatgtatccatatccagtctctaacagtgtacccgggcagcaggggaagtatcggggcgcaaaaggcagtctccccccccaaaggtctgatcaacatcaacccgcttcagccccaccaatgatgcaggcagcagccgctgctgggccacccctggttgccgcgacgccctactcatcctacattccgtacaatccccagcaattccccgggcagcctgcaatgatgcagcctatggctcactacccttcccaacccgtgttcgcgcctatgctgcagagcaatcctcggatgctgacttccggaagccatccacaggctatcgtgtcgagttcaacacctcagtaccccagcgccgaacagcccaccccccaggccctctacgcgactgtgcaccagtcctacccgcatcatgccacacagctgcatgcccaccaaccgcagcctgccactacacccactggctctcagccccaaagtcagcatgcagcccccagccccgtccagcaccaggccggtcaagcccctcacctgggttccggccagccccaacaaaacctctatcaccccggagctctcacggggacgccaccatctctcccccctggccccagtgcacagtctccccagagctcgttcccacaaccagctgccgtgtacgcaattcatcatcagcagctgcctcacggcttcaccaacatggcccatgttacccaggcccatgtgcagactggaataaccgccgcgcctcccccccacccaggcgcaccccacccaccgcaggtcatgctgctgcatccgccacagtcccatggtggtccccctcagggtgcggttccccagagcggagtacctgctttatccgcctccaccccctccccctacccctatatcggccacccgcagggggagcagccaggccaggcacccggcttccccggaggagctgacgatcggattcgggagttctccctggcaggcggcatatggcacggtcgcgcggaaggcctgcaggttggccaagacgctcgcgtcctgggcggagagtag

SEQ ID NO: 171314 - DNA, 3228 bp, Artificial Sequence
  derived and/or modified sequence
atgctcaagccacagcccctccaacagcctagccagccgcagcaacctccccctacccaacaggccgtggcaaggcggcctcctggaggcactagtccacctaatggaggattgcccggaccactggctacctcagccgctcctcctgggcctcctgccgctgcatcgccctgcctcggaccagttgcagccgctgggagtggcctgcggaggggagccgaaggcattttagcccctcagcctccccctcctcaacagcatcaggagcgccctggcgctgcagcgattggtagcgccagaggtcagagcaccggcaagggcccaccacagagtcccgtgttcgagggtgtttacaacaattcacgcatgttacatttcctgacagccgtggtgggatcaacctgcgatgtgaaggtcaagaacggaacaacctacgagggcatcttcaagaccctctctagtaaatttgaattggccgtggatgcagtgcaccgtaaagccagcgaaccggcaggtggacctcggcgagaggatattgtggacactatggtgttcaagccctccgacgtaatgctagtgcattttaggaatgttgattttaactacgctaccaaggataagttcaccgactctgccatagctatgaatagtaaggttaatggcgagcacaaggaaaaagtccttcaacgctgggagggtggcgacagtaacagcgacgattacgatctggagtctgatatgagcaatggctgggacccgaacgagatgtttaagtttaacgaagaaaactacggtgtgaaaaccacctacgatagcagcctgtcgagctacacggtaccgctcgaaaaggacaattctgaggagttcagacagagagaactccgagcagcacagttggccagggagatcgaaagttccccacaataccgcctccgaattgctatggagaatgatgacggacggaccgaggaggagaagcactccgcagttcagcggcagggctcgggcagagaatccccctcactggcctcgagggaagggaagtatattccccttccccagagagtccgggaagggccacgtgggggagtccggtgctccagcagccgcggtgggaggcccggtctgtcttcgttacccccacgtggtcctcatcatctcgacaactccagcccaggacccggttccgaggctcgtggaatcaatggcggaccctcccgcatgagtcctaaggcacagaggccgcttagaggggctaagactctgtcaagcccatccaataggccttctggagagacctcggtgcctcctccgcctgctgtaggacgcatgtacccccctcgctcccctaagagcgccgctcctgccccaatttctgcaagctgcccggagcctccaatcggatccgctgtccccactagttctgcctccattccagttacgagcagcgtgtcggatccgggtgtaggatccatttcaccggcttcaccaaagatttctctcgcccctaccgacgtcaaagaactgtctaccaaggaaccaggacgaacgcttgaaccccaggagcttgcccgtattgcaggcaaggtgcctggtctgcagaatgagcagaaaagatttcaactggaggagctacgcaagttcggcgctcaatttaagcttcaaccatcttcaagtcccgagaacagtctcgaccccttccctccacggatattgaaggaggaaccaaagggtaaagaaaaggaagtggacggactgctgacctcagaaccaatgggctctccagtcagttcaaaaaccgagagcgtgagcgacaaggaagacaaaccaccactggcacctagcggaggcactgaggggccagaacagcctcctccaccgtgccccagtcagactggctccccaccggttgggctgattaagggggaggataaggatgagggccctgtagccgagcaggtcaaaaaatctactttgaatccaaacgcaaaagaattcaacccgaccaaacctctgctgagcgtgaataagtcaacatcaacccccacatcacccggtcctcgaacccacagcacaccgagcatcccagtgcttaccgcagggcagtccgggctctactctccacagtacatcagctacatcccacagattcacatgggccctgccgtgcaggctcctcagatgtatccttacccggtgtccaatagcgtccccggtcagcagggtaagtaccgtggcgctaaggggagcctcccaccacagcggagtgaccagcaccaacctgctagcgccccaccaatgatgcaggcagcggctgcagctggcccacctttggtggcagccaccccatactcgtcctacatcccatataacccccagcagttccccggacagcccgctatgatgcagcccatggcccactacccaagccaacccgtgttcgcccctatgttacaaagcaaccctcgcatgctgacctctggaagtcaccctcaggccatcgtgtcgagtagcaccccccagtaccccagcgccgagcaaccgacgccccaagctctgtatgcgacggtgcaccagagttatccacaccatgctactcagctgcatgctcaccagcctcagccggctacgactccaactggcagccagccccagtcccagcatgccgcacctagccctgtccagcaccaggcagggcaggcaccgcacctgggatcagggcaaccacaacaaaatctgtaccatcctggcgctcttactggcactccgccatccttgccgcctgggccttccgctcagtcacctcagagcagtttccctcagccagcagcagtttacgcaattcatcaccagcagttgccccacgggtttacaaatatggctcacgtcacccaggcccatgtccagaccgggattaccgcagccccaccgccacatccaggggcaccacacccgcctcaggtgatgctactccacccccctcagagccacggaggccctccccagggtgccgtgcctcaatctggagtgcctgcactgtctgcgtccacaccatccccatacccatatataggccatccgcagggtgaacagccaggtcaggcgccaggttttcccggaggcgctgacgatcgcatccgggagtttagccttgcagggggaatctggcacggtcgggcagagggattacaggttggccaggacgccagggtcctagggggtgaatag

SEQ ID NO: 171315 - DNA, 4367 bp, Artificial Sequence
  derived and/or modified sequence
ccgcggtcttctctctccacccccgacaccgcggggctccccccgcccgcccacggcgggccccggctgcccgatccccctcgcttcccgcgctctccagcggggccccagccccggccccctctctccctcccttctctctaattccccttccggacgctgccatcatgttgaagcctcagccgctacaacagccctcccagccccagcagccgccccccacgcaacaggccgtggcccgtcggccccccgggggcaccagccctcccaacggcggcctcccggggccgctggccacctctgcggctcctcccgggcctccagcggccgcctccccctgcctggggcctgtggccgctgccgggagcgggctccgccggggagccgaaggcatcttggcgccgcagccgccgccgccgcagcaacaccaggagaggccgggggcagccgccatcggcagcgccaggggacagagcacaggaaagggacccccacagtcacctgtgtttgaaggcgtctacaacaattccagaatgctgcatttccttacagctgttgtgggctccacttgtgatgtaaaggtgaaaaatggtaccacttatgagggtatcttcaagacgctaagctcaaagtttgaactagccgtggatgctgtgcaccggaaagcatctgagccagcaggtggccctcgtcgggaggacattgtggacaccatggtgtttaagccaagtgatgtcatgcttgttcacttccgaaatgttgacttcaactatgctactaaagacaagttcaccgattcagccattgccatgaactcgaaagtgaatggggaacacaaagagaaggtgcttcagcgctgggaggggggtgacagcaacagcgacgactatgacctcgagtctgacatgtccaatggatgggaccccaatgaaatgttcaagttcaatgaggagaactacggtgtgaagactacctatgatagcagtctttcttcttatacggtgcccttagaaaaggacaactcagaagagtttcgtcagcgagagctgcgtgcggcccagttggctcgagagattgaatcaagcccccagtaccgcctacggatcgccatggagaacgacgatgggcgcactgaagaggagaagcacagtgcagtccagcggcagggctcagggcgggagagccccagcttggcatccagggaggggaagtatatccctctgcctcaacgagtccgggaaggtccccggggaggagttcgatgcagcagctctcggggcggtcggcctggccttagctctttgccacctcgtggccctcaccatctggacaacagcagccctggcccaggttctgaggcccgtggtatcaatggaggcccttcccgcatgtccccaaaggcacaacggcctctgagaggtgccaagactctgtcttcgcccagtaataggccttctggagaaacttctgttccacctcctcctgcagtgggccggatgtatcccccgcgttctcccaagtctgctgcccctgccccaatctcagcttcctgtccagagcctcccatcggctcggcagtgccaacctcttcagcctccatccctgtgacctcatcagtctcagatcctggagtgggctccatttctccagcttctccaaagatctccctggcccccacagatgtaaaagaactctctaccaaggaacctgggagaactctggagccccaggagctggctcggatagctgggaaagtccctggtcttcagaatgaacagaaacgattccaactggaagaactgagaaagtttggggcccagtttaagcttcagcccagtagctcccctgagaacagcctggatccttttcctccccggatcttaaaggaggagcccaaaggaaaggagaaagaggttgatggtctgttgacttcagagcccatggggtctcccgtctcctccaagacagagtccgtatcggataaggaggacaaaccacccctggcaccatcaggaggcactgaggggccagagcagcccccaccaccttgtccaagccaaactggcagccccccggtgggcctcatcaagggagaagacaaagatgagggccctgttgctgaacaagtaaagaaatcaacgttgaaccctaatgctaaggagttcaatcctacaaagcctctgctgtctgtgaataaatccaccagtaccccaacttctccggggccccggactcattcaactccctccatcccggtgctgacagcaggccagagtgggctatacagcccccagtacatctcctacatacctcagatccacatgggaccagctgtgcaggcacctcagatgtatccatatcctgtatccaattcagtgcctgggcagcagggcaagtaccggggagcaaaaggctcccttcctccgcagcgctcggaccaacaccagccagcctcagccccgccgatgatgcaggccgccgcggctgctggcccgcctctggtggctgccacgccctattcttcctacatcccctacaaccctcagcagttcccaggccagccagccatgatgcagcccatggcccactacccctcacagccggtgtttgcccccatgcttcagagcaacccacgcatgctgacgtcgggcagccatccccaggccatcgtgtcatcctctacccctcagtacccttctgcagagcagcctaccccccaagccctttatgccactgttcaccagtcctacccacaccatgccacacagctccatgcccaccagccgcagccggctaccacgcctactggaagccagccgcagtcccagcatgcggcccccagtcctgtccagcatcaggcggggcaggccccacacttgggcagtggacagccacagcagaatctgtaccacccaggggccctgacaggcacgccgccctctctgccaccgggaccttctgcccagtcccctcagagcagcttcccccagccagccgctgtgtatgccatccaccaccagcagctgccccacggcttcaccaacatggcccatgttacccaggcccatgtccaaactggaatcacagcagccccgccccctcaccctggggctccccacccgccccaggtgatgctgctgcacccaccccagagtcatggggggcccccccaaggcgcggtgccccagagtggggtgcctgcactctcagcttccacaccctcaccctacccctacatcggacacccccaaggtgagcagcctggccaggcgcctggatttccaggaggagccgatgacaggattcgtgagttctcattagctgggggaatttggcatggaagagctgaggggctgcaggtggggcaggatgcacgggttctgggtggggagtgaggggtcttggaggcagggctgtcccacagggcgcccgccgacctgcacctgtctgtgaagtatgtagggtgggcagaagccacagtcgccgccgccaggggcttgctcctggctctgtcctttgcttccctccgtcctcgctcagttgtgatccagcagcccccctccccactgcctccccagctctcagtgaccccgactgtctcctgacttagccgaggtaaggtcagtgcagcagacagggccagactggggtgtggggggctgagctgggcacatgagtgagggctctggcttactgggaaacagcgattgacctgtgcttctgacagcccccgagacaccttgaggaggccgctccttcccagacacacccccacgcccccactggacggcattggaggaagggacagctgcttgggttctaatgctcctgctctcttctctttcccctccaaccagttcaatctcatccctcccagcagctccccttccaccccccggggaactgaagattgtcctggccgcgacctgagacctccatgagtggagggaagagtgatctatgtctcttcccccagcagctcggaccactcccagccccccatccccccgttccccaggggagctggggaattcctgccaagcaccttgaatgggaggggcctcacagagggcagggccagggtccagcaggggtggggggttcctgctctgcccctgcccgtccccacccagtcttgccctcccatcctctcatctattcccccgctggagacggaagatcttttattttctattatttataacttcagacttgggccccctgttctttctttcccattaacttgagtgacctgtgtgagagacagacagatgccccacgaggatggctggacaaggacttttactttttattacataaaaatattaaaaaataaataaaaaaaataaaattttaaactaacttaa

SEQ ID NO: 171316 - DNA, 3228 bp, Artificial Sequence
  derived and/or modified sequence
atgctgaagccccagcccctgcagcagcccagccagccccagcagcccccccccacccagcaggccgtggccagaagaccccccggcggcaccagcccccccaacggcggcctgcccggccccctggccaccagcgccgccccccccggcccccccgccgccgccagcccctgcctgggccccgtggccgccgccggcagcggcctgagaagaggcgccgagggcatcctggccccccagcccccccccccccagcagcaccaggagagacccggcgccgccgccatcggcagcgccagaggccagagcaccggcaagggccccccccagagccccgtgttcgagggcgtgtacaacaacagcagaatgctgcacttcctgaccgccgtggtgggcagcacctgcgacgtgaaggtgaagaacggcaccacctacgagggcatcttcaagaccctgagcagcaagttcgagctggccgtggacgccgtgcacagaaaggccagcgagcccgccggcggccccagaagagaggacatcgtggacaccatggtgttcaagcccagcgacgtgatgctggtgcacttcagaaacgtggacttcaactacgccaccaaggacaagttcaccgacagcgccatcgccatgaacagcaaggtgaacggcgagcacaaggagaaggtgctgcagagatgggagggcggcgacagcaacagcgacgactacgacctggagagcgacatgagcaacggctgggaccccaacgagatgttcaagttcaacgaggagaactacggcgtgaagaccacctacgacagcagcctgagcagctacaccgtgcccctggagaaggacaacagcgaggagttcagacagagagagctgagagccgcccagctggccagagagatcgagagcagcccccagtacagactgagaatcgccatggagaacgacgacggcagaaccgaggaggagaagcacagcgccgtgcagagacagggcagcggcagagagagccccagcctggccagcagagagggcaagtacatccccctgccccagagagtgagagagggccccagaggcggcgtgagatgcagcagcagcagaggcggcagacccggcctgagcagcctgccccccagaggcccccaccacctggacaacagcagccccggccccggcagcgaggccagaggcatcaacggcggccccagcagaatgagccccaaggcccagagacccctgagaggcgccaagaccctgagcagccccagcaacagacccagcggcgagaccagcgtgccccccccccccgccgtgggcagaatgtacccccccagaagccccaagagcgccgcccccgcccccatcagcgccagctgccccgagccccccatcggcagcgccgtgcccaccagcagcgccagcatccccgtgaccagcagcgtgagcgaccccggcgtgggcagcatcagccccgccagccccaagatcagcctggcccccaccgacgtgaaggagctgagcaccaaggagcccggcagaaccctggagccccaggagctggccagaatcgccggcaaggtgcccggcctgcagaacgagcagaagagattccagctggaggagctgagaaagttcggcgcccagttcaagctgcagcccagcagcagccccgagaacagcctggaccccttcccccccagaatcctgaaggaggagcccaagggcaaggagaaggaggtggacggcctgctgaccagcgagcccatgggcagccccgtgagcagcaagaccgagagcgtgagcgacaaggaggacaagccccccctggcccccagcggcggcaccgagggccccgagcagcccccccccccctgccccagccagaccggcagcccccccgtgggcctgatcaagggcgaggacaaggacgagggccccgtggccgagcaggtgaagaagagcaccctgaaccccaacgccaaggagttcaaccccaccaagcccctgctgagcgtgaacaagagcaccagcacccccaccagccccggccccagaacccacagcacccccagcatccccgtgctgaccgccggccagagcggcctgtacagcccccagtacatcagctacatcccccagatccacatgggccccgccgtgcaggccccccagatgtacccctaccccgtgagcaacagcgtgcccggccagcagggcaagtacagaggcgccaagggcagcctgcccccccagagaagcgaccagcaccagcccgccagcgccccccccatgatgcaggccgccgccgccgccggcccccccctggtggccgccaccccctacagcagctacatcccctacaacccccagcagttccccggccagcccgccatgatgcagcccatggcccactaccccagccagcccgtgttcgcccccatgctgcagagcaaccccagaatgctgaccagcggcagccacccccaggccatcgtgagcagcagcaccccccagtaccccagcgccgagcagcccaccccccaggccctgtacgccaccgtgcaccagagctacccccaccacgccacccagctgcacgcccaccagccccagcccgccaccacccccaccggcagccagccccagagccagcacgccgcccccagccccgtgcagcaccaggccggccaggccccccacctgggcagcggccagccccagcagaacctgtaccaccccggcgccctgaccggcaccccccccagcctgccccccggccccagcgcccagagcccccagagcagcttcccccagcccgccgccgtgtacgccatccaccaccagcagctgccccacggcttcaccaacatggcccacgtgacccaggcccacgtgcagaccggcatcaccgccgccccccccccccaccccggcgccccccaccccccccaggtgatgctgctgcaccccccccagagccacggcggccccccccagggcgccgtgccccagagcggcgtgcccgccctgagcgccagcacccccagcccctacccctacatcggccacccccagggcgagcagcccggccaggcccccggcttccccggcggcgccgacgacagaatcagagagttcagcctggccggcggcatctggcacggcagagccgagggcctgcaggtgggccaggacgccagagtgctgggcggcgagtag

SEQ ID NO: 171317 - protein, 593 aa, Artificial Sequence
  derived and/or modified sequence
METPPLPPACTKQGHQKPLDSKDDNTEKHCPVTVNPWHMKKAFKVMNELRSQNLLCDVTIVAEDMEISAHRVVLAACSPYFHAMFTGEMSESRAKRVRIKEVDGWTLRMLIDYVYTAEIQVTEENVQVLLPAAGLLQLQDVKKTCCEFLESQLHPVNCLGIRAFADMHACTDLLNKANTYAEQHFADVVLSEEFLNLGIEQVCSLISSDKLTISSEEKVFEAVIAWVNHDKDVRQEFMARLMEHVRLPLLPREYLVQRVEEEALVKNSSACKDYLIEAMKYHLLPTEQRILMKSVRTRLRTPMNLPKLMVVVGGQAPKAIRSVECYDFKEERWHQVAELPSRRCRAGMVYMAGLVFAVGGFNGSLRVRTVDSYDPVKDQWTSVANMRDRRSTLGAAVLNGLLYAVGGFDGSTGLSSVEAYNIKSNEWFHVAPMNTRRSSVGVGVVGGLLYAVGGYDGASRQCLSTVECYNATTNEWTYIAEMSTRRSGAGVGVLNNLLYAVGGHDGPLVRKSVEVYDPTTNAWRQVADMNMCRRNAGVCAVNGLLYVVGGDDGSCNLASVEYYNPTTDKWTVVSSCMSTGRSYAGVTVIDKPL

SEQ ID NO: 171318 - protein, 505 aa, Artificial Sequence
  derived and/or modified sequence
MSESRAKRVRIKEVDGWTLRMLIDYVYTAEIQVTEENVQVLLPAAGLLQLQDVKKTCCEFLESQLHPVNCLGIRAFADMHACTDLLNKANTYAEQHFADVVLSEEFLNLGIEQVCSLISSDKLTISSEEKVFEAVIAWVNHDKDVRQEFMARLMEHVRLPLLPREYLVQRVEEEALVKNSSACKDYLIEAMKYHLLPTEQRILMKSVRTRLRTPMNLPKLMVVVGGQAPKAIRSVECYDFKEERWHQVAELPSRRCRAGMVYMAGLVFAVGGFNGSLRVRTVDSYDPVKDQWTSVANMRDRRSTLGAAVLNGLLYAVGGFDGSTGLSSVEAYNIKSNEWFHVAPMNTRRSSVGVGVVGGLLYAVGGYDGASRQCLSTVECYNATTNEWTYIAEMSTRRSGAGVGVLNNLLYAVGGHDGPLVRKSVEVYDPTTNAWRQVADMNMCRRNAGVCAVNGLLYVVGGDDGSCNLASVEYYNPTTDKWTVVSSCMSTGRSYAGVTVIDKPL

SEQ ID NO: 171319 - DNA, 1782 bp, Artificial Sequence
  derived and/or modified sequence
atggagaccccccccctgccccccgcctgcaccaagcagggccaccagaagcccctggacagcaaggacgacaacaccgagaagcactgccccgtgaccgtgaacccctggcacatgaagaaggccttcaaggtgatgaacgagctgagaagccagaacctgctgtgcgacgtgaccatcgtggccgaggacatggagatcagcgcccacagagtggtgctggccgcctgcagcccctacttccacgccatgttcaccggcgagatgagcgagagcagagccaagagagtgagaatcaaggaggtggacggctggaccctgagaatgctgatcgactacgtgtacaccgccgagatccaggtgaccgaggagaacgtgcaggtgctgctgcccgccgccggcctgctgcagctgcaggacgtgaagaagacctgctgcgagttcctggagagccagctgcaccccgtgaactgcctgggcatcagagccttcgccgacatgcacgcctgcaccgacctgctgaacaaggccaacacctacgccgagcagcacttcgccgacgtggtgctgagcgaggagttcctgaacctgggcatcgagcaggtgtgcagcctgatcagcagcgacaagctgaccatcagcagcgaggagaaggtgttcgaggccgtgatcgcctgggtgaaccacgacaaggacgtgagacaggagttcatggccagactgatggagcacgtgagactgcccctgctgcccagagagtacctggtgcagagagtggaggaggaggccctggtgaagaacagcagcgcctgcaaggactacctgatcgaggccatgaagtaccacctgctgcccaccgagcagagaatcctgatgaagagcgtgagaaccagactgagaacccccatgaacctgcccaagctgatggtggtggtgggcggccaggcccccaaggccatcagaagcgtggagtgctacgacttcaaggaggagagatggcaccaggtggccgagctgcccagcagaagatgcagagccggcatggtgtacatggccggcctggtgttcgccgtgggcggcttcaacggcagcctgagagtgagaaccgtggacagctacgaccccgtgaaggaccagtggaccagcgtggccaacatgagagacagaagaagcaccctgggcgccgccgtgctgaacggcctgctgtacgccgtgggcggcttcgacggcagcaccggcctgagcagcgtggaggcctacaacatcaagagcaacgagtggttccacgtggcccccatgaacaccagaagaagcagcgtgggcgtgggcgtggtgggcggcctgctgtacgccgtgggcggctacgacggcgccagcagacagtgcctgagcaccgtggagtgctacaacgccaccaccaacgagtggacctacatcgccgagatgagcaccagaagaagcggcgccggcgtgggcgtgctgaacaacctgctgtacgccgtgggcggccacgacggccccctggtgagaaagagcgtggaggtgtacgaccccaccaccaacgcctggagacaggtggccgacatgaacatgtgcagaagaaacgccggcgtgtgcgccgtgaacggcctgctgtacgtggtgggcggcgacgacggcagctgcaacctggccagcgtggagtactacaaccccaccaccgacaagtggaccgtggtgagcagctgcatgagcaccggcagaagctacgccggcgtgaccgtgatcgacaagcccctgtag

SEQ ID NO: 171320 - DNA, 1782 bp, Artificial Sequence
  derived and/or modified sequence
atggaaaccccacccctgcctccagcctgcacaaagcaaggacaccaaaaacccctagactctaaagacgacaataccgagaaacattgccctgtgacagtcaacccttggcatatgaaaaaggctttcaaggtgatgaatgagctgcgttctcaaaacctgttgtgcgacgtgacgattgtggccgaggacatggaaatttccgcccacagggtagtgttagctgcttgcagtccttacttccatgctatgttcactggggaaatgtctgagagcagggccaaacgtgtcaggattaaagaagttgatggctggacgttgagaatgctaatcgattacgtgtataccgccgagatacaagtgacagaggaaaacgtgcaggttctgctgcctgccgcaggactgctccaactccaggatgtaaaaaagacatgctgcgagtttcttgaatcccaattacatcccgtgaactgcctcggaattcgggccttcgccgacatgcacgcttgcaccgatctcctaaataaggccaacacctacgcagagcaacattttgcagacgttgttctgtcagaagaattccttaacctgggcatagaacaggtctgttctttaattagctcagataaactcacaatatccagcgaggagaaggtattcgaagccgtgatcgcatgggtgaatcacgacaaggacgtacggcaagagttcatggcaaggctaatggagcacgtccggctgcctctcttacccagggaatacttagtgcagagggtggaggaggaggccctggtgaaaaatagttccgcatgtaaagattatcttattgaagccatgaagtaccacttactccccaccgagcagcggattctgatgaagtccgtgaggactcggcttcgcacacctatgaacctgcctaagctaatggtggtggtcggcggacaggccccaaaagccataagatcagtggaatgttatgatttcaaggaagaacgctggcaccaggtagctgaactaccttccaggcgatgtcgggctggcatggtgtatatggccggcttggtttttgctgtcggcggtttcaacgggtcattgcgagtacgaaccgtcgacagttatgatccagtaaaggaccagtggaccagcgttgccaacatgcgggatcgacggtctaccctgggcgccgccgtgcttaacggactgctatatgcagtgggtggattcgacggcagcacaggactgagctcagtggaagcttacaatatcaagtcaaacgaatggttccacgtggctcctatgaacacccgaagatccagcgtaggcgtgggggtggtggggggactgttatacgctgtgggcgggtatgatggcgcttcaaggcagtgtctgagcacagtggaatgctataatgcaaccacaaacgagtggacatatatagcagaaatgtctacacgaagaagcggagccggcgtgggcgtactaaataatttgctgtatgctgttggcgggcatgatggtcctctggtgcgcaagagcgtggaagtgtacgatcctacaaccaacgcctggcgccaggtggccgacatgaacatgtgccgtcgaaatgcgggagtgtgtgcagtcaacggtctgttatatgtggttggaggagacgatggttcatgcaatctcgcaagcgtagagtattacaatcctaccactgataaatggacagtggtgagtagctgtatgtctacgggcagatcttatgccggcgtgaccgtcatcgataagcctctgtag

SEQ ID NO: 171321 - DNA, 1782 bp, Artificial Sequence
  derived and/or modified sequence
atggagaccccacccctgcccccagcctgcaccaagcagggccaccagaagcccctggacagcaaggatgacaacacagagaagcactgccctgtgacagtgaacccctggcacatgaagaaggccttcaaggtgatgaatgagctgcggagccagaacctgctgtgtgatgtgaccatcgtggccgaggacatggagatcagcgcccaccgggtggtgctggccgcctgcagcccctacttccacgccatgttcaccggggagatgtctgagagccgggccaagagggtgcgcatcaaggaggtggatggctggaccctgaggatgctgattgattatgtgtacacagctgagatccaggtgacagaggagaatgtgcaggtgctgctgcctgctgctggcctgctgcagctgcaggatgtgaagaagacctgctgtgagttcctggagagccagctgcaccctgtgaactgcctgggcatccgggcctttgctgacatgcacgcctgcacagacctgctgaacaaggccaacacctatgcagagcagcactttgctgatgtggtgctgtctgaggagttcctgaacctgggcatcgagcaggtgtgcagcctcatcagcagtgacaagctgaccatcagcagcgaggagaaggtgtttgaggccgtcatcgcctgggtgaaccacgacaaggatgtgcggcaggagttcatggcccggctgatggagcacgtgcggctgcccctgctgccccgggagtacctggtgcagagggtggaggaggaggccctggtgaagaacagcagcgcctgcaaggactacctgattgaggccatgaagtaccacctgctgcccacagagcagaggatcctgatgaagtctgtgaggacccggctgcggacccccatgaacctgcccaagctgatggtggtggtgggcggccaggcccccaaggccatccgctctgtggagtgctatgacttcaaggaggagcgctggcaccaggtggccgagctgcccagccgccgctgccgggccggcatggtgtacatggccggcctggtgtttgctgtgggcggcttcaacggcagcctgcgggtgaggacagtggacagctatgaccctgtgaaggaccagtggacctctgtggccaacatgagggacagaagaagcaccctgggcgctgctgtgctgaatggcctgctgtatgctgtgggcggctttgatggcagcacaggcctgagctctgtggaggcctacaacatcaagagcaatgagtggttccacgtggcccccatgaacacccggcgcagctctgtgggcgtgggcgtggtgggcggcctgctgtatgctgtgggcggctatgatggagccagccggcagtgcctgagcacagtggagtgctacaatgccaccaccaatgagtggacctacatcgccgagatgagcaccaggagaagtggagctggggtgggcgtgctgaacaacctgctgtatgctgtgggcggccatgatggccccctggtgaggaagtctgtggaggtgtatgaccccaccaccaatgcctggaggcaggtggccgacatgaacatgtgcagaagaaatgctggggtgtgtgctgtgaatggcctgctgtatgtggtgggcggagatgatggcagctgcaacctggcctctgtggagtactacaaccccaccacagacaagtggacagtggtgagcagctgcatgagcacaggccgctcctatgctggggtgacagtgattgacaagcccctgtag

SEQ ID NO: 171322 - DNA, 1782 bp, Artificial Sequence
  derived and/or modified sequence
atggagaccccccccctgccccccgcctgcaccaagcagggccaccagaaaccgctagactctaaggacgacaatacagagaagcactgcccagtgacagtcaatccctggcacatgaaaaaagcatttaaggtaatgaacgaactccggtcacagaatctgctgtgtgatgtaacaatcgtggccgaagatatggagatatctgctcaccgtgttgtcctagcagcctgttctccgtacttccatgcaatgtttaccggtgagatgagcgaatcacgggcgaagcgcgttcggatcaaagaggttgacggatggactttgagaatgttaatcgactacgtgtacacagccgagattcaagtaaccgaagagaacgtgcaggtgttgctgcctgcagccggtctgctccaactccaggatgtcaaaaaaacgtgctgcgaattcctggaaagccaacttcatcccgtgaactgtctaggaatccgggcatttgccgacatgcatgcctgcaccgatttactgaataaagccaacacctacgcagagcagcactttgccgacgtggtactgtctgaagagttccttaatctgggcatcgagcaagtgtgttcgttgataagctcagacaagctgaccatctcatccgaagagaaagtgtttgaggcagtcatagcttgggtgaatcacgacaaggacgttaggcaggagtttatggccagactcatggaacacgtgcgtctgcctctcctgccccgggagtacctggttcagagggtggaagaggaagccctggtcaaaaactcttcagcatgtaaggattacctgattgaggccatgaaatatcatcttctgcctaccgaacagcgaatactcatgaaaagtgtacgtactcgcctccgcactcctatgaatttgccaaagttaatggtggtcgtgggcgggcaggctccgaaagccattagatctgttgagtgttatgattttaaggaagaacgctggcaccaggtcgccgaactgccaagccgaagatgtagggcaggaatggtgtacatggccgggctggtattcgctgtgggtggattcaacggatctctgcgcgtgaggaccgtcgactcttatgatccagtgaaagaccagtggacctccgtagctaacatgcgtgaccggaggagcactctcggcgctgcagtacttaatggactgctatacgcagtggggggctttgacgggtctacaggattgtcatctgtagaggcgtacaatattaagtcaaacgaatggttccatgtggcgcccatgaacactcggcgcagttccgtgggcgtgggggtagtggggggcctcttatacgcggtcggtgggtacgacggggcgtctcgacaatgtctttcaacggtggaatgttataacgcgacgacaaatgaatggacttacatcgcggaaatgtctacccgcaggtcgggagctggagtgggagtgctgaacaatctgctttatgcggttggagggcatgatggcccattggtgagaaagtccgttgaagtatatgacccaaccaccaatgcctggcgacaggtggccgacatgaacatgtgcagaaggaacgccggagtttgcgccgtgaacggtttactctacgtggtgggaggcgacgatggcagctgtaatctagcaagtgtcgaatattataatccaactaccgataaatggactgtggtctctagctgtatgtccactgggagaagttatgccggcgttactgtaattgacaaacccctctag

SEQ ID NO: 171323 - DNA, 1782 bp, Artificial Sequence
  derived and/or modified sequence
atggagacccctccactcccacctgcgtgtaccaaacagggacaccagaaacccctcgacagcaaggatgacaatacggagaagcattgccccgttaccgttaacccatggcatatgaaaaaggcgtttaaagtgatgaacgagttacgatcacagaatctcttgtgcgatgtgacgattgtggctgaggacatggaaatcagcgcccatcgcgtcgtcctagctgcttgctcaccttacttccacgccatgtttaccggcgagatgtcagaaagtcgcgcaaaaagggtccgcattaaggaggttgacggttggactctccggatgctcatcgactatgtgtacactgccgagatccaagtaaccgaggagaatgttcaggtccttcttcccgctgccggactcttacaactgcaggatgtaaagaaaacatgctgcgagttccttgagtcccaactgcacccagtgaactgtctgggaatacgtgccttcgccgacatgcatgcttgtactgacctgctgaataaagccaacacctacgccgagcagcatttcgccgatgtcgtgctgtcggaggagttcctgaatctcgggattgaacaggtgtgtagcctgatttccagtgataagctgacaattagctcggaggaaaaagttttcgaggctgttattgcttgggtcaatcatgacaaagacgttcgccaggaatttatggctagactcatggagcatgtccgcctacccctgctgcccagagagtacttagtgcagagggtagaggaagaggctctcgtgaagaacagcagtgcctgtaaagattacctgatcgaagctatgaagtaccacctgttaccaacagagcagaggatcttgatgaagtcggtgagaacacggttgagaacacctatgaatttgcctaaactaatggtggttgtgggcggtcaggctcccaaggctatccgtagcgtggaatgctatgattttaaggaagagcgctggcatcaggtcgctgagctgccgtcacggaggtgtagagccggtatggtgtacatggctggtctggtgttcgcggtggggggtttcaacgggagtttgcgagtgcgaactgttgacagctacgatccagtgaaagaccagtggacatccgtggccaacatgagagaccggaggagcaccctcggtgccgcagtcctaaatgggctgctgtatgcggtagggggattcgatggcagcaccggactgtcctccgtggaggcctacaacatcaagagcaatgagtggtttcacgtggctccaatgaacactagacgatccagtgttggggtgggcgtggtgggcggactgctgtacgcagtcgggggatacgacggagcttctaggcagtgtctatcaacagtagagtgttacaatgccaccactaatgagtggacctacattgcagagatgtccactcgcagaagcggcgcaggagtgggggtacttaacaatctgctgtacgctgtgggcggacatgatggccctttagttcgcaagtccgttgaagtgtatgatccgactactaatgcctggagacaggttgccgatatgaatatgtgcaggaggaatgctggggtctgcgccgtcaatggcctactgtacgtggtgggaggcgatgacgggtcttgtaatctggcaagcgtggagtactataatcctaccacagacaagtggactgtggtgagctcgtgcatgtccacaggcagatcctacgcgggagtgacggttatcgacaagcccttatag

SEQ ID NO: 171324 - DNA, 1518 bp, Artificial Sequence
  derived and/or modified sequence
atgagcgagtcaagagcaaagcgggtacggatcaaggaggtagacggctggacactgcggatgttaatcgactacgtgtacactgcagagatacaggtgacagaggaaaacgtccaggtgctccttccagccgctggcctgctgcagttacaggatgtgaagaagacttgttgtgaatttctggagtcacagttgcatcccgtcaattgtctgggcattcgggcatttgctgacatgcatgcatgtaccgacctgctgaacaaggccaatacatatgctgagcagcactttgcggatgtagtgctctcagaagagtttctgaatcttggaatcgaacaggtctgttccctgatttcaagcgataagctgactatctcatccgaagaaaaagtgttcgaggccgtgatagcatgggttaatcacgataaggacgtacgacaggagttcatggcaaggctgatggaacatgtgcggctccctcttctacctagagagtacctggtgcagcgcgtggaagaagaggctctggtgaaaaactcttccgcctgcaaggactacctcattgaggctatgaaatatcacttactgcccaccgaacagagaattctgatgaaaagcgtgagaacaagactgcggactccaatgaatctaccaaagctgatggtagtcgtcggcggccaggcgcctaaagccatcagaagcgtcgagtgctacgactttaaggaggagaggtggcatcaggtggccgaactgccctcacggagatgccgggcaggcatggtgtacatggctgggctggtttttgccgtgggcggattcaatgggtcactgcgcgtgcgtactgtcgactcctatgaccctgttaaggaccagtggacctctgtggctaatatgagggaccgccggagcactcttggtgccgccgtgctgaacgggctgctctacgctgtaggagggttcgacgggtctactggattgagctctgtggaagcatacaacattaagtctaatgagtggttccatgtagctcctatgaacacgcggagatcctcagtgggagtaggcgtcgtgggcggtctcctgtacgctgtcggaggctatgatggggcgtctcgtcaatgcctctctactgtggaatgctacaatgcaactacaaacgaatggacctacatcgccgagatgtccactcgacgttcaggtgccggagtcggcgtcctcaacaacctactgtatgctgtgggcggccatgatggccccctggtgaggaaaagcgtggaagtgtatgatcctactactaacgcctggaggcaagtggccgacatgaacatgtgtaggaggaatgcaggcgtgtgtgcagtgaatggactgctctatgttgttgggggtgacgacggatcttgcaatttggcatccgtcgagtattacaaccccactactgataaatggacagtcgtgtcatcttgtatgtctaccggtcgatcctatgctggcgttactgtcatcgataagccgctgtag

SEQ ID NO: 171325 - DNA, 3134 bp, Artificial Sequence
  derived and/or modified sequence
gcgcccgccggtcccgtcgccgccgccccgcactcgggcgagcgcgggagccgcgcagtagacggagcgcgcccggccgagcgggccatggccgcgggggccgccgccgcaggtggtggcgcgcggtgaggagagcgcggcgccccctccggggcggatggaacgcggctcggcgggcgggcagtgccggcgtccgcggctggaatggtgctggctgtgttggtcggtgcctgcgttctgaagcccgagaggagccacaatggagacgccgccgctgcctcccgcatgcacaaagcagggtcatcagaagcctctcgattcaaaagatgataataccgaaaaacactgcccagtgacagtgaatccttggcatatgaagaaagctttcaaagtcatgaacgaattaagaagtcaaaatttgctgtgcgatgtcacaattgtggcagaagacatggaaatttctgctcatagagtggtgctggccgcctgtagtccttattttcatgccatgtttacaggtgagatgagtgagagccgagcaaagagagttagaataaaagaggtagatggctggaccctgaggatgctaattgattatgtttacactgcagaaattcaggttacagaagaaaatgtacaggtacttctcccagcagctggtctcttacagttacaggatgtgaagaagacttgttgtgaatttttggaatcccagcttcaccctgtcaactgcttaggaatccgggcttttgctgatatgcatgcatgtaccgaccttctgaacaaggccaacacctatgcagagcaacattttgcagatgttgtacttagtgaagaatttctcaatcttggcatcgaacaagtgtgcagcttaatctcaagtgacaaacttaccatttcttcagaagagaaggtatttgaagcagtaatagcatgggtgaaccatgacaaggatgtgaggcaagagtttatggcccgactgatggaacatgtacggttacctttgcttcctcgggaatatttagttcagagggttgaagaggaagcattggtcaagaatagcagtgcttgcaaagattacctcattgaagcaatgaagtaccatttgctgccaacagagcagcgtatattaatgaagagtgtccggacccggctgaggacacccatgaaccttcccaaattgatggtggtggttgggggccaagcaccaaaggctatccggagtgtggaatgctatgactttaaagaagaaaggtggcaccaagtagcagagttgccttccaggaggtgcagggcaggcatggtctacatggctggacttgtttttgctgttggtggctttaatggctcattaagagttcgcactgtagattcctacgaccctgtgaaggaccagtggaccagcgttgctaacatgagagaccggagaagcactttgggagctgctgtgttaaatggattattatacgctgtgggaggctttgatgggagtacaggtttgtcatctgtggaagcatacaacataaagtctaatgagtggtttcatgtagctcccatgaatacaaggaggagcagtgttggtgtgggtgttgttggaggtttgctctatgctgtaggaggttatgatggagcatcacgtcagtgtcttagcacagtagaatgctataatgctacaacaaatgagtggacctatatagcagaaatgagcaccaggcggagtggagcaggtgttggtgtgttaaacaatttattgtatgctgtaggaggtcatgatggccctttagtacgaaaaagtgttgaagtatatgatcccaccactaacgcatggagacaggttgcagatatgaacatgtgcagaagaaatgcaggagtttgtgcagttaatggtctgttatatgttgttggaggggatgatggttcctgtaacttggcgtcagtagaatattataacccaacaaccgataaatggacagttgtgtcatcgtgtatgagcacagggagaagttatgcaggggtcacagttattgataaaccattatgagcctgaaggacattttcagcatatttatacatgagaaacagccttcaacaagtatttgtgaagtgactgagaatctagcacttctccacttgtagctgcactttaagtctcagcagaagatacgatcgtctgcctttataggcctcagatactgaagattatttttggtagaagcaccgtgtaggctttttctgcaatgagcagcagctgactgaattttcataagaaacttggactgcaggacttaatctgtagtctttagacaacagttgctttcataaagactagttcttatcaaccttgaatgactacagattattttgtgaaggaggatgaagtaatgtgtgttcttgtaaaattaaattttatctttatttcttctaaaaatctgtataccaggaactgaaaatctttgaacagatattaaaatctacgtaagtatacaaactagttgagggatacactgtttgcttttataaaataactttgattacatgaatataataaattatgtgcatataaatgtgtgtctatatgctttcctttaaatatgtttgaaaagatgtttgaaacttgattatactatttataattggcacagtactttgaattatgccagtactacattgtaaaacagagttgtattttttgatatttaacaatgcttaacactttaaatgccacttctgaggaatggacctggtgtaacacacttgaatatgtgtgatgccaaactttttaaaatacaatataaattatgcttatttattattttctttagtttaatcttggtcatgttttggtgtgtatttttaatttttttcttaaattaacactttggcatgaacattactgcaggtttttgatgaatataatgaatgtatggaattcaattgaatttgcatggtcttcggaattttttctgtgtgtataaatttagctgctattaacagaagagagaactttctgtgagtagccatgtgtgttgatcagatacagtttttctgagatcttcaattaatctcactttaaaaatgaccaaaacatgtctttcttgaattaactttgaataaaagtttgtatattatttgtt

SEQ ID NO: 171326 - DNA, 2907 bp, Artificial Sequence
  derived and/or modified sequence
actgccagagctgggctagaacagaggccagtggaaactattaggaagactcagcttttcatgaagttagatttttagcctgagctttaagtcaaagaaagatgacctggacttaaagtgccttatggtatggttggaagcacggccccagattctctttgtatgcacaaagcagggtcatcagaagcctctcgattcaaaagatgataataccgaaaaacactgcccagtgacagtgaatccttggcatatgaagaaagctttcaaagtcatgaacgaattaagaaggtgagatgagtgagagccgagcaaagagagttagaataaaagaggtagatggctggaccctgaggatgctaattgattatgtttacactgcagaaattcaggttacagaagaaaatgtacaggtacttctcccagcagctggtctcttacagttacaggatgtgaagaagacttgttgtgaatttttggaatcccagcttcaccctgtcaactgcttaggaatccgggcttttgctgatatgcatgcatgtaccgaccttctgaacaaggccaacacctatgcagagcaacattttgcagatgttgtacttagtgaagaatttctcaatcttggcatcgaacaagtgtgcagcttaatctcaagtgacaaacttaccatttcttcagaagagaaggtatttgaagcagtaatagcatgggtgaaccatgacaaggatgtgaggcaagagtttatggcccgactgatggaacatgtacggttacctttgcttcctcgggaatatttagttcagagggttgaagaggaagcattggtcaagaatagcagtgcttgcaaagattacctcattgaagcaatgaagtaccatttgctgccaacagagcagcgtatattaatgaagagtgtccggacccggctgaggacacccatgaaccttcccaaattgatggtggtggttgggggccaagcaccaaaggctatccggagtgtggaatgctatgactttaaagaagaaaggtggcaccaagtagcagagttgccttccaggaggtgcagggcaggcatggtctacatggctggacttgtttttgctgttggtggctttaatggctcattaagagttcgcactgtagattcctacgaccctgtgaaggaccagtggaccagcgttgctaacatgagagaccggagaagcactttgggagctgctgtgttaaatggattattatacgctgtgggaggctttgatgggagtacaggtttgtcatctgtggaagcatacaacataaagtctaatgagtggtttcatgtagctcccatgaatacaaggaggagcagtgttggtgtgggtgttgttggaggtttgctctatgctgtaggaggttatgatggagcatcacgtcagtgtcttagcacagtagaatgctataatgctacaacaaatgagtggacctatatagcagaaatgagcaccaggcggagtggagcaggtgttggtgtgttaaacaatttattgtatgctgtaggaggtcatgatggccctttagtacgaaaaagtgttgaagtatatgatcccaccactaacgcatggagacaggttgcagatatgaacatgtgcagaagaaatgcaggagtttgtgcagttaatggtctgttatatgttgttggaggggatgatggttcctgtaacttggcgtcagtagaatattataacccaacaaccgataaatggacagttgtgtcatcgtgtatgagcacagggagaagttatgcaggggtcacagttattgataaaccattatgagcctgaaggacattttcagcatatttatacatgagaaacagccttcaacaagtatttgtgaagtgactgagaatctagcacttctccacttgtagctgcactttaagtctcagcagaagatacgatcgtctgcctttataggcctcagatactgaagattatttttggtagaagcaccgtgtaggctttttctgcaatgagcagcagctgactgaattttcataagaaacttggactgcaggacttaatctgtagtctttagacaacagttgctttcataaagactagttcttatcaaccttgaatgactacagattattttgtgaaggaggatgaagtaatgtgtgttcttgtaaaattaaattttatctttatttcttctaaaaatctgtataccaggaactgaaaatctttgaacagatattaaaatctacgtaagtatacaaactagttgagggatacactgtttgcttttataaaataactttgattacatgaatataataaattatgtgcatataaatgtgtgtctatatgctttcctttaaatatgtttgaaaagatgtttgaaacttgattatactatttataattggcacagtactttgaattatgccagtactacattgtaaaacagagttgtattttttgatatttaacaatgcttaacactttaaatgccacttctgaggaatggacctggtgtaacacacttgaatatgtgtgatgccaaactttttaaaatacaatataaattatgcttatttattattttctttagtttaatcttggtcatgttttggtgtgtatttttaatttttttcttaaattaacactttggcatgaacattactgcaggtttttgatgaatataatgaatgtatggaattcaattgaatttgcatggtcttcggaattttttctgtgtgtataaatttagctgctattaacagaagagagaactttctgtgagtagccatgtgtgttgatcagatacagtttttctgagatcttcaattaatctcactttaaaaatgaccaaaacatgtctttcttgaattaactttgaataaaagtttgtatattatttgtttca

SEQ ID NO: 171327 - DNA, 1518 bp, Artificial Sequence
  derived and/or modified sequence
atgtctgagagccgggccaagagggtgcgcatcaaggaggtggatggctggaccctgaggatgctgattgattatgtgtacacagctgagatccaggtgacagaggagaatgtgcaggtgctgctgcctgctgctggcctgctgcagctgcaggatgtgaagaagacctgctgtgagttcctggagagccagctgcaccctgtgaactgcctgggcatccgggcctttgctgacatgcacgcctgcacagacctgctgaacaaggccaacacctatgcagagcagcactttgctgatgtggtgctgtctgaggagttcctgaacctgggcatcgagcaggtgtgcagcctcatcagcagtgacaagctgaccatcagcagcgaggagaaggtgtttgaggccgtcatcgcctgggtgaaccacgacaaggatgtgcggcaggagttcatggcccggctgatggagcacgtgcggctgcccctgctgccccgggagtacctggtgcagagggtggaggaggaggccctggtgaagaacagcagcgcctgcaaggactacctgattgaggccatgaagtaccacctgctgcccacagagcagaggatcctgatgaagtctgtgaggacccggctgcggacccccatgaacctgcccaagctgatggtggtggtgggcggccaggcccccaaggccatccgctctgtggagtgctatgacttcaaggaggagcgctggcaccaggtggccgagctgcccagccgccgctgccgggccggcatggtgtacatggccggcctggtgtttgctgtgggcggcttcaacggcagcctgcgggtgaggacagtggacagctatgaccctgtgaaggaccagtggacctctgtggccaacatgagggacagaagaagcaccctgggcgctgctgtgctgaatggcctgctgtatgctgtgggcggctttgatggcagcacaggcctgagctctgtggaggcctacaacatcaagagcaatgagtggttccacgtggcccccatgaacacccggcgcagctctgtgggcgtgggcgtggtgggcggcctgctgtatgctgtgggcggctatgatggagccagccggcagtgcctgagcacagtggagtgctacaatgccaccaccaatgagtggacctacatcgccgagatgagcaccaggagaagtggagctggggtgggcgtgctgaacaacctgctgtatgctgtgggcggccatgatggccccctggtgaggaagtctgtggaggtgtatgaccccaccaccaatgcctggaggcaggtggccgacatgaacatgtgcagaagaaatgctggggtgtgtgctgtgaatggcctgctgtatgtggtgggcggagatgatggcagctgcaacctggcctctgtggagtactacaaccccaccacagacaagtggacagtggtgagcagctgcatgagcacaggccgctcctatgctggggtgacagtgattgacaagcccctgtag

SEQ ID NO: 171328 - DNA, 1518 bp, Artificial Sequence
  derived and/or modified sequence
atgagcgagagccgggccaagcgggtgcggatcaaggaggtggacggctggactctccgcatgttaatcgactatgtatacacagccgaaatacaggtgactgaggaaaacgttcaggtactgcttcccgcagctggactgctccagctgcaggacgtgaaaaaaacctgttgcgagtttctggaatctcagctccaccctgtcaactgtctggggattcgggccttcgcagatatgcatgcgtgtactgacctgctgaacaaagctaatacctacgccgagcagcacttcgctgacgtggtgctctcggaagaattcctgaatttggggatcgaacaggtttgttcattgattagttccgacaaactgactatcagctctgaggaaaaagtgtttgaagccgttatcgcatgggtaaaccatgataaggacgtcagacaagagttcatggcccgcctgatggaacatgtccgtctccccttgttacctcgtgagtaccttgtgcagagggtggaggaggaggcactcgttaaaaattcttccgcgtgcaaggactatctgattgaagccatgaaataccatttgttgcccaccgagcagcggatccttatgaaaagcgtgaggacccgcctaagaacacccatgaacctgcctaaactaatggtagttgtaggcggccaagccccaaaggcgattcggagtgtcgagtgctatgacttcaaggaggaacggtggcatcaggtagccgagttaccgtctagaaggtgtcgggccggaatggtgtatatggctggattagtcttcgccgtcgggggctttaacggctcacttagagtgaggaccgtggatagttacgatccagttaaggatcagtggaccagcgtcgctaatatgagagacaggcggagtaccctaggggccgccgtgctgaatgggctgctgtacgcagtcggcgggttcgatggctctacggggctgagttctgtggaggcttataatattaaatcgaacgagtggtttcacgttgcaccgatgaacacgcggcggagtagcgttggtgtcggggtggtgggcggcctgctgtacgccgtggggggatacgacggcgcctcccgtcagtgtttatcaacggttgaatgttataatgccacaaccaatgagtggacatacattgctgaaatgagtactagaagatctggggccggcgtgggggtgctgaacaacctgttgtatgccgtcggcggccacgatggcccccttgtgcgaaagtctgttgaggtctacgaccctactactaacgcctggcgccaagtcgcggatatgaatatgtgcaggagaaacgcgggagtttgcgcagtcaatggcctgctctacgtggttggtggggacgatggtagttgcaatctggctagcgtcgagtactacaatcccaccaccgacaaatggaccgttgttagctcatgcatgagcaccggtcggagttatgctggggtgaccgtcatagataaacctctatag

SEQ ID NO: 171329 - DNA, 1518 bp, Artificial Sequence
  derived and/or modified sequence
atgagcgagtcgcgcgctaagcgggtacgaatcaaggaagtggacggatggacccttagaatgctgattgactacgtgtatacggctgaaattcaggttactgaggagaatgtccaggttctccttccagctgcagggttacttcagttacaggatgtgaaaaaaacctgttgcgagttcctcgagagtcagcttcaccctgtaaattgccttggaatacgagccttcgctgacatgcatgcatgtaccgatctcttaaacaaggctaacacatatgctgaacagcactttgccgacgtcgtcctttctgaggagtttctcaatctcggcatcgaacaggtgtgttcactgattagtagcgataagctaaccatcagctccgaggagaaggtctttgaagccgtaatcgcttgggtaaatcatgacaaggacgttaggcaagagtttatggcaaggctgatggaacacgtcagactgcccctgctaccacgcgagtatctcgtgcaaagggtggaagaggaagccctggttaagaacagcagcgcgtgcaaggactatttaattgaggccatgaagtaccaccttttacccactgagcaacgcattttaatgaagtcagttcgtaccaggctcagaactccaatgaacttgccaaaactcatggtggtggtggggggtcaggcaccgaaagccattcggagtgttgaatgctatgactttaaagaagagcggtggcaccaggtcgctgaattgccatccagacggtgtagagctggcatggtttatatggccggattggtttttgccgtggggggatttaacggctccctgcgtgtgcgcacagtggactcgtatgaccccgtcaaagatcagtggacaagcgtcgctaatatgcgggacagacgttctactctgggcgcagctgtgctcaatgggctgctgtatgccgtggggggtttcgacggaagtaccggcttgtcttccgttgaggcatacaatatcaaatctaacgaatggttccatgtggcaccgatgaacaccaggagaagctctgtgggcgtcggtgttgtcggcggtctgctgtatgctgtcggaggctacgatggggctagccgacagtgcctgtctaccgtggagtgttacaatgcaaccaccaacgagtggacgtacatcgcagaaatgtctacgcgtcgatcaggagccggtgtgggggtcctcaacaacctgctgtacgccgtgggagggcacgatgggcctctcgttcggaagagcgtggaagtctatgatccaacaaccaatgcatggcgtcaggtggcagatatgaacatgtgccggagaaatgcaggtgtttgtgccgttaacggtctgctatatgttgtcggtggtgacgacggatcttgcaacttggcgtccgttgagtactacaatccaacgaccgataagtggacagtagtatcctcatgcatgagtacagggcgttcctatgccggtgtgactgtgattgataaacccctctag

SEQ ID NO: 171330 - DNA, 1518 bp, Artificial Sequence
  derived and/or modified sequence
atgagcgagagcagagccaagagagtgagaatcaaggaggtggacggctggaccctgagaatgctgatcgactacgtgtacaccgccgagatccaggtgaccgaggagaacgtgcaggtgctgctgcccgccgccggcctgctgcagctgcaggacgtgaagaagacctgctgcgagttcctggagagccagctgcaccccgtgaactgcctgggcatcagagccttcgccgacatgcacgcctgcaccgacctgctgaacaaggccaacacctacgccgagcagcacttcgccgacgtggtgctgagcgaggagttcctgaacctgggcatcgagcaggtgtgcagcctgatcagcagcgacaagctgaccatcagcagcgaggagaaggtgttcgaggccgtgatcgcctgggtgaaccacgacaaggacgtgagacaggagttcatggccagactgatggagcacgtgagactgcccctgctgcccagagagtacctggtgcagagagtggaggaggaggccctggtgaagaacagcagcgcctgcaaggactacctgatcgaggccatgaagtaccacctgctgcccaccgagcagagaatcctgatgaagagcgtgagaaccagactgagaacccccatgaacctgcccaagctgatggtggtggtgggcggccaggcccccaaggccatcagaagcgtggagtgctacgacttcaaggaggagagatggcaccaggtggccgagctgcccagcagaagatgcagagccggcatggtgtacatggccggcctggtgttcgccgtgggcggcttcaacggcagcctgagagtgagaaccgtggacagctacgaccccgtgaaggaccagtggaccagcgtggccaacatgagagacagaagaagcaccctgggcgccgccgtgctgaacggcctgctgtacgccgtgggcggcttcgacggcagcaccggcctgagcagcgtggaggcctacaacatcaagagcaacgagtggttccacgtggcccccatgaacaccagaagaagcagcgtgggcgtgggcgtggtgggcggcctgctgtacgccgtgggcggctacgacggcgccagcagacagtgcctgagcaccgtggagtgctacaacgccaccaccaacgagtggacctacatcgccgagatgagcaccagaagaagcggcgccggcgtgggcgtgctgaacaacctgctgtacgccgtgggcggccacgacggccccctggtgagaaagagcgtggaggtgtacgaccccaccaccaacgcctggagacaggtggccgacatgaacatgtgcagaagaaacgccggcgtgtgcgccgtgaacggcctgctgtacgtggtgggcggcgacgacggcagctgcaacctggccagcgtggagtactacaaccccaccaccgacaagtggaccgtggtgagcagctgcatgagcaccggcagaagctacgccggcgtgaccgtgatcgacaagcccctgtag

SEQ ID NO: 171331 - protein, 175 aa, Artificial Sequence
  derived and/or modified sequence
MLGLTSALDGAFCVDSITALKALERASSPSEHGPRKSYSLGSIYTRLYGQSPPDSHTAEGDVLALLSICQWRPQALLRWVDAHARPFGTIRPMYGVTASARTKPRPSAVTTTAHLATTRNTSPSLGESRGTKDLPPVKDPGALSREGLLAPLGLLAILTLAVATLYGLSLATPGE

SEQ ID NO: 171332 - protein, 304 aa, Artificial Sequence
  derived and/or modified sequence
MQTLIFFDMEATGLPFSQPKVTELCLLAVHRCALESPPTSQGPPPTVPPPPRVVDKLSLCVAPGKACSPAASEITGLSTAVLAAHGRQCFDDNLANLLLAFLRRQPQPWCLVAHNGDRYDFPLLQAELAMLGLTSALDGAFCVDSITALKALERASSPSEHGPRKSYSLGSIYTRLYGQSPPDSHTAEGDVLALLSICQWRPQALLRWVDAHARPFGTIRPMYGVTASARTKPRPSAVTTTAHLATTRNTSPSLGESRGTKDLPPVKDPGALSREGLLAPLGLLAILTLAVATLYGLSLATPGE

SEQ ID NO: 171333 - DNA, 528 bp, Artificial Sequence
  derived and/or modified sequence
atgctgggcctgaccagcgccctggacggcgccttctgcgtggacagcatcaccgccctgaaggccctggagagagccagcagccccagcgagcacggccccagaaagagctacagcctgggcagcatctacaccagactgtacggccagagcccccccgacagccacaccgccgagggcgacgtgctggccctgctgagcatctgccagtggagaccccaggccctgctgagatgggtggacgcccacgccagacccttcggcaccatcagacccatgtacggcgtgaccgccagcgccagaaccaagcccagacccagcgccgtgaccaccaccgcccacctggccaccaccagaaacaccagccccagcctgggcgagagcagaggcaccaaggacctgccccccgtgaaggaccccggcgccctgagcagagagggcctgctggcccccctgggcctgctggccatcctgaccctggccgtggccaccctgtacggcctgagcctggccacccccggcgagtag

SEQ ID NO: 171334 - DNA, 915 bp, Artificial Sequence
  derived and/or modified sequence
atgcagaccctgatcttcttcgacatggaggccaccggcctgcccttcagccagcccaaggtgaccgagctgtgcctgctggccgtgcacagatgcgccctggagagcccccccaccagccagggccccccccccaccgtgccccccccccccagagtggtggacaagctgagcctgtgcgtggcccccggcaaggcctgcagccccgccgccagcgagatcaccggcctgagcaccgccgtgctggccgcccacggcagacagtgcttcgacgacaacctggccaacctgctgctggccttcctgagaagacagccccagccctggtgcctggtggcccacaacggcgacagatacgacttccccctgctgcaggccgagctggccatgctgggcctgaccagcgccctggacggcgccttctgcgtggacagcatcaccgccctgaaggccctggagagagccagcagccccagcgagcacggccccagaaagagctacagcctgggcagcatctacaccagactgtacggccagagcccccccgacagccacaccgccgagggcgacgtgctggccctgctgagcatctgccagtggagaccccaggccctgctgagatgggtggacgcccacgccagacccttcggcaccatcagacccatgtacggcgtgaccgccagcgccagaaccaagcccagacccagcgccgtgaccaccaccgcccacctggccaccaccagaaacaccagccccagcctgggcgagagcagaggcaccaaggacctgccccccgtgaaggaccccggcgccctgagcagagagggcctgctggcccccctgggcctgctggccatcctgaccctggccgtggccaccctgtacggcctgagcctggccacccccggcgagtag

SEQ ID NO: 171335 - DNA, 528 bp, Artificial Sequence
  derived and/or modified sequence
atgctcgggttgacgagcgctctggatggagctttctgtgtggactcaatcaccgctcttaaagcgttagagagagcttccagcccaagcgagcacggcccacgtaaatcctatagcctcggaagtatctacacgcgactctacggccagagcccccctgattcacatactgctgagggagatgttctggcgctgctgagcatctgccagtggcgcccacaagccctattgcgctgggtggacgctcatgcccgcccatttgggaccatacggcctatgtacggggtgacggctagtgcaaggaccaagcccagaccctccgccgtgactacgactgctcacctggccacaaccaggaacacatctcccagccttggggagtccaggggtacaaaagacttgccacccgtgaaagacccaggcgccctgtctagggagggattgttggcgcctttgggcctgctggcaatactgaccttagcagtcgctaccctgtacggcctaagcttggcaactccgggtgagtag

SEQ ID NO: 171336 - DNA, 915 bp, Artificial Sequence
  derived and/or modified sequence
atgcaaacactgatcttcttcgatatggaagccacggggctgcccttctctcagcccaaggttaccgagctgtgtctgctggcagtgcaccgatgtgccctggaatcccctcctacatctcaggggcctccgcccactgtgcctcctccccctcgggtggtggacaagcttagtttgtgcgtggcacctggtaaagcttgtagcccagctgcaagtgaaattacagggttgagcacagctgttctcgccgcccatggccgacagtgtttcgatgacaacttggctaatttactgctggcgtttctgaggaggcagccccaaccttggtgccttgtagcccacaacggtgataggtatgatttccctcttctccaggctgagttggctatgttgggcctcactagtgcattagatggtgccttctgtgttgattcgataaccgcactgaaagctttggagagagcctcgtccccaagcgagcacggcccgcgtaagagttattctctgggctctatatacacgcgtttgtacgggcagtctcctccagattcccacactgcagagggtgatgtgctcgctctactgtccatttgccagtggcgtcctcaggctttgctccgatgggtggatgcccatgccagaccctttggaacaatcaggccaatgtacggggtgacagcatctgcgcggacgaagcctagaccatccgccgttaccactactgcgcacctggcaaccacaagaaatacgtcacccagcttgggcgagtcaagaggtaccaaggacctgccacccgtgaaagatccaggggccctgtcccgagaaggcttgctcgccccgttggggctgctggcgatcctgactctggctgttgctactctgtacggactatccctggcaacaccaggagagtag

SEQ ID NO: 171337 - DNA, 528 bp, Artificial Sequence
  derived and/or modified sequence
atgctcgggcttacttcagccttagatggcgcattctgtgtggactcaatcaccgcgctcaaggctctcgaaagagcatcatctccatcagaacacggaccaaggaagagttactccctaggctctatttataccaggctgtatgggcagtcacctcccgactctcataccgcggaaggtgacgttctggcgctcttaagcatttgtcagtggcgcccacaggccctactgagatgggtggacgcgcacgcacgcccattcggcaccattcgacccatgtacggagtgacagcgtctgccaggactaaaccgcggccgagcgctgtcactacaacagcccatctggccactacgcggaatacatcaccgagcctcggcgagagtcgcggaacaaaagacctcccgcccgtgaaggacccaggcgcgctgagtcgggagggcctgttggctcctcttggtttgctggctatacttaccttggcagtggccacgctgtacgggctcagcttagcgacccccggggaatag

SEQ ID NO: 171338 - DNA, 528 bp, Artificial Sequence
  derived and/or modified sequence
atgctgggcctgaccagcgccctggatggagccttctgtgtggacagcatcacagccctgaaggccctggagcgggccagcagccccagcgagcacggccccaggaagagctacagcctgggcagcatctacacccggctgtatggccagagccccccagacagccacacagcagaaggagatgtgctggccctgctgagcatctgccagtggaggccccaggccctgctgcgctgggtggatgcccacgcccggcccttcggcaccatccggcccatgtatggagtgacagccagcgcccggaccaagccccggcccagcgctgtgaccaccacagcccacctggccaccaccaggaacaccagccccagcctgggggagagccggggcaccaaggacctgccccctgtgaaggaccccggggccctgagccgggagggcctgctggcccccctgggcctgctggccatcctgaccctggccgtggccaccctgtatggcctgagcctggccaccccaggagagtag

SEQ ID NO: 171339 - DNA, 915 bp, Artificial Sequence
  derived and/or modified sequence
atgcagaccctcatcttctttgacatggaggccaccggcctgcccttcagccagcccaaggtgacagagctgtgcctgctggccgtgcaccgctgtgccctggagagcccccccaccagccagggccccccacccaccgtgcccccaccaccccgggtggtggacaagctgagcctgtgtgtggcccctgggaaggcctgcagccctgctgccagcgagatcaccggcctgagcacagctgtgctggccgcccacggccggcagtgctttgatgacaacctggccaacctgctgctggccttcctgcggcggcagccccagccctggtgcctggtggcccacaatggagacagatatgacttccccctgctgcaggccgagctggccatgctgggcctgaccagcgccctggatggagccttctgtgtggacagcatcacagccctgaaggccctggagcgggccagcagccccagcgagcacggccccaggaagagctacagcctgggcagcatctacacccggctgtatggccagagccccccagacagccacacagcagaaggagatgtgctggccctgctgagcatctgccagtggaggccccaggccctgctgcgctgggtggatgcccacgcccggcccttcggcaccatccggcccatgtatggagtgacagccagcgcccggaccaagccccggcccagcgctgtgaccaccacagcccacctggccaccaccaggaacaccagccccagcctgggggagagccggggcaccaaggacctgccccctgtgaaggaccccggggccctgagccgggagggcctgctggcccccctgggcctgctggccatcctgaccctggccgtggccaccctgtatggcctgagcctggccaccccaggagagtag

SEQ ID NO: 171340 - DNA, 528 bp, Artificial Sequence
  derived and/or modified sequence
atgctgggcctgaccagcgccctggacggcgccttctgcgtggactcaattaccgcactcaaagctctagagagggcatcctccccgtctgagcatggaccaaggaaaagctattctttagggtcaatatatacaagactgtatgggcagtcccccccggactcccacactgcggagggcgatgtgctagcccttctcagtatctgccagtggaggccacaagccctgctgaggtgggtagacgcccatgctagaccattcggaaccatccggcctatgtatggagtcacagcaagcgccagaacgaagccccgtccctctgccgtaaccaccactgcccacctggctactacgagaaacacaagccctagcctcggtgagtcccgaggaacaaaggacttgcctccagtgaaagatcctggagccctttcccgagaggggctgctggctcctctaggattattagccattctaacattggcagttgctaccttgtacggactgagtctcgctacgccaggggagtag

SEQ ID NO: 171341 - DNA, 915 bp, Artificial Sequence
  derived and/or modified sequence
atgcagaccctgatcttcttcgacatggaggccaccggcctgcccttttcccagcccaaggtcactgagctttgtctcctggcagtgcacagatgcgccctcgagagcccaccaacaagtcaaggacccccacccaccgtcccaccccccccccgagtggtggacaaactctcattgtgtgtggctcccgggaaggcctgttctccagccgcttctgagattacaggactgtctacggcagttctagccgcccacggccgacaatgtttcgacgataatctggccaacctgttgctggcatttctcaggagacaaccgcagccatggtgcttggtcgctcataatggagataggtacgattttcccctgctccaagccgagctggcgatgctcggccttacttccgcccttgatggggcattctgtgtagatagtatcaccgccttaaaagcactggagcgagcctcatcaccttctgaacatggtcccagaaagtcttatagcttgggctccatttacactcggctttacggccagtcacctccagacagtcacactgccgaaggggatgttctggcattgcttagcatttgccagtggcgtccccaggccttgctccgttgggtagatgctcatgcccgccccttcggaacaattcgcccaatgtatggcgtgacggcttccgctcggacgaagcctcgaccttcagcagtcacgaccacggcgcacctggccacaacgcggaacacctctccaagcctgggtgagagtcgcgggacaaaggatctgccccccgttaaggatccaggagccttgagccgagaggggctgctggcacctcttggtttgctcgcaatcctgacgctagctgtggctacactgtatgggttaagcttagccacacccggggagtag

SEQ ID NO: 171342 - DNA, 528 bp, Artificial Sequence
  derived and/or modified sequence
atgctgggcctgaccagcgccctggacggcgccttctgcgtggactccatcaccgctctgaaggccctcgagagagcaagctctccgagcgagcatggcccacgaaagagctactcccttggcagcatctacacgaggttatatggacagtctccgccagattctcacactgctgagggcgacgttctggccctgctatcaatttgccagtggagaccgcaagctcttctcaggtgggttgatgcgcacgcccgccccttcggcactatccggcctatgtacggggttacagcctctgcgagaacgaagccgagaccgtctgccgtgacaacaactgcacatctagccacaaccaggaatacgtcccccagtctgggagaaagccgcggaactaaggatctgcctcctgtaaaagaccctggagctctcagcagagaaggcctactggcacctctcggattgctagctatcctgaccctggccgtggcaactttgtacggcctgtccttggctacaccaggagaatag

SEQ ID NO: 171343 - DNA, 528 bp, Artificial Sequence
  derived and/or modified sequence
atgttgggtctcaccagtgccctcgatggagcattttgtgtggattctatcaccgcccttaaagctcttgagagagccagtagccccagcgagcacggacccaggaaatcttatagtttgggatctatatacacccggctttatggccagtccccaccagattctcatactgcagagggagacgttctcgctctgctgagtatttgccagtggagacctcaggccctgctgcgctgggtcgatgcgcacgctagaccgttcgggactatccgacccatgtatggggtcacagcaagcgcaagaacaaagcctcgcccttctgcagttactactactgcccacttagccacaactcgaaatacaagcccatcactgggtgagtcaaggggcactaaagacctgccgccagtaaaggatcccggagcactctcaagagagggcctactggccccactgggactacttgccattctgacgcttgctgttgctacactctacggtttgtcccttgctacgccaggcgagtag

SEQ ID NO: 171344 - DNA, 915 bp, Artificial Sequence
  derived and/or modified sequence
atgcaaactcttatctttttcgacatggaagcaacaggactgcccttctcccagccaaaggtgactgagctgtgtctgcttgccgtccaccgctgcgcgcttgagagcccgcctaccagtcaggggccacccccaacggtccctccacccccaagagttgttgataaactgagcctgtgtgtcgcaccaggaaaggcatgctcaccagccgctagcgaaattactggcctgtccaccgctgtgctggccgctcatggaaggcagtgtttcgacgataatttagccaatctactgctcgccttcctcaggaggcagccgcagccatggtgcctggtggcacacaacggagatcgctacgattttccgctcctgcaggcggaactggcaatgttgggcctgacctccgcactggacggcgctttttgtgtggacagtatcacagccctgaaagccctggagcgggcaagtagtcccagtgaacacggaccaagaaagtcctatagcctgggatccatttatactcgcttgtacggccagagtcctcctgattcgcataccgccgagggcgacgttctcgccctactgtctatttgccagtggcgtccccaggcactgctgcggtgggtggacgcccatgcaagaccctttggcacaatccggccaatgtacggcgtgaccgctagtgcaaggacgaagccacgacctagtgcggtgaccaccaccgctcacctggcaaccactcgaaacacgagcccgtcgctgggggaatcacggggaacaaaggacttgccacccgtgaaggaccccggagccctttcccgagagggactgctcgcgccactgggcctgctggccatcctgacactggccgtggcaacactgtacggtttatcccttgctacccccggagagtag

SEQ ID NO: 171345 - DNA, 528 bp, Artificial Sequence
  derived and/or modified sequence
atgctgggattgacctcggctcttgacggagccttttgcgtcgacagcatcaccgctctgaaggccctggagagagccagtagcccctcagagcacggacccagaaagagttattccctcgggtcgatctatacgcggctgtacggccaaagcccccctgacagtcacaccgccgagggcgatgtcctggctctactgtccatttgtcagtggcgccctcaggcactgttacggtgggttgacgcgcacgccaggccgtttggcaccatccgtcctatgtatggcgtcaccgctagcgcccgaactaagcccagaccatcagcggttacaacgacagcccatttagcaactactagaaacacctcccctagcctgggggagtccaggggaaccaaagacctgccaccagttaaggaccccggagcattaagccgcgagggcctcctggctcccctggggctgctcgcaattttgactctggccgtcgctaccctctatggcttaagtttggccacacccggtgagtag

SEQ ID NO: 171346 - DNA, 1105 bp, Artificial Sequence
  derived and/or modified sequence
gcctgtggaattgtcctgagtcattgctttgggctggggccatgggaagaaaccattgtgtggcagggaaggaggtggctcttggcccaggcctaaaccaggaaagcctgggaaactgggacccacagcgagagccgcgggagagtgtgcagccgagtcactactgcctgcctgcctgcctgctacggctcagcagcagcccaaggtcacggagctgtgcctgctggctgtccacagatgtgccctggagagcccccccacctctcaggggccacctcccacagttcctccaccaccgcgtgtggtagacaagctctccctgtgtgtggctccggggaaggcctgcagccctgcagccagcgagatcacaggtctgagcacagctgtgctggcagcgcatgggcgtcaatgttttgatgacaacctggccaacctgctcctagccttcctgcggcgccagccacagccctggtgcctggtggcacacaatggtgaccgctacgacttccccctgctccaagcagagctggctatgctgggcctcaccagtgctctggatggtgccttctgtgtggatagcatcactgcgctgaaggccctggagcgagcaagcagcccctcagaacacggcccaaggaagagctacagcctaggcagcatctacactcgcctgtatgggcagtcccctccagactcgcacacggctgagggtgatgtcctggccctgctcagcatctgtcagtggagaccacaggccctgctgcggtgggtggatgctcacgccaggcctttcggcaccatcaggcccatgtatggggtcacagcctctgctaggaccaagccaagaccatctgctgtcacaaccactgcacacctggccacaaccaggaacactagtcccagccttggagagagcaggggtaccaaggatcttcctccagtgaaggaccctggagccctatccagggaggggctgctggccccactgggtctgctggccatcctgaccttggcagtagccacactgtatggactatccctggccacacctggggagtaggccaagaaggaaaatctgacgaataaagacccccgctgccccata

SEQ ID NO: 171347 - DNA, 629 bp, Artificial Sequence
  derived and/or modified sequence
ggagagtgtgcagccgagtcactactgcctgcctgcctgcctgctacgagctggctatgctgggcctcaccagtgctctggatggtgccttctgtgtggatagcatcactgcgctgaaggccctggagcgagcaagcagcccctcagaacacggcccaaggaagagctacagcctaggcagcatctacactcgcctgtatgggcagtcccctccagactcgcacacggctgagggtgatgtcctggccctgctcagcatctgtcagtggagaccacaggccctgctgcggtgggtggatgctcacgccaggcctttcggcaccatcaggcccatgtatggggtcacagcctctgctaggaccaagccaagaccatctgctgtcacaaccactgcacacctggccacaaccaggaacactagtcccagccttggagagagcaggggtaccaaggatcttcctccagtgaaggaccctggagccctatccagggaggggctgctggccccactgggtctgctggccatcctgaccttggcagtagccacactgtatggactatccctggccacacctggggagtaggccaagaaggaaaatctgacgaataaagacccccgctgccccata

SEQ ID NO: 171348 - protein, 691 aa, Artificial Sequence
  derived and/or modified sequence
MSALLQDPMIAGQVSKPLLSVRSEMNAELRGEDKAATSDSELNEPLLAPVESNDSEDTPSKLFGARGNPALSDPGTPDQHQASQTHPPFPVGPQPLLTAQQLASAVAGVMPGGPPALNQPILIPFNMAGQLGGQQGLVLTLPTANLTNIQGLVAAAAAGGIMTLPLQNLQATSSLNSQLQQLQLQLQQQQQQQQQQPPPSTNQHPQPAPQAPSQSQQQPLQPTPPQQPPPASQQPPAPTSQLQQAPQPQQHQPHSHSQNQNQPSPTQQSSSPPQKPSQSPGHGLPSPLTPPNPLQLVNNPLASQAAAAAAAMSSIASSQAFGNALSSLQGVTGQLVTNAQGQIIGTIPLMPNPGPSSQAASGTQGLQVQPITPQLLTNAQGQIIATVIGNQILPVINTQGITLSPIKPGQQLHQPSQTSVGQAASQGNLLHLAHSQASMSQSPVRQASSSSSSSSSSSALSVGQLVSNPQTAAGEVDGVNLEEIREFAKAFKIRRLSLGLTQTQVGQALSATEGPAYSQSAICRHTILRSHFFLPQEAQENTIASSLTAKLNPGLLYPARFEKLDITPKSAQKIKPVLERWMAEAEARHRAGMQNLTEFIGSEPSKKRKRRTSFTPQALEILNAHFEKNTHPSGQEMTEIAEKLNYDREVVRVWFCNKRQALKNTIKRLKQHEPATAVPLEPLTDSLEENS

SEQ ID NO: 171349 - protein, 267 aa, Artificial Sequence
  derived and/or modified sequence
TPAFHFNILKPYIKIFSKSANIMHAKWQRLAMEGSTCLDVFEHISLMTLDSLQKCIFSFDSNCQEKPSEYITAIMELSALVVKRNNQFFRYKDFLYFLTPCGRRFHRACRLVHDFTDAVIQERRRTLTSQGVDDFLQAKAKSKTLDFIDVLLLSEDKNGKELSDEDIRAEADTFMFGGHDTTASGLSWVLYNLARHPEYQERCRQEVQELLKDREPKEIEWDDLAQLPFLTMCLKESLRLHPPIPTFARGCTQDVVLPDSRVIPKGL

SEQ ID NO: 171350 - DNA, 999 bp, Artificial Sequence
  derived and/or modified sequence
atgccgtctatcaccacggccgccgccagcggtgtcagccgcagcccgggaaaccgcaccggaagctgggtgacgtgggcctggaaacctagcgagtatatcaccgccatcatggagctctccgctctggtcgtcaaacggaacaaccagtttttccggtacaaggactttttgtatttcctcaccccctgtggtaggcgattccacagggcctgccgactggttcacgatttcacagacgccgttattcaggaacgcagaagaaccctcacgtcacagggagttgacgacttcctgcaagctaaagctaaatccaagacactggattttattgacgtgctgctgttgtctgaggacaaaaacgggaaagaattgtctgacgaggacattcgcgcagaagcggacacattcatgttcggagggcacgacactaccgccagtggtttgtcctgggtgctgtacaacttagctagacatcccgagtatcaggaacgctgccggcaagaagtccaagagttgttaaaagatcgggaaccaaaggaaattgaatgggacgatttagcccagcttccttttcttaccatgtgcctgaaggaatctttgcggctgcatccaccaatacccacatttgctcggggatgcactcaggacgttgtgctgcccgactctagagtgatacctaaaggaaatgtatgcaatatcaatatttttgcaattcaccacaatcccagcgtctggcccgatcccgaagtctatgatcctttcagatttgatcccgaaaacgcccagaaaagaagtccgatggcttttatccccttttctgccggcccccgtaactgcattggacagaaatttgctatggccgagatgaaagtagttcttgccctgactctcctgcgcttcagaattctgcccgatcatcgggaacctagacggacgccagagattgttctgagagccgaggatggcctctggttgcgagttgagcctctggggtag

SEQ ID NO: 171351 - DNA, 1560 bp, Artificial Sequence
  derived and/or modified sequence
atgagcctgctgtccctatcctggctgggcttgcgcccagtggccgcctccccttggcttctcttgctcgttgtcggggctagctggttgctagccagaattctcgcctggacctatgcattttaccacaatggtcggaggcttagatgctttcctcaacccaggaaacagaattggttcctcggacatctggggttggtaactcccacagaagaaggcttacgcgttctgactcagctggttgcaacttacccccagggtttcgtcaggtggctaggccctattaccccaattatcaacttgtgccatccagatatagtgagatcagtgatcaacactagtgacgccatcaccgacaaggacatagtcttttacaaaaccctgaaaccatggcttggggacggtttgctgcttagcgtgggcgataaatggaggcatcacagacggctgacgcctgccttccactttaacatccttaagccttatattaagatcttttccaagtccgcaaatatcatgcacgccaagtggcagaggcttgcgatggagggatcgacctgccttgacgttttcgaacatatctccctaatgactctggatagcttgcagaagtgtattttcagtttcgatagcaactgtcaggaaaagccctccgagtacatcacagctatcatggagctgagcgcgctggtagtgaagcgcaacaaccaattcttcagatacaaagattttctttactttctgacgccctgcggaaggcgcttccatagggcgtgccggctggtacacgactttaccgacgctgtcattcaagagcggaggcggactttgaccagccaaggcgtggatgatttcttacaggcaaaagccaagagcaagactctcgactttattgacgtgcttctgctgtccgaggacaaaaacggtaaggagcttagcgatgaggacatcagggcggaagctgatacatttatgttcggaggacatgatacgacagctagcggactgagctgggtcttgtataaccttgccagacatcccgaatatcaagaacggtgtcgtcaggaagttcaggaactgctgaaggaccgcgaacccaaggagatcgaatgggatgacctggcgcaactgcccttcctcacaatgtgcctcaaagaatctctcagactccacccacccataccaacctttgctcgcggatgtactcaggacgttgtcttgcctgattcccgggtgattccaaaggggaacgtctgtaacatcaacattttcgcgatccaccacaaccccagcgtctggcctgacccggaagtctatgacccttttcggttcgaccccgagaacgcccagaaacggtcgcctatggcttttatacctttttcagcaggcccccgcaattgtatcggacagaagttcgccatggctgaaatgaaagtcgtcctagcccttaccctgctgcgcttccgtatattgcccgaccaccgcgaaccaaggcggactccggagatagttctccgagctgaggatggactttggctccgggtagagccactggggtag

SEQ ID NO: 171352 - DNA, 804 bp, Artificial Sequence
  derived and/or modified sequence
acaccggcatttcactttaacatcttgaagccctatattaagatcttctcaaagtcagcaaatattatgcatgccaaatggcagagactcgctatggaagggtcaacctgcctggatgtgtttgagcatatcagcctaatgaccttagactctctgcagaaatgtatattcagctttgactctaactgtcaagaaaaaccctctgagtacattactgctataatggagctttccgcattggtcgttaaacggaataaccagttcttccggtataaagacttcctgtacttcttaactccatgcggtcgaagattccaccgcgcctgccggcttgttcatgattttaccgatgctgtcattcaagagcgcaggcgcaccttaacgtcccagggcgtggatgatttcctgcaggccaaggccaaatcaaaaactcttgactttatcgatgtgctcctgctcagcgaagataagaatggcaaagaattgtctgacgaggatattagagctgaggctgacacgtttatgttcgggggtcacgacaccaccgcatccgggctctcttgggttttgtacaaccttgcccggcatccagagtatcaggagcggtgcaggcaggaagtccaggaactgctcaaagatcgcgagccgaaggaaatcgaatgggacgatctggcacagctgccttttcttacaatgtgcctaaaagagtccctccggcttcaccctcccatccctacctttgcgagaggatgcacacaggacgtggtcctgcctgactcccgggtaattcctaagggcctctag

SEQ ID NO: 171353 - DNA, 999 bp, Artificial Sequence
  derived and/or modified sequence
atgcccagcatcaccacagctgctgccagcggcgtgagccgcagccctggcaacagaacaggctcctgggtgacctgggcctggaagcccagcgagtacatcacagccatcatggagctgagcgccctggtggtgaagaggaacaaccagttcttccgctacaaggacttcctgtacttcctgaccccctgtggccgccgcttccaccgggcctgccgcctggtgcatgacttcacagatgctgtgatccaggagaggaggaggaccctgaccagccagggcgtggatgacttcctgcaggccaaggccaagagcaagaccctggacttcattgatgtgctgctgctgtctgaggacaagaatggcaaggagctgagtgatgaggacatccgggcagaggccgacaccttcatgtttggaggccatgacaccacagccagcggcctgtcctgggtgctgtacaacctggcccggcaccctgagtaccaggagcgctgccggcaggaggtgcaggagctgctgaaggaccgggagcccaaggagattgagtgggatgacctggcccagctgcccttcctgaccatgtgcctgaaggagagcctgcggctgcacccccccatccccacctttgcccggggctgcacccaggatgtggtgctgcctgacagcagggtcatccccaagggaaatgtgtgcaacatcaacatctttgccatccaccacaaccccagcgtgtggccagaccctgaggtgtatgaccccttccgctttgatcctgaaaatgcccagaagaggagccccatggccttcatccccttctctgctggccccaggaactgcatcggccagaagtttgccatggccgagatgaaggtggtgctggccctgaccctgctgcgcttccgcatcctgcctgaccaccgggagcccaggaggaccccagagatcgtgctgcgggcagaagatggcctgtggctgcgggtggagcccctgggctag

SEQ ID NO: 171354 - DNA, 1560 bp, Artificial Sequence
  derived and/or modified sequence
atgagcctgctgagcctgtcctggctgggcctgcggcctgtggccgccagcccctggctgctgctgctggtggtgggcgcctcctggctgctggcccgcatcctggcctggacctacgccttctaccacaacggccggcggctgcgctgcttcccccagcccaggaagcagaactggttcctgggccacctgggcctggtgacccccacagaggagggcctgcgggtgctgacccagctggtggccacctacccccagggctttgtgcgctggctgggccccatcacccccatcatcaacctgtgccacccagacatcgtgcgcagcgtcatcaacaccagtgatgccatcacagacaaggacatcgtgttctacaagaccctgaagccctggctgggagatggcctgctgctgtctgtgggggacaagtggaggcaccaccggcggctgaccccagccttccacttcaacatcctgaagccctacatcaagatcttcagcaagagcgccaacatcatgcacgccaagtggcagaggctggccatggagggcagcacctgcctggatgtgtttgagcacatcagcctgatgaccctggacagcctgcagaagtgcatcttctcctttgacagcaactgccaggagaagcccagcgagtacatcacagccatcatggagctgagcgccctggtggtgaagaggaacaaccagttcttccgctacaaggacttcctgtacttcctgaccccctgtggccgccgcttccaccgggcctgccgcctggtgcatgacttcacagatgctgtgatccaggagaggaggaggaccctgaccagccagggcgtggatgacttcctgcaggccaaggccaagagcaagaccctggacttcattgatgtgctgctgctgtctgaggacaagaatggcaaggagctgagtgatgaggacatccgggcagaggccgacaccttcatgtttggaggccatgacaccacagccagcggcctgtcctgggtgctgtacaacctggcccggcaccctgagtaccaggagcgctgccggcaggaggtgcaggagctgctgaaggaccgggagcccaaggagattgagtgggatgacctggcccagctgcccttcctgaccatgtgcctgaaggagagcctgcggctgcacccccccatccccacctttgcccggggctgcacccaggatgtggtgctgcctgacagcagggtcatccccaagggaaatgtgtgcaacatcaacatctttgccatccaccacaaccccagcgtgtggccagaccctgaggtgtatgaccccttccgctttgatcctgaaaatgcccagaagaggagccccatggccttcatccccttctctgctggccccaggaactgcatcggccagaagtttgccatggccgagatgaaggtggtgctggccctgaccctgctgcgcttccgcatcctgcctgaccaccgggagcccaggaggaccccagaaattgtgctgcgggcagaagatggcctgtggctgcgggtggagcccctgggctag

SEQ ID NO: 171355 - DNA, 804 bp, Artificial Sequence
  derived and/or modified sequence
accccagccttccacttcaacatcctgaagccctacatcaagatcttcagcaagagcgccaacatcatgcacgccaagtggcagaggctggccatggagggcagcacctgcctggatgtgtttgagcacatcagcctgatgaccctggacagcctgcagaagtgcatcttctcctttgacagcaactgccaggagaagcccagcgagtacatcacagccatcatggagctgagcgccctggtggtgaagaggaacaaccagttcttccgctacaaggacttcctgtacttcctgaccccctgtggccgccgcttccaccgggcctgccgcctggtgcatgacttcacagatgctgtgatccaggagaggaggaggaccctgaccagccagggcgtggatgacttcctgcaggccaaggccaagagcaagaccctggacttcattgatgtgctgctgctgtctgaggacaagaatggcaaggagctgagtgatgaggacatccgggcagaggccgacaccttcatgtttggaggccatgacaccacagccagcggcctgtcctgggtgctgtacaacctggcccggcaccctgagtaccaggagcgctgccggcaggaggtgcaggagctgctgaaggaccgggagcccaaggagattgagtgggatgacctggcccagctgcccttcctgaccatgtgcctgaaggagagcctgcggctgcacccccccatccccacctttgcccggggctgcacccaggatgtggtgctgcctgacagcagggtcatccccaagggcctgtag

SEQ ID NO: 171356 - DNA, 999 bp, Artificial Sequence
  derived and/or modified sequence
atgcccagcatcaccaccgccgccgccagcggcgtgagccggagcccaggcaaccggacaggcagctgggtgacgtgggcatggaaaccctccgaatacattaccgccattatggagctctccgctctggtggtgaagcgcaataatcagttctttcggtataaggactttttgtatttccttactccttgcggccggcggtttcatcgcgcctgccgactggtccacgacttcacagacgccgtgattcaggaacgacgcaggaccctgacttctcagggcgtggacgactttctccaagccaaagcaaagtctaagaccttggactttatcgatgtcctgctgctaagcgaggacaaaaatggcaaagagctgagcgatgaggatatacgtgcggaagcagatacttttatgttcggcggccacgacaccactgcatctggcttatcctgggtgctgtacaacctagctagacatcccgaataccaggagcggtgtaggcaggaggtgcaggagctgttgaaagaccgcgagcccaaagagatcgagtgggatgatctagcccagctccccttcctgactatgtgtcttaaggaatctcttcgcctacaccctcccattcccacgtttgcccgcggttgcactcaggacgtcgtcctccccgactctagggtgataccaaaagggaacgtgtgtaatatcaatattttcgccatccaccacaaccctagtgtgtggcctgatccagaggtctatgatccattccgctttgaccctgagaatgcgcagaaacgctcacccatggccttcatcccctttagtgccgggccccgtaattgtataggacaaaagttcgccatggccgagatgaaagttgtcctcgcacttaccttgcttagatttcggatactccctgatcaccgggagccccggaggactcccgagatcgtgctgagggcagaagacgggctttggctcagggtggagcctttgggatag

SEQ ID NO: 171357 - DNA, 1560 bp, Artificial Sequence
  derived and/or modified sequence
atgagcctgctgagcctgagctggctgggcctgcggcccgtggccgcaagtccatggctgctgctgctggtcgtcggcgcttcatggttgttggcccgcatattagcctggacatacgccttctaccacaatgggagaagactgcgctgctttccacagcctagaaagcagaactggttcctcggccatctcgggctcgtgactcctaccgaggaagggcttagggtgcttactcagctggtcgctacgtacccccaggggttcgtgcgatggctcggccctattacacccatcattaatctgtgtcatcctgacattgttcgctcggtcatcaacacaagcgatgccatcactgataaggacattgtgttctacaagacattaaagccctggcttggggacgggcttctgttaagtgtcggggataaatggaggcatcatcgacgcctgacccctgctttccacttcaatatcttaaagccctacatcaagatctttagcaaaagcgctaatataatgcacgctaagtggcaacggctggccatggaaggcagtacttgcctggacgtcttcgagcatattagtctgatgaccttggacagccttcaaaagtgtattttttcttttgactcaaattgtcaagagaagccctcagaatacattacagcaattatggaactttcagccctggtagttaaacgtaacaaccagttttttcgctataaggatttcctgtatttcctcactccctgcggacgccgttttcaccgagcttgccgtctggtccacgacttcacagatgcggtgatccaagaacggcgccgtaccctgacctcacagggggtagatgacttcttgcaagcaaaggcaaagagtaaaacgttggacttcatcgacgtgctgttgttgagcgaggataaaaacggtaaggagctgagtgatgaagatataagagcagaggccgatacctttatgtttggcggccacgacactacggcatccgggctgagctgggtgctgtacaacctggccagacaccccgaataccaggagagatgccgacaggaagtgcaggagttgttaaaagacagagaacctaaggagatcgaatgggatgatctggcacagctccccttcctgaccatgtgcttgaaagaatctctgcgactgcatccccccatcccgacattcgcccgcggttgcacacaagatgttgtgctcccggactctcgcgtcatccccaagggaaatgtgtgcaacattaacattttcgccattcatcataacccctctgtgtggcccgatccagaggtgtacgacccttttcggttcgacccagagaacgcccagaagaggtctcccatggccttcattcccttctccgctggcccacgaaactgtattggccagaagttcgctatggccgaaatgaaggtcgttctcgcgttgaccttgttacggtttcggattctccccgaccaccgggagcctaggcgaacaccggagattgtgctcagagctgaggacggcctctggctgcgcgtggagccgctaggttag

SEQ ID NO: 171358 - DNA, 804 bp, Artificial Sequence
  derived and/or modified sequence
acccccgccttccacttcaacatcctgaagccctacatcaagatcttctccaaaagtgcgaacatcatgcatgcgaagtggcagaggctggcaatggagggctctacgtgcctagacgtctttgagcacatatctctgatgacactggacagcctccaaaagtgtattttttctttcgattctaactgccaggagaaaccaagtgagtacattaccgcaatcatggagctgagcgcactggtcgtcaaacgcaacaatcaattctttcgatataaggatttcctctatttcttaactccttgcggtcgaaggtttcacagagcgtgtagactagtacacgatttcacagatgcagtgattcaggagcgccgaagaaccttaacaagccaaggagtcgatgatttcttacaagcaaaggcaaagagcaaaacacttgacttcattgatgtgctactgctgtccgaagacaaaaatggaaaagaactgagtgacgaagacattcgagcggaggcagacacctttatgttcggcggacatgacaccaccgcgagcgggctgtcctgggtactctataatctagcacggcaccccgagtaccaggagagatgcaggcaagaggttcaggaactgttgaaggatcgagaacccaaagagatcgaatgggacgacctggcccagctgccgtttcttaccatgtgcctgaaggagagcttgcgcctccatccccccattccgactttcgccaggggctgtacccaggatgtcgtgctacccgacagtcgggtgatacctaagggcctctag

SEQ ID NO: 171359 - DNA, 999 bp, Artificial Sequence
  derived and/or modified sequence
atgccatcgattaccactgcagcagcctctggggtgagtcgctcccccggtaaccgcacgggctcctgggtaacctgggcgtggaagccatccgaatacattaccgcaatcatggaactgagcgctctggtcgtcaagcggaataatcagtttttcagatacaaggacttcctttactttctaacaccctgtggtagacggttccatagggcttgcagattggttcatgacttcaccgacgccgtaatacaggaacgccgacgaacacttacatcgcagggagtggacgactttcttcaagcaaaggccaagtctaagactctcgacttcattgatgttctgctcctgtccgaggataaaaatgggaaggaactatctgatgaggacattcgcgctgaagcagacacattcatgttcgggggtcacgatactacggcttccgggctgagttgggtactgtataatttggcaagacatcccgaataccaggagcgttgcaggcaggaggtgcaggagttgctgaaagatcgggagcccaaagaaatcgagtgggacgatctggcacagttgcctttcctgacaatgtgcctgaaagagtcactgcgcctccaccctccgattccaaccttcgccagagggtgcacgcaggatgtcgtgttacctgactcacgcgttattccaaagggcaatgtctgtaacatcaatattttcgccattcaccacaatccctcagtgtggccagatccagaggtgtacgacccctttcgctttgaccccgagaacgcacagaagaggtctcccatggcattcattccgttctcagcaggacctcggaactgtattggccagaagttcgcgatggctgaaatgaaggtagtcttggcactcacgctgctgcgctttcgtatcctccccgatcaccgtgaacctagaagaactcccgagatcgtgcttagagcggaggacggtctttggttacgtgtcgagccgttgggctag

SEQ ID NO: 171360 - DNA, 1560 bp, Artificial Sequence
  derived and/or modified sequence
atgtccttactctccctgtcctggttaggtctcaggcccgttgccgcttcgccttggctcctgctgttggtcgtgggtgcttcctggctcctcgcacggattctggcctggacatatgcattctatcataacggtcggagactccgttgcttccctcagcctagaaagcagaattggtttctggggcacctcggactagtcactccaacagaggaggggctcagagtgctgacacagctcgtcgcgacttatccccaaggcttcgtccgttggctgggcccaataacccctattatcaacctgtgtcacccggatatcgtgcgcagtgtcatcaatacgtcagacgcgattaccgataaagacatcgtattttataagacacttaagccatggcttggcgacgggttactgttgtccgtgggagataagtggaggcaccacaggaggctgacgccagcatttcacttcaatatccttaaaccatatatcaagatattttctaaaagtgccaacatcatgcatgctaagtggcagagactggccatggagggctcaacttgcctcgatgtgttcgagcacataagcctcatgacactggactctctacagaagtgcatcttttccttcgacagcaattgtcaggaaaaaccaagcgagtacatcacagctatcatggagttgtcagccctggtcgtgaagcggaacaaccagttcttcagatataaagactttctttatttcctcactccctgcgggaggcggttccaccgagcatgcaggttggttcatgactttacggatgccgtcatccaagagcgacgcagaaccctgacgtcgcagggggtcgacgattttctccaagccaaggcgaaaagcaaaactctggattttattgacgtcctcctgctttccgaagacaaaaacggcaaggaattatctgacgaagacattcgggcagaagctgacacatttatgttcggaggccatgacacgaccgcgtcaggtctaagctgggtgttgtacaatctagccaggcacccagaataccaggagagatgtaggcaggaagttcaagagctcttgaaggatcgagagcctaaagagatcgaatgggacgatcttgctcagttgccttttttgactatgtgtcttaaggagagcttgcggcttcacccccctatcccaaccttcgcaagggggtgcactcaggacgtagtgctgcccgacagccgagttatccctaagggcaatgtgtgcaacattaacatcttcgctatacatcataaccctagcgtatggcctgatcctgaggtgtatgacccattccgatttgacccagaaaatgcacagaagcggtccccaatggcctttatacccttcagcgccggacccaggaactgtataggacagaagttcgctatggctgagatgaaagtggtgcttgcactcacactgttacggttccgcatccttccagatcaccgagaacctaggaggactcccgagattgtgctcagagccgaggatggtctgtggctgcgggtggaaccgctgggatag

SEQ ID NO: 171361 - DNA, 804 bp, Artificial Sequence
  derived and/or modified sequence
acgcccgcatttcatttcaacatcctgaagccttacatcaagatctttagcaagtcagcaaatatcatgcacgccaaatggcagcggttggcaatggaaggtagcacctgtctggatgtctttgagcacatttctctgatgaccctggattctctgcagaagtgtattttcagcttcgattccaactgtcaggaaaagccttccgaatacatcaccgctatcatggagctgtccgctttagtcgtaaaaaggaataatcagttctttagatacaaagattttctgtacttcctcactccttgcggacgcaggttccacagggcttgccggcttgtgcatgactttaccgatgccgttatacaggaacgacggagaacattgacgtctcaaggggtggatgacttcctgcaggctaaggccaagtccaagaccctggacttcatcgatgtactcctactgtctgaggacaagaatgggaaggagctgagtgatgaagatattcgcgctgaagcggatacgttcatgttcggaggccatgacacgacagcctctggacttagctgggtactatacaatctcgcgagacaccccgagtaccaagaaaggtgcaggcaggaggttcaggagctgctcaaggacagggaaccaaaagaaattgagtgggacgacctggcccagttgcctttcctgacaatgtgtcttaaggaaagcctcaggctgcaccctcccattccgacatttgcccgtggctgcactcaagacgttgttctgcctgactctagagtgattcctaaaggcctctag

SEQ ID NO: 171362 - DNA, 1292 bp, Artificial Sequence
  derived and/or modified sequence
agcaaaaacctcctggcaaaggaggagaggaggttgtgcgggacaaccttctcctgacagaaggatgtcgctgctgagcctgtcttggctgggcctcaggccggtggcagcatccccgtggctgctcctgctggtggtcggggcctcctggctcctggcccgcatcctggcctggacctatgccttctatcacaacggccgccgcctccggtgtttcccgcagccccggaaacagaactggttcttgggtcacctgggcctggaagcccagtgaatatattactgcgatcatggagctcagtgcccttgtagtgaaacggaataaccagttcttccggtacaaggacttcctgtacttcctcactccctgtggacggcgcttccacagggcctgcagactggtgcacgacttcacagatgccgtcatccaggagcggcgccgcaccctcactagccagggtgttgatgacttcctccaagccaaggccaagtccaagactttggactttattgatgtgctcctgctgagcgaggataaaaatggtaaagagttgtcagatgaggacataagagcagaagctgacactttcatgtttggaggccatgacaccacggccagtggcctctcctgggtcttgtacaacctcgcgaggcacccagaataccaagaacgctgccggcaggaggtgcaagagcttctgaaggaccgtgagcctaaagagattgaatgggacgacctggcccagttgcccttcctgaccatgtgcctgaaggagagcctgcggttgcatcccccaatccctacattcgcccgcggctgcacccaggacgtggtgctcccagacagccgagtcatccccaaagggaatgtctgtaacatcaacatcttcgcaatccatcacaacccctcagtctggccagaccctgaggtctatgaccccttccgcttcgacccagaaaacgcccagaagaggtcacctatggcttttattcctttctcggcggggcccaggaactgcatcgggcagaagttcgcgatggcagagatgaaggtggtcctggcgctcacgctgctgcgcttccgcatcctgcccgaccacagggagccacgcaggacgccggagattgttttgcgtgcggaggacggactttggctgcgagtagaacccctgggctgaggcctgcagtgacccacccacctacctttgcatcacctacctttgcaccaactaccttttcagatttccggtaataaatctgtgttggcccctgtgcctcagtcccgcggatgg

SEQ ID NO: 171363 - DNA, 999 bp, Artificial Sequence
  derived and/or modified sequence
atgcccagcatcaccaccgccgccgccagcggcgtgagcagaagccccggcaacagaaccggcagctgggtgacctgggcctggaagcccagcgagtacatcaccgccatcatggagctgagcgccctggtggtgaagagaaacaaccagttcttcagatacaaggacttcctgtacttcctgaccccctgcggcagaagattccacagagcctgcagactggtgcacgacttcaccgacgccgtgatccaggagagaagaagaaccctgaccagccagggcgtggacgacttcctgcaggccaaggccaagagcaagaccctggacttcatcgacgtgctgctgctgagcgaggacaagaacggcaaggagctgagcgacgaggacatcagagccgaggccgacaccttcatgttcggcggccacgacaccaccgccagcggcctgagctgggtgctgtacaacctggccagacaccccgagtaccaggagagatgcagacaggaggtgcaggagctgctgaaggacagagagcccaaggagatcgagtgggacgacctggcccagctgcccttcctgaccatgtgcctgaaggagagcctgagactgcacccccccatccccaccttcgccagaggctgcacccaggacgtggtgctgcccgacagcagagtgatccccaagggcaacgtgtgcaacatcaacatcttcgccatccaccacaaccccagcgtgtggcccgaccccgaggtgtacgaccccttcagattcgaccccgagaacgcccagaagagaagccccatggccttcatccccttcagcgccggccccagaaactgcatcggccagaagttcgccatggccgagatgaaggtggtgctggccctgaccctgctgagattcagaatcctgcccgaccacagagagcccagaagaacccccgagatcgtgctgagagccgaggacggcctgtggctgagagtggagcccctgggctag

SEQ ID NO: 171364 - DNA, 1560 bp, Artificial Sequence
  derived and/or modified sequence
atgagcctgctgagcctgagctggctgggcctgagacccgtggccgccagcccctggctgctgctgctggtggtgggcgccagctggctgctggccagaatcctggcctggacctacgccttctaccacaacggcagaagactgagatgcttcccccagcccagaaagcagaactggttcctgggccacctgggcctggtgacccccaccgaggagggcctgagagtgctgacccagctggtggccacctacccccagggcttcgtgagatggctgggccccatcacccccatcatcaacctgtgccaccccgacatcgtgagaagcgtgatcaacaccagcgacgccatcaccgacaaggacatcgtgttctacaagaccctgaagccctggctgggcgacggcctgctgctgagcgtgggcgacaagtggagacaccacagaagactgacccccgccttccacttcaacatcctgaagccctacatcaagatcttcagcaagagcgccaacatcatgcacgccaagtggcagagactggccatggagggcagcacctgcctggacgtgttcgagcacatcagcctgatgaccctggacagcctgcagaagtgcatcttcagcttcgacagcaactgccaggagaagcccagcgagtacatcaccgccatcatggagctgagcgccctggtggtgaagagaaacaaccagttcttcagatacaaggacttcctgtacttcctgaccccctgcggcagaagattccacagagcctgcagactggtgcacgacttcaccgacgccgtgatccaggagagaagaagaaccctgaccagccagggcgtggacgacttcctgcaggccaaggccaagagcaagaccctggacttcatcgacgtgctgctgctgagcgaggacaagaacggcaaggagctgagcgacgaggacatcagagccgaggccgacaccttcatgttcggcggccacgacaccaccgccagcggcctgagctgggtgctgtacaacctggccagacaccccgagtaccaggagagatgcagacaggaggtgcaggagctgctgaaggacagagagcccaaggagatcgagtgggacgacctggcccagctgcccttcctgaccatgtgcctgaaggagagcctgagactgcacccccccatccccaccttcgccagaggctgcacccaggacgtggtgctgcccgacagcagagtgatccccaagggcaacgtgtgcaacatcaacatcttcgccatccaccacaaccccagcgtgtggcccgaccccgaggtgtacgaccccttcagattcgaccccgagaacgcccagaagagaagccccatggccttcatccccttcagcgccggccccagaaactgcatcggccagaagttcgccatggccgagatgaaggtggtgctggccctgaccctgctgagattcagaatcctgcccgaccacagagagcccagaagaacccccgagatcgtgctgagagccgaggacggcctgtggctgagagtggagcccctgggctag

SEQ ID NO: 171365 - DNA, 804 bp, Artificial Sequence
  derived and/or modified sequence
acccccgccttccacttcaacatcctgaagccctacatcaagatcttcagcaagagcgccaacatcatgcacgccaagtggcagagactggccatggagggcagcacctgcctggacgtgttcgagcacatcagcctgatgaccctggacagcctgcagaagtgcatcttcagcttcgacagcaactgccaggagaagcccagcgagtacatcaccgccatcatggagctgagcgccctggtggtgaagagaaacaaccagttcttcagatacaaggacttcctgtacttcctgaccccctgcggcagaagattccacagagcctgcagactggtgcacgacttcaccgacgccgtgatccaggagagaagaagaaccctgaccagccagggcgtggacgacttcctgcaggccaaggccaagagcaagaccctggacttcatcgacgtgctgctgctgagcgaggacaagaacggcaaggagctgagcgacgaggacatcagagccgaggccgacaccttcatgttcggcggccacgacaccaccgccagcggcctgagctgggtgctgtacaacctggccagacaccccgagtaccaggagagatgcagacaggaggtgcaggagctgctgaaggacagagagcccaaggagatcgagtgggacgacctggcccagctgcccttcctgaccatgtgcctgaaggagagcctgagactgcacccccccatccccaccttcgccagaggctgcacccaggacgtggtgctgcccgacagcagagtgatccccaagggcctgtag

SEQ ID NO: 171366 - protein, 521 aa, Artificial Sequence
  derived and/or modified sequence
MGEVEAPGRLWLESPPGGAPPIFLPSDGQALVLGRGPLTQVTDRKCSRTQVELVADPETRTVAVKQLGVNPSTTGTQELKPGLEGSLGVGDTLYLVNGLHPLTLRWEETRTPESQPDTPPGTPLVSQDEKRDAELPKKRMRKSNPGWENLEKLLVFTAAGVKPQGKVAGFDLDGTLITTRSGKVFPTGPSDWRILYPEIPRKLRELEAEGYKLVIFTNQMSIGRGKLPAEEFKAKVEAVVEKLGVPFQVLVATHAGLYRKPVTGMWDHLQEQANDGTPISIGDSIFVGDAAGRPANWAPGRKKKDFSCADRLFALNLGLPFATPEEFFLKWPAAGFELPAFDPRTVSRSGPLCLPESRALLSASPEVVVAVGFPGAGKSTFLKKHLVSAGYVHVNRDTLGSWQRCVTTCETALKQGKRVAIDNTNPDAASRARYVQCARAAGVPCRCFLFTATLEQARHNNRFREMTDSSHIPVSDMVMYGYRKQFEAPTLAEGFSAILEIPFRLWVEPRLGRLYCQFSEG

SEQ ID NO: 171367 - DNA, 1566 bp, Artificial Sequence
  derived and/or modified sequence
atgggcgaggtggaggcccccggcagactgtggctggagagcccccccggcggcgccccccccatcttcctgcccagcgacggccaggccctggtgctgggcagaggccccctgacccaggtgaccgacagaaagtgcagcagaacccaggtggagctggtggccgaccccgagaccagaaccgtggccgtgaagcagctgggcgtgaaccccagcaccaccggcacccaggagctgaagcccggcctggagggcagcctgggcgtgggcgacaccctgtacctggtgaacggcctgcaccccctgaccctgagatgggaggagaccagaacccccgagagccagcccgacaccccccccggcacccccctggtgagccaggacgagaagagagacgccgagctgcccaagaagagaatgagaaagagcaaccccggctgggagaacctggagaagctgctggtgttcaccgccgccggcgtgaagccccagggcaaggtggccggcttcgacctggacggcaccctgatcaccaccagaagcggcaaggtgttccccaccggccccagcgactggagaatcctgtaccccgagatccccagaaagctgagagagctggaggccgagggctacaagctggtgatcttcaccaaccagatgagcatcggcagaggcaagctgcccgccgaggagttcaaggccaaggtggaggccgtggtggagaagctgggcgtgcccttccaggtgctggtggccacccacgccggcctgtacagaaagcccgtgaccggcatgtgggaccacctgcaggagcaggccaacgacggcacccccatcagcatcggcgacagcatcttcgtgggcgacgccgccggcagacccgccaactgggcccccggcagaaagaagaaggacttcagctgcgccgacagactgttcgccctgaacctgggcctgcccttcgccacccccgaggagttcttcctgaagtggcccgccgccggcttcgagctgcccgccttcgaccccagaaccgtgagcagaagcggccccctgtgcctgcccgagagcagagccctgctgagcgccagccccgaggtggtggtggccgtgggcttccccggcgccggcaagagcaccttcctgaagaagcacctggtgagcgccggctacgtgcacgtgaacagagacaccctgggcagctggcagagatgcgtgaccacctgcgagaccgccctgaagcagggcaagagagtggccatcgacaacaccaaccccgacgccgccagcagagccagatacgtgcagtgcgccagagccgccggcgtgccctgcagatgcttcctgttcaccgccaccctggagcaggccagacacaacaacagattcagagagatgaccgacagcagccacatccccgtgagcgacatggtgatgtacggctacagaaagcagttcgaggcccccaccctggccgagggcttcagcgccatcctggagatccccttcagactgtgggtggagcccagactgggcagactgtactgccagttcagcgagggctag

SEQ ID NO: 171368 - DNA, 1566 bp, Artificial Sequence
  derived and/or modified sequence
atgggagaggtggaagcgcctggtaggctatggctggagtccccccctggtggagctcccccaatctttctgccctctgacgggcaggctctggtgctggggcggggcccattgacccaggttaccgaccgcaagtgctcacgcacacaggtagaacttgtcgctgatcctgagactagaacagtggcagtcaagcaactgggcgttaatcctagtacaactgggactcaagagttaaagccaggcttagagggctccttaggcgtgggggatactctgtatctggtgaatggacttcatcctctgaccctgcgctgggaggagacgcgtacccccgagtctcagccagatacccctcctggcacaccacttgtcagccaggacgagaagcgcgacgccgaacttcccaagaaaaggatgcggaaatctaatcctggctgggagaatttggagaagctgctcgtcttcacagccgcaggagtcaaaccgcaaggcaaggtggcggggttcgacctggacggtaccttaatcacgaccaggtcaggcaaggtgttcccaaccggcccttctgactggagaattttgtacccggagatccccagaaagttaagggagctggaagccgagggctacaagctcgtcatcttcacaaatcaaatgagcatcgggaggggtaaactgccagctgaggagtttaaggcaaaggtggaggccgtggtagaaaaactcggggtgcccttccaggttttggttgccacacacgctgggctatataggaagcctgtgaccggcatgtgggaccatcttcaagaacaggctaacgatggtacgcccatctcgataggcgacagcatctttgttggggatgcggctggaaggccagctaactgggctccgggccggaaaaagaaagatttcagctgcgctgacagactgttcgccctcaacctcgggctaccgttcgccacccctgaagagttcttcctcaagtggccagctgcgggcttcgaactgccagcatttgacccccggacagtgtcacgaagcggccccttatgcctcccagaaagcagagcattgctgagcgcatctccagaggttgttgtggctgtggggttcccaggagctggcaagagtaccttcctcaagaagcatctagttagcgccggctatgtgcacgtgaatcgggacacgcttggctcttggcagaggtgtgttacgacatgcgagacagccttgaaacagggcaaaagagtagcgatcgataataccaaccctgacgcagccagtagagcacgatatgtccagtgcgcccgggccgcaggcgtcccttgtagatgttttctgtttaccgcgacactcgagcaggcaaggcacaacaataggtttcgtgaaatgactgactcatctcacatacctgtcagcgacatggtaatgtacggatataggaagcaattcgaggccccgacgctggccgagggcttcagcgcaatactcgagattccctttagactgtgggtggagccaaggctgggtcggctgtattgtcagtttagtgaaggctag

SEQ ID NO: 171369 - DNA, 1566 bp, Artificial Sequence
  derived and/or modified sequence
atgggagaggtggaggcccctggccgcctgtggctggagagccccccaggaggagccccacccatcttcctgcccagtgatggccaggccctggtgctgggccggggccccctgacccaggtgacagacaggaagtgcagcaggacccaggtggagctggtggccgaccctgagaccaggacagtggccgtgaagcagctgggcgtgaaccccagcaccaccggcacccaggagctgaagccaggcctggagggcagcctgggcgtgggggacaccctgtacctggtgaatggcctgcaccccctgaccctgcgctgggaggagaccaggaccccagagagccagcctgacaccccacctggcacccccctggtgtcccaggatgagaagagagatgctgagctgcccaagaagaggatgaggaagagcaaccctggctgggagaacctggagaagctgctggtgttcaccgctgctggggtgaagccccagggcaaggtggccggctttgacctggatggcaccctcatcaccaccaggtctgggaaggtgttccccaccggccccagcgactggaggatcctgtacccagagatccccaggaagctgcgggagctggaggccgagggctacaagctggtgatcttcaccaaccagatgagcatcggccggggcaagctgcctgctgaggagttcaaggccaaggtggaggccgtggtggagaagctgggcgtgcccttccaggtgctggtggccacccatgctggcctgtacaggaagcctgtgacaggcatgtgggaccacctgcaggagcaggccaatgatggcacccccatcagcattggagacagcatctttgtgggagatgctgctggccggcctgccaactgggcccctggcaggaagaagaaggacttcagctgtgccgaccggctgtttgccctgaacctgggcctgccctttgccaccccagaggagttcttcctgaagtggccagctgctggctttgagctgcctgcctttgaccccaggacagtgagccgcagcggccccctgtgcctgcctgagagccgggccctgctgagcgccagccctgaggtggtggtggccgtgggcttccctggggccggcaagagcaccttcctgaagaagcacctggtgtctgctggctacgtgcacgtgaacagagacaccctgggctcctggcagagatgtgtgaccacctgtgaaacagccctgaagcagggcaagagggtggccatcgacaacaccaacccagatgctgccagccgggcccgctacgtgcagtgtgcccgggctgctggggtgccctgccgctgcttcctgttcaccgccaccctggagcaggcccggcacaacaaccgcttccgggagatgacagacagcagccacatccctgtgtctgacatggtgatgtatggctacaggaagcagtttgaggcccccaccctggccgagggcttcagcgccatcctggagatccccttccggctgtgggtggagccccggctgggccgcctgtactgccagttcagcgagggctag

SEQ ID NO: 171370 - DNA, 1566 bp, Artificial Sequence
  derived and/or modified sequence
atgggcgaggtggaggcccccggccggctgtggctggagagccccccgggcggcgcaccaccaattttcctccctagtgacggccaagctctcgtgctggggcgcggccccctgacccaagtgaccgaccgaaaatgttccaggacccaggtcgagttggtagccgacccagagacccggaccgtggcagtgaaacagctgggggtcaacccgagtactaccgggacccaggagctgaagcccggtctggaagggagtctgggagtaggtgataccctgtatttagttaacggcctgcacccactgacccttcggtgggaagagacacggactccagagtcacaaccagatacccctcctggcacgcccctcgtgagtcaggacgaaaaacgggacgccgagttaccaaagaaaaggatgcgcaaatctaaccctggatgggagaacctggaaaagctcctcgtgtttactgctgccggtgtgaaacctcagggcaaagtggcaggattcgacctcgatgggaccttgatcaccacccgctccggaaaagtgttcccaaccggcccctctgactggcgcatcctgtacccagagattccccggaagctgcgggaactggaagctgagggctataagctggtgatctttaccaatcaaatgagcattggtcgaggcaaattacccgctgaggagttcaaggcaaaagtcgaggccgtggttgagaagctcggcgttccattccaggttcttgtcgccacccacgccggcctgtacagaaagcccgtgacagggatgtgggatcacctccaggaacaggcgaacgacggaacccctattagtattggagattctatattcgttggtgatgcggcaggtcgccctgccaactgggctccaggccggaaaaagaaggacttcagctgcgccgatagactatttgcccttaatcttgggctgccattcgcgacaccagaagagttttttttgaagtggcccgcagctggattcgaattacctgccttcgatccaaggaccgtgtcaaggagtggtccactctgtctacccgaatcccgcgcattgctcagcgctagccctgaggtggtcgtcgccgtggggtttcccggcgccggaaagtcgaccttcctcaaaaagcacctggtgtctgcgggctacgtgcacgttaatcgcgacaccttagggtcctggcagcggtgcgttacaacatgcgaaaccgccttgaagcaggggaagagggttgccatagataacaccaacccagatgctgcatcccgcgctcgttacgtacagtgcgccagggctgcaggagtcccctgcaggtgcttcctgttcacggccaccctggagcaagcacggcataataacagatttagggagatgacagacagctcccacatcccggtaagtgatatggtcatgtacggataccgcaaacagttcgaagcgcccacattagccgagggattctctgccattttggaaattccattcagactgtgggttgaaccaagactcggcaggctctattgccagtttagtgaagggtag

SEQ ID NO: 171371 - DNA, 1566 bp, Artificial Sequence
  derived and/or modified sequence
atgggggaagtggaggcgcctgggagactgtggttggaaagtccgccaggcggagcccctcctatctttcttccttccgatggacaggctctggtgcttggcaggggtcctctcacacaagtcacagaccggaagtgttcgcgcactcaggtggagctcgtagccgatcctgagacccgaactgtggccgttaaacagctcggggtgaatccatctacaactggcacacaggagctgaaacccggtctcgaagggtccctgggggtcggtgacactctgtacttggtgaatgggctgcacccgcttactctcagatgggaagagacacgaacacctgagtctcaaccggatacccccccagggacacctcttgtgtcacaggatgaaaagagagatgcagaactccctaagaagagaatgcgaaagtccaatcccggttgggaaaaccttgaaaagctactcgttttcacagccgctggggtcaaacctcagggcaaagtcgctggattcgacttggacggcaccttgattacaaccaggagcgggaaggtgtttcccaccgggccaagcgattggagaatactttacccagagatcccaaggaagctcagggaactggaggcggagggttataaacttgtcatcttcactaatcaaatgtccattggcagaggcaagcttcctgccgaggagttcaaggccaaggtcgaggcagtggttgaaaagctgggggttcctttccaggtccttgtcgccactcatgctggtttataccggaagcccgtgaccggcatgtgggaccacctgcaggaacaagccaacgacgggactcctattagcattggagactctatctttgtaggagatgcagccggtcggccagccaattgggcccctggaaggaagaaaaaggatttcagctgtgccgatcggttgtttgcactcaatctcggactccctttcgctacccccgaagaattctttctcaaatggcccgcagccggattcgagctaccggcattcgatccacgaacagtgtcccggtccggcccactctgtctcccagaatcccgtgccctgttgagcgcttcacccgaagtcgtggtggcagtcggctttcctggtgccggaaagtcgacatttctaaagaagcacctggtctcggccggatatgtgcacgttaatagggacacactcggttcctggcaacgctgcgtgacaacctgcgaaaccgccctaaagcaggggaagagggtcgccatcgacaataccaaccctgatgccgcttctcgtgctcgctatgtgcagtgcgccagagctgctggagtgccatgtcggtgcttcctctttacagccaccctcgagcaggcgcgacacaataataggttcagagaaatgactgactctagccacattccagtctcggatatggtgatgtacgggtaccgcaaacagtttgaggctccaacactggccgagggcttctctgcgattctggagatcccgttccggctgtgggtggaacccaggcttggtaggttgtactgccagttctcagagggttag

SEQ ID NO: 171372 - DNA, 1715 bp, Artificial Sequence
  derived and/or modified sequence
ggaaccgaccgccgccggccgggttgcaggcggggcacctcgggcaggacctccctggtcggaagtggccgtgagcccaagccgcggtcccgggccggcacccaggatgggcgaggtggaggccccgggccgcttgtggctcgagagcccccctgggggagcgccccccatcttcctgccctcggacgggcaagccctggtcctgggcaggggacccctgacccaggttacggaccggaagtgctccagaactcaagtggagctggtcgcagatcctgagacccggacagtggcagtgaaacagctgggagttaacccctcaactaccgggacccaggagttgaagccggggttggagggctctctgggggtgggggacacactgtatttggtcaatggcctccacccactgaccctgcgctgggaagagacccgcacaccagaatcccagccagatactccgcctggcacccctctggtgtcccaagatgagaagagagatgctgagctgccgaagaagcgtatgcggaagtcaaaccccggctgggagaacttggagaagttgctagtgttcaccgcagctggggtgaaaccccagggcaaggtggctggctttgatctggacgggacgctcatcaccacacgctctgggaaggtctttcccactggccccagtgactggaggatcttgtacccagagattccccgtaagctccgagagctggaagccgagggctacaagctggtgatcttcaccaaccagatgagcatcgggcgcgggaagctgccagccgaggagttcaaggccaaggtggaggctgtggtggagaagctgggggtccccttccaggtgctggtggccacgcacgcaggcttgtaccggaagccggtgacgggcatgtgggaccatctgcaggagcaggccaacgacggcacgcccatatccatcggggacagcatctttgtgggagacgcagccggacgcccggccaactgggccccggggcggaagaagaaagacttctcctgcgccgatcgcctgtttgccctcaaccttggcctgcccttcgccacgcctgaggagttctttctcaagtggccagcagccggcttcgagctcccagcctttgatccgaggactgtctcccgctcagggcctctctgcctccccgagtccagggccctcctgagcgccagcccggaggtggttgtcgcagtgggattccctggggccgggaagtccacctttctcaagaagcacctcgtgtcggccggatatgtccacgtgaacagggacacgctaggctcctggcagcgctgtgtgaccacgtgtgagacagccctgaagcaagggaaacgggtcgccatcgacaacacaaacccagacgccgcgagccgcgccaggtacgtccagtgtgcccgagccgcgggcgtcccctgccgctgcttcctcttcaccgccactctggagcaggcgcgccacaacaaccggtttcgagagatgacggactcctctcatatccccgtgtcagacatggtcatgtatggctacaggaagcagttcgaggccccaacgctggctgaaggcttctctgccatcctggagatcccgttccggctatgggtggagccgaggctggggcggctgtactgccagttctccgagggctgagccccgcccagctcccctccacaataaacgctgtttctccttg

SEQ ID NO: 171373 - protein, 327 aa, Artificial Sequence
  derived and/or modified sequence
MFPSRRKAAQLPWEDGRSGLLSGGLPRKCSVFHLFVACLSLGFFSLLWLQLSCSGDVARAVRGQGQETSGPPRACPPEPPPEHWEEDASWGPHRLAVLVPFRERFEELLVFVPHMRRFLSRKKIRHHIYVLNQVDHFRFNRAALINVGFLESSNSTDYIAMHDVDLLPLNEELDYGFPEAGPFHVASPELHPLYHYKTYVGGILLLSKQHYRLCNGMSNRFWGWGREDDEFYRRIKGAGLQLFRPSGITTGYKTFRHLHDPAWRKRDQKRIAAQKQEQFKVDREGGLNTVKYHVASRTALSVGGAPCTVLNIMLDCDKTATPWCTFS

SEQ ID NO: 171374 - DNA, 984 bp, Artificial Sequence
  derived and/or modified sequence
atgttccccagcagaagaaaggccgcccagctgccctgggaggacggcagaagcggcctgctgagcggcggcctgcccagaaagtgcagcgtgttccacctgttcgtggcctgcctgagcctgggcttcttcagcctgctgtggctgcagctgagctgcagcggcgacgtggccagagccgtgagaggccagggccaggagaccagcggcccccccagagcctgcccccccgagcccccccccgagcactgggaggaggacgccagctggggcccccacagactggccgtgctggtgcccttcagagagagattcgaggagctgctggtgttcgtgccccacatgagaagattcctgagcagaaagaagatcagacaccacatctacgtgctgaaccaggtggaccacttcagattcaacagagccgccctgatcaacgtgggcttcctggagagcagcaacagcaccgactacatcgccatgcacgacgtggacctgctgcccctgaacgaggagctggactacggcttccccgaggccggccccttccacgtggccagccccgagctgcaccccctgtaccactacaagacctacgtgggcggcatcctgctgctgagcaagcagcactacagactgtgcaacggcatgagcaacagattctggggctggggcagagaggacgacgagttctacagaagaatcaagggcgccggcctgcagctgttcagacccagcggcatcaccaccggctacaagaccttcagacacctgcacgaccccgcctggagaaagagagaccagaagagaatcgccgcccagaagcaggagcagttcaaggtggacagagagggcggcctgaacaccgtgaagtaccacgtggccagcagaaccgccctgagcgtgggcggcgccccctgcaccgtgctgaacatcatgctggactgcgacaagaccgccaccccctggtgcaccttcagctag

SEQ ID NO: 171375 - DNA, 984 bp, Artificial Sequence
  derived and/or modified sequence
atgttcccctctcgccggaaggccgcccagctcccctgggaggacggcaggtcaggactgctctccggcgggttgccaagaaaatgttctgtgttccatctgtttgtagcttgcttatctctggggttcttcagcctgctgtggctgcagctgtcatgttcaggagatgtggctcgggctgtgcggggccagggtcaggaaacctccggtccaccgcgggcatgcccacctgagcccccacctgagcattgggaagaggacgcctcctggggaccccacaggctggcagtcctggttccattcagggagagatttgaagagctcttggtattcgttccccatatgcggagattcctgagtcggaaaaagatcagacaccacatctatgtgctcaaccaggtcgaccatttccgcttcaatcgcgccgccttaatcaacgtcggctttctcgagtcctccaatagcaccgactacatcgctatgcacgatgttgacctattaccgctcaatgaggaactggattacggcttccccgaagccggacctttccacgtggcctcccctgaactgcaccccctgtatcactataagacttatgttggcggtattctgctgctctcaaagcaacattatagactgtgcaacggcatgagtaatcggttctggggatgggggagagaggatgacgagttttatcgaaggatcaaaggagccgggctacagctcttccgaccctcagggatcaccactgggtacaagacgttccgccacctccatgatcccgcctggaggaagcgcgatcagaaacgaatcgcggcacagaaacaggaacagttcaaggtggaccgggaaggaggacttaacaccgttaagtatcatgtggcatccaggaccgccctgagtgtgggcggagcaccttgcaccgtgctgaatattatgctcgattgtgataaaaccgcgactccatggtgcacattttcgtag

SEQ ID NO: 171376 - DNA, 984 bp, Artificial Sequence
  derived and/or modified sequence
atgttccccagcaggaggaaggccgcccagctgccctgggaggatggccgcagcggcctgctgagcggcggcctgcccaggaagtgcagcgtcttccacctgtttgtggcctgcctgagcctgggcttcttcagcctgctgtggctgcagctgagctgcagcggagatgtggcccgggctgtgcggggccagggccaggagaccagcggccccccccgggcctgccccccagagcccccacctgagcactgggaggaggatgcctcctggggcccccaccggctggccgtgctggtgcccttccgggagagatttgaggagctgctggtgtttgtgccccacatgaggcgcttcctgagcaggaagaagatccgccaccacatctacgtgctgaaccaggtggaccacttccgcttcaacagagctgccctgatcaacgtgggcttcctggagagcagcaacagcacagactacatcgccatgcatgatgtggacctgctgcccctgaatgaggagctggactatggcttccctgaggccggccccttccacgtggccagccctgagctgcaccccctgtaccactacaagacctacgtgggcggcatcctgctgctgagcaagcagcactaccgcctgtgcaatggcatgagcaaccgcttctggggctggggcagagaagatgatgagttctaccgccgcatcaagggggccggcctgcagctgttccggcccagcggcatcaccaccggctacaagaccttccgccacctgcatgaccctgcctggaggaagagggaccagaagagaattgctgcccagaagcaggagcagttcaaggtggaccgggagggcggcctgaacacagtgaagtaccacgtggccagcaggacagccctgtctgtgggcggggccccctgcaccgtgctgaacatcatgctggactgtgacaagacagccaccccctggtgcaccttctcctag

SEQ ID NO: 171377 - DNA, 984 bp, Artificial Sequence
  derived and/or modified sequence
atgttccccagccggcggaaggccgcccagctgccctgggaggacggcagatccgggctgcttagcggcggcctcccaagaaagtgctcagtgtttcaccttttcgtggcctgcctgtctttggggttcttcagcctgctgtggctccaactcagttgcagcggagatgtcgctcgcgccgtcagaggacaggggcaggaaaccagcggcccccctcgagcctgcccacccgaaccaccgcccgagcactgggaggaggacgctagctgggggccccatcgtttagctgtgcttgtcccgtttcgcgagcgattcgaagagctgctcgtgttcgtcccgcacatgcgccgatttctcagtcgcaaaaaaattcggcatcacatctacgtgcttaaccaagttgaccacttccggtttaacagggctgccctgattaacgtgggatttctcgagtcctccaatagcacagattatatagccatgcatgacgtggatctcctgccactgaatgaggaactggattatggcttccctgaggctgggccctttcacgtcgcttcccctgagttgcatccactttaccactataagacctatgtggggggcatactgctcctgtccaaacagcactacagattgtgcaatggcatgtcaaaccgtttctggggatgggggcgcgaagacgacgaattttatcggagaatcaaaggcgccggactacaactgttccggccttcaggaatcaccacaggctacaagacttttcgccacttgcacgatcccgcatggaggaaacgtgaccagaaacgtatagccgctcaaaagcaggagcagttcaaggtcgaccgtgagggcgggctgaatactgtaaaataccacgtggcttctagaacagccctctcagtgggcggcgccccatgcaccgtactgaacatcatgctggattgcgataaaactgccactccctggtgtactttcagctag

SEQ ID NO: 171378 - DNA, 984 bp, Artificial Sequence
  derived and/or modified sequence
atgttcccttcacgacgaaaggccgcacagctgccttgggaagatggccgaagcgggctcctctccggtggacttccaagaaaatgcagtgtgtttcatttgttcgtggcctgtctgtctctcgggtttttttccttgctctggctgcagctgagctgtagtggagatgtcgcaagagcagttagaggtcagggacaagaaacatctggcccacccagggcctgtccgccagagccaccgccagagcactgggaagaggatgcctcctgggggcctcatagactcgcggtcttagtcccgtttcgcgagcgtttcgaagagctcctcgtgttcgtgccacatatgcgtcgtttcctgtcacgaaaaaagatcagacatcatatctatgtgttaaatcaagtggaccattttaggtttaatcgcgcagccctgattaacgtgggatttttggagtcttccaattccacggattacatcgcgatgcacgacgttgacctgctgcctctcaacgaggaactagactacggcttccctgaagccggaccctttcatgtcgcctcgcccgagctgcatccactataccactacaagacatacgtgggaggtatcctgttgttgagtaagcagcattacagactctgtaacggaatgtccaaccggttctgggggtgggggcgtgaggacgatgagttttataggagaattaaaggggctgggttacagctgtttagacccagcgggatcaccactggctacaaaacatttcgtcacttacatgatccggcttggaggaaacgtgatcagaaacgaatcgcggctcagaagcaagaacagttcaaggtggacagagaaggaggactcaatacagtgaagtatcacgtggcatccagaactgccctgtcagtggggggagcgccttgcaccgtgcttaatattatgctggactgcgataagactgccacgccatggtgcaccttctcttag

SEQ ID NO: 171379 - DNA, 984 bp, Artificial Sequence
  derived and/or modified sequence
atgtttccctcccgacgaaaggccgctcaactaccctgggaggatggaagatctggcctgctgagcgggggtttaccacggaagtgcagcgtattccacttgtttgtggcatgcttatccttgggtttcttttcactgctctggctgcagctgagttgttccggcgatgtggctcgggccgttcggggccaggggcaagaaacaagtggtccgcccagagcctgtccccctgagccgccccctgagcactgggaggaggacgcaagctggggtccccatcggctggctgttctggtgccctttagagaacgattcgaggagctgttagtgttcgttccacatatgagacggtttctctcacgtaaaaagatccgacaccacatatatgtgctcaatcaagtggaccacttccgattcaatcgtgccgcccttattaatgtaggattcctggagtcttcaaacagcactgactacattgctatgcatgacgtcgacctgcttccccttaacgaggagttagattacggtttccccgaggctggcccttttcatgtcgcaagccccgagttacatcctctctatcactacaaaacttacgtgggaggtattctgttactgtcgaagcagcattaccgcctgtgcaatggcatgagtaatcgcttttggggctggggtagggaggacgatgaattttataggcggatcaaaggggctggactccagctctttaggccctctggaatcacaacaggctataaaacatttcggcacttacacgacccggcatggagaaaacgcgatcagaaaagaattgccgcccagaagcaagaacagtttaaggtggaccgggaaggcggactcaatacagtgaagtatcacgtggcaagtcgcacagcattatccgtcggaggggccccctgtacagtgctaaacatcatgctggattgcgataagaccgctacaccttggtgcactttcagctag

SEQ ID NO: 171380 - DNA, 984 bp, Artificial Sequence
  derived and/or modified sequence
atgtttccttctagacgcaaggctgcccagctcccctgggaggacggccgatcagggttgctgtctggtggacttccccgcaaatgttccgtgtttcatctgtttgtcgcctgcctttcgttgggctttttctccctgctctggttgcagctgagttgcagcggggatgtggcccgcgccgttcggggtcaaggacaggaaaccagcggcccccctagagcttgtccacctgaaccccctccggagcactgggaagaggatgcatcttggggaccccatcgtctagctgtcctagtccccttcagagaacgcttcgaagagctgcttgtgttcgtgccgcacatgcgcagattcctcagtcgaaaaaaaattcgtcatcacatttacgttctgaatcaagtggaccatttcaggtttaacagagctgccctgattaacgttggatttcttgaatcctccaactcaacagactacattgcaatgcatgatgttgatctccttccattgaatgaggagctcgattatggatttcctgaggccggcccttttcatgtcgcatccccagaactgcatccactctaccattataaaacctatgtggggggcatcttgttactgagcaagcagcattataggctgtgtaatggaatgagtaataggttttggggctggggaagagaagacgacgaattctacaggcgaatcaagggcgctggactgcagttattccgtccatctggtataaccactgggtacaaaacctttaggcacttacatgaccctgcctggagaaaacgagatcaaaaaaggatagccgcacagaagcaggaacagttcaaggtggatcgagaagggggtctcaatactgtcaaatatcacgttgcatctaggacagctctgagcgtaggtggggccccctgtaccgtgctcaatattatgctcgattgtgacaaaactgcaacaccatggtgcactttctcttag

SEQ ID NO: 171381 - DNA, 1747 bp, Artificial Sequence
  derived and/or modified sequence
cggggcggacaggcctgggcggagcgggaggcggaggcgccgcgtaggcccgggaggccgggccggccgggctgcgagcgcctgccccatgcgccgccgcctctccgcacgatgttcccctcgcggaggaaagcggcgcagctgccctgggaggacggcaggtccgggttgctctccggcggcctccctcggaagtgttccgtcttccacctgttcgtggcctgcctctcgctgggcttcttctccctactctggctgcagctcagctgctctggggacgtggcccgggcagtcaggggacaagggcaggagacctcgggccctccccgtgcctgccccccagagccgccccctgagcactgggaagaagacgcatcctggggcccccaccgcctggcagtgctggtgcccttccgcgaacgcttcgaggagctcctggtcttcgtgccccacatgcgccgcttcctgagcaggaagaagatccggcaccacatctacgtgctcaaccaggtggaccacttcaggttcaaccgggcagcgctcatcaacgtgggcttcctggagagcagcaacagcacggactacattgccatgcacgacgttgacctgctccctctcaacgaggagctggactatggctttcctgaggctgggcccttccacgtggcctccccggagctccaccctctctaccactacaagacctatgtcggcggcatcctgctgctctccaagcagcactaccggctgtgcaatgggatgtccaaccgcttctggggctggggccgcgaggacgacgagttctaccggcgcattaagggagctgggctccagcttttccgcccctcgggaatcacaactgggtacaagacatttcgccacctgcatgacccagcctggcggaagagggaccagaagcgcatcgcagctcaaaaacaggagcagttcaaggtggacagggagggaggcctgaacactgtgaagtaccatgtggcttcccgcactgccctgtctgtgggcggggccccctgcactgtcctcaacatcatgttggactgtgacaagaccgccacaccctggtgcacattcagctgagctggatggacagtgaggaagcctgtacctacaggccatattgctcaggctcaggacaaggcctcaggtcgtgggcccagctctgacaggatgtggagtggccaggaccaagacagcaagctacgcaattgcagccacccggccgccaaggcaggcttgggctgggccaggacacgtggggtgcctgggacgctgcttgccatgcacagtgatcagagagaggctggggtgtgtcctgtccgggaccccccctgccttcctgctcaccctactctgacctccttcacgtgcccaggcctgtgggtagtggggagggctgaacaggacaacctctcatcacccccacttttgttccttcctgctgggctgcctcgtgcagagacacagtgtaggggccatgcagctggcgtaggtggcagttgggcctggtgagggttaggacttcagaaaccagagcacaagccccacagagggggaacagccagcaccgctctagctggttgttgccatgccggaatgtgggcctagtgttgccagatcttctgatttttcgaaagaaactagaatgctggattcttaagtgatatcttctgattttttaaatgatagcacctaaatgaaactttcaaaaagtatggcaggccagacaaaa

SEQ ID NO: 171382 - DNA, 2257 bp, Artificial Sequence
  derived and/or modified sequence
agtagagatggggtgttaccatatttgccaggctggtcttgagctcctgacctcgtgatgcacctgcctcggcctcccaaagtgctgggattacaggcgtgagccaccacgcctggccaggagatagaatttataagacctgatagctaatcgctgactcttaagattgtgaagtggattcctttgcagattactttggggagaaggtagggggagtacagaggaagcttctcccttcatggattcctcagctcctgtctcagcatactcaggaacttccagaggagcggcaaaggaatctggtgaattctgtttctttgtatttgctaaccaaaaggctgtctcctggcatcaccccagtgtctgtgatgttcagctgtttttccagtttctgaaatcagtgcctgtgctgtacccagccctcatccttgccctgagcagctctgaccaggactcagtcacagaaagtaagagagcattgaggagccggggcagctctgtgaactgggagtggttcagagggcttcccgagagcgggtggcatgggttgggtctagagaggcaagcaggattcggatgcatggtagtggcatgagcagaaacattaaagttgcttctgtactaattcccaggtgcttggggtagacgagttatgtgcagcctcctcgtggggaggccagagaacgggtctgtcacagggccagccctgccccgccctcctgaccctgtcccgcgcttgctccaggtccgggttgctctccggcggcctccctcggaagtgttccgtcttccacctgttcgtggcctgcctctcgctgggcttcttctccctactctggctgcagctcagctgctctggggacgtggcccgggcagtcaggggacaagggcaggagacctcgggccctccccgtgcctgccccccagagccgccccctgagcactgggaagaagacgcatcctggggcccccaccgcctggcagtgctggtgcccttccgcgaacgcttcgaggagctcctggtcttcgtgccccacatgcgccgcttcctgagcaggaagaagatccggcaccacatctacgtgctcaaccaggtggaccacttcaggttcaaccgggcagcgctcatcaacgtgggcttcctggagagcagcaacagcacggactacattgccatgcacgacgttgacctgctccctctcaacgaggagctggactatggctttcctgaggctgggcccttccacgtggcctccccggagctccaccctctctaccactacaagacctatgtcggcggcatcctgctgctctccaagcagcactaccggctgtgcaatgggatgtccaaccgcttctggggctggggccgcgaggacgacgagttctaccggcgcattaagggagctgggctccagcttttccgcccctcgggaatcacaactgggtacaagacatttcgccacctgcatgacccagcctggcggaagagggaccagaagcgcatcgcagctcaaaaacaggagcagttcaaggtggacagggagggaggcctgaacactgtgaagtaccatgtggcttcccgcactgccctgtctgtgggcggggccccctgcactgtcctcaacatcatgttggactgtgacaagaccgccacaccctggtgcacattcagctgagctggatggacagtgaggaagcctgtacctacaggccatattgctcaggctcaggacaaggcctcaggtcgtgggcccagctctgacaggatgtggagtggccaggaccaagacagcaagctacgcaattgcagccacccggccgccaaggcaggcttgggctgggccaggacacgtggggtgcctgggacgctgcttgccatgcacagtgatcagagagaggctggggtgtgtcctgtccgggaccccccctgccttcctgctcaccctactctgacctccttcacgtgcccaggcctgtgggtagtggggagggctgaacaggacaacctctcatcacccccacttttgttccttcctgctgggctgcctcgtgcagagacacagtgtaggggccatgcagctggcgtaggtggcagttgggcctggtgagggttaggacttcagaaaccagagcacaagccccacagagggggaacagccagcaccgctctagctggttgttgccatgccggaatgtgggcctagtgttgccagatcttctgatttttcgaaagaaactagaatgctggattctt

SEQ ID NO: 171383 - protein, 709 aa, Artificial Sequence
  derived and/or modified sequence
MGPRIGPAGEVPQVPDKETKATMGTENTPGGKASPDPQDVRPSVFHNIKLFVLCHSLLQLAQLMISGYLKSSISTVEKRFGLSSQTSGLLASFNEVGNTALIVFVSYFGSRVHRPRMIGYGAILVALAGLLMTLPHFISEPYRYDNTSPEDMPQDFKASLCLPTTSAPASAPSNGNCSSYTETQHLSVVGIMFVAQTLLGVGGVPIQPFGISYIDDFAHNSNSPLYLGILFAVTMMGPGLAFGLGSLMLRLYVDINQMPEGGISLTIKDPRWVGAWWLGFLIAAGAVALAAIPYFFFPKEMPKEKRELQFRRKVLAVTDSPARKGKDSPSKQSPGESTKKQDGLVQIAPNLTVIQFIKVFPRVLLQTLRHPIFLLVVLSQVCLSSMAAGMAIFLPKFLERQFSITASYANLLIGCLSFPSVIVGIVVGGVLVKRLHLGPVGCGALCLLGMLLCLFFSLPLFFIGCSSHQIAGITHQTSAHPGLELSPSCMEACSCPLDGFNPVCDPSTRVEYITPCHAGCSSWVVQDALDNSQVFYTNCSCVVEGNPVLAGSCDSTCSHLVVPFLLLVSLGSALACLTHTPSFMLILRGVKKEDKTLAVGIQFMFLRILAWMPSPVIHGSAIDTTCVHWALSCGRRAVCRYYNNDLLRNRFIGLQFFFKTGSVICFALVLAVLRQQDKEARTKESRSSPAVEQQLLVSGPGKKPEDSRV

SEQ ID NO: 171384 - protein, 482 aa, Artificial Sequence
  derived and/or modified sequence
MIGYGAILVALAGLLMTLPHFISEPYRYDNTSPGGISLTIKDPRWVGAWWLGFLIAAGAVALAAIPYFFFPKEMPKEKRELQFRRKVLAVTDSPARKGKDSPSKQSPGESTKKQDGLVQIAPNLTVIQFIKVFPRVLLQTLRHPIFLLVVLSQVCLSSMAAGMAIFLPKFLERQFSITASYANLLIGCLSFPSVIVGIVVGGVLVKRLHLGPVGCGALCLLGMLLCLFFSLPLFFIGCSSHQIAGITHQTSAHPGLELSPSCMEACSCPLDGFNPVCDPSTRVEYITPCHAGCSSWVVQDALDNSQVFYTNCSCVVEGNPVLAGSCDSTCSHLVVPFLLLVSLGSALACLTHTPSFMLILRGVKKEDKTLAVGIQFMFLRILAWMPSPVIHGSAIDTTCVHWALSCGRRAVCRYYNNDLLRNRFIGLQFFFKTGSVICFALVLAVLRQQDKEARTKESRSSPAVEQQLLVSGPGKKPEDSRV

SEQ ID NO: 171385 - DNA, 2130 bp, Artificial Sequence
  derived and/or modified sequence
atgggccccagaatcggccccgccggcgaggtgccccaggtgcccgacaaggagaccaaggccaccatgggcaccgagaacacccccggcggcaaggccagccccgacccccaggacgtgagacccagcgtgttccacaacatcaagctgttcgtgctgtgccacagcctgctgcagctggcccagctgatgatcagcggctacctgaagagcagcatcagcaccgtggagaagagattcggcctgagcagccagaccagcggcctgctggccagcttcaacgaggtgggcaacaccgccctgatcgtgttcgtgagctacttcggcagcagagtgcacagacccagaatgatcggctacggcgccatcctggtggccctggccggcctgctgatgaccctgccccacttcatcagcgagccctacagatacgacaacaccagccccgaggacatgccccaggacttcaaggccagcctgtgcctgcccaccaccagcgcccccgccagcgcccccagcaacggcaactgcagcagctacaccgagacccagcacctgagcgtggtgggcatcatgttcgtggcccagaccctgctgggcgtgggcggcgtgcccatccagcccttcggcatcagctacatcgacgacttcgcccacaacagcaacagccccctgtacctgggcatcctgttcgccgtgaccatgatgggccccggcctggccttcggcctgggcagcctgatgctgagactgtacgtggacatcaaccagatgcccgagggcggcatcagcctgaccatcaaggaccccagatgggtgggcgcctggtggctgggcttcctgatcgccgccggcgccgtggccctggccgccatcccctacttcttcttccccaaggagatgcccaaggagaagagagagctgcagttcagaagaaaggtgctggccgtgaccgacagccccgccagaaagggcaaggacagccccagcaagcagagccccggcgagagcaccaagaagcaggacggcctggtgcagatcgcccccaacctgaccgtgatccagttcatcaaggtgttccccagagtgctgctgcagaccctgagacaccccatcttcctgctggtggtgctgagccaggtgtgcctgagcagcatggccgccggcatggccatcttcctgcccaagttcctggagagacagttcagcatcaccgccagctacgccaacctgctgatcggctgcctgagcttccccagcgtgatcgtgggcatcgtggtgggcggcgtgctggtgaagagactgcacctgggccccgtgggctgcggcgccctgtgcctgctgggcatgctgctgtgcctgttcttcagcctgcccctgttcttcatcggctgcagcagccaccagatcgccggcatcacccaccagaccagcgcccaccccggcctggagctgagccccagctgcatggaggcctgcagctgccccctggacggcttcaaccccgtgtgcgaccccagcaccagagtggagtacatcaccccctgccacgccggctgcagcagctgggtggtgcaggacgccctggacaacagccaggtgttctacaccaactgcagctgcgtggtggagggcaaccccgtgctggccggcagctgcgacagcacctgcagccacctggtggtgcccttcctgctgctggtgagcctgggcagcgccctggcctgcctgacccacacccccagcttcatgctgatcctgagaggcgtgaagaaggaggacaagaccctggccgtgggcatccagttcatgttcctgagaatcctggcctggatgcccagccccgtgatccacggcagcgccatcgacaccacctgcgtgcactgggccctgagctgcggcagaagagccgtgtgcagatactacaacaacgacctgctgagaaacagattcatcggcctgcagttcttcttcaagaccggcagcgtgatctgcttcgccctggtgctggccgtgctgagacagcaggacaaggaggccagaaccaaggagagcagaagcagccccgccgtggagcagcagctgctggtgagcggccccggcaagaagcccgaggacagcagagtgtag

SEQ ID NO: 171386 - DNA, 2064 bp, Artificial Sequence
  derived and/or modified sequence
atgggcaccgagaacacccccggcggcaaggccagccccgacccccaggacgtgagacccagcgtgttccacaacatcaagctgttcgtgctgtgccacagcctgctgcagctggcccagctgatgatcagcggctacctgaagagcagcatcagcaccgtggagaagagattcggcctgagcagccagaccagcggcctgctggccagcttcaacgaggtgggcaacaccgccctgatcgtgttcgtgagctacttcggcagcagagtgcacagacccagaatgatcggctacggcgccatcctggtggccctggccggcctgctgatgaccctgccccacttcatcagcgagccctacagatacgacaacaccagccccgaggacatgccccaggacttcaaggccagcctgtgcctgcccaccaccagcgcccccgccagcgcccccagcaacggcaactgcagcagctacaccgagacccagcacctgagcgtggtgggcatcatgttcgtggcccagaccctgctgggcgtgggcggcgtgcccatccagcccttcggcatcagctacatcgacgacttcgcccacaacagcaacagccccctgtacctgggcatcctgttcgccgtgaccatgatgggccccggcctggccttcggcctgggcagcctgatgctgagactgtacgtggacatcaaccagatgcccgagggcggcatcagcctgaccatcaaggaccccagatgggtgggcgcctggtggctgggcttcctgatcgccgccggcgccgtggccctggccgccatcccctacttcttcttccccaaggagatgcccaaggagaagagagagctgcagttcagaagaaaggtgctggccgtgaccgacagccccgccagaaagggcaaggacagccccagcaagcagagccccggcgagagcaccaagaagcaggacggcctggtgcagatcgcccccaacctgaccgtgatccagttcatcaaggtgttccccagagtgctgctgcagaccctgagacaccccatcttcctgctggtggtgctgagccaggtgtgcctgagcagcatggccgccggcatggccatcttcctgcccaagttcctggagagacagttcagcatcaccgccagctacgccaacctgctgatcggctgcctgagcttccccagcgtgatcgtgggcatcgtggtgggcggcgtgctggtgaagagactgcacctgggccccgtgggctgcggcgccctgtgcctgctgggcatgctgctgtgcctgttcttcagcctgcccctgttcttcatcggctgcagcagccaccagatcgccggcatcacccaccagaccagcgcccaccccggcctggagctgagccccagctgcatggaggcctgcagctgccccctggacggcttcaaccccgtgtgcgaccccagcaccagagtggagtacatcaccccctgccacgccggctgcagcagctgggtggtgcaggacgccctggacaacagccaggtgttctacaccaactgcagctgcgtggtggagggcaaccccgtgctggccggcagctgcgacagcacctgcagccacctggtggtgcccttcctgctgctggtgagcctgggcagcgccctggcctgcctgacccacacccccagcttcatgctgatcctgagaggcgtgaagaaggaggacaagaccctggccgtgggcatccagttcatgttcctgagaatcctggcctggatgcccagccccgtgatccacggcagcgccatcgacaccacctgcgtgcactgggccctgagctgcggcagaagagccgtgtgcagatactacaacaacgacctgctgagaaacagattcatcggcctgcagttcttcttcaagaccggcagcgtgatctgcttcgccctggtgctggccgtgctgagacagcaggacaaggaggccagaaccaaggagagcagaagcagccccgccgtggagcagcagctgctggtgagcggccccggcaagaagcccgaggacagcagagtgtag

SEQ ID NO: 171387 - DNA, 1782 bp, Artificial Sequence
  derived and/or modified sequence
atgatcggctacggcgccatcctggtggccctggccggcctgctgatgaccctgccccacttcatcagcgagccctacagatacgacaacaccagccccgaggacatgccccaggacttcaaggccagcctgtgcctgcccaccaccagcgcccccgccagcgcccccagcaacggcaactgcagcagctacaccgagacccagcacctgagcgtggtgggcatcatgttcgtggcccagaccctgctgggcgtgggcggcgtgcccatccagcccttcggcatcagctacatcgacgacttcgcccacaacagcaacagccccctgtacctgggcatcctgttcgccgtgaccatgatgggccccggcctggccttcggcctgggcagcctgatgctgagactgtacgtggacatcaaccagatgcccgagggcggcatcagcctgaccatcaaggaccccagatgggtgggcgcctggtggctgggcttcctgatcgccgccggcgccgtggccctggccgccatcccctacttcttcttccccaaggagatgcccaaggagaagagagagctgcagttcagaagaaaggtgctggccgtgaccgacagccccgccagaaagggcaaggacagccccagcaagcagagccccggcgagagcaccaagaagcaggacggcctggtgcagatcgcccccaacctgaccgtgatccagttcatcaaggtgttccccagagtgctgctgcagaccctgagacaccccatcttcctgctggtggtgctgagccaggtgtgcctgagcagcatggccgccggcatggccatcttcctgcccaagttcctggagagacagttcagcatcaccgccagctacgccaacctgctgatcggctgcctgagcttccccagcgtgatcgtgggcatcgtggtgggcggcgtgctggtgaagagactgcacctgggccccgtgggctgcggcgccctgtgcctgctgggcatgctgctgtgcctgttcttcagcctgcccctgttcttcatcggctgcagcagccaccagatcgccggcatcacccaccagaccagcgcccaccccggcctggagctgagccccagctgcatggaggcctgcagctgccccctggacggcttcaaccccgtgtgcgaccccagcaccagagtggagtacatcaccccctgccacgccggctgcagcagctgggtggtgcaggacgccctggacaacagccaggtgttctacaccaactgcagctgcgtggtggagggcaaccccgtgctggccggcagctgcgacagcacctgcagccacctggtggtgcccttcctgctgctggtgagcctgggcagcgccctggcctgcctgacccacacccccagcttcatgctgatcctgagaggcgtgaagaaggaggacaagaccctggccgtgggcatccagttcatgttcctgagaatcctggcctggatgcccagccccgtgatccacggcagcgccatcgacaccacctgcgtgcactgggccctgagctgcggcagaagagccgtgtgcagatactacaacaacgacctgctgagaaacagattcatcggcctgcagttcttcttcaagaccggcagcgtgatctgcttcgccctggtgctggccgtgctgagacagcaggacaaggaggccagaaccaaggagagcagaagcagccccgccgtggagcagcagctgctggtgagcggccccggcaagaagcccgaggacagcagagtgtag

SEQ ID NO: 171388 - DNA, 2130 bp, Artificial Sequence
  derived and/or modified sequence
atggggccgcgaataggccctgcaggcgaagtcccacaggttcccgacaaagagacgaaggcgacaatgggaactgagaatacacctggcgggaaggcttcccctgatcctcaggatgtgcgcccctcagtttttcataacatcaagctatttgtcttgtgtcactctctgcttcaacttgcccaactgatgatttcaggatacctgaagtccagcatctccacagttgagaagaggtttgggctgtcctcccagacctctggactcctggctagctttaatgaagtggggaacacggctctgattgtgtttgtgtcctatttcggcagtagagtccacaggccccgcatgattggttatggagccatactggtggctctagcgggcctcttaatgactctaccccacttcatctcagagccctaccgatatgacaatacctcaccagaggacatgccccaggatttcaaggctagcttgtgtctcccgactactagtgcccccgcgtcagcgccctctaatggtaattgctccagctacacagaaactcaacacttatccgtggtgggcataatgttcgtggcacagaccctgcttggcgtggggggagttcccatccagcccttcgggatcagctacatcgatgactttgcccacaactcaaattctcctctgtaccttggtatattgttcgcggtcaccatgatgggccctggcctggcattcggtctgggctcattaatgctgcgcctgtatgtagatatcaatcagatgcctgaaggcgggatttcgctgaccattaaggatccacggtgggttggcgcctggtggctgggattccttattgcagccggggcggttgcccttgcagcgatcccttacttcttctttccgaaggaaatgccaaaggagaagagagaactgcaatttagacggaaagtgctggccgtgactgactcacctgctcgtaaaggaaaagattcgccttccaagcagtcacccggggagagcacaaagaaacaagatggcctcgtgcagatagctcccaacctgaccgttattcagtttatcaaggtgttcccacgcgtacttctgcaaacactccgtcatccaatctttcttctggtggtgctcagccaggtttgcttatctagcatggccgcaggaatggccattttcttgcccaagtttcttgagagacagttctcaattacagcaagctatgcaaacctgctaatcggttgtctcagcttcccttctgtgattgtgggaatagttgttgggggcgtcttggtgaagcggctgcacctaggccccgtcggatgcggggccctgtgtctcctcgggatgctgctatgcctttttttttctttgcccttgttcttcatcggatgtagctcacaccagatagcggggattactcaccaaacttctgcacatcccggattggaactgtctcccagctgcatggaggcatgcagttgtcctttggatggattcaacccagtctgcgatccctcaacaagggtagagtacattaccccttgtcacgctggttgtagttcctgggtggtgcaagatgcactggataacagtcaggtcttctatacgaactgctcttgcgtggtcgagggcaacccagtgctggcaggctcatgtgattctacgtgcagccacctggtcgtcccttttctcctcttggtctcgctgggaagtgccctggcctgtctgactcataccccttcctttatgctcatcctgcgaggggtaaaaaaggaggataaaactctcgccgtgggaatccaatttatgttcttgcggattctggcctggatgcccagcccagtaattcacggatctgcgattgacactacctgtgtgcactgggcattatcatgcggaagaagagcggtctgcagatactataacaacgacttgctgcgaaacaggtttatcgggttgcagttctttttcaaaacaggtagcgtgatctgctttgctctagtgcttgctgtgcttcgccagcaggacaaagaagccaggacaaaagagtctcgttctagtccagccgttgagcagcagctgttagtgtctggtccaggcaagaagcctgaggacagcagggtctag

SEQ ID NO: 171389 - DNA, 2064 bp, Artificial Sequence
  derived and/or modified sequence
atggggactgagaacaccccgggtggcaaggcctcacccgatccacaggatgtccggcctagtgtttttcacaacattaagctattcgtactatgccatagtctgcttcagctggctcagcttatgatttccggatatttaaagtcctcaatttcaacagtcgagaagcgatttggactttccagccagacaagcggactgctggcctcttttaacgaggtgggcaacacagcgctgatcgtcttcgtgtcttactttggcagtcgcgttcatcggcctcggatgatcggatatggtgcaatcctggtcgctcttgccggcctgctgatgacactgccccactttatcagtgaaccataccgatacgataatacaagcccggaagacatgcctcaggactttaaagcctcactgtgcctgcccactacctcagctcctgcgtctgcaccatccaacggtaattgtagtagctacaccgagacccagcatctgtccgtggtggggattatgttcgtcgcccaaacgctgttgggggtgggcggagtgcccatccaaccctttggaatcagctacattgatgacttcgctcacaactctaactctccactgtatcttgggatactctttgctgtcaccatgatgggtccaggccttgcgttcgggctcggatcactaatgttacggttatacgtggatataaaccagatgcctgaaggtggtatttcccttaccattaaggatccaaggtgggtgggagcctggtggctcgggttcctgattgccgctggcgctgttgccctcgctgccatcccctacttcttctttccgaaagagatgcctaaggaaaaaagagagctccagtttaggaggaaagtcctggctgtcaccgatagccctgcacggaagggcaaggactcaccaagcaaacaaagtccaggggagtccactaagaagcaagacggtctggtgcagatcgcccctaatcttaccgtcattcaatttataaaggtctttcctagggtgctgctccagacgctgcgtcatcctatattcctcctggtcgtgctgagtcaggtctgcctcagctccatggctgcaggtatggccatatttctgccaaagtttctcgagcgccagttctccatcactgcaagctacgccaatctcctgattggttgcctctcttttcccagcgtcattgtggggattgtagtgggaggcgtactggtgaagagattgcatctgggtcccgtcggatgtggggccctgtgcttgttgggaatgctgttgtgtctgtttttttctttacctctgttcttcatagggtgtagctcccaccagatcgcaggcattacccatcagacaagtgcacaccccggtctggagttatctcctagctgtatggaagcctgtagctgtccactggatggcttcaacccagtatgtgatccgagcacgagagtcgaatacataacaccctgtcacgcaggatgttcttcatgggtggttcaggacgcactcgacaatagtcaggtgttctacactaattgctcttgcgtggttgaaggcaatccggtgctggcaggctcctgcgactccacatgtagccacctggtagttccattcttactgcttgtttctttaggatccgcactggcttgtcttactcataccccatcgtttatgctcatattgcggggagtcaagaaagaggacaagacgttggcagtcggaattcaattcatgtttctgaggatcctggcatggatgccttcccctgtgatccacgggagtgctattgataccacctgcgtccattgggctctgagctgcggcaggagagccgtctgcagatactacaataatgacttgctccgtaatagatttatagggctccagtttttctttaagacagggtctgtgatctgttttgccctcgtgcttgccgtgttacgccagcaagacaaggaggcccgaaccaaagagtctcgctctagtcctgctgtggagcagcagctgctcgtatccgggccagggaaaaagcccgaagactccagggtttag

SEQ ID NO: 171390 - DNA, 1782 bp, Artificial Sequence
  derived and/or modified sequence
atgatcgggtacggcgccatcctcgtggctctggccggcctactgatgaccctcccccattttatcagtgaaccctaccgttatgacaataccagccccgaggacatgcctcaggactttaaagcttccttatgtctcccgaccactagtgcccccgcctccgctccaagcaacggcaattgttcaagctacaccgagacacagcacttgtctgtggtaggcattatgttcgtcgcccagaccctcctaggcgtgggaggcgtgcctattcaacccttcgggatttcatatatcgacgattttgcgcacaattccaactcccctctgtatctcggcatcttgttcgcggtcaccatgatgggccctgggctggccttcggtctcggtagcctgatgctgcgattgtacgtggacatcaaccagatgcctgaaggaggaatttctctcacaattaaagacccccgttgggttggggcctggtggcttggcttccttatagccgcaggcgctgtggccttggcagccatcccatacttcttctttcctaaggaaatgccgaaagagaaacgagagctacagtttcgccggaaggtactcgccgtgaccgactcacctgcccgcaaagggaaggactccccctctaaacagagccctggcgagagtaccaaaaagcaggatggcttggttcagatcgcccccaatttgacagtcattcaatttatcaaagtgtttcctagagtcctgctccagaccctccggcatcccattttcttgctagtagtcctgagtcaggtgtgtcttagtagcatggccgccggaatggcaatatttttacctaaatttctggagcggcagtttagtatcacagcatcttacgccaacttgctgatcggctgcttgtcattcccatccgtgatagtggggatcgtggtgggcggagtgctagtgaaaagactgcatctcgggccagtcggttgtggcgcgctgtgtctcttaggaatgttgctgtgcctctttttctcattgcccctgttctttattggttgtagttctcatcagatcgcgggcatcacccatcagacctccgcccatccaggtttggagctttcccccagctgcatggaagcctgcagttgcccacttgacggattcaatcccgtgtgcgatcctagtaccagggtggagtacatcactccttgtcacgctggatgttcaagttgggtagtccaggatgccttggataactcccaagttttctatactaactgtagctgcgtggtggaggggaaccctgtgttggctggctcctgtgacagtacatgcagccacctggtggttcccttcctcctgctagtgtccctggggagtgccctggcgtgcctcacccacaccccatccttcatgctgatcctgaggggggtaaagaaagaagataagactctggcagtaggcatccaattcatgttcctacgcatactggcttggatgccatccccagtaattcacggcagcgcaatcgacacaacatgcgtgcactgggccttgtcctgcgggcggcgggcggtgtgtagatactacaataacgacctgttacggaatcgcttcattggactgcagtttttcttcaagactggcagtgttatctgttttgcgctggtgctggctgtgctgaggcagcaggacaaggaggcacggactaaggaaagtcgaagttctccagccgtggagcaacaactgttggtaagtggccccggcaagaaacccgaagactctagggtgtag

SEQ ID NO: 171391 - DNA, 2130 bp, Artificial Sequence
  derived and/or modified sequence
atgggccccagaattggccctgctggggaggtgccccaggtgcctgacaaggagaccaaggccaccatgggcacagagaacaccccaggcggcaaggccagcccagacccccaggatgtgcggcccagcgtcttccacaacatcaagctgtttgtgctgtgccacagcctgctgcagctggcccagctgatgatcagcggctacctgaagagcagcatcagcacagtggagaagcgcttcggcctgagcagccagaccagcggcctgctggccagcttcaatgaggtgggcaacacagccctgattgtgtttgtgtcctacttcggcagccgggtgcaccggcccaggatgattggctacggggccatcctggtggccctggccggcctgctgatgaccctgccccacttcatcagcgagccctaccgctatgacaacaccagccctgaggacatgccccaggacttcaaggccagcctgtgcctgcccaccaccagcgccccagccagcgcccccagcaatggaaactgcagcagctacacagagacccagcacctgtctgtggtgggcatcatgtttgtggcccagaccctgctgggcgtgggcggcgtgcccatccagcccttcggcatctcctacattgatgactttgcccacaacagcaacagccccctgtacctgggcatcctgtttgctgtgaccatgatgggccctggcctggccttcggcctgggcagcctgatgctgcggctgtatgtggacatcaaccagatgcctgagggcggcatcagcctgaccatcaaggacccccgctgggtgggcgcctggtggctgggcttcctgattgctgctggagctgtggccctggccgccatcccctacttcttcttccccaaggagatgcccaaggagaagcgggagctgcagttccggaggaaggtgctggccgtgacagacagccctgccaggaagggcaaggacagccccagcaagcagagccctggagagagcaccaagaagcaggacggcctggtgcagatcgcccccaacctgaccgtcatccagttcatcaaggtgttcccccgggtgctgctgcagaccctgcggcaccccatcttcctgctggtggtgctgagccaggtgtgcctgagctccatggccgccggcatggccatcttcctgcccaagttcctggagcggcagttcagcatcacagccagctatgccaacctgctgattggctgcctgtccttccccagcgtcatcgtgggcatcgtggtgggcggcgtgctggtgaagaggctgcacctgggccctgtgggctgtggggccctgtgcctgctgggcatgctgctgtgcctcttcttcagcctgcccctcttcttcatcggctgcagcagccaccagattgctggcatcacccaccagaccagcgcccaccctggcctggagctgagccccagctgcatggaggcctgcagctgccccctggatggcttcaaccctgtgtgtgaccccagcaccagggtggagtacatcaccccctgccacgccggctgcagctcctgggtggtgcaggatgccctggacaacagccaggtgttctacaccaactgcagctgtgtggtggagggcaaccctgtgctggccggcagctgtgacagcacctgcagccacctggtggtgcccttcctgctgctggtgtccctgggcagcgccctggcctgcctgacccacacccccagcttcatgctgatcctgcggggcgtgaagaaggaggacaagaccctggccgtgggcatccagttcatgttcctgcgcatcctggcctggatgcccagccctgtgatccacggcagcgccatcgacaccacctgtgtgcactgggccctgagctgtggcagaagagctgtgtgccgctactacaacaatgacctgctgaggaaccgcttcatcggcctgcagttcttcttcaagacaggcagcgtcatctgctttgccctggtgctggccgtgctgcggcagcaggacaaggaggcccggaccaaggagagccgcagcagccctgctgtggagcagcagctgctggtgtctggccctgggaagaagccagaggacagccgggtgtag

SEQ ID NO: 171392 - DNA, 2064 bp, Artificial Sequence
  derived and/or modified sequence
atgggcacagagaacaccccaggcggcaaggccagcccagacccccaggatgtgcggcccagcgtcttccacaacatcaagctgtttgtgctgtgccacagcctgctgcagctggcccagctgatgatcagcggctacctgaagagcagcatcagcacagtggagaagcgcttcggcctgagcagccagaccagcggcctgctggccagcttcaatgaggtgggcaacacagccctgattgtgtttgtgtcctacttcggcagccgggtgcaccggcccaggatgattggctacggggccatcctggtggccctggccggcctgctgatgaccctgccccacttcatcagcgagccctaccgctatgacaacaccagccctgaggacatgccccaggacttcaaggccagcctgtgcctgcccaccaccagcgccccagccagcgcccccagcaatggaaactgcagcagctacacagagacccagcacctgtctgtggtgggcatcatgtttgtggcccagaccctgctgggcgtgggcggcgtgcccatccagcccttcggcatctcctacattgatgactttgcccacaacagcaacagccccctgtacctgggcatcctgtttgctgtgaccatgatgggccctggcctggccttcggcctgggcagcctgatgctgcggctgtatgtggacatcaaccagatgcctgagggcggcatcagcctgaccatcaaggacccccgctgggtgggcgcctggtggctgggcttcctgattgctgctggagctgtggccctggccgccatcccctacttcttcttccccaaggagatgcccaaggagaagcgggagctgcagttccggaggaaggtgctggccgtgacagacagccctgccaggaagggcaaggacagccccagcaagcagagccctggagagagcaccaagaagcaggacggcctggtgcagatcgcccccaacctgaccgtcatccagttcatcaaggtgttcccccgggtgctgctgcagaccctgcggcaccccatcttcctgctggtggtgctgagccaggtgtgcctgagctccatggccgccggcatggccatcttcctgcccaagttcctggagcggcagttcagcatcacagccagctatgccaacctgctgattggctgcctgtccttccccagcgtcatcgtgggcatcgtggtgggcggcgtgctggtgaagaggctgcacctgggccctgtgggctgtggggccctgtgcctgctgggcatgctgctgtgcctcttcttcagcctgcccctcttcttcatcggctgcagcagccaccagattgctggcatcacccaccagaccagcgcccaccctggcctggagctgagccccagctgcatggaggcctgcagctgccccctggatggcttcaaccctgtgtgtgaccccagcaccagggtggagtacatcaccccctgccacgccggctgcagctcctgggtggtgcaggatgccctggacaacagccaggtgttctacaccaactgcagctgtgtggtggagggcaaccctgtgctggccggcagctgtgacagcacctgcagccacctggtggtgcccttcctgctgctggtgtccctgggcagcgccctggcctgcctgacccacacccccagcttcatgctgatcctgcggggcgtgaagaaggaggacaagaccctggccgtgggcatccagttcatgttcctgcgcatcctggcctggatgcccagccctgtgatccacggcagcgccatcgacaccacctgtgtgcactgggccctgagctgtggcagaagagctgtgtgccgctactacaacaatgacctgctgaggaaccgcttcatcggcctgcagttcttcttcaagacaggcagcgtcatctgctttgccctggtgctggccgtgctgcggcagcaggacaaggaggcccggaccaaggagagccgcagcagccctgctgtggagcagcagctgctggtgtctggccctgggaagaagccagaggacagccgggtgtag

SEQ ID NO: 171393 - DNA, 1782 bp, Artificial Sequence
  derived and/or modified sequence
atgattggctacggggccatcctggtggccctggccggcctgctgatgaccctgccccacttcatcagcgagccctaccgctatgacaacaccagccctgaggacatgccccaggacttcaaggccagcctgtgcctgcccaccaccagcgccccagccagcgcccccagcaatggaaactgcagcagctacacagagacccagcacctgtctgtggtgggcatcatgtttgtggcccagaccctgctgggcgtgggcggcgtgcccatccagcccttcggcatctcctacattgatgactttgcccacaacagcaacagccccctgtacctgggcatcctgtttgctgtgaccatgatgggccctggcctggccttcggcctgggcagcctgatgctgcggctgtatgtggacatcaaccagatgcctgagggcggcatcagcctgaccatcaaggacccccgctgggtgggcgcctggtggctgggcttcctgattgctgctggagctgtggccctggccgccatcccctacttcttcttccccaaggagatgcccaaggagaagcgggagctgcagttccggaggaaggtgctggccgtgacagacagccctgccaggaagggcaaggacagccccagcaagcagagccctggagagagcaccaagaagcaggacggcctggtgcagatcgcccccaacctgaccgtcatccagttcatcaaggtgttcccccgggtgctgctgcagaccctgcggcaccccatcttcctgctggtggtgctgagccaggtgtgcctgagctccatggccgccggcatggccatcttcctgcccaagttcctggagcggcagttcagcatcacagccagctatgccaacctgctgattggctgcctgtccttccccagcgtcatcgtgggcatcgtggtgggcggcgtgctggtgaagaggctgcacctgggccctgtgggctgtggggccctgtgcctgctgggcatgctgctgtgcctcttcttcagcctgcccctcttcttcatcggctgcagcagccaccagattgctggcatcacccaccagaccagcgcccaccctggcctggagctgagccccagctgcatggaggcctgcagctgccccctggatggcttcaaccctgtgtgtgaccccagcaccagggtggagtacatcaccccctgccacgccggctgcagctcctgggtggtgcaggatgccctggacaacagccaggtgttctacaccaactgcagctgtgtggtggagggcaaccctgtgctggccggcagctgtgacagcacctgcagccacctggtggtgcccttcctgctgctggtgtccctgggcagcgccctggcctgcctgacccacacccccagcttcatgctgatcctgcggggcgtgaagaaggaggacaagaccctggccgtgggcatccagttcatgttcctgcgcatcctggcctggatgcccagccctgtgatccacggcagcgccatcgacaccacctgtgtgcactgggccctgagctgtggcagaagagctgtgtgccgctactacaacaatgacctgctgaggaaccgcttcatcggcctgcagttcttcttcaagacaggcagcgtcatctgctttgccctggtgctggccgtgctgcggcagcaggacaaggaggcccggaccaaggagagccgcagcagccctgctgtggagcagcagctgctggtgtctggccctgggaagaagccagaggacagccgggtgtag

SEQ ID NO: 171394 - DNA, 2130 bp, Artificial Sequence
  derived and/or modified sequence
atgggcccccggatcggccccgccggcgaggtgccccaggtgcccgacaaagagaccaaagcaactatgggcacagagaatactcctgggggaaaggccagccctgatcctcaggatgttcgcccatcggtgtttcacaacatcaaactgtttgtcctgtgtcatagcctactgcaactcgcccagctgatgattagcggatacctgaaatcctccatcagtacagtggagaaacggtttggactttccagccagacctccggattattggcatcgttcaacgaggtcggtaacaccgccctgatcgtgttcgtctcctactttggaagtagggtgcataggccacggatgatcggatatggcgccatcctcgtagctctcgccggtctgctgatgactttacctcactttatcagtgagccatacaggtatgacaacacgtcccctgaggatatgccacaggatttcaaggcctctctgtgcctcccaactacttccgctccagccagtgctccgagcaacggaaattgcagctcttacacagaaacccaacatctgagcgtggtgggtattatgttcgtcgcccaaaccctgctgggcgtcggcggggtcccaattcagccgtttggcatctcttacatcgatgattttgcacataattccaactcccctttgtaccttggaattctcttcgctgtgacaatgatgggacccggcctagcttttggtttagggagtctgatgctgcgcctctatgtggacattaatcaaatgcctgagggaggaatctctttaacaattaaggacccgcgatgggtgggcgcctggtggctgggctttttgatcgccgctggcgccgttgcattagctgccattccatatttcttttttcccaaagaaatgccaaaggagaagcgggagcttcagtttagacggaaggtgctagcggtgacagattctcctgcacggaaaggaaaggacagtccttcaaaacagtccccaggtgagagcaccaaaaagcaggatggattagtccaaattgcacctaacctgacggtcattcagtttataaaagtctttccccgcgtgctgctgcagacactgcgacatcctatattcctcctggtggtcttgtcccaggtctgtctcagctcgatggccgccgggatggcgatatttctccctaagtttctcgagagacagttcagtattacggcttcttacgccaaccttctaatcggctgtctttccttcccaagcgtgatcgtgggtattgtcgttggaggcgtgctcgttaagagacttcacctggggccggtcggttgcggtgcgttgtgcctgctggggatgctactgtgtttgtttttcagtttgcctctgttctttatcgggtgtagcagccaccaaattgcggggattacacatcaaaccagtgctcatcccggcttggaactctccccctcgtgcatggaagcctgtagctgtccactggacggttttaaccctgtgtgtgatccaagcacgagagtcgaatacattactccttgtcacgcgggatgctcttcatgggtggtccaagacgccttggacaacagtcaggtcttttacaccaactgttcatgtgtggttgaagggaatccagttttggccggctcttgcgatagcacatgctctcatttggtggtaccctttttgctcctagtgtccctgggaagcgctctcgcctgcctgactcacaccccaagcttcatgctgatccttcgaggggttaagaaagaggataagactttagccgtaggtatccagtttatgttcttgcgtatactggcctggatgccttctccagtcatccatggctctgccatagacaccacgtgtgtgcactgggctctgtcctgcggtcggagagcagtgtgccgctactacaacaatgacttactgcgaaaccgattcattggtctccagttcttcttcaaaacaggctctgtcatctgtttcgctttggtgctggcggttctacgacaacaggacaaagaggcacgtacaaaagagtcaagatccagcccggccgttgaacagcagctcttagttagtgggcctggtaagaagcctgaagactccagagtctag

SEQ ID NO: 171395 - DNA, 2064 bp, Artificial Sequence
  derived and/or modified sequence
atgggcaccgagaacacccccggcggcaaggccagccccgacccccaggatgtgaggccgtcggtatttcacaacattaaactgttcgtcctgtgtcacagcctgttacaactggcccagctaatgatcagcggctacctgaagagctctatctcaaccgtggaaaaaagatttggactgagctcccagacctctggactgcttgcttcctttaatgaagtagggaacaccgccctgatagtatttgtgtcatattttggctctagggtgcatcggccccgaatgatcggatacggagcaattctggtggccctggctggactgctgatgacacttcctcatttcatatctgagccttaccgctacgacaatacatctccagaggatatgccccaggactttaaggcgagtctgtgcctgccaaccacctccgctcctgcatctgcccctagcaatggaaattgcagttcttatactgagacccaacacctgtctgtagtcggcatcatgttcgtggcccagaccctcctgggggtagggggcgtacccatccagcctttcggcatcagttacattgacgacttcgcccataacagcaacagtcctctgtatctaggtattctttttgcagtgaccatgatggggccaggtctggccttcggtcttgggtcccttatgttgagactgtatgtcgacattaaccagatgcccgaaggtggcatctctctcacaattaaggaccctcggtgggtgggagcatggtggctcggattcctgattgccgcgggcgccgtggccctcgccgcaatcccctacttctttttccccaaagagatgcccaaggagaagcgcgagctgcagtttaggcggaaagtgttggctgtgacagactccccagcccgcaaagggaaagacagccctagtaagcaaagtcccggagaatcgactaagaagcaggatggtctcgtgcaaattgcccccaatttaaccgtaattcagtttattaaggtattcccaagagttttgctgcagaccctaaggcatcctatcttcttgctggtcgtgctctcacaggtctgcctatccagtatggctgccggtatggctattttcctacctaaatttctggagaggcagttttcgattaccgcaagctatgcaaacctgctgattggttgtctttctttcccctcggtcatcgttggaatagtggtcggcggcgtgcttgtcaagaggctgcacctgggtcctgttggctgcggggccctttgtctcctgggtatgcttttgtgtcttttcttttccttgccccttttctttatagggtgctcctcgcatcagatcgccggtattactcatcaaacttccgcccatcccggccttgagctgtcacctagctgcatggaggcttgtagttgccccctcgacggatttaatcctgtttgtgatccatctactagggtggagtatataaccccctgtcacgccggatgttcgtcctgggtggtacaggatgcccttgacaatagtcaggtcttttataccaactgctcctgcgttgtggaaggaaaccctgttctggcgggctcctgtgattccacatgctcccatctggtcgtgccctttcttcttctcgtatcgctgggctcggccctcgcttgtcttacgcatactccgagcttcatgttaattctcagaggcgtgaagaaggaggacaagaccctcgctgttgggatccagtttatgtttctgaggatccttgcttggatgcccagccccgtgatccacggttccgccattgacacgacttgcgttcactgggcactgtcttgtggccgcagggcagtctgccgttactataacaacgacctgttgcggaaccggtttataggcctgcagttcttcttcaagactgggagcgttatttgttttgctctggtgctggccgtgttgcgccaacaagataaagaagctcgcacgaaagagtcacgctcttcgcctgctgtggaacagcagctgttggtctctgggcctgggaagaagcctgaggacagtcgcgtatag

SEQ ID NO: 171396 - DNA, 1782 bp, Artificial Sequence
  derived and/or modified sequence
atgatcggctacggcgccatcctggtggccctggccggcctgctgatgacactcccccattttatatccgaaccctatcggtacgacaatacatcgcctgaagacatgccacaggacttcaaggcatctctttgccttcccaccacatcagcaccagcctcagcaccatccaatggcaattgtagtagttacacagaaacccaacacctgtctgtggtcggcatcatgttcgtggctcagaccctgctgggagtagggggagtccctatccagccgttcggcatttcatatatcgacgactttgctcacaattccaattccccattgtatctgggcatcttattcgccgtgacgatgatgggccccggactggcctttggtcttggcagtcttatgctccgactgtatgtggatattaaccagatgcctgagggaggcatttcattgactattaaagacccaagatgggttggcgcctggtggctcggatttctgatagcggctggagcagtggcgttagcagcaatcccatacttctttttcccgaaagagatgccaaaagagaagagagagctgcagttccgccggaaggtgctggccgtcacagacagccctgcacgcaaggggaaagatagcccaagcaagcaaagcccaggcgagtccactaagaaacaggacgggctagtgcaaatagcacccaatctgacggtgattcaatttatcaaggtattcccccgcgtgctgttgcagactctgagacaccccatattcttactggttgtcttgtcacaggtgtgtctgtcgtccatggctgccgggatggccatcttccttccaaagtttcttgagaggcagtttagtatcactgcatcctatgctaacctgcttattgggtgcttgtctttcccatccgtcatcgtgggtatcgttgtgggcggtgttctggtaaaacgtcttcacctgggccccgtcgggtgtggtgccctttgcctgctaggcatgctgctgtgcttgttcttttctctacccctgttttttataggttgctcatctcaccagatcgctggtatcacccaccaaaccagcgctcatccgggcctggaactgagtccctcctgcatggaagcatgcagctgtcccctggacgggtttaaccctgtgtgcgatccaagcactcgcgtggagtacattacaccgtgccatgccggctgtagctcgtgggttgtccaagatgccttggataacagccaagttttttatacgaactgttcatgcgtcgtcgagggcaatcctgtgctggcaggctcatgtgattctacctgcagtcacttagttgtgccctttctgttgcttgtaagcctcggaagcgccctagcttgcctgacacacactccttcattcatgctgattctgcgaggagttaagaaggaagataaaactttggccgtgggtatccagttcatgtttctgcggatcctggcatggatgccttccccggtgattcacggaagcgccattgacacaacttgcgtccactgggccctgtcgtgcggccgaagggctgtctgtagatactacaacaacgacctgttgcggaataggttcatcgggctccagttctttttcaagacgggatcggtgatatgttttgcgctcgtgttggccgttttgcgacagcaagataaggaagccagaaccaaagaatcacggtcttccccagcggtcgaacagcagctgcttgtgagtggaccgggcaaaaagcctgaggattccagggtgtag

SEQ ID NO: 171397 - DNA, 2130 bp, Artificial Sequence
  derived and/or modified sequence
atgggcccaagaattggacctgccggagaagtgccacaagttcctgataaggagaccaaggcgactatgggcaccgaaaatacccccggaggaaaggccagtcccgatcctcaggatgtgagaccgagcgtgttccacaacataaagctgttcgtgctttgccacagtcttctccaactggcacaactgatgatcagtggatatttaaaaagcagcattagcacagtggaaaagcggtttggcctgagtagtcagacgtcggggttactggcatcttttaacgaggtagggaatacagcccttattgtttttgttagttattttggcagccgcgtgcacagacctagaatgataggatacggcgctattctggtggctttagctggcctactcatgaccctcccacacttcatttcggagccttacagatatgataacacctccccagaagacatgccccaggattttaaagcttctctatgcttgcctacaacctctgctcctgcttccgccccatcaaacggaaattgttcttcgtatacagagacccagcatctgagtgtggtgggcattatgttcgtagctcagaccctgttaggcgtggggggagttccaattcagccgttcggtatttcctacatcgatgacttcgcccacaactctaactcaccgctgtacctgggaattctcttcgcagttaccatgatgggccctggcctcgcgttcggtctcggctccctcatgttgcggctttatgttgacataaatcaaatgccagaaggcggtatcagcctgaccattaaggatcctcgctgggtcggcgcttggtggttgggatttctaatcgcggctggcgcagtcgcgctggctgctataccatacttttttttccctaaagagatgccgaaggaaaagagggaactccagttccggaggaaagttctggccgtcaccgacagccctgccaggaagggaaaggattctcccagcaaacaatcaccaggcgagtctacaaagaagcaggacgggcttgtgcaaattgcaccaaacctgaccgtcatccagttcataaaggtgttcccgagagttctgctgcagacattaagacatcctatattcctattagtggttctcagccaggtgtgtctgagctccatggcagccggaatggcaatatttctgcccaaattcctggagagacagttcagcatcaccgcatcctacgcaaacctgttgataggctgcctgtcatttcctagcgtaatcgtcggaatcgtggtggggggtgtgctggttaaaaggctgcatctaggacccgttgggtgtggcgctttatgtctgttgggtatgttgctctgcctcttcttttcacttccactgtttttcattggctgtagctcacaccagattgcaggaataacacaccagacaagcgcacatccaggacttgagttgtccccaagctgtatggaagcctgtagctgtcccctggacggatttaaccctgtatgtgaccccagcacccgggtggagtacataacaccatgtcatgcaggttgttcctcttgggtcgttcaggacgccctcgacaacagccaggttttctacacaaactgtagctgcgttgttgagggcaacccagtgctcgctggctcctgcgactctacatgcagtcatctcgtggtgccttttttacttttagtgagtctgggaagtgcattagcatgccttacgcatacaccttccttcatgctcatactaaggggcgtgaaaaaagaagacaaaactctcgctgttggcattcaatttatgttcctcagaatcctagcatggatgccctcaccggttattcatggcagcgcgatagatactacatgtgtccattgggcacttagttgtggtcggagagctgtttgccgctattacaataatgatctcctaaggaaccggtttatagggctacagttcttctttaagactggctcagtgatctgttttgctctggtgctggccgtgctaagacagcaggacaaagaagctagaactaaggaaagtagaagcagcccggctgtcgaacagcagttactagtgtccggtccaggaaagaaacccgaggatagtagagtgtag

SEQ ID NO: 171398 - DNA, 2064 bp, Artificial Sequence
  derived and/or modified sequence
atggggaccgaaaatacaccgggaggtaaagcttcgccagatcctcaggacgtcaggccgagcgtgttccataacatcaagctgtttgtcctttgtcattccttattgcagctggctcagttgatgatctctggctacctgaaatcatctatctccacagtcgaaaagaggtttggtctgtctagtcagacaagcggactcttagcatccttcaatgaggttggtaacaccgcgctaatcgtattcgtgtcttacttcggatcacgcgtgcatcgccctcggatgataggctacggcgcaattctggtagcactcgcaggcctgctgatgacactgcctcacttcatttctgagccataccgctacgataatacatcgcccgaggatatgccgcaagattttaaggcgagcttgtgcctccctacgacctccgcccctgcttcggcaccctccaatggaaactgctccagttataccgagacccagcacctgtctgtagtcgggattatgtttgtggcgcaaaccctgctcggtgtcgggggagtgcctattcaacctttcgggattagctacatcgatgactttgcccacaactcaaattctcccctgtacctgggcattctgtttgccgtgactatgatgggccctggccttgctttcggtctgggcagtctgatgttgcgcctgtatgttgatataaatcaaatgcctgaaggtggcatatctctgactattaaggaccctaggtgggtcggggcttggtggctgggcttcctgattgcggctggagcagtcgccctagccgctatcccctacttcttcttcccaaaagaaatgcccaaagagaagcgggagttacagttccggcgaaaggttctggcagttactgactcacccgctagaaaggggaaagacagcccgtccaaacagagccctggcgagagcactaagaagcaggacggactcgtacagatcgccccaaatctaactgtgatccaattcattaaggtattcccaagagtgcttcttcagaccctcaggcacccgatcttcttgctggtcgtactcagtcaggtgtgcttgagcagtatggcggcaggaatggctatcttcttacctaaatttttagaacggcagtttagcatcacggcctcttacgcgaatttgctgattggatgcctgtcctttccaagtgtcatcgtgggtatcgtggtcgggggagtgctggtaaagagacttcatctgggaccagtgggctgcggcgcattgtgcctcctcggcatgcttctatgtctctttttttctctgcctctcttctttatcggttgctcatctcatcagattgcaggaatcacacaccagacgagcgcccaccccggtcttgaattatcaccatcctgcatggaagcttgtagctgccctctggatggctttaaccctgtgtgcgatccgtcgactcgagtagagtacatcacaccttgccacgccggatgcagttcctgggttgttcaggacgcacttgataactctcaagtgttctataccaactgctcatgtgtggtggaaggcaatccagttctagcgggatcgtgcgacagcacatgcagccacctggtagtgcctttcttgttgctagtctctcttgggagtgcactggcgtgtctcacccacaccccttccttcatgctcatcctacggggagtcaagaaggaagacaaaactttggctgttggaattcaattcatgttcttacgaatcctggcgtggatgccctcccctgtgatccacgggtccgcaatcgacaccacttgcgtgcactgggcactgagttgtgggagacgagccgtctgtaggtattacaacaatgacctgcttcgcaatagatttatcgggctgcagttcttcttcaagacaggctccgttatatgcttcgccctggtgctggccgtgctgcggcaacaggacaaggaagcgagaacaaaggaatcaaggagctccccagcagtggagcagcagctgctcgtgtcggggccaggaaagaaaccagaagacagtcgagtgtag

SEQ ID NO: 171399 - DNA, 1782 bp, Artificial Sequence
  derived and/or modified sequence
atgatcggctatggtgccatcctggtagcactagccggactcctgatgaccctcccgcattttatctccgaaccgtataggtacgataatacatcccctgaggacatgccacaagatttcaaagctagcctctgtttgccaaccacaagtgccccagcctccgctccgagcaacggaaattgttccagctacaccgagacccagcatttatcagtcgtggggatcatgttcgtggctcagacgctgctgggcgtcggcggagtccccatccagccctttggcataagctatatcgacgattttgcccacaatagtaactctccgctgtacctgggcatcctctttgcagtgacaatgatgggaccgggacttgcattcgggctgggaagtctgatgttgcgcttgtacgtggacatcaaccagatgccagagggaggtatttccttaaccattaaagatcctcgatgggtgggggcttggtggctgggtttcttgatcgccgctggcgctgtggcacttgctgctatcccatacttctttttccctaaagagatgcccaaagaaaaacgggaactgcagttccgccgtaaggtgcttgccgttaccgacagccccgctcgcaagggcaaggacagtccatccaagcaatctcccggtgagagcacaaagaaacaggatgggctcgtgcagatagctcccaacctcacagtgatacaattcatcaaggtcttccccagggtactgctccagaccctgcgtcatcccatattccttctcgtggtccttagccaagtgtgtttatccagcatggctgctggaatggcaattttccttcccaagtttttagagcgccagttcagtataaccgcatcttatgccaacctactcatcggctgtctgtcgttcccaagcgtaatcgtgggcatcgtggtgggtggagtgttggtcaagcgccttcatctcggtcctgtaggatgcggggcactgtgcctgctgggaatgcttttgtgtttgttcttctcactgcccctgttctttatcggatgctcatcacatcaaatcgcagggatcacgcaccagacgtctgcccatcccggattggagctgtccccgtcctgcatggaggcgtgctcttgcccgctcgatggttttaaccccgtgtgtgacccttctactcgagttgaatacatcactccatgccacgcgggttgcagtagttgggtagtccaggacgcactcgataatagccaggtattctatacgaactgctcttgcgtggtagaagggaaccccgtgctggcaggtagctgtgactccacatgctcacatcttgtcgtgcctttcttgctgcttgtatcactcggaagcgctttggcctgcctcacccataccccttctttcatgttgattttgcggggtgtgaaaaaggaggacaaaaccctggctgtgggcatccaatttatgtttctgcggatcctcgcctggatgcccagcccagtaattcacggcagcgctattgacactacgtgtgtacattgggcgctgagttgcggccgaagggcggtgtgcaggtactataataatgatctgctgcgcaaccgttttatcggcctccagtttttttttaagacaggtagcgttatttgctttgctcttgtgctggcggttcttcgccagcaggataaggaggccaggactaaagagtcgcgatcttcacctgccgtggagcagcagctgctagtctctggtcccggtaagaagcccgaggattcgagggtgtag

SEQ ID NO: 171400 - DNA, 4494 bp, Artificial Sequence
  derived and/or modified sequence
aaaaggacaggctgaggctgagcctcagggaggcggggtgcagcttcctcttcacagagaggctggacttgaacaaacccagccttctatacaaccgtggagccagggcaagggagagacagaaggagcaagtgacccagggagacaaacacttggagatacttggggctgagtttgagcaagactccctaacctgtgtctggacaagtctgatgtcctgtgtggcccaagaagaactgaccccgtgtctggagctcccaccgttattgcatccctgctgtggctcacctgctgctgtctccaggagcccctgagaagatttgcttcctctcccctgctaagctccaggtcctgagattaaattaggggctggagctcactgcactccagcagtcatgggacccaggatagggccagcgggtgaggtaccccaggtaccagacaaggaaaccaaagccacaatgggcacagaaaacacacctggaggcaaagccagcccagaccctcaggacgtgcggccaagtgtgttccataacatcaagctgttcgttctgtgccacagcctgctgcagctggcgcagctcatgatctccggctacctaaagagctccatctccacagtggagaagcgcttcggcctctccagccagacgtcggggctgctggcctccttcaacgaggtggggaacacagccttgattgtgtttgtgagctattttggcagccgggtgcaccgaccccgaatgattggctatggggctatccttgtggccctggcgggcctgctcatgactctcccgcacttcatctcggagccataccgctacgacaacaccagccctgaggatatgccacaggacttcaaggcttccctgtgcctgcccacaacctcggccccagcctcggccccctccaatggcaactgctcaagctacacagaaacccagcatctgagtgtggtggggatcatgttcgtggcacagaccctgctgggcgtgggcggggtgcccattcagccctttggcatctcctacatcgatgactttgcccacaacagcaactcgcccctctacctcgggatcctgtttgcagtgaccatgatggggccaggcctggcctttgggctgggcagcctcatgctgcgcctttatgtggacattaaccagatgccagaaggtggtatcagcctgaccataaaggacccccgatgggtgggtgcctggtggctgggtttcctcatcgctgccggtgcagtggccctggctgccatcccctacttcttcttccccaaggaaatgcccaaggaaaaacgtgagcttcagtttcggcgaaaggtcttagcagtcacagactcacctgccaggaagggcaaggactctccctctaagcagagccctggggagtccacgaagaagcaggatggcctagtccagattgcaccaaacctgactgtgatccagttcattaaagtcttccccagggtgctgctgcagaccctacgccaccccatcttcctgctggtggtcctgtcccaggtatgcttgtcatccatggctgcgggcatggccatcttcctgcccaagttcctggagcgccagttttccatcacagcctcctacgccaacctgctcatcggctgcctctccttcccttcggtcatcgtgggcatcgtggtgggtggcgtcctggtcaagcggctccacctgggccctgtgggatgcggtgccctttgcctgctggggatgctgctgtgcctcttcttcagcctgccgctcttctttatcggctgctccagccaccagattgcgggcatcacacaccagaccagtgcccaccctgggctggagctgtctccaagctgcatggaggcctgctcctgcccattggacggctttaaccctgtctgcgaccccagcactcgtgtggaatacatcacaccctgccacgcaggctgctcaagctgggtggtccaggatgctctggacaacagccaggttttctacaccaactgcagctgcgtggtggagggcaaccccgtgctggcaggatcctgcgactcaacgtgcagccatctggtggtgcccttcctgctcctggtcagcctgggctcggccctggcctgtctcacccacacaccctccttcatgctcatcctaagaggagtgaagaaagaagacaagactttggctgtgggcatccagttcatgttcctgaggattttggcctggatgcccagccccgtgatccacggcagcgccatcgacaccacctgtgtgcactgggccctgagctgtgggcgtcgagctgtctgtcgctactacaataatgacctgctccgaaaccggttcatcggcctccagttcttcttcaaaacaggttctgtgatctgcttcgccttagttttggctgtcctgaggcagcaggacaaagaggcaaggaccaaagagagcagatccagccctgccgtagagcagcaattgctagtgtcggggccagggaagaagccagaggattcccgagtgtgagctgtcttggggccccacctggccaagagtagcagccacagcagtacctcctctgagtcctttgcccaagattgggtgtcaagagccctgtgttccattctggctcctccactaaattgctgtgtgacttcaggcaagacattgatcctctctcagcctttgcttgctagtctgaaccaaagagttgtttgggcatttgctgtgttggccatttctggagcaagagggtcttcttcctccttcccccagccagccagctgtcctggggccaggctttcctgggtggaaagaagtatacctttccctggggccctaggatagcaaagtgagccatagtgggccaggctgccctccatgctgggccccagcccaggtctgcactcgcctggatcaccttctttgagccttagccatctcctgtcaggtaggaatgaacttgccagccttcaggctcgttcagctatgaccatctgtgcggtcagggtacactcagctctcctccccaactccagcagcctttaagaagtgtccctttggcgccccctggaggcagagcactgagctggaccctgggtagactcccacagggaggacggagctggcctcaggagtgggacacccagacttggcagggccttcaagaggcctgtgtgggggccccaggaatccttagctgaagcggggagactcactctccatctcaggaaattctagcccttgccctcagggagccacggttgagggtgaggcccaacacctgccttagggccctgggtgggcaagtctgggccctggggtagggagggagactcaggcccacacttgggtattttctaatttcagacaaacacacactcagcgcgcactcactgattcctacacattgccaagatttcacacatgtgaccaggggccaccaaagtccctgtgacctttgtgactaggatcctaatttctctattttctcctgggtgcctgggtctgtgtcacctggggcagtgtggataatgtttagttctgtgacactgttttttgggggtggcacctggttctccgatgcctgggctggtgtcaggcccaggactgtagtgctgggagcagtaaagctcagctctgtgtaatgagtgatgctatggcttgctcgtgtcttatgatccaatccttttctacatcagcccttgttttgttttatggctagtcttatctggcctggttatttccttgcggggaggagagggtttgctaatctgctcccagcccaacctattaccaccccacctcgctgggacctactgctcgggaggcagcagacagggagccaccagcagtggcttcctggccctgtgctgggggtggggggaagctgggggcacatgtggcccttgccttctgagcagctcccagtgccagggctttgagactttcccacatgataaaagaaaagggaggtacagaagttccaattccctttttattttgctggttggtatctgtaaatgtttaataaatatctgagcatgtatctatcaacgccaagaatttcaaagtctccttcaacaatatgaggcttttaggatgtttatattccttcatccctcttgtttcccaggttttgcagggaaaaaaagtctggaattatagatacagcttattattaaatttgttcttgcataatgtctcttctattacaaaaattctttcttcataaactgcattagaggtttgcaacaaccacatcatttccattaacttagatttaggttttactggattcattgctcaccattattgcttgtatattacatcttttccaatctttatattctggtctaatttttgtttgagtgtcttcgtctactaatggtttcaaaaatggaataaggtcatgaggatttctgaatcctcacctgtccaaattgtcattcacattttatagaagaggaaactggctcagaaagcacaagtgact

SEQ ID NO: 171401 - DNA, 2368 bp, Artificial Sequence
  derived and/or modified sequence
atatctctaaaggataaagtactcccaggaaggctttgagccttggcagaaaaggctgggattgaagcttcagggagagccagaggtgaggctggagtgggagatcacctgaggcagggccagcgggtgaggtaccccaggtaccagacaaggaaaccaaagccacaatgggcacagaaaacacacctggaggcaaagccagcccagaccctcaggacgtgcggccaagtgtgttccataacatcaagctgttcgttctgtgccacagcctgctgcagctggcgcagctcatgatctccggctacctaaagagctccatctccacagtggagaagcgcttcggcctctccagccagacgtcggggctgctggcctccttcaacgaggtggggaacacagccttgattgtgtttgtgagctattttggcagccgggtgcaccgaccccgaatgattggctatggggctatccttgtggccctggcgggcctgctcatgactctcccgcacttcatctcggagccataccgctacgacaacaccagccctgaggatatgccacaggacttcaaggcttccctgtgcctgcccacaacctcggccccagcctcggccccctccaatggcaactgctcaagctacacagaaacccagcatctgagtgtggtggggatcatgttcgtggcacagaccctgctgggcgtgggcggggtgcccattcagccctttggcatctcctacatcgatgactttgcccacaacagcaactcgcccctctacctcgggatcctgtttgcagtgaccatgatggggccaggcctggcctttgggctgggcagcctcatgctgcgcctttatgtggacattaaccagatgccagaaggtggtatcagcctgaccataaaggacccccgatgggtgggtgcctggtggctgggtttcctcatcgctgccggtgcagtggccctggctgccatcccctacttcttcttccccaaggaaatgcccaaggaaaaacgtgagcttcagtttcggcgaaaggtcttagcagtcacagactcacctgccaggaagggcaaggactctccctctaagcagagccctggggagtccacgaagaagcaggatggcctagtccagattgcaccaaacctgactgtgatccagttcattaaagtcttccccagggtgctgctgcagaccctacgccaccccatcttcctgctggtggtcctgtcccaggtatgcttgtcatccatggctgcgggcatggccatcttcctgcccaagttcctggagcgccagttttccatcacagcctcctacgccaacctgctcatcggctgcctctccttcccttcggtcatcgtgggcatcgtggtgggtggcgtcctggtcaagcggctccacctgggccctgtgggatgcggtgccctttgcctgctggggatgctgctgtgcctcttcttcagcctgccgctcttctttatcggctgctccagccaccagattgcgggcatcacacaccagaccagtgcccaccctgggctggagctgtctccaagctgcatggaggcctgctcctgcccattggacggctttaaccctgtctgcgaccccagcactcgtgtggaatacatcacaccctgccacgcaggctgctcaagctgggtggtccaggatgctctggacaacagccaggttttctacaccaactgcagctgcgtggtggagggcaaccccgtgctggcaggatcctgcgactcaacgtgcagccatctggtggtgcccttcctgctcctggtcagcctgggctcggccctggcctgtctcacccacacaccctccttcatgctcatcctaagaggagtgaagaaagaagacaagactttggctgtgggcatccagttcatgttcctgaggattttggcctggatgcccagccccgtgatccacggcagcgccatcgacaccacctgtgtgcactgggccctgagctgtgggcgtcgagctgtctgtcgctactacaataatgacctgctccgaaaccggttcatcggcctccagttcttcttcaaaacaggttctgtgatctgcttcgccttagttttggctgtcctgaggcagcaggacaaagaggcaaggaccaaagagagcagatccagccctgccgtagagcagcaattgctagtgtcggggccagggaagaagccagaggattcccgagtgtgagctgtcttggggccccacctggccaagagtagcagccacagcagtacctcctctgagtcctttgcccaagattgggtgtcaagagccctgtgttccattctggctcctccactaaattgctgtgtgacttcaggcaa

SEQ ID NO: 171402 - DNA, 274 bp, Artificial Sequence
  derived and/or modified sequence
aaacagccatatctctaaaggataaagtactcccaggaaggctttgagccttggcagaaaaggctgggattgaagcttcagggagagccagagggccagcgggtgaggtaccccaggtaccagacaaggaaaccaaagccacaatgggcacagaaaacacacctggaggcaaagccagcccagaccctcaggacgtgcggccaagtgtgttccataacatcaagctgttcgttctgtgccacagcctgctgcagctggcgcagctcatgatctc

SEQ ID NO: 171403 - DNA, 546 bp, Artificial Sequence
  derived and/or modified sequence
attttacccaatccctactcaagatgaagatggagatggagatggggccagcgggtgaggtaccccaggtaccagacaaggaaaccaaagccacaatgggcacagaaaacacacctggaggcaaagccagcccagaccctcaggacgtgcggccaagtgtgttccataacatcaagctgttcgttctgtgccacagcctgctgcagctggcgcagctcatgatctccggctacctaaagagctccatctccacagtggagaagcgcttcggcctctccagccagacgtcggggctgctggcctccttcaacgaggtggggaacacagccttgattgtgtttgtgagctattttggcagccgggtgcaccgaccccgaatgattggctatggggctatccttgtggccctggcgggcctgctcatgactctcccgcacttcatctcggagccataccgctacgacaacaccagccctgaggatatgccacaggacttcaaggcttccctgtgcctgcccacaacctcggccccagcctcggccccct

SEQ ID NO: 171404 - DNA, 224 bp, Artificial Sequence
  derived and/or modified sequence
aacgaagaggcacacaggaggtcggagaacacaatatcaacagggccagcgggtgaggtaccccaggtaccagacaaggaaaccaaagccacaatgggcacagaaaacacacctggaggcaaagccagcccagaccctcaggacgtgcggccaagtgtgttccataacatcaagctgttcgttctgtgccacagcctgctgcagctggcgcagctcatgatctc

SEQ ID NO: 171405 - DNA, 578 bp, Artificial Sequence
  derived and/or modified sequence
aactgcagactgggaggttactaagtccttagcagctgagtacagaacacgatggaaatgaaaacatggtacaacagaggttacagccctctcctgacctgataaacttcatgatggagctaaagatggtttgggaagtttctttgaatcacaagcagaactgtatgtgctgtctcctcctgtctggatctactcactacttgctaaagagaagaattttggtttgggataaatttatgtggatcttcgctttggtgccataaagggccagcgggtgaggtaccccaggtaccagacaaggaaaccaaagccacaatgggcacagaaaacacacctggaggcaaagccagcccagaccctcaggacgtgcggccaagtgtgttccataacatcaagctgttcgttctgtgccacagcctgctgcagctggcgcagctcatgatctccggctacctaaagagctccatctccacagtggagaagcgcttcggcctctccagccagacgtcggggctgctggcctccttcaacgaggtggggaacacagccttgattgtgtttgtgagctattttggcag

SEQ ID NO: 171406 - DNA, 2593 bp, Artificial Sequence
  derived and/or modified sequence
aaacccagccttctatacaaccgtggagccagggcaagggagagacagaaggagcaagtgacccagggagacaaacacttggagatacttggggctgagtttgagcaagactccctaacctgtgtctggacaagtctgatgtcctgtgtggcccaagaagaactgaccccgtgtctggagctcccaccgttattgcatccctgctgtggctcacctgctgctgtctccaggagcccctgagaagatttgcttcctctcccctgctaagctccaggtcctgagattaaattaggggctggagctcactgcactccagcagtcatgggacccaggataggtggggaacacagccttgattgtgtttgtgagctattttggcagccgggtgcaccgaccccgaatgattggctatggggctatccttgtggccctggcgggcctgctcatgactctcccgcacttcatctcggagccataccgctacgacaacaccagccctgaggatatgccacaggacttcaaggcttccctgtgcctgcccacaacctcggccccagcctcggccccctccaatggcaactgctcaagctacacagaaacccagcatctgagtgtggtggggatcatgttcgtggcacagaccctgctgggcgtgggcggggtgcccattcagccctttggcatctcctacatcgatgactttgcccacaacagcaactcgcccctctacctcgggatcctgtttgcagtgaccatgatggggccaggcctggcctttgggctgggcagcctcatgctgcgcctttatgtggacattaaccagatgccagaaggtggtatcagcctgaccataaaggacccccgatgggtgggtgcctggtggctgggtttcctcatcgctgccggtgcagtggccctggctgccatcccctacttcttcttccccaaggaaatgcccaaggaaaaacgtgagcttcagtttcggcgaaaggtcttagcagtcacagactcacctgccaggaagggcaaggactctccctctaagcagagccctggggagtccacgaagaagcaggatggcctagtccagattgcaccaaacctgactgtgatccagttcattaaagtcttccccagggtgctgctgcagaccctacgccaccccatcttcctgctggtggtcctgtcccaggtatgcttgtcatccatggctgcgggcatggccatcttcctgcccaagttcctggagcgccagttttccatcacagcctcctacgccaacctgctcatcggctgcctctccttcccttcggtcatcgtgggcatcgtggtgggtggcgtcctggtcaagcggctccacctgggccctgtgggatgcggtgccctttgcctgctggggatgctgctgtgcctcttcttcagcctgccgctcttctttatcggctgctccagccaccagattgcgggcatcacacaccagaccagtgcccaccctgggctggagctgtctccaagctgcatggaggcctgctcctgcccattggacggctttaaccctgtctgcgaccccagcactcgtgtggaatacatcacaccctgccacgcaggctgctcaagctgggtggtccaggatgctctggacaacagccaggttttctacaccaactgcagctgcgtggtggagggcaaccccgtgctggcaggatcctgcgactcaacgtgcagccatctggtggtgcccttcctgctcctggtcagcctgggctcggccctggcctgtctcacccacacaccctccttcatgctcatcctaagaggagtgaagaaagaagacaagactttggctgtgggcatccagttcatgttcctgaggattttggcctggatgcccagccccgtgatccacggcagcgccatcgacaccacctgtgtgcactgggccctgagctgtgggcgtcgagctgtctgtcgctactacaataatgacctgctccgaaaccggttcatcggcctccagttcttcttcaaaacaggttctgtgatctgcttcgccttagttttggctgtcctgaggcagcaggacaaagaggcaaggaccaaagagagcagatccagccctgccgtagagcagcaattgctagtgtcggggccagggaagaagccagaggattcccgagtgtgagctgtcttggggccccacctggccaagagtagcagccacagcagtacctcctctgagtcctttgcccaagattgggtgtcaagagccctgtgttccattctggctcctccactaaattgctgtgtgacttcaggcaagacattgatcctctctcagcctttgcttgctagtctgaaccaaagagttgtttgggcatttgctgtgttggccatttctggagcaagagggtcttcttcctccttcccccagccagccagctgtcctggggccaggctttcctgggtggaaagaagtatacctttccctggggccctaggatagcaaagtgagccatagtgggccaggctgccctccatgctgggccccagcccaggtctgcactcgcctggatcaccttctttgagccttagc

SEQ ID NO: 171407 - DNA, 373 bp, Artificial Sequence
  derived and/or modified sequence
atttgggcaaggccccacttgctcccagaagcccagcagggagagcttcataggccatggagacagacccagctgaggagcagctgcagggactccaggagaacgcagccatggcttggggactgcagtacggcaggaagggtgggatggatgcctcctctcggggcacctcacaggacagatgagaatgagggccagcgggtgaggtaccccaggtaccagacaaggaaaccaaagccacaatgggcacagaaaacacacctggaggcaaagccagcccagaccctcaggacgtgcggccaagtgtgttccataacatcaagctgttcgttctgtgccacagcctgctgcagctggcgcagctcatgatctc

SEQ ID NO: 171408 - DNA, 577 bp, Artificial Sequence
  derived and/or modified sequence
agccatatctctaaaggataaagtactcccaggaaggctttgagccttggcagaaaaggctgggattgaagcttcagggagagccagaggtgaggctggagtgggagatcacctgaggcaggtgagcaggctccatgagtgggcagggccagcgggtgaggtaccccaggtaccagacaaggaaaccaaagccacaatgggcacagaaaacacacctggaggcaaagccagcccagaccctcaggacgtgcggccaagtgtgttccataacatcaagctgttcgttctgtgccacagcctgctgcagctggcgcagctcatgatctccggctacctaaagagctccatctccacagtggagaagcgcttcggcctctccagccagacgtcggggctgctggcctccttcaacgaggtggggaacacagccttgattgtgtttgtgagctattttggcagccgggtgcaccgaccccgaatgattggctatggggctatccttgtggccctggcgggcctgctcatgactctcccgcacttcatctcggagccataccgctacgacaacaccagccct

SEQ ID NO: 171409 - protein, 364 aa, Artificial Sequence
  derived and/or modified sequence
MALALLEDWCRIMSVDEQKSLMVTGIPADFEEAEIQEVLQETLKSLGRYRLLGKIFRKQENANAVLLELLEDTDVSAIPSEVQGKGGVWKVIFKTPNQDTEFLERLNLFLEKEGQTVSGMFRALGQEGVSPATVPCISPELLAHLLGQAMAHAPQPLLPMRYRKLRVFSGSAVPAPEEESFEVWLEQATEIVKEWPVTEAEKKRWLAESLRGPALDLMHIVQADNPSISVEECLEAFKQVFGSLESRRTAQVRYLKTYQEEGEKVSAYVLRLETLLRRAVEKRAIPRRIADQVRLEQVMAGATLNQMLWCRLRELKDQGPPPSFLELMKVIREEEEEEASFENESIEEPEERDGYGRWNHEGDD

SEQ ID NO: 171410 - DNA, 1095 bp, Artificial Sequence
  derived and/or modified sequence
atggcactagcccttctggaggactggtgccgcattatgtccgtggacgaacagaaatcactgatggttaccggaatccccgccgatttcgaggaagccgagatacaggaggttcttcaggagactcttaaatctcttggacgctaccgtcttctcggcaagatatttaggaaacaggaaaatgcgaacgctgtcttgctggagctgcttgaagatacagatgtttctgctataccatctgaagtacagggcaaggggggggtatggaaggtgatcttcaagactcctaatcaagacactgagttcctcgagaggttaaacctcttcttggagaaggagggccagacagtatccggcatgtttagggccctgggacaggaaggcgtaagccctgccactgtgccctgtatctctccagaactgctggcccatttgctgggccaggccatggctcacgctccacagcccctgctgcccatgagataccgcaagttgagggtgttttcgggcagtgcagtgccggcgcctgaggaggaatccttcgaggtatggctcgagcaggccactgaaatcgtcaaggaatggccagttactgaagcagaaaaaaaaagatggctggcagagagcctacgcgggccggcccttgatttaatgcatattgtgcaagctgacaacccctccatctctgtcgaagagtgtttggaagcctttaagcaggtcttcggttctctggagagtaggcggaccgcacaggtccggtatctgaaaacataccaagaagaaggcgaaaaggtctcagcttacgtactgcgcttagagaccctgctgaggcgggccgtcgagaagagagctatcccacgacggattgccgaccaggttcgtctggagcaggtgatggccggtgccacgttgaatcaaatgctatggtgcaggctgagagagctaaaggaccaggggcctccaccctctttcttggagttgatgaaagtcatccgggaggaggaagaggaagaagccagcttcgaaaatgaaagcattgaagagcccgaggagagagacggctatggtcgatggaatcatgaaggggacgactag

SEQ ID NO: 171411 - DNA, 4950 bp, Artificial Sequence
  derived and/or modified sequence
gctcggggaagcggcaaagttggatctgggagggcgtccgctgcggctgcgggagccgaaaggctgccagttcccggcagcgctgggaggagggaggcgcgggcggggcgcggcgccggggaggggagcggtgctcaggggagggctggaggggagggaaggagagagagaggggagggcggcaccgcccctagccccgcgctccggaagtgaagcggccagaccaccagctaatggatgcggagcggagggcccgctgaccgctctccgcgcctggagcagcttggcttggctggagctaagagccagacacaccactgtgtggaggtgggtgatgtcttcctgtgctaaaaggtgaataaataagctcctcacctctcgcggaacactcgggaacacatcaacaggggtccaagccgccctgctgggaggcttctcttcaagagttctgggtcccagagtggaaggcattttcccatcaactggagagagacgaaacatcagagaccaggaggctgtggagaaagcagctgtcccaggtgcctcaactatcagagaagggtcagcgtcacgtggctgccagcatctttgagaaaatcactggcaatcggacttcagagctgcgggcacaggtgtggttagaactgagatacgacctgcccacctgggtcaggcctaaagacaagaagtcctgagttcttgccactgagtaggccagggtcatttgtccagaaaactttgtgactgtctttgagtgacctagtctgggacccattcattggtgggttctaaggttagaagctcatccaggatattttcaatattaagtcagtgcatagctgcaccactaacaaattggtgcctgtagagtcagagtgggtcaattcttaggacaatggcgctggcactgttagaggactggtgcaggataatgagtgtggatgagcagaagtcactgatggttacggggataccggcggactttgaggaggctgagattcaggaggtccttcaggagactttaaagtctctgggcaggtatagactgcttggcaagatattccggaagcaggagaatgccaatgctgtcttactagagcttctggaagatactgatgtctcggccattcccagtgaggtccagggaaaggggggtgtctggaaggtgatctttaagacccctaatcaggacactgagtttcttgaaagattgaacctgtttctagaaaaagaggggcagacggtctcgggtatgtttcgagccctggggcaggagggcgtgtctccagccacagtgccctgcatctcaccagaattactggcccatttgttgggacaggcaatggcacatgcgcctcagcccctgctacccatgagataccggaaactgcgagtattctcagggagtgctgtcccagccccagaggaagagtcctttgaggtctggttggaacaggccacggagatagtcaaagagtggccagtaacagaggcagaaaagaaaaggtggctggcggaaagcctgcggggccctgccctggacctcatgcacatagtgcaggcagacaacccgtccatcagtgtagaagagtgtttggaggcctttaagcaagtgtttgggagcctagagagccgcaggacagcccaggtgaggtatctgaagacctatcaggaggaaggagagaaggtctcagcctatgtgttacggctagaaaccctgctccggagagcggtggagaaacgcgccatccctcggcgtattgcggaccaggtccgcctggagcaggtcatggctggggccactcttaaccagatgctgtggtgccggcttagggagctgaaggatcagggcccgccccccagcttccttgagctaatgaaggtaatacgggaagaagaggaggaagaggcctcctttgagaatgagagtatcgaagagccagaggaacgagatggctatggccgctggaatcatgagggagacgactgaaaaccacctgggggcaggacccacagccagtgggctaagacctttaaaaaatttttttctttaatgtatgggactgaaatcaaaccatgaaagccaattattgaccttccttccttccttccttccctcccttcctccttctctccttctctcctcctctctcctctcctctcctctctttccttccttccttccttttttctttttctctttcttctttatttcttgggtctcactctcatcacccaggctagagtgcagtggcacaaaaatctcggctcactgcagccttgacttcccaggctcaggctcaggtgatcctcacaccttagcctcccaagtacctgggactacaggcacgcaccaccatgcctagctattcttttgtatttttggtagagacagggttttgctgtgttgctcaggctggtctggaacccctaggctcaaatgatgtgcccaactcggcctcccaaagtgctgggattacaggcatgaaccgccatgcctggcccttgatttttctttttaagaaaaaaatatctaggagtttcttagaccctatgtagattattaatgaacaaaagattaaactccaaatattaaatagtaagcctgaaggaatctgaaacacttgtacttccaattttctttaaataatcccaaatagaccagaattggcccataccatagaagaaagaattggcagtcaaaaaaaaaaataccttttgtaatgtttgaaaaataaagctgtttgacttgtcaggtgttttcctttctcaaatcagcaaattctctctgagtgcctggctttgtgagacactgtacaaggagttacaagactacagctataacctgcagttgagcagttataaacctacaaaatgggccctgccctcagagaggttccagtctagatgaggagctgatctagacaggtaaaaggctaactaaccctttgtgtaaataagttcatcaccccagtaaaagtgtcatcacccagtgaataggaccacctctgcctgcagatttttgttgttgttgttgtcattgttgttgttgttttaacctgggaagtgttcttcctgcctttctgctaggtgtcagatagatggtcccagagctaggtgctgtgtcaggccctgaagacacagatgactcaacctaagctttactttccagaggtccacagcctgagaggtgtccccaaagaaagggggacatgaggggactgcatgcttgagagcagggttgtttagggcaggtttggatttagtgagcaggctggtttgcttagagaaggcttttagtggcaacaaaggatgaagaggagagaaaaggaactcacatttattgagggcctactgtgtgcaaagtgtttcatgtatatctcattgaatgtatacagccaccctgttgtggtataattttgctctttataaagagaaagaccgaagctcagatgagttaagtggtctcctcaacaccaaaatgccaagaagtgatggagcctagacagaagcccagaactttctgactcacactagtccatcctctaccatcacgatgactttcaaattgtgctctgcagttctgcagattttctagcagtgccatctccaaaatgtgttttaaactctttatttttttaattattattagtattattttgagactgagtcttgctctatcacccaggctggagtgcagtggtgcaatctcagctcactgcaacctccgcctcccaggttcaagcgatttcgtgcctcagcctcccgagtagctgggattacaggcacccaccaccacgcccagctaatttttgtatttttagtagaaatggggtttcaccatgttggccaggctggtctcgaactcctgacctcaagtgatccactcacctcggcctcccaaagtgctgggattacaggtgtgagccaccatgcctgggctaaactctttaagtctctagtaaatgcagctagattcaaatgggctgataaccaaattttaacacatcagcattcaccaccaggtttacttttattttcagattggctcattttgtgcagaccttagagcaaagtttcctttatggtatctgtgtacgtatccaaacttcttttaattgttcacagattttaaaagcggtagcaccacatggttgtgtagatcagacctgtgtatttagatcagacctgtgtatcacgtaagtgtgtgagtgcagtgcagatgagcaccatttagttatatgtgctaggcaaatctccaacacagttgatgtgtagtcttgtggtagatttgtgcatactgtaagcaaattgcttagcttctctagacatcagtttccacatctgaaaaataagaagatgagagtacacggttgttatgaacaaatgacttaatgctttttaagcacgttgcatgacatctggaacacagaaagccctcaatacattgaagctcttaggattttcacgatgttcctgtctgctcaatgcatgctttctttattgttctgacagttgtgtggtaacaagctaatatgcttccagttgacttccagtctaccctggtgttagaaaccgtttcatctcttattgtaaatttgagtgcttgttgttttttatatttgtgatgactcttccagcagttgttgacaattgttagaggtttgacttttaaataattacttattttttctgattgtggttcagtttaactgaagaatatcctgagattgtaagaaaagcattttttaaaaggtatcacttgtgatcatttatctttctaaattctatttttaatactgttccaccaaagtgatgcagtggttaccatgacaccctaatttcatgtgtttttgtatttatgaaaatagtttcattgtcatttattggcggtatacaaagtaaaatgttataaatgtgaagttataaaataaatatatgctaataaaa

SEQ ID NO: 171412 - DNA, 1095 bp, Artificial Sequence
  derived and/or modified sequence
atggccctggccctgctggaggactggtgccgcatcatgtctgtggatgagcagaagagcctgatggtgacaggcatcccagctgactttgaggaggccgagatccaggaggtgctgcaggagaccctgaagagcctgggccgctaccgcctgctgggcaagatcttcaggaagcaggagaatgccaatgctgtgctgctggagctgctggaggacacagatgtgtctgccatccccagcgaggtgcagggcaaaggaggagtgtggaaggtgatcttcaagacccccaaccaggacacagagttcctggagcggctgaacctcttcctggagaaggagggccagacagtgtctggcatgttccgggccctgggccaggagggcgtgtccccagccaccgtgccctgcatcagccctgagctgctggcccacctgctgggccaggccatggcccacgccccccagcccctgctgcccatgagatacaggaagctgcgggtcttcagcggcagcgctgtgcctgcccctgaggaggagagctttgaggtgtggctggagcaggccacagaaattgtgaaggagtggcctgtgacagaggccgagaagaagcgctggctggccgagagcctgcggggccctgccctggacctgatgcacatcgtgcaggccgacaaccccagcatctctgtggaggagtgcctggaggccttcaagcaggtgtttggcagcctggagagcagaagaacagcccaggtgcgctacctgaagacctaccaggaggagggggagaaggtgtctgcctacgtgctgcggctggagaccctgctgcggcgggctgtggagaagagggccatccccaggagaattgctgaccaggtgcggctggagcaggtgatggccggggccaccctgaaccagatgctgtggtgccgcctgcgggagctgaaggaccagggccccccacccagcttcctggagctgatgaaggtgatccgggaggaggaggaggaggaggccagctttgaaaatgaaagcattgaggagcctgaggagagagatggctacggccgctggaaccacgagggagatgactag

SEQ ID NO: 171413 - DNA, 1095 bp, Artificial Sequence
  derived and/or modified sequence
atggccctggccctgctggaggactggtgccggatcatgagcgtggacgaacaaaaatcactcatggtgaccggtatccccgcagacttcgaggaagcagagatacaggaagttctgcaagagaccctaaagagcctaggccgctaccgtctcttggggaagatcttcaggaagcaggagaatgccaacgctgtcctactagaacttctggaagacacggatgtgagcgccatcccatcggaggtccaaggtaaggggggggtgtggaaagtcatctttaagacacccaatcaggacacagagtttctggagagactaaacttattcctggagaaagaggggcagactgtctccggcatgtttcgcgccctggggcaggaaggggtgagccccgcgacagttccctgcatttctcccgagctgctagcccacctcttgggccaggctatggcccacgcgccgcaaccactcctgccaatgcgctatcggaagcttcgggttttttccggatctgccgttcccgcacccgaagaggagtcatttgaggtgtggctggagcaagccaccgagattgtcaaagaatggcccgtgactgaggctgaaaagaagcgctggcttgccgagtcactgaggggccccgcacttgacttgatgcatatcgtccaagcagacaacccttctatctctgtggaagaatgcctcgaggcctttaaacaggtctttggaagcttggagagccgcagaacggcacaagtgaggtatctgaaaacgtatcaggaggagggggaaaaagtgagcgcctacgttctgaggttggaaactctgctccggcgggctgtggaaaaaagagctatcccccggaggatcgccgatcaagtgaggctcgagcaggtcatggctggggcgacgctgaatcagatgttatggtgtcgacttcgagagctcaaagaccaagggcctcccccttcctttctggaactgatgaaggtgatcagggaagaggaagaggaggaagcgagcttcgagaacgagtcaattgaggagcctgaggagagagatggctatggtcggtggaatcatgagggagatgactag

SEQ ID NO: 171414 - DNA, 1095 bp, Artificial Sequence
  derived and/or modified sequence
atggctctggccttattagaggactggtgtcgcattatgtccgttgatgagcagaagtcactcatggtgacaggcattcctgcagacttcgaggaagccgagatccaggaagttctccaggagacattgaaatccctgggtcgctatcgccttcttggcaagatctttagaaaacaggagaacgctaacgccgtcctgttggaactattggaggacactgatgtaagtgctattccctctgaggtgcagggtaagggtggagtgtggaaggtgatcttcaagaccccaaaccaagacaccgaatttctagagcgcctcaatctgtttctggaaaaggaaggccagacagtttccggcatgtttcgcgctctgggccaggagggcgtctctcccgctaccgtcccctgcatcagtcctgaattactagcccacctcttaggccaagccatggctcacgcaccgcaacccctgctgcctatgaggtatcgcaaattaagggtctttagtgggagtgccgtcccagctccagaggaggagagttttgaggtatggctcgaacaggccaccgagattgttaaagagtggcctgtgacagaggctgagaagaagcgatggctggctgagtcattgcgcggtcccgcactggatctcatgcacattgtgcaggctgataatccatcgattagcgtggaagagtgtttagaggcctttaagcaggtattcgggtcacttgaaagcaggaggacggcgcaggttagatatctcaagacttatcaggaagagggcgaaaaagtgagcgcctacgttttacgcctagagactctgctgaggcgcgctgttgagaagcgggctattcctcgtagaattgcagatcaggtacgtctcgaacaggttatggccggtgccacgctgaatcagatgctgtggtgccgcttacgcgagctcaaggatcagggaccccctccatcgtttctggaactgatgaaagtgattagggaggaagaggaggaagaggcaagctttgaaaatgagtcgatagaggagccagaggaaagggatgggtacgggcgatggaatcacgagggggacgattag

SEQ ID NO: 171415 - DNA, 1095 bp, Artificial Sequence
  derived and/or modified sequence
atggccctggccctgctggaggactggtgcagaatcatgagcgtggacgagcagaagagcctgatggtgaccggcatccccgccgacttcgaggaggccgagatccaggaggtgctgcaggagaccctgaagagcctgggcagatacagactgctgggcaagatcttcagaaagcaggagaacgccaacgccgtgctgctggagctgctggaggacaccgacgtgagcgccatccccagcgaggtgcagggcaagggcggcgtgtggaaggtgatcttcaagacccccaaccaggacaccgagttcctggagagactgaacctgttcctggagaaggagggccagaccgtgagcggcatgttcagagccctgggccaggagggcgtgagccccgccaccgtgccctgcatcagccccgagctgctggcccacctgctgggccaggccatggcccacgccccccagcccctgctgcccatgagatacagaaagctgagagtgttcagcggcagcgccgtgcccgcccccgaggaggagagcttcgaggtgtggctggagcaggccaccgagatcgtgaaggagtggcccgtgaccgaggccgagaagaagagatggctggccgagagcctgagaggccccgccctggacctgatgcacatcgtgcaggccgacaaccccagcatcagcgtggaggagtgcctggaggccttcaagcaggtgttcggcagcctggagagcagaagaaccgcccaggtgagatacctgaagacctaccaggaggagggcgagaaggtgagcgcctacgtgctgagactggagaccctgctgagaagagccgtggagaagagagccatccccagaagaatcgccgaccaggtgagactggagcaggtgatggccggcgccaccctgaaccagatgctgtggtgcagactgagagagctgaaggaccagggccccccccccagcttcctggagctgatgaaggtgatcagagaggaggaggaggaggaggccagcttcgagaacgagagcatcgaggagcccgaggagagagacggctacggcagatggaaccacgagggcgacgactag

SEQ ID NO: 171416 - protein, 299 aa, Artificial Sequence
  derived and/or modified sequence
MWLPWALLLLWVPGCFALSKCRTVAGPVGGSLSVQCPYEKEHRTLNKYWCRPPQIFLCDKIVETKGSAGKRNGRVSIRDSPANLSFTVTLENLTEEDAGTYWCGVDTPWLRDFHDPVVEVEVSVFPASTSMTPASITAAKTSTITTAFPPVSSTTLFAVGATHSASIQEETEEVVNSQLPLLLSLLALLLLLLVGASLLAWRMFQKWIKAGDHSELSQNPKQAATQSELHYANLELLMWPLQEKPAPPREVEVEYSTVASPREELHYASVVFDSNTNRIAAQRPREEEPDSDYSVIRKT

SEQ ID NO: 171417 - DNA, 900 bp, Artificial Sequence
  derived and/or modified sequence
atgtggctgccctgggccctgctgctgctgtgggtgcccggctgcttcgccctgagcaagtgcagaaccgtggccggccccgtgggcggcagcctgagcgtgcagtgcccctacgagaaggagcacagaaccctgaacaagtactggtgcagacccccccagatcttcctgtgcgacaagatcgtggagaccaagggcagcgccggcaagagaaacggcagagtgagcatcagagacagccccgccaacctgagcttcaccgtgaccctggagaacctgaccgaggaggacgccggcacctactggtgcggcgtggacaccccctggctgagagacttccacgaccccgtggtggaggtggaggtgagcgtgttccccgccagcaccagcatgacccccgccagcatcaccgccgccaagaccagcaccatcaccaccgccttcccccccgtgagcagcaccaccctgttcgccgtgggcgccacccacagcgccagcatccaggaggagaccgaggaggtggtgaacagccagctgcccctgctgctgagcctgctggccctgctgctgctgctgctggtgggcgccagcctgctggcctggagaatgttccagaagtggatcaaggccggcgaccacagcgagctgagccagaaccccaagcaggccgccacccagagcgagctgcactacgccaacctggagctgctgatgtggcccctgcaggagaagcccgccccccccagagaggtggaggtggagtacagcaccgtggccagccccagagaggagctgcactacgccagcgtggtgttcgacagcaacaccaacagaatcgccgcccagagacccagagaggaggagcccgacagcgactacagcgtgatcagaaagacctag

SEQ ID NO: 171418 - DNA, 900 bp, Artificial Sequence
  derived and/or modified sequence
atgtggcttccatgggctctattgctgttatgggtaccgggctgctttgcgctgagtaagtgtcgcactgtggctggacctgttggcggctcgctctctgtccagtgcccctatgagaaggaacatcggaccctgaacaagtactggtgtcggcctcctcagattttcttgtgtgataagatcgtcgaaacgaaagggagtgcgggaaaacgcaacggtagagtatcgattcgggattcccccgcaaacctcagcttcactgtcaccctcgagaatttaaccgaggaagatgccggaacctattggtgtggagttgacacaccgtggttgagagacttccatgatccggtagtggaggttgaagtgtctgtgtttcctgcatctacatccatgacgccggcttctattacagccgctaaaacatccaccatcacaactgcttttccccctgtgagctcaacaacactatttgctgtgggcgctacccacagtgcatccatccaagaggaaaccgaagaagtagtcaactcccagttaccgctgctcttgtccctgctagctctgctgttgctgttgctggttggggctagcctgctggcatggagaatgtttcaaaagtggatcaaggccggtgaccactctgagctctcacagaatccgaagcaggcagcaacccaaagtgaacttcactacgccaatttagaactgctaatgtggccccttcaggaaaagcccgccccgcctcgcgaagtagaggttgagtatagtactgtggcatcgccgcgtgaggagctgcactacgcttctgtagttttcgattccaacaccaacaggatcgccgctcaacggccccgcgaagaggaacccgacagtgactattccgtaattcgcaagacttag

SEQ ID NO: 171419 - DNA, 900 bp, Artificial Sequence
  derived and/or modified sequence
atgtggctgccctgggccctgctgctgctgtgggtgcccggctgctttgccctgagcaagtgcaggacagtggccggccctgtgggcggcagcctgtctgtgcagtgcccctatgagaaggagcacaggaccctgaacaagtactggtgccggcccccccagatcttcctgtgtgacaagatcgtggagaccaagggcagcgctgggaagagaaatggccgggtgtccatccgggacagccctgccaacctgtccttcaccgtgaccctggagaacctgacagaggaggatgctggcacctactggtgtggggtggacaccccctggctgcgggacttccatgaccctgtggtggaggtggaggtgtctgtgtttcctgccagcacctccatgaccccagccagcatcacagctgccaagaccagcaccatcaccacagccttcccccctgtgagcagcaccaccctgtttgctgtgggcgccacccacagcgccagcatccaggaggagacagaggaggtggtgaacagccagctgcccctgctgctgagcctgctggccctgctgctgctgctgctggtgggcgccagcctgctggcctggaggatgttccagaagtggatcaaggccggggaccacagcgagctgagccagaaccccaagcaggccgccacccagagcgagctgcactacgccaacctggagctgctgatgtggcccctgcaggagaagccagccccaccccgggaggtggaggtggagtacagcacagtggccagcccccgggaggagctgcactacgcctctgtggtgtttgacagcaacaccaacagaattgctgcccagaggccccgggaggaggagccagacagcgactacagcgtcatcaggaagacctag

SEQ ID NO: 171420 - DNA, 900 bp, Artificial Sequence
  derived and/or modified sequence
atgtggctgccctgggccctgctgctgctgtgggtgcccggctgcttcgccctctccaaatgcaggactgttgccggcccggtgggggggagcctctcagtgcaatgcccctatgaaaaagagcacagaaccttaaacaaatactggtgtaggccaccacagattttcctctgcgacaaaatagtggagacgaaaggaagtgcaggtaaacgtaacggaagagtgagcatcagggattcgccggccaatctgtcatttacagtgaccctggagaacctcacggaggaggatgcaggcacttactggtgcggggtggacactccttggctgcgggacttccacgaccccgtggtagaggttgaggtaagcgtcttcccagctagtacctccatgaccccagcttccatcaccgccgcgaaaacctcaacgattaccacagcgttcccgccagttagcagcaccacactcttcgcagttggagccacacactctgccagcatccaagaagagacagaggaggtagttaactcccagctccccctcttgctgagtcttctggctcttctcctgctcctgctggtgggggcctccttattggcctggaggatgttccaaaaatggatcaaagccggggatcattcagagcttagccagaatccaaaacaggctgctacccagagcgaactgcattacgccaacctcgaactacttatgtggcccctccaggagaaaccagcgcctccccgggaagtagaagtggaatactctaccgttgccagcccacgggaagaactccactacgcctctgtagtcttcgatagtaatactaatcggatcgccgcgcagcggcctcgtgaggaagagccagacagcgattattctgtcatcaggaagacatag

SEQ ID NO: 171421 - DNA, 900 bp, Artificial Sequence
  derived and/or modified sequence
atgtggctcccgtgggccctgctactgctctgggtaccagggtgttttgcactgagtaagtgtcgcacagtggccggaccagtgggtggatccctgagcgtgcagtgtccctacgaaaaagagcaccgtacactaaacaagtactggtgcagaccaccgcagatctttctgtgtgacaagattgtagagactaagggctcagcagggaagcggaacggacgcgtgagcatcagagacagtcccgcaaacctgagcttcaccgtgacactggagaatttgaccgaggaggatgccggaacatattggtgcggagtggacacgccttggctaagagactttcatgaccctgtcgtggaggtggaggtgagtgtgttccctgctagcacaagtatgacacccgcatcaatcacggcagctaagaccagcaccattacaactgcatttcctcccgtttcctctaccaccctgtttgcagtgggcgcaacccacagtgctagcatacaggaagagacagaagaggtggtgaacagtcaattaccacttctcttgagtctgctggctctgttactgctccttctagtcggcgcaagtctgctggcctggaggatgttccagaagtggatcaaggctggcgaccacagtgagctgagtcagaaccccaagcaggctgcaactcagtccgagttgcattatgccaacctggagctgcttatgtggcccctgcaagagaagcctgctccgcctagggaagtggaggtggaatattctaccgtggcctctcctagggaagagctgcactatgcttctgttgtgtttgattccaacactaaccggattgcggcacagcgccctcgagaggaagagcccgacagtgattactctgtcatccgcaaaacatag

SEQ ID NO: 171422 - DNA, 1856 bp, Artificial Sequence
  derived and/or modified sequence
gctacggagtcactacagggagaggtctcatcactagaaatagccgaagaacctgcagcctcaaccagcgttaaggaggacgtgccgtttctagggagtcttagtcggggctcaccagcttcctgcattttctgaccggctccaggaatagaaccaaaagaagctgaacaaggaagcagcgcggcaccaagaaaagcagaagtcggggccttggaggcgtgactttcccctcgggtccaggtagggcctggagctgctgcaagtgccgcctgtgctggggaagggaccatgtggctgccttgggctctgttgcttctctgggtcccaggatgttttgctctgagcaaatgcaggaccgtggcgggccccgtggggggatccctgagtgtgcagtgtccctatgagaaggaacacaggaccctcaacaaatactggtgcagaccaccacagattttcctatgtgacaagattgtggagaccaaagggtcagcaggaaaaaggaacggccgagtgtccatcagggacagtcctgcaaacctcagcttcacagtgaccctggagaatctcacagaggaggatgcaggcacctactggtgtggggtggatacaccatggctccgagactttcatgatcccgttgtcgaggttgaggtgtccgtgttcccggcatcaacgtcaatgacacctgcaagtatcactgcggccaagacctcaacaatcacaactgcatttccacctgtatcatccactaccctgtttgcagtgggtgccacccacagtgccagcatccaggaggaaactgaggaggtggtgaactcacagctcccgctgctcctctccctgctggcattgttgctgcttctgttggtgggggcctccctgctagcctggaggatgtttcagaaatggatcaaagctggtgaccattcagagctgtcccagaaccccaagcaggctgccacgcagagtgagctgcactacgcaaatctggagctgctgatgtggcctctgcaggaaaagccagcaccaccaagggaggtggaggtggaatacagcactgtggcctcccccagggaagaacttcactatgcctcggtggtgtttgattctaacaccaacaggatagctgctcagaggcctcgggaggaggaaccagattcagattacagtgtgataaggaagacataggcttttgtcctgcctcgccatcggagctctcatgggccccaggaagtccagggacagctcccttatacctggcccacgtccttctcagcctgccctcgacaacagtgaccaacagacaggcagctgggtttcccaggccatccctctgttgccatcagcttgattggcttccccgagggccagcagggctgggggctccggagagcagcaggaagcactcccagccaccagtgcctgtcacctctttcccctttgcccctgcttcatcccagctctgtgtgtggaggacaaagcttcttcctgcgtggctccaggaaaagatgtggctcacgtaggtggcacctgccaatagctttgtcaatcacagccccataggaacgtctggaattgcttgggagttggggagaactgtcaagaagagtgaagagagtgccaaagcggagatctgttcacctgggggccatggaggggggacccactaaagatcaagatcaaagattctccccatctcacagacaaggaaactgaggccagagggaggagagaattgctcatggctccagaactggtggcaagtttctctggactcttaggtttatttttaatatgaaatataaaaacagtttcaaatatcttattgagggagaagtaaaaacttatttaaacaa

SEQ ID NO: 171423 - protein, 308 aa, Artificial Sequence
  derived and/or modified sequence
MAPPAPGPASGGSGEVDELFDVKNAFYIGSYQQCINEAQRVKLSSPERDVERDVFLYRAYLAQRKFGVVLDEIKPSSAPELQAVRMFADYLAHESRRDSIVAELDREMSRSVDVTNTTFLLMAASIYLHDQNPDAALRALHQGDSLECTAMTVQILLKLDRLDLARKELKRMQDLDEDATLTQLATAWVSLATGGEKLQDAYYIFQEMADKCSPTLLLLNGQAACHMAQGRWEAAEGLLQEALDKDSGYPETLVNLIVLSQHLGKPPEVTNRYLSQLKDAHRSHPFIKEYQAKENDFDRLVLQYAPSA

SEQ ID NO: 171424 - protein, 307 aa, Artificial Sequence
  derived and/or modified sequence
MAPPAPAGLRGSGEVDELFDVKNAFYIGSYQQCINEAQRVKLSSPERDVERDVFLYRAYLAQRKFGVVLDEIKPSSAPELQAVRMFADYLAHESRRDSIVAELDREMSRSVDVTNTTFLLMAASIYLHDQNPDAALRALHQGDSLECTAMTVQILLKLDRLDLARKELKRMQDLDEDATLTQLATAWVSLATGGEKLQDAYYIFQEMADKCSPTLLLLNGQAACHMAQGRWEAAEGLLQEALDKDSGYPETLVNLIVLSQHLGKPPEVTNRYLSQLKDAHRSHPFIKEYQAKENDFDRLVLQYAPSA

SEQ ID NO: 171425 - DNA, 927 bp, Artificial Sequence
  derived and/or modified sequence
atggcccctcccgcaccagggcctgcaagtggtggaagcggtgaggttgatgaactgttcgatgttaagaacgcattttacataggatcttatcaacagtgtatcaacgaggcccaaagggtcaagctttcaagtccagagagagacgtcgagcgcgatgtgtttctttatcgcgcttacctagcccagaggaaatttggcgtagtccttgacgagattaaaccgtcaagtgccccagaactgcaggctgtgcgaatgttcgccgactacctggcacatgagagtcggagggactccatcgtggcagaactggatagagaaatgagccggtccgtcgacgtgactaacaccacgttcctgctaatggcggcctcaatctatctgcatgaccaaaatccagatgcagcgctgcgggcattacatcagggggactcactcgaatgcactgctatgacggtgcaaatcttgttaaagttggatcgtctcgaccttgcaagaaaagaactgaaacgtatgcaggacctggatgaggacgctaccctgactcagcttgcaactgcatgggtgtcattggccaccgggggtgagaaactgcaggatgcctactatatcttccaggagatggcagataagtgctcaccaaccctgctgctgttgaatggacaagcagcatgtcacatggcccaggggcgctgggaggctgccgagggcctgctgcaggaggcgctggacaaagatagcggctacccagaaacgctggtgaatctcattgttctttcacaacatctgggaaaaccccctgaagtgactaatagatacctttcacaactaaaggacgcccacaggtcacatcccttcattaaggagtatcaggccaaggagaacgactttgacaggcttgtcctccagtacgctccatctgcttag

SEQ ID NO: 171426 - DNA, 924 bp, Artificial Sequence
  derived and/or modified sequence
atggcgcctcccgctccggccgggctgaggggcagcggagaagtggacgaattgttcgatgtgaaaaatgcattttacatcggcagctaccaacaatgcattaacgaagcacaacgagtgaagctgtccagccccgaaagggatgtggaacgtgatgtgttcttatacagggcataccttgcacagagaaagttcggcgtggtactcgacgagatcaaaccctcaagcgcacctgagctacaggcagtccgcatgtttgctgattaccttgctcacgagtcacgacgcgactccattgttgcggaacttgacagagaaatgagcagaagtgttgacgtgactaacaccaccttcctgttgatggcagccagtatctacctgcatgatcagaatccagacgcagctctgagggccctccatcagggggactctttggagtgtaccgctatgaccgtacagattttgcttaagctggatcggctggacctggccaggaaagaactgaaaaggatgcaggatttggatgaggacgctactcttactcaactggctaccgcatgggtgtcactggctaccggcggggagaagcttcaagatgcctactatatcttccaagaaatggccgataagtgctccccaaccctgctcctgttgaacggccaggccgcctgccacatggcccaaggcaggtgggaggccgctgagggactgctgcaggaggcactggacaaggactcagggtaccccgaaaccctcgtcaatctcattgtccttagccaacatctggggaaacccccagaggtaactaacagatatctgagtcagctgaaggatgcgcatcgaagccacccgtttattaaggagtaccaagccaaagagaacgactttgaccggcttgtcctccaatatgccccgagtgcgtag

SEQ ID NO: 171427 - DNA, 927 bp, Artificial Sequence
  derived and/or modified sequence
atggcccccccagcccctggccctgccagcggcggcagcggggaggtggatgagctgtttgatgtgaagaatgccttctacatcggcagctaccagcagtgcatcaatgaggcccagagggtgaagctgagcagccctgagagagatgtggagagagatgtgttcctgtaccgggcctacctggcccagaggaagtttggagtggtgctggatgagatcaagcccagcagcgcccctgagctgcaggccgtgaggatgtttgctgactacctggcccacgagagccggcgggacagcatcgtggccgagctggaccgggagatgagccgctctgtggatgtgaccaacaccaccttcctgctgatggccgccagcatctacctgcatgaccagaacccagatgctgccctgcgggccctgcaccagggcgacagcctggagtgcacagccatgacagtgcagatcctgctgaagctggaccggctggacctggccaggaaggagctgaagaggatgcaggacctggatgaagatgccaccctgacccagctggccacagcctgggtgtccctggccactggaggagagaagctgcaggatgcctactacatcttccaggagatggctgacaagtgcagccccaccctgctgctgctgaatggccaggccgcctgccacatggcccagggccgctgggaggccgctgagggcctgctgcaggaggccctggacaaggacagcggctacccagagaccctggtgaacctgattgtgctgagccagcacctgggcaagcccccagaggtgaccaaccgctacctgagccagctgaaggatgcccacaggagccaccccttcatcaaggagtaccaggccaaggaaaatgactttgaccggctggtgctgcagtatgcccccagcgcctag

SEQ ID NO: 171428 - DNA, 924 bp, Artificial Sequence
  derived and/or modified sequence
atggcccccccagccccagctggcctgcggggcagcggggaggtggatgagctgtttgatgtgaagaatgccttctacatcggcagctaccagcagtgcatcaatgaggcccagagggtgaagctgagcagccctgagagagatgtggagagagatgtgttcctgtaccgggcctacctggcccagaggaagtttggagtggtgctggatgagatcaagcccagcagcgcccctgagctgcaggccgtgaggatgtttgctgactacctggcccacgagagcagaagagacagcatcgtggccgagctggaccgggagatgagccgctctgtggatgtgaccaacaccaccttcctgctgatggccgccagcatctacctgcatgaccagaacccagatgctgccctgcgggccctgcaccagggcgacagcctggagtgcacagccatgacagtgcagatcctgctgaagctggaccggctggacctggccaggaaggagctgaagaggatgcaggacctggatgaagatgccaccctgacccagctggccacagcctgggtgtccctggccaccggcggggagaagctgcaggatgcctactacatcttccaggagatggctgacaagtgcagccccaccctgctgctgctgaatggccaggccgcctgccacatggcccagggccgctgggaggccgctgagggcctgctgcaggaggccctggacaaggacagcggctacccagagaccctggtgaacctgattgtgctgagccagcacctgggcaagcccccagaggtgaccaaccgctacctgagccagctgaaggatgcccacaggagccaccccttcatcaaggagtaccaggccaaggaaaatgactttgaccggctggtgctgcagtatgcccccagcgcctag

SEQ ID NO: 171429 - DNA, 927 bp, Artificial Sequence
  derived and/or modified sequence
atggccccccccgcccccggccccgccagcggcggcagcggcgaggttgacgaattatttgatgtgaagaacgcgttttatattggttcgtaccagcaatgtattaacgaggcccagagagtcaagttgtcctcccccgagcgggacgtcgaacgtgacgtcttcctgtatagggcctatctcgctcagagaaaatttggggtagtgctggatgaaatcaagccttcatctgcaccagagctgcaggccgtgaggatgtttgcagattacctggcccacgagtcacggagagactccatcgtagcagagcttgatcgcgagatgtctagaagtgttgacgtcaccaatactacctttttgctgatggctgcttcgatttacctccatgaccagaaccccgatgccgcactgagggcacttcaccagggagattcattagagtgcaccgctatgaccgtccaaattttgttaaagctggatcggctggatctagcccgaaaagaactcaagcgcatgcaggatctggatgaggatgcgacacttacacagctagccaccgcatgggtgagtctggctacaggaggagagaagttgcaagatgcctattatattttccaagaaatggccgataagtgttcgcccacgcttctcctgctgaacggccaggctgcctgccacatggcacagggacggtgggaagctgcagaaggtttgctgcaggaggccctcgacaaagactcaggataccctgagacacttgtgaatctgattgtgctttcccaacatctggggaaaccacccgaggtcacaaaccggtacttatcgcagttaaaagacgcccatcgtagccaccccttcattaaagaatatcaggctaaagagaacgattttgatcggctagtactgcagtacgcccccagtgcctag

SEQ ID NO: 171430 - DNA, 924 bp, Artificial Sequence
  derived and/or modified sequence
atggccccccccgcccccgccggcctgcggggcagcggcgaggtggatgaattattcgacgtgaaaaatgccttctacattggctcctaccagcagtgcatcaacgaagctcagcgggtcaaactcagtagccctgagcgagacgtggaacgagatgtgtttttgtacagagcctacctggcccagcgaaagttcggcgtggtgctggatgaaattaaaccatcttctgccccagagctgcaggctgtgcggatgttcgcggactacctcgcccatgaatcaaggcgagactcaatcgttgctgaactcgaccgcgagatgagcagatccgtcgacgtgaccaacactaccttcttgctgatggcagcctctatttacttacatgatcagaaccctgatgccgccctcagggccttgcaccagggcgatagtctggaatgcaccgccatgacagtccaaatcttattgaaacttgacaggcttgacctggctaggaaagagcttaagaggatgcaggaccttgatgaggacgccactttgacccaacttgcgaccgcttgggtctctctggcgacggggggagaaaagcttcaggatgcttattatatattccaggaaatggcagacaaatgctcgcctacactcttgctgttaaacgggcaggccgcctgccacatggcacaaggacgctgggaggccgcagagggtctcctccaggaggccctggacaaggatagtggctatcctgagactctggtgaacttgatcgtgctgagtcagcacctaggcaaacccccggaagtgacaaatagatatctttcccagctgaaagacgctcatcgctcccatcctttcataaaggaataccaggccaaggagaatgacttcgaccgcttggtgctgcagtacgctccaagtgcctag

SEQ ID NO: 171431 - DNA, 927 bp, Artificial Sequence
  derived and/or modified sequence
atggccccaccagctcctggcccagccagcggtggatctggggaggtggacgaactgttcgatgtcaagaatgccttctatatcggttcttaccagcaatgcattaacgaagctcagcgcgtcaagctttcctctcctgagagagatgttgaacgcgacgtattcctctatcgcgcttatcttgcacagaggaagtttggggtggtgcttgatgagattaaaccctcttcagcccctgaactgcaggccgtcaggatgtttgctgactacctggcgcacgagagcagaagagactctattgtggcggagctggatcgagagatgtctaggtcagtggacgtgacgaacaccacttttctgctgatggctgcgtcgatctatttgcacgaccaaaatcccgacgcagccctgcgggcacttcaccagggtgattccttagagtgcacagcaatgacagttcagatcctgctgaagctggatagacttgacctcgcgaggaaggaacttaagcgcatgcaagacctggatgaagatgcaacgctgacacagctggctacagcttgggtttcgttggctaccggaggcgaaaaactccaggatgcatactacatcttccaggagatggcagataagtgtagccctactctgttgctcctcaatggccaggcggcttgtcatatggctcagggcaggtgggaggctgcggagggcttgcttcaggaggccctggataaggatagtggatatccagagactctggtgaatttgattgtgcttagtcagcacttagggaagcctcccgaggttacaaaccgatacttgagtcagttgaaggacgcacaccggtcccatccctttattaaggagtatcaggcaaaggagaacgatttcgatcggctggttctccaatatgcgccaagcgcttag

SEQ ID NO: 171432 - DNA, 924 bp, Artificial Sequence
  derived and/or modified sequence
atggctccgccagcccctgcgggtcttcgaggcagtggggaggtggatgagctgttcgacgtgaagaacgccttttatattgggtcctatcagcaatgcatcaatgaagcacaacgggttaagttgagctcccccgaacgcgacgttgaaagggacgtattcctgtatcgggcatacctggctcaacgaaaattcggtgtggtcctagacgagataaagccctcaagcgcccctgagctgcaggctgtgcggatgtttgctgattacctggcacacgaatcgaggcgtgattctatcgtggcagagctcgatcgcgaaatgagtcgctcagtggacgtgaccaatacaactttcctcctcatggcagcgagtatttacttgcacgaccagaatcccgacgccgctcttagagccctacatcagggcgattctctcgagtgtacagccatgacagttcagatcctgcttaaacttgacaggctggatctggctagaaaggagcttaagcgaatgcaggatctggacgaagacgcgacattaacccaattggcgacagcttgggtgagcttggcgaccggaggcgaaaaactacaagacgcttattacatctttcaggaaatggctgataagtgcagcccgaccttactattactgaatggtcaggccgcttgccacatggctcagggtcggtgggaggcagctgagggtctactccaagaggccctcgataaggattcaggatatccagagaccctcgtaaatctcattgtgctgtcccagcacttaggcaaaccacctgaggtcactaacagatatctgtcccagcttaaggacgcacaccgctctcaccctttcatcaaggagtaccaggcaaaggaaaacgacttcgataggctcgtgctgcaatacgcaccttccgcctag

SEQ ID NO: 171433 - DNA, 1134 bp, Artificial Sequence
  derived and/or modified sequence
gacgtgtctttcaggaagaggagctggtgagaagacagcgaaatggcgcctccggcccccggcccggcctccggcggctccggggaggtagacgagctgttcgacgtaaagaacgccttctacatcggcagctaccagcagtgcataaacgaggcgcagcgggtgaagctatcaagcccagagagagacgtggagagggacgtcttcctgtatagagcgtacctggcgcagaggaagttcggtgtggtcctggatgagatcaagccctcctcggcccctgagctccaggccgtgcgcatgtttgctgactacctcgcccacgagagtcggagggacagcatcgtggccgagctggaccgagagatgagcaggagcgtggacgtgaccaacaccaccttcctgctcatggccgcctccatctatctccacgaccagaacccggatgccgccctgcgtgcgctgcaccagggggacagcctggagtgcacagccatgacagtgcagatcctgctgaagctggaccgcctggacctcgcccggaaggagctgaagagaatgcaggacctggacgaggatgccaccctcacccagctcgccactgcctgggtcagcctggccacgggtggtgagaagctgcaggatgcctactacatcttccaggagatggctgacaagtgctcgcccaccctgctgctgctcaatgggcaggcggcctgccacatggcccagggccgctgggaggccgctgagggcctgctgcaggaggcgctagacaaggatagtggctacccagagacgctggtcaacctcatcgtcctgtcccagcacctgggcaagccccctgaggtgacaaaccgatacctgtcccagctgaaggatgcccacaggtcccatcccttcatcaaggagtaccaggccaaggagaacgactttgacaggctggtgctacagtacgctcccagcgcctgaggctggcccagagctgtcaggaccatgaagccaggacagaggccaggagccagccctgcagccctccccacccggcatccacctgcatcccctctgggggcaggagcccacccccagcacccccatctgttaataaatatctcaactccagggtgttccacctga

SEQ ID NO: 171434 - DNA, 1128 bp, Artificial Sequence
  derived and/or modified sequence
cgtgtctttcaggaagaggagctggtgagaagacagcgaaatggcgcctccggccccggccggcctccggggctccggggaggtagacgagctgttcgacgtaaagaacgccttctacatcggcagctaccagcagtgcataaacgaggcgcagcgggtgaagctatcaagcccagagagagacgtggagagggacgtcttcctgtatagagcgtacctggcgcagaggaagttcggtgtggtcctggatgagatcaagccctcctcggcccctgagctccaggccgtgcgcatgtttgctgactacctcgcccacgagagtcggagggacagcatcgtggccgagctggaccgagagatgagcaggagcgtggacgtgaccaacaccaccttcctgctcatggccgcctccatctatctccacgaccagaacccggatgccgccctgcgtgcgctgcaccagggggacagcctggagtgcacagccatgacagtgcagatcctgctgaagctggaccgcctggacctcgcccggaaggagctgaagagaatgcaggacctggacgaggatgccaccctcacccagctcgccactgcctgggtcagcctggccacgggtggtgagaagctgcaggatgcctactacatcttccaggagatggctgacaagtgctcgcccaccctgctgctgctcaatgggcaggcggcctgccacatggcccagggccgctgggaggccgctgagggcctgctgcaggaggcgctagacaaggatagtggctacccagagacgctggtcaacctcatcgtcctgtcccagcacctgggcaagccccctgaggtgacaaaccgatacctgtcccagctgaaggatgcccacaggtcccatcccttcatcaaggagtaccaggccaaggagaacgactttgacaggctggtgctacagtacgctcccagcgcctgaggctggcccagagctgtcaggaccatgaagccaggacagaggccaggagccagccctgcagccctccccacccggcatccacctgcatcccctctgggggcaggagcccacccccagcacccccatctgttaataaatatctcaactccagggtgttccacctg

SEQ ID NO: 171435 - DNA, 927 bp, Artificial Sequence
  derived and/or modified sequence
atggccccccccgcccccggccccgccagcggcggcagcggcgaggtggacgagctgttcgacgtgaagaacgccttctacatcggcagctaccagcagtgcatcaacgaggcccagagagtgaagctgagcagccccgagagagacgtggagagagacgtgttcctgtacagagcctacctggcccagagaaagttcggcgtggtgctggacgagatcaagcccagcagcgcccccgagctgcaggccgtgagaatgttcgccgactacctggcccacgagagcagaagagacagcatcgtggccgagctggacagagagatgagcagaagcgtggacgtgaccaacaccaccttcctgctgatggccgccagcatctacctgcacgaccagaaccccgacgccgccctgagagccctgcaccagggcgacagcctggagtgcaccgccatgaccgtgcagatcctgctgaagctggacagactggacctggccagaaaggagctgaagagaatgcaggacctggacgaggacgccaccctgacccagctggccaccgcctgggtgagcctggccaccggcggcgagaagctgcaggacgcctactacatcttccaggagatggccgacaagtgcagccccaccctgctgctgctgaacggccaggccgcctgccacatggcccagggcagatgggaggccgccgagggcctgctgcaggaggccctggacaaggacagcggctaccccgagaccctggtgaacctgatcgtgctgagccagcacctgggcaagccccccgaggtgaccaacagatacctgagccagctgaaggacgcccacagaagccaccccttcatcaaggagtaccaggccaaggagaacgacttcgacagactggtgctgcagtacgcccccagcgcctag

SEQ ID NO: 171436 - DNA, 924 bp, Artificial Sequence
  derived and/or modified sequence
atggccccccccgcccccgccggcctgagaggcagcggcgaggtggacgagctgttcgacgtgaagaacgccttctacatcggcagctaccagcagtgcatcaacgaggcccagagagtgaagctgagcagccccgagagagacgtggagagagacgtgttcctgtacagagcctacctggcccagagaaagttcggcgtggtgctggacgagatcaagcccagcagcgcccccgagctgcaggccgtgagaatgttcgccgactacctggcccacgagagcagaagagacagcatcgtggccgagctggacagagagatgagcagaagcgtggacgtgaccaacaccaccttcctgctgatggccgccagcatctacctgcacgaccagaaccccgacgccgccctgagagccctgcaccagggcgacagcctggagtgcaccgccatgaccgtgcagatcctgctgaagctggacagactggacctggccagaaaggagctgaagagaatgcaggacctggacgaggacgccaccctgacccagctggccaccgcctgggtgagcctggccaccggcggcgagaagctgcaggacgcctactacatcttccaggagatggccgacaagtgcagccccaccctgctgctgctgaacggccaggccgcctgccacatggcccagggcagatgggaggccgccgagggcctgctgcaggaggccctggacaaggacagcggctaccccgagaccctggtgaacctgatcgtgctgagccagcacctgggcaagccccccgaggtgaccaacagatacctgagccagctgaaggacgcccacagaagccaccccttcatcaaggagtaccaggccaaggagaacgacttcgacagactggtgctgcagtacgcccccagcgcctag

SEQ ID NO: 171437 - protein, 644 aa, Artificial Sequence
  derived and/or modified sequence
MEETMKLATMEDTVEYCLFLIPDESRDSDKHKEILQKYIERIITRFAPMLVPYIWQNQPFNLKYKPGKGGVPAHMFGVTKFGDNIEDEWFIVYVIKQITKEFPELVARIEDNDGEFLLIEAADFLPKWLDPENSTNRVFFCHGELCIIPAPRKSGAESWLPTTPPTIPQALNIITAHSEKILASESIRAAVNRRIRGYPEKIQASLHRAHCFLPAGIVAVLKQRPRLVAAAVQAFYLRDPIDLRACRVFKTFLPETRIMTSVTFTKCLYAQLVQQRFVPDRRSGYRLPPPSDPQYRAHELGMKLAHGFEILCSKCSPHFSDCKKSLVTASPLWASFLESLKKNDYFKGLIEGSAQYRERLEMAENYFQLSVDWPESSLAMSPGEEILTLLQTIPFDIEDLKKEAANLPPEDDDQWLDLSPDQLDQLLQEAVGKKESESVSKEEKEQNYDLTEVSESMKAFISKVSTHKGAELPREPSEAPITFDADSFLNYFDKILGPRPNESDSDDLDDEDFECLDSDDDLDFETHEPGEEASLKGTLDNLKSYMAQMDQELAHTCISKSFTTRNQVEPVSQTTDNNSDEEDSGTGESVMAPVDVDLNLVSNILESYSSQAGLAGPASNLLQSMGVQLPDNTDHRPTSKPTKN

SEQ ID NO: 171438 - protein, 212 aa, Artificial Sequence
  derived and/or modified sequence
MFGVTKFGDNIEDEWFIVYVIKQITKEFPELVARIEDNDGEFLLIEAADFLPKWLDPENSTNRVFFCHGELCIIPAPRKSGAESWLPTTPPTIPQALNIITAHSEKILASESIRAAVNRRIRGYPEKIQASLHRAHCFLPAGIVAVLKQRPRLVAAAVQAFYLRDPIDLRACRVFKTFLPETRIMTSVTFTKCLYAQLVQQRFVPDRRSGYR

SEQ ID NO: 171439 - DNA, 2280 bp, Artificial Sequence
  derived and/or modified sequence
aaaatgctcccgccgacgcacagcagtgacgacacacaaggtttcggggactgagtgggtttcagactttctctcaggatttccgctggcttcaggttccggtcaggcgtcgggacagagcctgatccaggcttcggcggccggtggcagctctcgatcagctctcgcagtcggagaggcggctaaggaaaggtgccacagcagagacgcgaaggagaggccctagaaccttttcaaagaagaatggaagaaaccatgaagcttgctacgatggaagacacagtggagtactgcctgttcctgataccagatgagtcaagggactcagataaacataaagagattcttcagaagtacattgagagaataatcactcggtttgcacctatgctggtcccctacatctggcagaatcagcctttcaatcttaaatataaacctgggaaaggaggtgttcctgctcatatgtttggcgtgacaaagtttggggataacattgaggatgaatggtttattgtttatgtaataaagcagatcacaaaggaatttccagagttagtagcaaggattgaagacaatgatggtgaattcttgttaatagaagctgctgactttctccctaaatggctggatcctgaaaatagcaccaatagggtatttttctgccatggggaattgtgtattatccctgcaccaagaaaatctggagcagaatcttggttacccaccacacccccaacaattccacaagcattgaatataatcacagcacattcagaaaaaatacttgcttcagaatctatacgagctgctgtgaataggcgcatcagagggtacccagaaaaaattcaggcctcacttcatcgagcacactgcttccttccagctggcattgtggcagtgctaaagcagcgccccagattggtggctgcagcagtccaggcattttacctacgagaccctattgacctgcgagcttgtcgtgttttcaagacattcttgcctgaaacacgaataatgacatcggtcacattcactaaatgtctatatgcacaattggtgcaacaaaggtttgtgccagaccggcggagtggatacaggctgcctcctccatctgatccccagtaccgagcccatgaattgggcatgaaattggctcatggatttgagatcttatgctccaaatgtagcccacatttttctgactgcaagaaatcccttgtgactgcctcaccactctgggccagtttccttgaaagtctgaaaaagaatgattactttaagggactgatagaaggttctgctcagtaccgggaaaggctagaaatggcagagaattacttccagctctcagtagactggccagaaagttctcttgctatgagccctggtgaagaaatcttaaccttattacagacaataccatttgatatagaagaccttaagaaagaagcagctaatcttcccccagaggatgatgaccagtggttagatctctcaccagatcagctggaccagctgctgcaggaagctgttggcaaaaaagaatccgagtctgtttccaaggaggagaaggagcagaactatgacttaactgaagtctcagagagcatgaaagctttcatatccaaagtctcaacccacaagggagcagagctgcctcgagaaccttctgaggctccaatcacttttgatgcagattcttttcttaattattttgataagattttagggccaaggcctaatgagtcagattctgatgatctggatgatgaagactttgaatgtttagatagtgatgatgacttggactttgaaacacacgaacctggcgaagaggcttccctgaaaggaacacttgataatctcaagtcatacatggcccagatggaccaggaactagcacacacctgcatcagcaaaagtttcaccactaggaaccaagtggaacctgtatcccagactaccgataacaattcagatgaggaagattctggtacgggagaatctgttatggcaccagtagatgtagacctgaacctggtttcaaatatattggaatcctatagctcccaagctggactggcaggacctgcttccaatcttttacaaagcatgggagtgcagctgcctgacaacaccgatcacagaccaacaagtaagccaacaaaaaattaaccagcacatttagcttctcttttttctttttaaataaatattgaatatgattctgttcaaaaaaaaaaaaaaaaaaaaaaaaaaaaaaaaaaaaaaaaaaaa

SEQ ID NO: 171440 - DNA, 1935 bp, Artificial Sequence
  derived and/or modified sequence
atggaggagaccatgaagctggccaccatggaggacaccgtggagtactgcctgttcctgatccccgacgagagcagagacagcgacaagcacaaggagatcctgcagaagtacatcgagagaatcatcaccagattcgcccccatgctggtgccctacatctggcagaaccagcccttcaacctgaagtacaagcccggcaagggcggcgtgcccgcccacatgttcggcgtgaccaagttcggcgacaacatcgaggacgagtggttcatcgtgtacgtgatcaagcagatcaccaaggagttccccgagctggtggccagaatcgaggacaacgacggcgagttcctgctgatcgaggccgccgacttcctgcccaagtggctggaccccgagaacagcaccaacagagtgttcttctgccacggcgagctgtgcatcatccccgcccccagaaagagcggcgccgagagctggctgcccaccaccccccccaccatcccccaggccctgaacatcatcaccgcccacagcgagaagatcctggccagcgagagcatcagagccgccgtgaacagaagaatcagaggctaccccgagaagatccaggccagcctgcacagagcccactgcttcctgcccgccggcatcgtggccgtgctgaagcagagacccagactggtggccgccgccgtgcaggccttctacctgagagaccccatcgacctgagagcctgcagagtgttcaagaccttcctgcccgagaccagaatcatgaccagcgtgaccttcaccaagtgcctgtacgcccagctggtgcagcagagattcgtgcccgacagaagaagcggctacagactgcccccccccagcgacccccagtacagagcccacgagctgggcatgaagctggcccacggcttcgagatcctgtgcagcaagtgcagcccccacttcagcgactgcaagaagagcctggtgaccgccagccccctgtgggccagcttcctggagagcctgaagaagaacgactacttcaagggcctgatcgagggcagcgcccagtacagagagagactggagatggccgagaactacttccagctgagcgtggactggcccgagagcagcctggccatgagccccggcgaggagatcctgaccctgctgcagaccatccccttcgacatcgaggacctgaagaaggaggccgccaacctgccccccgaggacgacgaccagtggctggacctgagccccgaccagctggaccagctgctgcaggaggccgtgggcaagaaggagagcgagagcgtgagcaaggaggagaaggagcagaactacgacctgaccgaggtgagcgagagcatgaaggccttcatcagcaaggtgagcacccacaagggcgccgagctgcccagagagcccagcgaggcccccatcaccttcgacgccgacagcttcctgaactacttcgacaagatcctgggccccagacccaacgagagcgacagcgacgacctggacgacgaggacttcgagtgcctggacagcgacgacgacctggacttcgagacccacgagcccggcgaggaggccagcctgaagggcaccctggacaacctgaagagctacatggcccagatggaccaggagctggcccacacctgcatcagcaagagcttcaccaccagaaaccaggtggagcccgtgagccagaccaccgacaacaacagcgacgaggaggacagcggcaccggcgagagcgtgatggcccccgtggacgtggacctgaacctggtgagcaacatcctggagagctacagcagccaggccggcctggccggccccgccagcaacctgctgcagagcatgggcgtgcagctgcccgacaacaccgaccacagacccaccagcaagcccaccaagaactag

SEQ ID NO: 171441 - DNA, 639 bp, Artificial Sequence
  derived and/or modified sequence
atgttcggcgtgaccaagttcggcgacaacatcgaggacgagtggttcatcgtgtacgtgatcaagcagatcaccaaggagttccccgagctggtggccagaatcgaggacaacgacggcgagttcctgctgatcgaggccgccgacttcctgcccaagtggctggaccccgagaacagcaccaacagagtgttcttctgccacggcgagctgtgcatcatccccgcccccagaaagagcggcgccgagagctggctgcccaccaccccccccaccatcccccaggccctgaacatcatcaccgcccacagcgagaagatcctggccagcgagagcatcagagccgccgtgaacagaagaatcagaggctaccccgagaagatccaggccagcctgcacagagcccactgcttcctgcccgccggcatcgtggccgtgctgaagcagagacccagactggtggccgccgccgtgcaggccttctacctgagagaccccatcgacctgagagcctgcagagtgttcaagaccttcctgcccgagaccagaatcatgaccagcgtgaccttcaccaagtgcctgtacgcccagctggtgcagcagagattcgtgcccgacagaagaagcggctacagatag

SEQ ID NO: 171442 - DNA, 1935 bp, Artificial Sequence
  derived and/or modified sequence
atggaggaaacaatgaagttggccacaatggaggacacggttgagtattgtctctttctcatcccagatgaatctagggactccgataagcataaggagattctccagaagtacatagagcggattattactaggttcgcccccatgttggttccatacatttggcaaaaccaaccctttaacctaaagtacaaaccagggaaaggaggagttccggctcatatgtttggagtgacaaagtttggtgacaatattgaggatgaatggttcatcgtctacgtgatcaagcagatcacaaaagagtttcctgaacttgtggcccgtatagaggacaatgacggtgagttcctgctcattgaagcagcggacttcttgcctaagtggctcgacccagaaaactcaacgaatcgtgtcttcttctgtcacggcgagctgtgtatcatccctgccccccggaaatcaggtgccgagtcctggctacctactacaccccctaccatacctcaggccttgaacattatcaccgctcattctgagaagatccttgcatctgaatccatccgggctgcagtgaacagacgaatccgcggctaccccgagaagattcaggcttctctgcatagagcccactgttttctccctgccggaatcgtggccgtattgaaacagcgaccccggctggtggctgcagctgtgcaagccttttatttaagggaccctattgacctcagagcctgtagagtgtttaaaacgtttctgcccgagaccaggattatgacgtccgttacatttacaaaatgcctgtacgcacagttggtacagcaacgcttcgttcccgaccgacgttcaggttaccggttgccaccccctagtgacccccagtaccgggctcatgaactcggtatgaaactggctcacggattcgagattctgtgcagcaagtgtagcccccacttctcggactgtaagaaatccctggtcactgcaagtccactttgggctagcttcctggagagtttaaaaaagaacgattatttcaaaggcttaatcgagggctccgcacagtatcgggagaggcttgagatggccgaaaattatttccagctgagcgttgattggccagaatcatcactggcaatgagccccggtgaggagattcttacattgttacagactatcccctttgacatagaagaccttaaaaaagaagcagcaaatctgccacccgaagatgatgatcagtggctggacttatcaccagatcagctcgatcagctgctgcaagaggcagtgggcaagaaagagagcgagtcagtatcaaaagaggagaaagagcaaaactatgatttaaccgaagtctctgaatcaatgaaggcctttatttcaaaggtgtcaacacataagggcgcagaactgcctagggagcctagtgaggcgcctattacctttgacgctgactcgttccttaactatttcgataagatcttgggacctcgtcctaacgaatccgattctgatgatctcgatgatgaggacttcgaatgcctggatagcgacgacgacctcgacttcgagacacacgaacccggagaggaggcttcactgaaggggaccttagataatctgaagagctacatggcccagatggatcaggaactcgcccatacgtgcatttctaagtcttttaccacacgtaatcaggtggagccggtgtctcagactactgacaataatagtgatgaggaggacagtggcacaggtgagtctgtgatggccccagtcgatgtggacctcaatcttgtctcgaacatactggaatcgtattcctcccaggctggactggccggtcctgcctcaaatctgctgcaaagcatgggagttcagctaccagacaacactgatcaccgcccaacctccaaaccaacaaaaaactag

SEQ ID NO: 171443 - DNA, 639 bp, Artificial Sequence
  derived and/or modified sequence
atgttcggagtcaccaagttcggtgataacatcgaagatgagtggttcattgtatacgtcattaaacagattacaaaggagtttcccgaattagtagcccgcattgaggacaacgatggggaatttctgcttatcgaggccgccgattttctccctaagtggcttgatcccgagaactccacaaatagagtgttcttttgtcacggggaactctgtatcatcccagcgcctcgcaagagcggggctgaaagctggctcccaactacccctcctacgattccgcaagcactcaacataattaccgcccattctgaaaaaatcttggcctctgagtctattcgcgccgccgttaaccgacgcatccgcggttaccccgagaaaatccaggccagcctccaccgggcacactgtttcctgccggcaggtattgtcgccgtgcttaagcagagaccccgcttggtggcagccgccgtacaggccttctatttgcgcgatccgattgacctgagagcttgtagggtcttcaaaactttcctgcctgagaccagaataatgacatcagttacattcaccaagtgcctctacgcgcaactggtgcagcagagattcgtgcctgatcgtagatctggttatcggtag

SEQ ID NO: 171444 - DNA, 3069 bp, Artificial Sequence
  derived and/or modified sequence
caaggtttcggggactgagtgggtttcagactttctctcaggatttccgctggcttcaggttccggtcaggcgtcgggacagagcctgatccaggcttcggcggccggtggcagctctcgatcagctctcgcagtcggagaggcggctaaggaaaggtgccacagcagagacgcgaaggagaggccctagaaccttttcaaagaagaatggaagaaaccatgaagcttgctacgatggaagacacagtggagtactgcctgttcctgataccagatgagtcaagggactcagataaacataaagagattcttcagaagtacattgagagaataatcactcggtttgcacctatgctggtcccctacatctggcagaatcagcctttcaatcttaaatataaacctgggaaaggaggtgttcctgctcatatgtttggcgtgacaaagtttggggataacattgaggatgaatggtttattgtttatgtaataaagcagatcacaaaggaatttccagagttagtagcaaggattgaagacaatgatggtgaattcttgttaatagaagctgctgactttctccctaaatggctggatcctgaaaatagcaccaatagggtatttttctgccatggggaattgtgtattatccctgcaccaagaaaatctggagcagaatcttggttacccaccacacccccaacaattccacaagcattgaatataatcacagcacattcagaaaaaatacttgcttcagaatctatacgagctgctgtgaataggcgcatcagagggtacccagaaaaaattcaggcctcacttcatcgagcacactgcttccttccagctggcattgtggcagtgctaaagcagcgccccagattggtggctgcagcagtccaggcattttacctacgagaccctattgacctgcgagcttgtcgtgttttcaagacattcttgcctgaaacacgaataatgacatcggtcacattcactaaatgtctatatgcacaattggtgcaacaaaggtttgtgccagaccggcggagtggatacaggctgcctcctccatctgatccccagtaccgagcccatgaattgggcatgaaattggctcatggatttgagatcttatgctccaaatgtagcccacatttttctgactgcaagaaatcccttgtgactgcctcaccactctgggccagtttccttgaaagtctgaaaaagaatgattactttaagggactgatagaaggttctgctcagtaccgggaaaggctagaaatggcagagaattacttccagctctcagtagactggccagaaagttctcttgctatgagccctggtgaagaaatcttaaccttattacagacaataccatttgatatagaagaccttaagaaagaagcagctaatcttcccccagaggatgatgaccagtggttagatctctcaccagatcagctggaccagctgctgcaggaagctgttggcaaaaaagaatccgagtctgtttccaaggaggagaaggagcagaactatgacttaactgaagtctcagagagcatgaaagctttcatatccaaagtctcaacccacaagggagcagagctgcctcgagaaccttctgaggctccaatcacttttgatgcagattcttttcttaattattttgataagattttagggccaaggcctaatgagtcagattctgatgatctggatgatgaagactttgaatgtttagatagtgatgatgacttggactttgaaacacacgaacctggcgaagaggcttccctgaaaggaacacttgataatctcaagtcatacatggcccagatggaccaggaactagcacacacctgcatcagcaaaagtttcaccactaggaaccaagtggaacctgtatcccagactaccgataacaattcagatgaggaagattctggtacgggagaatctgttatggcaccagtagatgtagacctgaacctggtttcaaatatattggaatcctatagctcccaagctggactggcaggacctgcttccaatcttttacaaagcatgggagtgcagctgcctgacaacaccgatcacagaccaacaagtaagccaacaaaaaattaaccagcacatttagcttctcttttttctttttaaataaatattgaatatgattctgttcatttctagtttagattactcatttagtaaaaatgtttcttcattacaagttttacagattgacttctccatgagccccaaatgtggccctcttggcacaagtctttgtgatctcagctgtgggttatacacaggttttgaactcggcagggtagaatctagcccctagacaaccttgagatgaaattcacacacttcatgctaaagacataccctaccacaatatacccttggagtaattctaaatatttaaatttctcccttactgctattcatcctcagatcaaaatttcaagttgacaaatttggatttgaaaactcattcactttttcaatttttttaatgaggcataacatgcatatggttaagtgcacaaatcttaagtgtacagtcagtgaatttttgcatgtatgtatgtacctgaagcaagatatagaacttatttacttgtaaataacagctatattgatatgtcacataccaaaaaatttaccctttaaattatacaattcagtggtttttagtatatttacaaaattgtgcaaccatccctaccatctaattctagaatattagaaaccccatactcactaatagtctctcattcccttctactcccagcccctagaaaccactagtctactttctgtctctatggatttgcctattttggatatttcatacctgatactgtacttaattgttttaattaattaattggtttgatatttaatataactgatatatcttttgctaagatgaaatgtttatttcttaaaatgatgctcatattcctcctaaaataaatcaagtattatctatatatcataaaattcaccattaaaagcaaaaaaaaagtcttctttaca

SEQ ID NO: 171445 - DNA, 1935 bp, Artificial Sequence
  derived and/or modified sequence
atggaggagaccatgaagctggccaccatggaggacacagtggagtactgcctcttcctgatcccagatgagagccgggacagcgacaagcacaaggagatcctgcagaagtacatcgagcgcatcatcaccaggtttgcccccatgctggtgccctacatctggcagaaccagcccttcaacctgaagtacaagccaggcaagggcggcgtgcctgcccacatgtttggagtgaccaagtttggagacaacattgaagatgagtggttcatcgtgtatgtgatcaagcagatcaccaaggagttccctgagctggtggccagaattgaggacaatgatggagagttcctgctgattgaagctgctgacttcctgcccaagtggctggaccctgagaacagcaccaacagagtcttcttctgccacggggagctgtgcatcatcccagcccccaggaagagcggggctgagagctggctgcccaccaccccacccaccatcccccaggccctgaacatcatcacagcccacagcgagaagatcctggccagcgagagcatccgggctgctgtgaacagacgcatccggggctacccagagaagatccaggccagcctgcaccgggcccactgcttcctgcctgctggcatcgtggccgtgctgaagcagaggccccggctggtggccgctgctgtgcaggccttctacctgcgggaccccatcgacctgcgggcctgcagggtcttcaagaccttcctgcctgagacccgcatcatgacctctgtgaccttcaccaagtgcctgtatgcccagctggtgcagcagagatttgtgcctgacagaagaagtggctaccgcctgcccccacccagcgacccccagtaccgggcccacgagctgggcatgaagctggcccacggctttgagatcctgtgcagcaagtgcagcccccacttcagtgactgcaagaagagcctggtgacagccagccccctgtgggccagcttcctggagagcctgaagaagaatgactacttcaagggcctcatcgagggcagcgcccagtaccgggagcggctggagatggccgagaactacttccagctgtctgtggactggccagagagcagcctggccatgagccctggagaggagatcctgaccctgctgcagaccatcccctttgatattgaggacctgaagaaggaggccgccaacctgcccccagaagatgatgaccagtggctggacctgagcccagaccagctggaccagctgctgcaggaggccgtgggcaagaaggagagcgagagcgtgtccaaggaggagaaggagcagaactatgacctgacagaggtgtctgagagcatgaaggccttcatcagcaaggtgtccacccacaagggagctgagctgccccgggagcccagcgaggcccccatcacctttgatgctgacagcttcctgaactactttgacaagatcctgggcccccggcccaatgaaagtgacagtgatgacctggatgatgaagattttgagtgcctggacagtgatgatgacctggactttgagacccatgagcctggagaggaggccagcctgaagggcaccctggacaacctgaagagctacatggcccagatggaccaggagctggcccacacctgcatcagcaagagcttcaccaccaggaaccaggtggagcctgtgtcccagaccacagacaacaacagtgatgaggaggacagcggcaccggggagagcgtgatggcccctgtggatgtggacctgaacctggtgagcaacatcctggagagctacagcagccaggccggcctggccggccctgccagcaacctgctgcagagcatgggcgtgcagctgcctgacaacacagaccaccggcccaccagcaagcccaccaagaactag

SEQ ID NO: 171446 - DNA, 639 bp, Artificial Sequence
  derived and/or modified sequence
atgtttggagtgaccaagtttggagacaacattgaagatgagtggttcatcgtgtatgtgatcaagcagatcaccaaggagttccctgagctggtggccagaattgaggacaatgatggagagttcctgctgattgaagctgctgacttcctgcccaagtggctggaccctgagaacagcaccaacagagtcttcttctgccacggggagctgtgcatcatcccagcccccaggaagagcggggctgagagctggctgcccaccaccccacccaccatcccccaggccctgaacatcatcacagcccacagcgagaagatcctggccagcgagagcatccgggctgctgtgaacagacgcatccggggctacccagagaagatccaggccagcctgcaccgggcccactgcttcctgcctgctggcatcgtggccgtgctgaagcagaggccccggctggtggccgctgctgtgcaggccttctacctgcgggaccccatcgacctgcgggcctgcagggtcttcaagaccttcctgcctgagacccgcatcatgacctctgtgaccttcaccaagtgcctgtatgcccagctggtgcagcagagatttgtgcctgacagaagaagtggctacagatag

SEQ ID NO: 171447 - DNA, 1935 bp, Artificial Sequence
  derived and/or modified sequence
atggaggagaccatgaagctggccaccatggaggacaccgtggagtactgcttgttcttgatcccggatgagtctcgtgattccgacaaacataaggaaatcctccaaaaatatatcgagcgtataatcacgcggtttgctcccatgctcgttccctatatatggcagaaccaacccttcaacctgaaatacaaaccaggcaaaggcggtgtaccagcgcatatgttcggcgtgactaagttcggcgacaacatcgaggatgaatggtttatcgtatacgtgatcaagcagatcaccaaggaattccctgagctggttgccaggatcgaggacaatgatggagaatttttgctgattgaggctgccgacttccttcccaagtggctcgatccagaaaattccactaatcgggtgtttttctgccatggcgagctatgcattatcccagctccccgcaagagtggggctgagagttggttgccgacaacaccacctaccatcccccaggctctgaatatcatcaccgcacacagtgaaaagatcctggccagtgaaagcattcgggccgccgtcaacaggcgcatacgtggctacccggagaagattcaggcttctcttcacagagctcactgtttccttccagcgggcattgtggcggtcctcaagcaacgcccacgcctggtcgctgcggccgtgcaggccttttatctgcgcgatcctatcgatctgcgcgcctgccgggtcttcaaaacattcttgcctgagacaagaattatgacttctgtgaccttcacgaaatgcctgtacgcccagctcgtgcagcagcggttcgttcccgatcgacgctctggttaccggctgcccccacctagcgatccccaatatcgcgcacacgaactgggtatgaagctcgcccacggttttgagatactctgttccaagtgcagtccccattttagcgattgtaagaagtctctcgttacggcctccccactctgggcaagctttctggagagcttgaaaaaaaatgactattttaagggtctgattgaaggatccgctcagtaccgcgagcgacttgagatggccgagaactacttccaactcagtgtggattggcctgaatcctcacttgctatgtctccgggagaagagattctcacattactccagactatcccctttgacatcgaggacctcaagaaggaggcagcaaatctgcctcctgaagatgatgaccagtggttagacctctcgcccgaccagctggaccagttactgcaggaggcagtcggcaagaaggagagcgagtctgtcagcaaggaggaaaaggaacagaactatgatttaaccgaggtgagcgagtccatgaaggcctttatcagcaaggtttcaacacacaaaggcgcggaactccccagggagccctccgaagctcccatcacgtttgacgccgatagcttcctgaactacttcgataagatcttgggtccgagacctaatgagtcggattccgatgacctagacgacgaggatttcgagtgtcttgacagcgacgacgatctcgattttgaaacccatgaaccaggcgaagaggcttccctgaagggcactctagataacttgaaatcatatatggcgcagatggatcaggaactggctcacacttgtatttcaaaatccttcacaactcgaaaccaggtggaacccgtcagccagaccactgacaacaattcagatgaagaggattctggtacaggcgaatccgtaatggcccctgtcgatgtcgacttgaacctcgtctctaatattctcgaatcgtactcttctcaggccggtctagcgggaccagcgagcaaccttctccagtccatgggggtacagctccccgataacaccgaccaccggccaacatctaaacccacaaagaattag

SEQ ID NO: 171448 - DNA, 639 bp, Artificial Sequence
  derived and/or modified sequence
atgttcggcgtgaccaagttcggcgacaacatcgaggacgagtggtttatcgtatatgtcatcaaacagatcactaaggagtttcccgagttggtggccaggatagaggataacgacggggaatttctgttgattgaagcggcggatttccttcccaagtggttggatccagaaaacagcacaaatcgagtcttcttttgccacggcgagctgtgtatcatcccggctccgcgaaagtctggcgcagagagctggctcccaacaaccccgcctaccatacctcaagcgctgaacattatcactgcacatagcgagaagatccttgcatcagagagcataagagccgctgtgaaccggcgcatcaggggataccccgaaaagatccaggcaagcctgcatcgggcccactgcttcctgcccgctggaatcgtagctgtgctgaaacaacgccctagactcgttgcagcagctgtgcaggcattttacttgcgggaccctatcgatcttcgcgcttgtagggtttttaaaacctttctacccgagaccaggatcatgacatcagtcacgttcaccaaatgtttgtacgcacagctggtgcagcagcgtttcgtgccagatcgaagaagtggttatcggtag

SEQ ID NO: 171449 - DNA, 1935 bp, Artificial Sequence
  derived and/or modified sequence
atggaagagaccatgaaattggcaacaatggaagatactgtcgagtactgcttgtttctgataccagacgagtcccgtgatagtgacaagcacaaggagatcttgcagaagtacatcgagcgcattattacccgctttgccccaatgctggtgccatatatctggcaaaatcagccctttaacctgaagtataaacctggcaagggtggggttcctgcccatatgtttggtgtgactaagttcggcgacaacatagaagatgaatggttcatagtgtatgtaatcaaacagatcaccaaagagtttcctgagctcgtcgctcgaatcgaagacaacgacggcgaattcctccttattgaagccgcagattttctcccaaagtggttggacccagagaattctacaaatagagtattcttttgccacggggagttatgcatcatccccgctcctagaaagagtggcgctgagagctggctgcccactaccccgccaaccatccctcaagctctgaatattattacggcacactccgagaagatcctggcttccgagtcaatcagggcagccgtgaacaggagaattagagggtatccagagaaaatacaggcatccctacacagggctcattgctttctgccagcaggtatagttgctgtgcttaagcagcgccctcgattggtggcagcagccgtgcaggccttctacctcagggacccaatagacttgagagcctgtcgggtgtttaagaccttccttcccgagacccgcatcatgacctctgtgaccttcacaaagtgcctgtatgctcaactggtccaacagaggtttgtgccagatcggaggtctggataccggcttcctcccccatccgatccccagtaccgtgcccatgagctcggaatgaagttagcccacggctttgagatcctgtgttcaaaatgctcgccacacttctctgattgtaaaaagtccctggttaccgcatcacctctgtgggccagttttcttgagagcctaaagaaaaatgattattttaagggactcatcgaaggatctgctcagtatagggaaaggctggaaatggcagagaattatttccagctctccgtggactggcccgagtcatctctggcgatgagtccaggagaagaaatcctcacattgctgcagaccatcccgtttgatattgaggatctgaaaaaggaagctgccaacctcccacccgaggacgacgatcagtggctcgatctcagtcccgaccagctcgatcagcttctgcaagaggccgttggtaaaaaggaatccgagtccgtcagtaaggaggaaaaggagcagaactacgatctgacggaagtgtccgagtctatgaaagccttcatctcgaaagtttccacacacaaaggggctgagctgccacgcgagccgtctgaagcacccattaccttcgacgcggactcttttcttaattacttcgacaaaattctcggcccaagaccaaacgagtccgacagcgacgatttagacgacgaggactttgagtgcctagattccgatgatgaccttgatttcgagacacacgagcctggggaggaggcttcgctcaaaggcacactggataatctgaaatcatacatggctcagatggatcaggagcttgcacatacatgtattagcaaatcattcacgactagaaaccaggtggaacccgtctcacagaccactgacaacaatagcgatgaagaggacagtggcaccggcgagtccgtaatggccccagtggacgtcgatctgaatctggtctccaatattctggaaagttattctagccaggccggactggccggtccagcgagtaacctcctgcagagcatgggcgtgcagctgcccgataataccgaccaccggcctacaagtaagcccacaaagaactag

SEQ ID NO: 171450 - DNA, 639 bp, Artificial Sequence
  derived and/or modified sequence
atgttcggggtgacgaagttcggggataatatcgaggatgagtggttcattgtatatgtgattaagcagattaccaaggaatttccagaactagttgccaggattgaggacaatgacggggagtttctcctgatagaagctgctgactttcttcccaagtggttagaccccgaaaacagcaccaaccgggtttttttttgccacggagaattatgcataataccagccccacgaaaatcaggagctgagtcctggctgcccaccacccctcctaccatccctcaggctctgaacatcatcacggctcatagcgaaaagatattggcctctgaatccatccgggctgccgtgaatcgacgaattagaggatatcccgagaagattcaagcctcattacatagagcccactgttttttgccggctggcattgtagcagtgctgaagcagcgccctcgcttagtcgccgcagctgtgcaagccttttacctccgcgatcctatcgatctgagagcctgcagagttttcaagaccttcttgcccgagacgaggataatgactagcgtcacgttcacaaaatgcctgtatgcccaactggtccagcagcgcttcgtccctgaccgtcgctcagggtacagatag

SEQ ID NO: 171451 - DNA, 884 bp, Artificial Sequence
  derived and/or modified sequence
aaaatgctcccgccgacgcacagcagtgacgacacacaaggtttcggggactgagtgggtttcagactttctctcaggatttccgctggcttcaggttccggtcaggcgtcgggacagagcctgatccaggcttcggcggccggtggcagctctcgatcagctctcgcagtcggagaggcggctaaggaaaggtgccacagcagagacgcgaaggagaggccctagaaccgaggtgttcctgctcatatgtttggcgtgacaaagtttggggataacattgaggatgaatggtttattgtttatgtaataaagcagatcacaaaggaatttccagagttagtagcaaggattgaagacaatgatggtgaattcttgttaatagaagctgctgactttctccctaaatggctggatcctgaaaatagcaccaatagggtatttttctgccatggggaattgtgtattatccctgcaccaagaaaatctggagcagaatcttggttacccaccacacccccaacaattccacaagcattgaatataatcacagcacattcagaaaaaatacttgcttcagaatctatacgagctgctgtgaataggcgcatcagagggtacccagaaaaaattcaggcctcacttcatcgagcacactgcttccttccagctggcattgtggcagtgctaaagcagcgccccagattggtggctgcagcagtccaggcattttacctacgagaccctattgacctgcgagcttgtcgtgttttcaagacattcttgcctgaaacacgaataatgacatcggtcacattcactaaatgtctatatgcacaattggtgcaacaaaggtttgtgccagaccggcggagtggatacaggc

SEQ ID NO: 171452 - protein, 388 aa, Artificial Sequence
  derived and/or modified sequence
MRCLYGRVGGARRKMAASAAAAELQASGGPRHPVCLLVLGMAGSGKTTFVQRLTGHLHAQGTPPYVINLDPAVHEVPFPANIDIRDTVKYKEVMKQYGLGPNGGIVTSLNLFATRFDQVMKFIEKAQNMSKYVLIDTPGQIEVFTWSASGTIITEALASSFPTVVIYVMDTSRSTNPVTFMSNMLYACSILYKTKLPFIVVMNKTDIIDHSFAVEWMQDFEAFQDALNQETTYVSNLTRSMSLVLDEFYSSLRVVGVSAVLGTGLDELFVQVTSAAEEYEREYRPEYERLKKSLANAESQQQREQLERLRKDMGSVALDAGTAKDSLSPVLHPSDLILTRGTLDEEDEEADSDTDDIDHRVTEESHEEPAFQNFMQESMAQYWKRNNK

SEQ ID NO: 171453 - DNA, 1167 bp, Artificial Sequence
  derived and/or modified sequence
atgcggtgcctctacggtcgagtggggggcgcccggcggaaaatggccgcaagtgctgcagccgcagagcttcaggcctccgggggccccagacaccctgtgtgcctgctcgttcttggcatggctggtagtggtaaaaccacctttgtgcagaggttgacaggccatctccatgcacagggcacgccgccttacgtgatcaatttagacccagctgttcatgaggtaccctttcccgccaatattgacatccgggatactgtcaagtataaggaggtaatgaagcagtacggactcggccccaatggcggcatagtcaccagcctgaatctgtttgcaacgcgattcgatcaggtgatgaagtttatagagaaggcacagaatatgtctaagtatgtcctgatcgatacccccggacagattgaagttttcacatggtctgccagtggcacgatcattacagaggccctggcatctagtttccctaccgttgtgatctatgtgatggatacatctaggtccacaaatcctgtgacattcatgtccaatatgctgtatgcttgttctatactctataaaacgaaactaccatttatcgtggtcatgaataagactgatataattgaccactcatttgctgtagagtggatgcaggatttcgaagccttccaagatgccctaaatcaagagactacatacgtgtccaacctgacaagatcaatgagtctcgtgctcgatgagttctactcgtcacttagagtggtgggcgtgagcgccgtccttggcacggggctggacgagctgttcgtgcaggtgacatctgctgctgaagagtatgaacgcgaatacaggccagaatacgagcgacttaaaaaaagcctggccaatgcagagtcccagcagcaacgcgagcaactagaacgactcagaaaagatatgggctcggtggctctggacgctggcacggccaaggactccttgtcacccgtcttgcatcctagcgacttgatcttgacccggggcacattggatgaagaagacgaggaagctgacagtgataccgacgatattgaccaccgggtcactgaggagagccacgaggagccagccttccagaacttcatgcaagagtcaatggcacaatactggaaacgtaacaacaaatag

SEQ ID NO: 171454 - DNA, 1167 bp, Artificial Sequence
  derived and/or modified sequence
atgcgctgcctgtatggccgggtgggcggggcccggaggaagatggccgccagcgctgctgctgctgagctgcaggccagcggcggccccaggcaccctgtgtgcctgctggtgctgggcatggccggcagcggcaagaccacctttgtgcagaggctgaccggccacctgcacgcccagggcaccccaccctacgtgatcaacctggaccctgctgtgcatgaggtgcccttccctgccaacatcgacatccgggacacagtgaagtacaaggaggtgatgaagcagtatggcctgggccccaacggcggcatcgtgaccagcctgaacctgtttgccaccaggtttgaccaggtgatgaagttcatcgagaaggcccagaacatgagcaaatatgtgctgattgacaccccaggccagatcgaggtgttcacctggagcgccagcggcaccatcatcacagaggccctggccagcagcttccccaccgtggtgatctacgtgatggacaccagccgcagcaccaaccctgtgaccttcatgagcaacatgctgtatgcctgcagcatcctgtacaagaccaagctgcccttcatcgtggtgatgaacaagacagacatcatcgaccacagctttgctgtggagtggatgcaggactttgaggccttccaggatgccctgaaccaggagaccacctacgtgagcaacctgaccaggtccatgagcctggtgctggatgagttctacagcagcctgcgggtggtgggcgtgtctgctgtgctgggcaccggcctggatgagctgtttgtgcaggtgaccagcgctgctgaggagtatgagcgggagtacagaccagaatatgagcggctgaagaagagcctggccaatgctgagagccagcagcagcgggagcagctggagcggctgaggaaggacatgggctctgtggccctggatgctggaacagccaaggacagcctgagccctgtgctgcaccccagcgacctgatcctgacccggggcaccctggatgaggaggatgaggaggccgacagcgacacagatgacatcgaccaccgggtgacagaggagagccatgaggagcccgccttccagaacttcatgcaggagagcatggcccagtactggaagaggaacaacaagtag

SEQ ID NO: 171455 - DNA, 1167 bp, Artificial Sequence
  derived and/or modified sequence
atgcggtgcctgtacggccgggtgggcggcgcccggcggaagatggctgcctccgccgcggccgctgagctgcaggcctccggtgggcccaggcaccctgtttgccttttagtgctgggaatggctgggtcaggcaaaactacctttgttcaacggctgaccggccacctgcacgctcagggtacccccccctacgtcataaatctagatcccgctgtgcatgaggtaccattcccggcgaatattgatattcgcgacactgttaaatataaggaagtaatgaagcagtatggcctcgggcctaacgggggtattgtgacaagcctcaacttgttcgcgactcgattcgaccaggtcatgaaatttatcgaaaaagcgcaaaatatgtctaagtatgtgctcattgacacaccgggacagatagaggtattcacctggtccgcttctggcacaatcattacggaggcgctggcctcatccttccctaccgttgtaatatacgtcatggataccagtcggtctactaatccggtgacctttatgagcaacatgctttacgcatgctcaattctgtacaaaacaaagctgccctttattgtggtgatgaataaaactgacattattgaccattcctttgccgttgaatggatgcaggatttcgaggcctttcaagatgctctgaaccaggaaaccacctatgtgtctaacctcacaagatcgatgtccttggtgctggacgaattctactcttccttaagggtggtgggcgtgtctgctgtacttggcactggcctggatgaactattcgtccaggtaacatcagctgctgaggaatatgagagggagtatcggccagaatacgaacggctcaaaaagagcctggctaacgctgaaagccaacaacagcgggaacagctggaaaggctgagaaaagatatgggctctgtcgccctagacgcggggactgccaaggattcactgtcacctgtgctacaccccagtgacctcattttgacacgagggacgctcgatgaggaagacgaagaagccgatagcgatacagacgacatagatcaccgcgtcaccgaggaatctcacgaggaacctgcattccagaactttatgcaggaaagcatggctcagtactggaagcgtaacaacaaatag

SEQ ID NO: 171456 - DNA, 1167 bp, Artificial Sequence
  derived and/or modified sequence
atgcgatgtctgtacggcagagtcgggggtgccagaagaaaaatggctgccagtgctgctgctgccgaattacaggccagcgggggacccaggcatcctgtttgcctccttgtcctggggatggctggctcgggcaaaacaacattcgtgcagagactgacaggccacctgcatgcccagggcaccccaccctatgtgatcaatctggatcctgccgtgcacgaagtgccattccccgcaaatatcgacattagggacaccgtgaaatataaggaggtgatgaagcagtacggactgggccctaacgggggaatcgtaacatccctgaacctcttcgccactagatttgatcaagtgatgaaattcattgaaaaggcgcagaatatgtcaaaatatgtgctgatcgatacccctggccaaatagaggtgtttacatggtcagcaagtgggaccattatcacagaggccctcgctagttccttcccaacggttgtgatctacgtgatggatacaagtaggagcacaaacccagttacatttatgtccaacatgctgtatgcttgttctatcctgtataagaccaagctcccctttatcgtcgtgatgaacaagacggacattattgatcacagctttgccgttgagtggatgcaggatttcgaggccttccaagatgccctgaaccaggaaaccacatatgtttctaaccttacccgaagcatgtcccttgtattagacgagttctacagcagcctgagagtggtgggggtttccgctgtgttgggaaccggtttggacgaactctttgtccaggtgaccagtgctgctgaagagtatgagagggaatataggcctgaatatgaacgccttaagaaatccctcgccaatgccgaatcccagcagcaaagggaacagctggagcgcctccgcaaagatatgggatctgtggcactcgatgccggaactgccaaggattcactttcccctgtcctacacccttcagacctgatcctgacgcgagggactctagatgaggaagacgaagaggcagactcagatactgatgacatcgaccatcgcgtaacagaggaatcacacgaggaacccgcattccagaatttcatgcaggaaagcatggctcaatactggaaaagaaacaataagtag

SEQ ID NO: 171457 - DNA, 1725 bp, Artificial Sequence
  derived and/or modified sequence
gaataagcccgagcagccggtcctccagtggctccgctccccgttctctgtgggctcaaaatgacagaggctcacaggacacctgcatgcccaaggcactccaccgtatgtgatcaacctggatccagcagtacatgaagttccctttcctgccaatattgatattcgtgatactgtaaagtataaagaagtaatgaaacaatatggacttggacccaatggcggcatagtgacctcactcaatctctttgctaccagatttgatcaggtgatgaaatttattgagaaggcccagaacatgtccaaatatgtgttgattgacacacctggacagattgaggtattcacctggtcagcttctgggacaattatcactgaagcccttgcatcctcatttccaacagttgtcatctatgtaatggacacatcgagaagtaccaacccagtgaccttcatgtccaacatgctctatgcctgcagcatcttatacaaaaccaagctgcctttcattgtggtcatgaataaaactgacatcattgaccacagctttgcagtggaatggatgcaggattttgaggctttccaagatgccttgaatcaagagactacatacgtcagtaacctgactcgttcaatgagcctggtgttagatgagttttacagctcactcagggtggtgggtgtctctgctgttctgggtactggattagatgaactctttgtgcaagttaccagtgctgccgaagaatatgaaagggagtatcgtcctgaatatgaacgtctgaaaaaatcactggccaacgcagagagccaacagcagagagaacaactggaacgccttcgaaaagatatgggttctgtagccttggatgcagggactgccaaagacagcttatctcctgtgctgcacccttctgatttgatcctgactcgaggaaccttggatgaagaggatgaggaagcagacagcgatactgatgacattgaccacagagttacagaggaaagccatgaagagccagcattccagaattttatgcaagaatcgatggcacaatactggaagagaaacaataaataggagactttagcacacttcacttgtttctagaagtccagaattttggacctccacgtgaaagaactgttcttacctctgaactgggggctcccataagggataattttcctcagagtagcaaagtttctcttattagagaaatcttgtgactcagatgaagtcagggatagaagacccttggacctggcaggttaatgctgattattccttggcctttcccttgtatttatgcaaggaaggatatactgagctgatactcttccaagcctacaacttcaagttttatcatttgaactcaagtacttttgctgctgaggaatggaatcaaaagaacgtagtctcctggtgaccacctcagatctctattattaggctagatgtatagcctctactcccccagcttcttgctcttgaccctgcactgtaagttgcccttctattagcagccaaggaaaagggaaacatgagcttatccagaacggtggcagagtctccttggcaatcaaccaacgttgctatgaaatatgcctcacactgtatagctcattataggacgtcaggtttgttgaaaaaagtgggcaagacatgattaatgaatcagaatcctgtttcattggtgacttggataaagactttttaatttt

SEQ ID NO: 171458 - DNA, 2496 bp, Artificial Sequence
  derived and/or modified sequence
attgcggaagtttctctacccatgcggtgtctctatggtcgggtgggtggggccaggaggaagatggcggcgtccgcagctgccgctgagctccaggcttctgggggtccgcggcacccagtgtgtctgttggtgttgggaatggcgggatccgggaaaaccacttttgtacagaggctcacaggacacctgcatgcccaaggcactccaccgtatgtgatcaacctggatccagcagtacatgaagttccctttcctgccaatattgatattcgtgatactgtaaagtataaagaagtaatgaaacaatatggacttggacccaatggcggcatagtgacctcactcaatctctttgctaccagatttgatcaggtgatgaaatttattgagaaggcccagaacatgtccaaatatgtgttgattgacacacctggacagattgaggtattcacctggtcagcttctgggacaattatcactgaagcccttgcatcctcatttccaacagttgtcatctatgtaatggacacatcgagaagtaccaacccagtgaccttcatgtccaacatgctctatgcctgcagcatcttatacaaaaccaagctgcctttcattgtggtcatgaataaaactgacatcattgaccacagctttgcagtggaatggatgcaggattttgaggctttccaagatgccttgaatcaagagactacatacgtcagtaacctgactcgttcaatgagcctggtgttagatgagttttacagctcactcagggtggtgggtgtctctgctgttctgggtactggattagatgaactctttgtgcaagttaccagtgctgccgaagaatatgaaagggagtatcgtcctgaatatgaacgtctgaaaaaatcactggccaacgcagagagccaacagcagagagaacaactggaacgccttcgaaaagatatgggttctgtagccttggatgcagggactgccaaagacagcttatctcctgtgctgcacccttctgatttgatcctgactcgaggaaccttggatgaagaggatgaggaagcagacagcgatactgatgacattgaccacagagttacagaggaaagccatgaagagccagcattccagaattttatgcaagaatcgatggcacaatactggaagagaaacaataaataggagactttagcacacttcacttgtttctagaagtccagaattttggacctccacgtgaaagaactgttcttacctctgaactgggggctcccataagggataattttcctcagagtagcaaagtttctcttattagagaaatcttgtgactcagatgaagtcagggatagaagacccttggacctggcaggttaatgctgattattccttggcctttcccttgtatttatgcaaggaaggatatactgagctgatactcttccaagcctacaacttcaagttttatcatttgaactcaagtacttttgctgctgaggaatggaatcaaaagaacgtagtctcctggtgaccacctcagatctctattattaggctagatgtatagcctctactcccccagcttcttgctcttgaccctgcactgtaagttgcccttctattagcagccaaggaaaagggaaacatgagcttatccagaacggtggcagagtctccttggcaatcaaccaacgttgctatgaaatatgcctcacactgtatagctcattataggacgtcaggtttgttgaaaaaagtgggcaagacatgattaatgaatcagaatcctgtttcattggtgacttggataaagactttttaattttaactttgttctaagactgcttgtcatgatttcaaattagaaaattatataattgcaaacagcttcacttctcctgttcaacagaggcttaaggccagatgtccaaacttgtctcaataaggaggtgatattttactaaagtttcccacgtgcacatactgactaaatacagagctaggcccagtttgtattgtactctgaacttaatgcaaagtctccttggtgattttcgcaaagtccgtggatttgggtcagaggcacatttcatacataacagcccttataaacgtttgccctgcctccacattttacagtatcttaaaacagtacatttctttcaaagaattttatctctatgagtcagtactccaacttagtggttctcacattgtggaccaggagcatcagcatcatctggggaattgttcaacttacctcttataacctatgaactcagaaaccctgggggtgggctgagcagtctgttttagaaagccctccatgtgattctgatgcatagtagcctatgacataattccagaccaggtgaatctcaagatactaatcctcacatcatttgccttctcatatttccctcgtcttgaccatctggtgcctgttatgcagtttaacattctgcagcaataaaagtgttttattataaa

SEQ ID NO: 171459 - DNA, 1167 bp, Artificial Sequence
  derived and/or modified sequence
atgagatgcctgtacggcagagtgggcggcgccagaagaaagatggccgccagcgccgccgccgccgagctgcaggccagcggcggccccagacaccccgtgtgcctgctggtgctgggcatggccggcagcggcaagaccaccttcgtgcagagactgaccggccacctgcacgcccagggcacccccccctacgtgatcaacctggaccccgccgtgcacgaggtgcccttccccgccaacatcgacatcagagacaccgtgaagtacaaggaggtgatgaagcagtacggcctgggccccaacggcggcatcgtgaccagcctgaacctgttcgccaccagattcgaccaggtgatgaagttcatcgagaaggcccagaacatgagcaagtacgtgctgatcgacacccccggccagatcgaggtgttcacctggagcgccagcggcaccatcatcaccgaggccctggccagcagcttccccaccgtggtgatctacgtgatggacaccagcagaagcaccaaccccgtgaccttcatgagcaacatgctgtacgcctgcagcatcctgtacaagaccaagctgcccttcatcgtggtgatgaacaagaccgacatcatcgaccacagcttcgccgtggagtggatgcaggacttcgaggccttccaggacgccctgaaccaggagaccacctacgtgagcaacctgaccagaagcatgagcctggtgctggacgagttctacagcagcctgagagtggtgggcgtgagcgccgtgctgggcaccggcctggacgagctgttcgtgcaggtgaccagcgccgccgaggagtacgagagagagtacagacccgagtacgagagactgaagaagagcctggccaacgccgagagccagcagcagagagagcagctggagagactgagaaaggacatgggcagcgtggccctggacgccggcaccgccaaggacagcctgagccccgtgctgcaccccagcgacctgatcctgaccagaggcaccctggacgaggaggacgaggaggccgacagcgacaccgacgacatcgaccacagagtgaccgaggagagccacgaggagcccgccttccagaacttcatgcaggagagcatggcccagtactggaagagaaacaacaagtag

SEQ ID NO: 171460 - protein, 805 aa, Artificial Sequence
  derived and/or modified sequence
MAQPLAFILDVPETPGDQGQGPSPYDESEVHDSFQQLIQEQSQCTAQEGLELQQREREVTGSSQQTLWRPEGTQSTATLRILASMPSRTIGRSRGAIISQYYNRTVQLRCRSSRPLLGNFVRSAWPSLRLYDLELDPTALEEEEKQSLLVKELQSLAVAQRDHMLRGMPLSLAEKRSLREKSRTPRGKWRGQPGSGGVCSCCGRLRYACVLALHSLGLALLSALQALMPWRYALKRIGGQFGSSVLSYFLFLKTLLAFNALLLLLLVAFIMGPQVAFPPALPGPAPVCTGLELLTGAGCFTHTVMYYGHYSNATLNQPCGSPLDGSQCTPRVGGLPYNMPLAYLSTVGVSFFITCITLVYSMAHSFGESYRVGSTSGIHAITVFCSWDYKVTQKRASRLQQDNIRTRLKELLAEWQLRHSPRSVCGRLRQAAVLGLVWLLCLGTALGCAVAVHVFSEFMIQSPEAAGQEAVLLVLPLVVGLLNLGAPYLCRVLAALEPHDSPVLEVYVAICRNLILKLAILGTLCYHWLGRRVGVLQGQCWEDFVGQELYRFLVMDFVLMLLDTLFGELVWRIISEKKLKRRRKPEFDIARNVLELIYGQTLTWLGVLFSPLLPAVQIIKLLLVFYVKKTSLLANCQAPRRPWLASHMSTVFLTLLCFPAFLGAAVFLCYAVWQVKPSSTCGPFRTLDTMYEAGRVWVRHLEAAGPRVSWLPWVHRYLMENTFFVFLVSALLLAVIYLNIQVVRGQRKVICLLKEQISNEGEDKIFLINKLHSIYERKEREERSRVGTTEEAAAPPALLTDEQDA

SEQ ID NO: 171461 - DNA, 2418 bp, Artificial Sequence
  derived and/or modified sequence
atggcccagcccctggccttcatcctggacgtgcccgagacccccggcgaccagggccagggccccagcccctacgacgagagcgaggtgcacgacagcttccagcagctgatccaggagcagagccagtgcaccgcccaggagggcctggagctgcagcagagagagagagaggtgaccggcagcagccagcagaccctgtggagacccgagggcacccagagcaccgccaccctgagaatcctggccagcatgcccagcagaaccatcggcagaagcagaggcgccatcatcagccagtactacaacagaaccgtgcagctgagatgcagaagcagcagacccctgctgggcaacttcgtgagaagcgcctggcccagcctgagactgtacgacctggagctggaccccaccgccctggaggaggaggagaagcagagcctgctggtgaaggagctgcagagcctggccgtggcccagagagaccacatgctgagaggcatgcccctgagcctggccgagaagagaagcctgagagagaagagcagaacccccagaggcaagtggagaggccagcccggcagcggcggcgtgtgcagctgctgcggcagactgagatacgcctgcgtgctggccctgcacagcctgggcctggccctgctgagcgccctgcaggccctgatgccctggagatacgccctgaagagaatcggcggccagttcggcagcagcgtgctgagctacttcctgttcctgaagaccctgctggccttcaacgccctgctgctgctgctgctggtggccttcatcatgggcccccaggtggccttcccccccgccctgcccggccccgcccccgtgtgcaccggcctggagctgctgaccggcgccggctgcttcacccacaccgtgatgtactacggccactacagcaacgccaccctgaaccagccctgcggcagccccctggacggcagccagtgcacccccagagtgggcggcctgccctacaacatgcccctggcctacctgagcaccgtgggcgtgagcttcttcatcacctgcatcaccctggtgtacagcatggcccacagcttcggcgagagctacagagtgggcagcaccagcggcatccacgccatcaccgtgttctgcagctgggactacaaggtgacccagaagagagccagcagactgcagcaggacaacatcagaaccagactgaaggagctgctggccgagtggcagctgagacacagccccagaagcgtgtgcggcagactgagacaggccgccgtgctgggcctggtgtggctgctgtgcctgggcaccgccctgggctgcgccgtggccgtgcacgtgttcagcgagttcatgatccagagccccgaggccgccggccaggaggccgtgctgctggtgctgcccctggtggtgggcctgctgaacctgggcgccccctacctgtgcagagtgctggccgccctggagccccacgacagccccgtgctggaggtgtacgtggccatctgcagaaacctgatcctgaagctggccatcctgggcaccctgtgctaccactggctgggcagaagagtgggcgtgctgcagggccagtgctgggaggacttcgtgggccaggagctgtacagattcctggtgatggacttcgtgctgatgctgctggacaccctgttcggcgagctggtgtggagaatcatcagcgagaagaagctgaagagaagaagaaagcccgagttcgacatcgccagaaacgtgctggagctgatctacggccagaccctgacctggctgggcgtgctgttcagccccctgctgcccgccgtgcagatcatcaagctgctgctggtgttctacgtgaagaagaccagcctgctggccaactgccaggcccccagaagaccctggctggccagccacatgagcaccgtgttcctgaccctgctgtgcttccccgccttcctgggcgccgccgtgttcctgtgctacgccgtgtggcaggtgaagcccagcagcacctgcggccccttcagaaccctggacaccatgtacgaggccggcagagtgtgggtgagacacctggaggccgccggccccagagtgagctggctgccctgggtgcacagatacctgatggagaacaccttcttcgtgttcctggtgagcgccctgctgctggccgtgatctacctgaacatccaggtggtgagaggccagagaaaggtgatctgcctgctgaaggagcagatcagcaacgagggcgaggacaagatcttcctgatcaacaagctgcacagcatctacgagagaaaggagagagaggagagaagcagagtgggcaccaccgaggaggccgccgccccccccgccctgctgaccgacgagcaggacgcctag

SEQ ID NO: 171462 - DNA, 2418 bp, Artificial Sequence
  derived and/or modified sequence
atggcacaacccttagcgttcatcctagacgtaccagagactcctggggatcagggccaaggtccaagcccttacgatgaatccgaagtccatgacagcttccaacagttaattcaagagcagagccagtgtacagcacaagaaggccttgagctgcagcagcgagagcgcgaggtgactggcagcagccagcagaccctctggcggcccgaagggacacagtctacagcaacacttcgcatactggctagtatgcctagccggaccatagggcgctctcgaggcgcaataatatcacagtactacaatagaactgtgcagttgaggtgccgttccagtaggcccctgctgggcaattttgtgcgctccgcctggccatcacttcgcttgtacgatctagagctggacccaaccgcgcttgaggaagaggagaaacagagcttgcttgtgaaagaactgcaatccttagctgtggctcagcgcgaccacatgttgcgtggcatgccactaagcctggcggaaaagaggtctctgcgggaaaagtcccgaacacctagggggaaatggcgaggccagcctgggagcggtggagtctgctcatgttgcggacggctgcgctacgcctgtgttctggctcttcactccctcggcctcgccctcctaagcgccttgcaggctttgatgccatggcgttatgcgttaaagcggataggcggacagtttggcagctcagtcttgtcctatttcctgttcttgaaaactctgctggcctttaatgccctccttctcctgctgctcgtggcttttataatgggaccacaggtggcatttccacccgcccttcctggccctgcacccgtgtgtaccggactggaactactgaccggggccggctgcttcactcacactgttatgtactatggacactacagcaatgctacacttaaccagccttgcggttcgcctttggatggtagtcaatgtaccccccgtgtcggagggctgccttacaatatgcctcttgcatacttatcgactgtgggcgtgagctttttcattacctgtatcaccctggtctattctatggcccacagctttggagaaagctacagggtaggctccactagtgggattcacgctatcaccgtgttctgttcttgggattacaaggtcactcagaaaagagcatcccgcttgcagcaggataacattcgaacccggctcaaggaacttctcgccgagtggcaactgaggcactctccccgaagcgtgtgtggtagactcagacaggcagccgtgctcgggctggtatggctgctgtgtctgggcaccgcactcggctgcgccgttgcagtccacgtgtttagcgagtttatgatccagtctccagaagcagcgggacaggaagctgtgctactggtgctgcccctcgtggtgggtcttctcaatctgggggcgccatatttgtgtcgcgtcctcgccgccttagagccccatgattcacccgttctggaggtgtatgtggcaatctgtcggaatctcatcctgaaactcgccattctgggaactctctgttaccattggttgggcaggcgagttggcgtgcttcaaggacaatgctgggaagacttcgtgggccaggaattgtaccgttttctggtaatggattttgtgttgatgctcctcgatacactgttcggagagctcgtctggaggattatttctgaaaaaaagctaaaacgtcggcggaagccagaatttgacattgctcggaacgtgctcgaacttatatacggacagacgctgacctggttgggagtcctgttctcaccacttttgcccgccgtgcagatcatcaagcttctgctggtattttatgtgaagaagaccagcctcttggctaactgtcaggctcccagacgcccgtggttggctagccacatgtccacagtgttcctcactctgctgtgttttcctgctttcttaggcgctgcagtattcctgtgttatgccgtgtggcaggtgaaaccgtcctccacatgtggccctttccgtacactggatactatgtacgaagcaggtcgagtctgggtccgccatttggaggccgcaggccctcgggtgtcttggttgccctgggttcaccgctatctgatggagaacactttctttgtgtttctggtaagcgctctcctactcgccgtcatatatctgaacatacaggtcgtccgcgggcaacggaaagtcatctgcctgcttaaggagcaaataagcaatgagggagaagacaaaattttccttataaataagctgcactctatttacgagcggaaggagcgggaagagaggtctcgcgttggtacaacagaagaagccgcagctccaccagctctgctcactgacgagcaggatgcctag

SEQ ID NO: 171463 - DNA, 2418 bp, Artificial Sequence
  derived and/or modified sequence
atggcccagcccctggccttcatcctggatgtgcctgagacccctggggaccagggccagggccccagcccctatgatgagagcgaggtgcatgacagcttccagcagctgatccaggagcagagccagtgcacagcccaggagggcctggagctgcagcagcgggagcgggaggtgacaggcagcagccagcagaccctgtggaggcctgagggcacccagagcacagccaccctgcgcatcctggcctccatgcccagcaggaccatcggccgcagcagaggagccatcatcagccagtactacaacagaacagtgcagctgcgctgccgcagcagccggcccctgctgggcaactttgtgcgcagcgcctggcccagcctgcggctgtatgacctggagctggaccccacagccctggaggaggaggagaagcagagcctgctggtgaaggagctgcagagcctggccgtggcccagagggaccacatgctgcggggcatgcccctgagcctggccgagaagaggagcctgcgggagaagagcaggaccccccggggcaagtggaggggccagcccggcagcggaggagtgtgcagctgctgcggccgcctgcgctatgcctgtgtgctggccctgcacagcctgggcctggccctgctgagcgccctgcaggccctgatgccctggaggtatgccctgaagagaattggaggccagtttggcagctctgtgctgagctacttcctgttcctgaagaccctgctggccttcaatgccctgctgctgctgctgctggtggccttcatcatgggcccccaggtggccttccccccagccctgcccggccctgcccctgtgtgcaccggcctggagctgctgactggagctggctgcttcacccacacagtgatgtactacggccactacagcaatgccaccctgaaccagccctgtggcagccccctggatggcagccagtgcaccccccgggtgggcggcctgccctacaacatgcccctggcctacctgagcacagtgggcgtgtccttcttcatcacctgcatcaccctggtgtacagcatggcccacagctttggagagagctacagagtgggcagcaccagcggcatccacgccatcaccgtcttctgctcctgggactacaaggtgacccagaagagggccagccggctgcagcaggacaacatccgcacccggctgaaggagctgctggccgagtggcagctgcggcacagccccaggtctgtgtgtggccgcctgcggcaggccgctgtgctgggcctggtgtggctgctgtgcctgggcacagccctgggctgtgctgtggccgtgcacgtgttcagcgagttcatgatccagagccctgaggccgccggccaggaggccgtgctgctggtgctgcccctggtggtgggcctgctgaacctgggcgccccctacctgtgccgggtgctggccgccctggagccccatgacagccctgtgctggaggtgtatgtggccatctgcaggaacctgatcctgaagctggccatcctgggcaccctgtgctaccactggctgggcagaagagtgggcgtgctgcagggccagtgctgggaggactttgtgggccaggagctgtaccgcttcctggtgatggactttgtgctgatgctgctggacaccctgtttggagagctggtgtggaggatcatcagcgagaagaagctgaagagaagaaggaagccagagtttgatattgccagaaatgtgctggagctgatctacggccagaccctgacctggctgggcgtgctcttcagccccctgctgcctgctgtgcagatcatcaagctgctgctggtgttctacgtgaagaagaccagcctgctggccaactgccaggccccccggcggccctggctggccagccacatgagcaccgtcttcctgaccctgctgtgcttccctgccttcctgggcgctgctgtgttcctgtgctatgctgtgtggcaggtgaagcccagcagcacctgtggccccttccgcaccctggacaccatgtatgaagctggccgggtgtgggtgcgccacctggaggccgccggcccccgggtgtcctggctgccctgggtgcaccgctacctgatggagaacaccttctttgtgttcctggtgtctgccctgctgctggccgtcatctacctgaacatccaggtggtgcggggccagaggaaggtgatctgcctgctgaaggagcagatcagcaatgaaggagaggacaagatcttcctgatcaacaagctgcacagcatctatgaaaggaaggagcgggaggagaggagccgggtgggcaccacagaggaggccgccgcccccccagccctgctgacagatgagcaggatgcctag

SEQ ID NO: 171464 - DNA, 2418 bp, Artificial Sequence
  derived and/or modified sequence
atggcccagcccctggccttcatcctggacgtgcccgagacccccggtgaccagggacagggaccatcgccttacgacgaaagtgaggtgcacgatagttttcaacagcttatccaggagcagagccaatgtacagctcaggaaggcctggaactgcagcagcgagagagggaggtgacgggttcctctcaacaaaccttatggcgccctgagggaacccagagtaccgccactctcagaatccttgcatctatgccgagtagaactattggtaggtctcgaggggctattatttcacagtattacaatagaaccgtccagctgcgatgccgaagcagcaggcctttactggggaattttgtgcgcagcgcctggccaagtctgcggctgtatgacctggagctggaccccactgcgctggaggaggaggagaaacagtctctcttggtgaaggagctgcagtcgctggctgttgctcaacgtgaccacatgcttcgtggcatgcctctgtctctcgctgaaaaaaggtctctgagggagaagagtcgcaccccacgaggtaaatggcggggccaaccaggcagcggcggggtgtgctcttgttgtggccggctccgatacgcatgcgtcctcgctttgcacagcctgggtctggcgctgttgtccgcgttgcaagcactaatgccatggcgatacgccctgaaacgcatcggagggcaatttgggtccagcgttttgagctattttctgttcttgaagacattgctggcctttaacgccttactgttgttactcttggtggctttcattatgggtcctcaagttgcttttcccccagcattacccggcccggcccctgtgtgcaccgggttagagcttctgacaggtgccggctgttttacacatacggtgatgtactacggacactattctaatgccacactgaaccagccttgtggcagccccctggacggatcccaatgcacacctcgcgttggcggcttaccgtacaatatgcctctcgcctacctgagtacggtcggcgtgtccttttttatcacctgcataacactggtttactctatggcgcattcgtttggggagtcttacagagtgggctccacctccggcatccatgccatcacagtgttttgttcttgggactacaaggtgacccagaagagagcctcccgacttcaacaggataatatcagaacacgactgaaagagctgctcgccgagtggcaactaaggcattcgccccgatctgtgtgtgggagacttagacaggcagccgttttggggctagtgtggctgctttgcctggggacagccttagggtgcgctgtcgcagtacatgttttctccgaattcatgatacaatctcccgaagccgcgggtcaggaagccgtcctgctcgtgcttcctctggttgtcggactcctcaatctgggtgccccttacctttgtagagtgctggcagccttagagccacacgatagtcccgtcctggaggtttatgtggcaatttgtcgtaatctgatcttgaagctcgccatcctcggcaccctatgttaccactggctgggccggcgagtgggcgtgctccagggacagtgttgggaagactttgttggccaggagctgtatcggtttctcgttatggatttcgtcctcatgctcctggacacactgtttggtgagttagtttggagaattatttctgagaagaagctgaaaagacgaaggaagcccgagtttgatatcgcccgcaacgtgctagagctgatttacggtcagacactcacctggctcggagttcttttttcgcctctgctgccagccgtccagataatcaaactgctgcttgttttctatgtgaagaaaacttcactcctggccaattgccaggcaccaagacgaccgtggcttgcaagccacatgtccacggtttttctcacgctcctgtgcttccctgcattcctcggggccgcagtgtttttgtgttacgctgtctggcaggtcaagccttcatccacttgtgggccttttagaacacttgacactatgtatgaagctgggcgggtgtgggtccgccatcttgaagcagcgggcccccgtgtatcctggctaccatgggtgcatcggtatctcatggaaaacaccttttttgtgtttttagtgagcgccctcctgctggcagtaatctacctgaacatccaggtcgtgcggggccaacgcaaggtcatctgtctgttgaaggagcagatttctaacgagggcgaagataaaatatttctgatcaacaagcttcacagcatttatgagcgaaaggaacgggaggagcggagcagagtggggacaacggaagaggctgcggccccccctgctcttcttacagatgaacaagatgcttag

SEQ ID NO: 171465 - DNA, 2418 bp, Artificial Sequence
  derived and/or modified sequence
atggcccagccattggcgtttattcttgacgttcctgaaacacccggagatcagggccagggcccaagcccctatgatgagtccgaagtccatgattcctttcaacagttgatccaggagcagtcccagtgtactgcccaggaaggactggagctccagcagcgtgagcgggaggtgaccggcagcagccagcagacattgtggaggcctgagggtactcagtctacagcgactcttagaatccttgcgagtatgcccagcagaaccattggaaggtcccgcggagctatcatatcacaatactacaacaggaccgtgcagctcaggtgccgtagctcacgtccgctattggggaatttcgtccgttcagcctggcctagcttgcggctgtacgatttggagctggaccccactgccctggaggaggaagaaaagcagtccctgctcgttaaggagctccaaagtttagctgtggctcagcgcgaccacatgctcagagggatgccactttccctcgctgaaaagagaagcttgcgagagaagtcaagaactcctcggggtaagtggaggggtcagcccggttcgggtggcgtgtgtagttgttgcggccgactccgctatgcctgcgtcctggcattacatagtctgggtctcgctttactgtctgccctgcaggctttgatgccctggcggtatgccttaaagcgcatcggcggtcagtttgggtcatccgtcctctcctatttcttattcctaaagacactgctggccttcaatgctctcctgcttcttctgctggtagcattcatcatggggccacaggtcgctttccctccggctttgccgggtccagctcctgtttgtaccggccttgaactactcaccggggcaggttgctttactcatactgttatgtattacggacattattctaacgctactcttaatcagccatgtggcagcccgttagatggatctcagtgcacgcccagagtaggcggacttccttataacatgcctctggcttatcttagcaccgttggcgtatcctttttcattacctgcatcactctggtatactctatggcccacagttttggcgaatcttatcgcgttgggagcaccagcggaatacatgccataaccgtgttctgcagctgggactacaaggtgacacagaagagagcctctaggctgcaacaggacaacatccggacccggctgaaagagctcctggccgagtggcaactccgtcactctccccgatcggtctgtggtaggctaaggcaggcggctgtgctgggtttggtgtggttactttgtctgggcaccgcactgggctgtgccgtggctgtgcatgtgtttagtgagttcatgatccagtctccagaagctgccggacaagaggccgtgctattggtgcttccattagtggtgggtctattaaatcttggtgctccctacctgtgccgggtgcttgcagctctcgaaccccacgattcaccagtcctcgaagtgtatgtggccatttgcagaaatctcattctgaagttggccattctaggtacgctgtgttaccactggctgggcagaagagtgggcgttcttcagggccagtgttgggaagattttgtgggacaggagctgtaccgatttctggtaatggattttgtgctaatgctgctggacacgctgtttggagagctggtctggagaattattagcgagaaaaaactaaagcgaagacgcaaaccagagtttgatatcgctcgcaacgttctggagttgatttacgggcagacattaacttggcttggggtactctttagccccctcctgcccgctgttcagatcataaagctgctgttggttttttacgtcaagaaaacctccttgctggcaaactgccaggcacctcgcagaccttggctggcaagtcatatgagtacggtttttctgaccctcctgtgctttcctgcttttctcggcgctgccgtgttcctttgctatgccgtttggcaagtgaagccttccagtacctgcggcccattccgaaccctggacaccatgtacgaagcgggtcgagtgtgggtcagacatttggaagctgccggtcctcgcgtgagctggctaccctgggttcatcgttacttgatggagaacacctttttcgtgttcctggtatcagctctcctgctcgccgtgatatatctcaacatccaagtggttcggggacagagaaaagttatctgtctcctgaaagaacaaatcagtaatgaaggcgaggacaagatttttctcataaacaaacttcacagcatctatgagaggaaggagagggaagagcgctccagggtaggcactaccgaggaagccgctgcaccacctgccctattaactgacgagcaagacgcttag

SEQ ID NO: 171466 - DNA, 5268 bp, Artificial Sequence
  derived and/or modified sequence
gccgagacctcagttcccggcggctcttgcggggcacaggtgagccctggctgcgcgcgcggcccctcctccccggcgcctcccagatgggggctccggaggtggcgcccaggctctgagctaccctaggtctgcagactagcgggcattggccagagacatggcccagccactggccttcatcctcgatgtccctgagaccccaggggaccagggccagggccccagcccctatgatgaaagcgaagtgcacgactccttccagcagctcatccaggagcagagccagtgcacggcccaggaggggctggagctgcagcagagagagcgggaggtgacaggaagtagccagcagacactctggcggcccgagggcacccagagcacggccacactccgcatcctggccagcatgcccagccgcaccattggccgcagccgaggtgccatcatctcccagtactacaaccgcacggtgcagcttcggtgcaggagcagccggcccctgctcgggaactttgtccgctccgcctggcccagcctccgcctgtacgacctggagctggaccccacggccctggaggaggaggagaagcagagcctcctggtgaaggagctccagagcctggcagtggcacagcgggaccacatgcttcgcgggatgcccttaagcctggctgagaaacgcagcctgcgagagaagagcaggaccccgagggggaagtggaggggccagccgggcagcggcggggtctgctcctgctgtggccggctcagatatgcctgcgtgctggccttgcacagcctgggcctggcgctgctctccgccctgcaggccctgatgccgtggcgctacgccctgaagcgcatcgggggccagttcggctccagcgtgctctcctacttcctctttctcaagaccctgctggctttcaatgccctcctgctgctgctgctggtggccttcatcatgggccctcaggtcgccttcccacccgccctgccgggccctgcccccgtctgcacaggcctggagctcctcacaggcgcgggttgcttcacccacaccgtcatgtactacggccactacagtaacgccacgctgaaccagccgtgtggcagccccctggatggcagccagtgcacacccagggtgggtggcctgccctacaacatgcccctggcctacctctccactgtgggcgtgagcttctttatcacctgcatcaccctggtgtacagcatggctcactctttcggggagagctaccgggtgggcagcacctctggcatccacgccatcaccgtcttctgctcctgggactacaaggtgacgcagaagcgggcctcccgcctccagcaggacaatattcgcacccggctgaaggagctgctggccgagtggcagctgcggcacagccccaggagcgtgtgcgggaggctgcggcaggcggctgtgctggggcttgtgtggctgctgtgtctggggaccgcgctgggctgcgccgtggccgtccacgtcttctcggagttcatgatccagagtccagaggctgctggccaggaggctgtgctgctggtcctgcccctggtggttggcctcctcaacctgggggccccctacctgtgccgtgtcctggccgccctggagccgcatgactccccggtactggaggtgtacgtggccatctgcaggaacctcatcctcaagctggccatcctggggacactgtgctaccactggctgggccgcagggtgggcgtcctgcagggccagtgctgggaggattttgtgggccaggagctgtaccggttcctggtgatggacttcgtcctcatgttgctggacacgctttttggggaactggtgtggaggattatctccgagaagaagctgaagaggaggcggaagccggagtttgacattgcccggaatgtcctggagctgatttatgggcagactctgacctggctgggggtgctcttctcgcccctcctccccgccgtgcagatcatcaagctgctgctcgtcttctatgtcaagaagaccagccttctggccaactgccaggcgccgcgccggccctggctggcctcacacatgagcaccgtcttcctcacgctgctctgcttccccgccttcctgggcgccgctgtcttcctctgctacgccgtctggcaggtgaagccctcgagcacctgcggccccttccggaccctggacaccatgtacgaggccggcagggtgtgggtgcgccacctggaggcggcaggccccagggtctcctggctgccctgggtgcaccggtacctgatggaaaacaccttctttgtcttcctggtgtcagccctgctgctggccgtgatctacctcaacatccaggtggtgcggggccagcgcaaggtcatctgcctgctcaaggagcagatcagcaatgagggtgaggacaaaatcttcttaatcaacaagcttcactccatctacgagaggaaggagagggaggagaggagcagggttgggacaaccgaggaggctgcggcaccccctgccctgctcacagatgaacaggatgcctagggggacggcgatgggcctcacgggcccgcccagcaccctgagaccacactgttgcctcccagtgaccctgctgggacaccaggacaaggaagacagtttcgcctctcgaaagccgcagctgcgcctaggctggagctggaagggtgggtgaatccggcttgggcatccccaatgaactctgccctgcctgggactctatttattctgattaaaggggttttgcaaatgggcttgtcccttggggctctgtgtctgtgaccacacccggggcctgcttcccgctgccctggggccacctccaggcgcaggtctgggtcctgggaacctcagctggagtgggggcgccctctgctggccaagccccagatggcaggggctggaccgcgccagggcttgattcgcttgctgcctttgaccagcctgaactcgcgcccaggaggggcttacacctgcacaagtgagccgagcaggcacggattgtgaccagagcgatgcgtcaaccattgggtgatgctgtagcatctactggagcaggagacaaatttagagagggacttggaggggagacatatcagttgcaaatgagttgtggggacagttgcctcccaggcataggtaaccagcacctgtgcttggaggcgaacagggcttggtgaggtggggctggccccctgcttctggctgccagcagctggctggggggtggtgatcctgggtctgactgggctgagtttgaggagcccgtgggataccgaaaaccgtaggctgtggggggtgggcacagggattcggggaccagcccgtcatgaccccgtgctccaggtctgcagggaccagcccatgacagcccagggctccaggtctgcggggaccagcccatcacagcccagggctccaggcctgcggggaccagcccgtcagcctcagttctccaggcctgcggggaccagcccgtcatgaccccagtgctccaggtctgtggggaccagcccgtcagcctgtgctccaggcctgcaggaaccagcccgtcagcctcagtgctccaggcctgcggggaccagcccgtcagcctgtgctccaggcctgcggggaccagcccgtcatgaccccagtgctccaggtctgtggggaccagcccgtcagcctgtgctccaggcctgcgggaaccagcccgtcatgaccccagtgctccaggcctgcggggaccagcccgtcatgaccccagtgctccaggtctgtggggaccagcccgtcacggcgcagggttccaggcttgtggggaccagcctgtcacagcccagggctccaggcctgcaggagctgcgcttgggattgggggaatgaacccaggtggggaaatggtcaaagagcgatgggcccagaaaagggtcagacccagatggagatgccactggctgctagcagacccccacgctgggtctagcccacccaatcccatggggatgctcctgtgctctgcagacatctgggtgctgccacaggggcccgacagagttggcatctgggtggatctgagccaagtggtgcttctgggcctcagcaagtagctggtgctgattctgggcagccaactgtggcagcatcttcaggtgcgagtgctgctgggtgaagctgcgtgggcagtccagaaagtgacgtgacagtccacagggaccgacgtagggtttccagcccctatctgtgcagatgctgtcctccaaaccatcacggtccctctctggctggggacgtgcgcctgccactgctggcttgccagcatgatcattggttgtgacctgttgagcccatcttgccagcctcacaaaggacagtactagctgcttatgacaggaaagtggaagaacttggcctggatatttctggagaattaccgtgtgtgctagtcagtctttcgtgtcaaccaggccaggctgtggggcccagtgatctcatcgagaggggccgaggtgttgctgtgatcgtgtgctgctggaatgtggtgaacacctacagtcgatttcacctaaagatcatccttgagaatgtgggtgggcctcatcctatcagctgaaagctttaagagcaaaacccgaggtgtcccagagagggaattctgccttgagacggcggcttcccactcccactggatgtccagcccgcggccccacggctgggtgagcccgtcctctcctcgtttctgtctccggacccaccgtgtggccccagaccctccagtgaggacctcccgtatttcttcagagcagcccttgcgtgctggaggcctgggcttcagtgtgtccctgggtgccctggggcatgttctgtgacctcccagctcctcgcctcatggggccgctgtatcaagtgacacagtttgtgtgctgcgtaccatgcctggcacccatttgaggtgttgcaaggaggccatgtttgctcgatgagagcagcctaagatctacaaactgttgttcgagtggatgggaacttgatgctattttcaggctgaatgacaagactccgcgatgcttctcggcctgggctgcacaacggaatctaccagggaggttttaaaaacactggtacttgctggaggtggtggcgcctgtctgtaattgcagctgctccagaggctgaggcggaggattgcttgagcccaagagtttcggtttatttgctttttcagagtcttg

SEQ ID NO: 171467 - DNA, 2418 bp, Artificial Sequence
  derived and/or modified sequence
atggcgcagcccctagcctttatattggacgttccagagacaccaggagaccagggccagggaccctcaccatacgacgagagcgaagtgcacgattcctttcagcagttaatccaagaacagagtcagtgtacagcacaggaagggctggagctacagcagcgagaaagagaagtcacaggctctagccagcaaaccctctggcgtccggagggaacacaatccacagccactctcagaatactggctagcatgccttccaggaccattggcaggtcacgaggtgctatcatttcacagtattacaacagaacagtgcagctgaggtgtaggtcttcacgaccactgttgggcaatttcgtgcggtcagcctggccttcactgaggctgtacgatctggaactggaccctaccgctttagaagaggaggagaaacaatccctgctcgtcaaggagctacagtctctggcagttgctcagagagatcacatgctacgcggcatgcctttaagtttggcagagaagaggagcctcagggagaagagtcggacaccccgtgggaagtggaggggccaacctggctctggcggggtctgctcctgctgtggacggcttcggtatgcatgtgttttggccctgcattccctgggattggcactgctgtcggctctgcaagcactgatgccatggcgatatgccttgaaacggattggtgggcagttcggcagcagtgtcctcagttacttcttatttctgaagactctacttgctttcaacgcgctcctgttgttgctattggtggcttttatcatgggccctcaagtagcctttccacctgccctacccgggccggcacctgtgtgtaccggtttggaactgctgaccggcgcaggatgcttcacccataccgtaatgtactacgggcattattctaatgctaccctcaatcagccctgtggctctcccctggacggttcccagtgcactcccagagtgggcggtctgccatataatatgccactcgcctatttgagtaccgtgggagtgtctttttttatcacctgcattactttagtctacagcatggcacattcttttggagaaagctatcgcgtgggctccacgtccggcatccatgccataaccgtattttgctcatgggactataaggttactcaaaagagagcatctaggctccagcaggataatatccgaaccagattaaaggaactgttggccgagtggcagctgagacactctcccagatccgtctgtgggaggctgcggcaggctgccgtgctcggactcgtctggcttctgtgtctcggaacggccctcggatgcgccgtcgccgtgcatgtctttagtgaattcatgatccagtcacctgaagcggctgggcaagaagccgtccttctggtcctcccactggtggtgggcctgctgaaccttggggccccatatttgtgcagagtgctggccgccctggagcctcacgacagccccgtgctcgaggtttatgtagctatctgccggaatctgatcctgaagttggctatcctgggaaccttgtgttaccattggctgggcagacgcgtgggcgtccttcaggggcagtgttgggaagacttcgtggggcaggaactttacaggtttctggtgatggattttgtgctaatgctgctagatactttatttggcgaattggtgtggagaatcatcagtgaaaaaaaacttaagcgacgccggaagccagaatttgatatcgcgaggaacgtgctggagttaatttatggacagactctgacttggctcggggtcctattcagccccctgctgcctgccgtccagatcatcaaactgttgcttgtcttctacgtcaagaagacttctctccttgcaaactgccaggccccacggcgcccttggctggcctcccacatgtccaccgttttcctgaccctcctgtgctttccagcctttctgggggccgctgtatttctctgctatgccgtctggcaggttaagcctagttcaacctgcggtccattccgaactctggacactatgtatgaggcagggcgcgtgtgggtgagacatctggaagccgcaggcccgcgggtgagctggctgccctgggtccatcgctatttaatggagaacacctttttcgtctttctggtgagcgccctgctgttggcagtgatctatctgaatattcaggtggtgcgtggccagcgaaaggtcatatgcctgctaaaggagcagatcagtaacgagggagaggataagattttcctcattaacaagctgcatagtatttatgagcgtaaggagcgggaggagagatccagagtaggcactaccgaggaggccgccgcaccgccagcattactgaccgacgagcaggacgcctag

SEQ ID NO: 171468 - DNA, 2418 bp, Artificial Sequence
  derived and/or modified sequence
atggcccagcctttagcattcatcctagacgtaccggagaccccaggagatcagggccaggggccctcaccctatgacgagtctgaggtgcacgacagtttccagcagttaatccaagaacagagccagtgtacagcccaggagggcttagagctgcaacagcgggagcgcgaggtgactgggagctcccaacagacactatggaggccagaagggacccagtctaccgccacactccgcatactggcctccatgcctagcaggaccattggacggtccagaggagcaataatctcccagtactataataggaccgtgcaactccgttgccgttcatctcgaccccttttgggaaacttcgtccgctctgcatggccatctcttcggttatacgatttagaattagacccaaccgcgttagaggaggaagaaaagcagtcgctgctggtcaaggaactccaatccctggcagtggctcaacgtgatcacatgttgcggggtatgccgttgtctctcgccgaaaagagatctctccgggagaaaagtcgaacacccagaggaaaatggcgaggccaaccggggtccgggggggtgtgttcgtgctgcggaagactccgttatgcatgtgtcctagccctgcattcactgggcctcgcattgctgagcgctcttcaggccctgatgccttggcgatacgccttgaaaaggatcggaggacagttcggaagctcggtactttcatatttcctgtttctgaaaaccctgctggcttttaatgccttgctgctgcttctgctggtggctttcattatggggccccaagtagccttcccccccgccttgccggggcctgcccccgtatgtactgggctggagctactcacaggcgccggctgctttacacacactgtgatgtattacgggcactactcaaacgccacattgaatcaaccttgtggttcccccctggacggcagtcaatgtacccctagggttggcgggctgccctataacatgccactcgcctacctttctacggttggcgtgagctttttcattacatgtattactctggtgtatagcatggctcactcttttggggagtcttatcgcgtaggaagtactagtggcattcatgccattaccgtattctgcagctgggattataaggtgacacagaagcgggcttctaggctacagcaggataatatcaggacccgactgaaagaattacttgcggagtggcagttgagacactcccctaggtctgtctgtggtagattgagacaggccgccgttcttgggttagtgtggctgttgtgccttggaacagccttgggctgcgccgttgccgtgcacgtctttagcgagtttatgatccagagcccagaagcagcaggacaggaggctgtactgcttgtgctgcctttggtagtcggtttgctgaacctgggagccccctatttgtgcagggtcttggccgcgctggaacctcatgattcacccgtactggaagtctatgttgccatatgcaggaacttgatcctgaagttggccatcctgggcaccctgtgttaccactggttggggcgaagggtgggtgtgttgcaaggtcaatgttgggaggactttgtcggccaggagctatataggtttcttgtgatggactttgtgcttatgttgctggacacactctttggcgagctagtgtggcgaatcatctccgaaaagaaattgaagcggagaagaaaacctgagttcgatattgctcgaaatgtgttggagctgatttacggacagaccctgacgtggctgggggtgttatttagcccacttctgcccgccgtccagattattaagctcttgctcgtattctacgtgaagaagaccagtcttctcgcaaactgccaagcccctcgaaggccatggctggcctctcacatgagtacggtgttcctcacactcctttgtttccctgcatttctaggcgcggccgtcttcctgtgttatgcagtgtggcaggttaaaccatctagtacctgtggaccatttagaaccctagacacaatgtacgaggctggaagggtctgggtccgtcaccttgaagcagccggaccccgcgtgagctggctcccctgggtgcaccgctatttgatggagaacacctttttcgtgtttctcgtgagcgcactgctgcttgccgtgatctacctgaacatccaagtagtacgcggccaacgtaaggtgatttgcttactgaaagaacagatatctaacgagggcgaagacaagatctttttaatcaataagcttcatagtatctatgagaggaaggaacgtgaggaacggagccgcgtcggaacaacagaggaagctgcagcacctccagccctgctaaccgatgaacaggacgcttag

SEQ ID NO: 171469 - DNA, 2418 bp, Artificial Sequence
  derived and/or modified sequence
atggcccagcccctggccttcatcctggacgtgcccgagacccccggcgatcagggacagggtcctagtccatacgatgagtccgaagtccatgacagctttcagcagcttattcaagagcagagtcagtgtaccgctcaggagggacttgaactgcagcaacgggaacgagaagtgactggttccagccagcagactttatggcgccctgaggggacccagtccacagccacgcttcgcatcctggcaagtatgccctcccgcacgatcggtagaagccggggagctataatctcccagtattataacagaacggttcagttaagatgtcgctcctcaagacctctgcttggaaatttcgttcggagtgcgtggccctctctgagactctatgacttggaattggaccccaccgccctagaagaggaagagaagcagtcactcctggtgaaagaactgcagagcctcgcagtggcacagcgcgatcacatgctcagaggaatgcccttaagtctggccgaaaagcggagcttacgcgagaaaagcagaaccccccgagggaagtggcgcggtcagcctggtagcggaggagtgtgctcttgctgcggacgcctgaggtatgcatgtgtgctggcactgcattccctgggcctggcccttttaagtgctcttcaggcgctgatgccttggcgttacgccttgaagagaattggcggacagttcggatcatcggtgctctcgtacttcctgttccttaagactctgctggcctttaatgcgctgctcctcctgctgcttgtcgcattcataatgggcccccaggtagcattcccccccgccctgccaggacctgctcctgtgtgcactggactggagctgctaaccggggccggttgcttcacacacacagttatgtactacggtcattattctaatgcaacactgaatcagccctgtggctcgcctctggacggaagccagtgcacacccagggtaggtggcttgccctataatatgcccctcgcttacctctccactgtcggagtgagcttcttcatcacttgtataactctggtctattccatggcccactcatttggggagagttatagagttggatccacttctgggatacacgctattaccgtgttctgctcctgggattacaaggttacccagaaacgggccagccggctgcagcaggataacatccgcacgagactcaaagagctgctcgccgagtggcagctgcgtcacagccctaggtcagtttgcgggcgacttagacaggcagcagttctcggcctcgtctggctgctgtgcctagggacagccctcggctgtgccgtggccgttcacgtgttttcagagtttatgatccaatctcctgaggccgccggccaagaggctgttctacttgtgctaccacttgtcgtaggtctcctgaacctgggggccccctatctgtgtcgggtcctggctgcccttgaaccccacgattcccccgtgctcgaggtttatgtggccatctgtcgcaatttaatcctcaaactggcaattctgggtaccctgtgttatcactggctgggtagaagagtgggcgtgctgcagggacaatgttgggaagacttcgtgggccaggagttatataggtttttggtgatggatttcgtgctgatgctgctcgatactttgtttggtgaactcgtttggcgcatcataagtgagaagaagctcaagagacgtcggaaacctgagttcgacatagctcgtaacgtccttgaactgatttatggccagacattaacatggctgggggtactgttctccccattgctgccggcagtccagattataaagctgcttttggtcttttacgtcaagaagacctctctactcgccaattgtcaggctccacgccgcccttggcttgccagtcacatgagcacagttttccttacgctcctgtgttttccagcattcttgggtgcagccgtcttcctgtgctacgccgtgtggcaggttaaaccatcttcaacatgtggaccattccgaactctcgatactatgtatgaagccggtcgggtgtgggtgagacatctggaagcagccggaccacgggtgtcatggctgccctgggtacatcgataccttatggaaaatacattttttgtgttcctcgtctctgccttgctactggcagtcatttatttgaatatccaggtggtccgcggacagcgcaaggtgatttgcttgttaaaagaacagatcagtaacgagggagaggacaagatattcttaatcaataagcttcacagtatttacgagagaaaggagcgcgaagaacggagccgagtgggtaccactgaggaagctgccgcaccacccgccctgctcactgacgagcaggatgcatag

SEQ ID NO: 171470 - DNA, 2418 bp, Artificial Sequence
  derived and/or modified sequence
atggcccagcccctggccttcatcctggacgtgcccgagacccccggagaccagggtcagggaccctccccatacgacgaaagcgaagtacacgacagtttccagcagctaatacaggaacagtcccagtgtactgctcaggaaggtttagaactgcagcaacgcgagagagaggtgacaggtagtagtcagcagaccctgtggcgcccagagggcacgcaaagcacagctactttacggattctagcctccatgccctcacgcacaatcgggaggtctagaggggccattatcagccagtactataataggactgtccagctgcgctgtaggtctagtcggccactgctgggcaactttgtgaggagtgcatggcccagcttgagattatacgatctagagttagacccaacagcacttgaagaggaagagaagcagagtctgctcgtcaaggagctccagagtttggcggtagctcagcgagaccacatgttgcgcgggatgccgttgagtctggccgagaagcgttcactgagagagaaatcccggacgcctcgcggcaagtggcgcgggcagccgggatccgggggcgtgtgttcgtgctgtgggagactcagatatgcctgtgtcttggcattgcacagcctcggcctcgctctgctgtctgcacttcaagctctcatgccctggagatatgccctgaaaaggataggaggtcagttcggtagtagcgtgttgtcatatttcctgtttctcaagacgctgctagcttttaacgccctgcttctgctactactcgtcgcctttatcatggggcctcaggtggctttcccaccggcccttcccgggccggctcccgtgtgtacagggctcgagctacttacaggtgccggctgcttcacccacaccgtcatgtactatgggcactactcgaacgctaccctcaaccagccttgcgggtccccactggacgggtctcagtgtaccccacgcgttgggggactgccctacaacatgccactcgcctatttgtcaacagttggcgtgtctttcttcatcacctgcatcaccctggtatactccatggcccatagctttggtgaatcttaccgtgtgggcagtacttctgggatccatgccatcactgtattttgctcatgggattacaaggtgacacagaagcgggcctctagactgcagcaggacaatattagaactcgcctaaaagaattgctcgctgaatggcaactgagacactcaccccgatccgtgtgcggtagattgagacaggctgccgttctcggcctcgtctggctgctttgtttaggcacagcgctcggatgcgctgttgcggttcacgttttctctgaatttatgatacagagtcctgaggcggcgggccaagaggcagtcctgctcgttctgcctctggtcgtgggcctgctgaacctgggggccccatacttgtgtcgtgtccttgctgccctggaaccacatgactccccagttctagaggtgtacgtggctatatgccgcaacttgattctcaagctggctatcctgggcaccttgtgttatcattggctgggccggagagttggcgtactacaggggcagtgctgggaggatttcgtcggtcaggagctatatcgcttcctggttatggactttgtgctgatgcttctggataccctcttcggtgagcttgtctggcggattattagcgaaaagaaactgaagcgaagaagaaaacctgagtttgatatcgccagaaacgttctggagctcatttatgggcagacactgacttggttgggggtgttgtttagccctctgctgcctgccgtgcaaatcatcaagctccttctcgtgttctatgtcaaaaaaacctcccttctagcaaattgccaggcgccacgacgcccttggttggctagccatatgagcacagtgtttctgaccttgctgtgttttcccgcatttctcggcgccgcggtgttcctctgctatgccgtgtggcaggtgaaaccttcatccacgtgtggccccttcaggactctcgatacaatgtatgaagcaggccgggtttgggtgaggcacctggaggcagcgggaccacgggtgtcttggctgccttgggtgcaccgctacttgatggagaatacattttttgtcttcctcgtctcagcgcttttactagccgtgatctacctgaatatccaggtggtgcgggggcagcggaaggtcatttgtctccttaaggagcagatttcaaatgagggggaggacaaaatctttctgattaataagctccactctatatatgaacgcaaggagcgggaggagcgcagccgagtgggcacaacagaggaggcagccgccccacctgccttgctcactgatgaacaggacgcctag

SEQ ID NO: 171471 - DNA, 2418 bp, Artificial Sequence
  derived and/or modified sequence
atggcccaacctctggcctttatactggatgtaccagaaacccccggagaccaagggcaaggacccagtccatacgacgaatcggaggtccatgacagctttcaacagttgattcaggagcagtctcaatgcacagcacaggagggactggagcttcagcaacgtgagcgggaagtgactggttcttcacagcagaccctttggagaccagagggaacccagtccacggcaacccttcgtatcttggcctccatgccgtcacgcaccattggaaggtccaggggagcaatcataagccagtattacaataggaccgttcaactgagatgccgctccagtcggcctttgttggggaattttgtcagaagcgcttggccttccctgcgactgtatgatctggagctcgacccgaccgcactcgaagaggaggaaaaacaaagtctcttggtgaaggaactgcagtcacttgctgtcgcccagcgcgatcatatgctgagaggtatgcccctttcactggctgaaaaacgaagcctgcgcgaaaagtcacgaactcctcggggaaaatggcgtggacagcccggttccggcggagtgtgttcttgctgtgggcgattaaggtacgcttgcgtgctggccttacactctctgggcttggcgctgctttcagcgctacaggccctgatgccgtggcgctacgctctcaaaaggatagggggacagtttggatcgtctgtcctgagttatttcttgtttctgaagaccttgctagcatttaatgccttattattgttgcttctggtggcctttatcatgggaccccaggtcgccttcccccctgcattgcctgggcctgcgcctgtctgtaccgggctggagctcctgaccggagccggatgcttcactcataccgtgatgtactatggacactattccaatgccacgcttaatcagccatgcggcagtcccttggatgggtctcagtgcactcctagagtcggcggacttccatacaatatgcctctggcgtacctttccactgttggagtctcttttttcatcacttgtatcactcttgtgtatagcatggctcattcattcggtgagtcgtatagggtcggtagcacaagcggtatccacgcaattacggtgttctgctcctgggactacaaggtgacccagaaacgggcaagtcgcctgcagcaggacaacatccgaacgcgcctgaaggaactcctcgccgaatggcagttgagacactcccccagaagtgtctgcggtcggctgagacaggccgctgttctgggccttgtttggttactatgcttaggaactgcattgggctgtgcggtcgcagtccacgtcttctccgaattcatgatccaaagccctgaagctgccggtcaagaggctgttttgctcgtgctgccacttgtggttggcttgctgaatctaggcgctccttatctttgtcgggtgctggccgcactcgagccccacgactcccctgtcttagaggtttatgttgcaatttgccgaaatctgatcctgaagcttgctatcttaggtactctttgctatcactggttgggacggagggttggcgtattgcagggtcagtgttgggaagatttcgtcggccaggagctgtacagattcttggtaatggatttcgttctaatgttattagacacactcttcggcgaactggtgtggcgcatcatctctgaaaagaagctgaagcgaaggcggaagcctgagtttgatatcgctagaaatgtcttggagttaatctacggacaaacattgacctggctgggggttttgttttcccctctcttacctgcagtgcaaatcattaagctcctgctagtcttctatgtcaaaaagacaagcctgcttgctaactgccaggcccctcgcagaccgtggctggcgagccacatgagtactgtctttctcacattactatgcttccccgcattcctgggcgctgcagtcttcttatgctatgctgtctggcaagtaaagccatcatctacctgcggaccttttcggacgctcgataccatgtacgaggcaggacgcgtttgggttagacacctggaggcagctgggcctcgagtgtcctggctcccctgggtccacaggtatctgatggagaatacttttttcgtgttccttgtgagcgcccttctcctggctgttatctaccttaatatccaagtggtgagaggacaaaggaaggtcatctgtctgctgaaggaacaaatttcaaacgagggcgaagataagatcttcttgatcaacaaactgcacagcatatacgagaggaaagagagggaggagaggtccagagtgggaaccactgaggaagccgctgcaccacccgcactcttaactgacgaacaggacgcttag

SEQ ID NO: 171472 - DNA, 2418 bp, Artificial Sequence
  derived and/or modified sequence
atggcccagccactcgccttcattctcgacgttcctgagacgcccggtgatcaggggcaggggccatccccttacgacgaatctgaagtccacgactcatttcaacagctgattcaggagcagtcacagtgcaccgcacaggaagggcttgaacttcagcagcgagagcgagaggtcactgggagctcccaacagacgctctggaggccagaaggcacccaaagcactgcgacactgcgtatcctcgcatcaatgccatcaagaactatagggagaagccggggagccattatcagccagtactataaccggacagtgcaactcagatgtcgttccagtcgaccactccttggaaactttgtgcgttctgcgtggccatctctccggctgtacgatctggagttagatcctaccgcactggaagaggaggaaaaacagagcttactcgtgaaggagttgcagtccctggcagtcgcacaacgggaccatatgttgcggggaatgccactgtcacttgccgaaaagaggtccttgcgagagaagtcacggacgccaagaggcaaatggagagggcagccaggttccgggggagtctgctcatgctgcggcaggctcagatatgcttgcgtattggccctgcattccttggggttagcactgctcagtgctctccaggctctaatgccctggagatatgcccttaagaggatcggcggtcagtttggatcgtctgtgctctcctatttcttgtttttgaaaacactgttggcatttaacgcactgctgcttctcctcttggtggcctttattatgggtccccaggttgcttttcccccagctttgccaggccctgcccctgtctgtaccggactggagctgctaacaggtgcagggtgtttcacacataccgtgatgtactacgggcactactcaaacgctacccttaaccagccctgcgggtctcctctcgacggttcgcagtgcacccccagagtggggggattgccctacaacatgcctctagcttatctctcaacagtgggagtctctttctttatcacctgtattactttggtctactccatggcacactcatttggagagtcgtaccgagtgggcagcaccagtggtatccacgccattaccgtgttctgcagctgggactacaaggtgacccagaagcgcgcatcccgactgcagcaggacaatatccgcacccgcctaaaggagctcctggccgaatggcagctgcggcactcaccccgatctgtctgtggcaggcttcggcaagctgcagtgctgggtctggtttggctactgtgcctgggtacagctctggggtgtgccgtagccgtgcatgtgtttagcgagtttatgatccagagtccggaagcagctggtcaggaggcagtgctgctcgttctgcctctggtggtgggcttgctgaacctgggtgcgccatacctgtgtcgtgtgctcgctgccctcgaacctcacgactcaccagtcctggaggtgtacgtcgcaatttgccgaaatctgatactgaaactggcaatcctcggaactctttgttatcattggctcggtcgaagggttggagtgcttcagggacagtgctgggaggatttcgttgggcaggagctctatcgtttcctggtcatggactttgtgctgatgttgttggacaccctattcggggagcttgtgtggcggataatctccgaaaaaaagttaaagagaaggcgcaagccagagtttgacatcgcgcgtaatgtgttggaactgatctacggccagacattgacgtggctgggagtattgttctcaccattgctcccggctgtgcagattatcaaactgctgctggtgttctatgttaagaagacaagtctcttagctaactgccaagcaccgcgacgaccttggttggcctcccatatgtctactgtgttcctgacacttttatgctttcccgcattccttggcgcagctgtgtttctgtgttacgccgtttggcaagtgaagccaagcagcacttgcggacctttcaggactctcgatacgatgtatgaagccggaagggtgtgggtgagacatctcgaggctgccggaccacgcgttagctggcttccatgggtgcaccgatacttaatggaaaacaccttcttcgtgttcttggtgagcgcactgcttttggcagtgatttatctgaacatacaggttgttcggggtcagagaaaggttatttgccttctcaaggagcagatatccaacgaaggtgaagacaagatcttcctaatcaataagttacattctatttatgaaagaaaagaacgcgaggagcgctccagggtgggcaccacagaggaggcagccgctcctcctgccctcctgacagatgagcaggacgcctag

SEQ ID NO: 171473 - DNA, 2789 bp, Artificial Sequence
  derived and/or modified sequence
aggaagcggaggaaggtgaagtaggaccgaattcctgtgccgaagaggcctgcagtgggagagcaggatgggggctccggaggtggcgcccaggctctgagctaccctaggtctgcagactagcgggcattggccagagacatggcccagccactggccttcatcctcgatgtccctgagaccccaggggaccagggccagggccccagcccctatgatgaaagcgaagtgcacgactccttccagcagctcatccaggagcagagccagtgcacggcccaggaggggctggagctgcagcagagagagcgggaggtgacaggaagtagccagcagacactctggcggcccgagggcacccagagcacggccacactccgcatcctggccagcatgcccagccgcaccattggccgcagccgaggtgccatcatctcccagtactacaaccgcacggtgcagcttcggtgcaggagcagccggcccctgctcgggaactttgtccgctccgcctggcccagcctccgcctgtacgacctggagctggaccccacggccctggaggaggaggagaagcagagcctcctggtgaaggagctccagagcctggcagtggcacagcgggaccacatgcttcgcgggatgcccttaagcctggctgagaaacgcagcctgcgagagaagagcaggaccccgagggggaagtggaggggccagccgggcagcggcggggtctgctcctgctgtggccggctcagatatgcctgcgtgctggccttgcacagcctgggcctggcgctgctctccgccctgcaggccctgatgccgtggcgctacgccctgaagcgcatcgggggccagttcggctccagcgtgctctcctacttcctctttctcaagaccctgctggctttcaatgccctcctgctgctgctgctggtggccttcatcatgggccctcaggtcgccttcccacccgccctgccgggccctgcccccgtctgcacaggcctggagctcctcacaggcgcgggttgcttcacccacaccgtcatgtactacggccactacagtaacgccacgctgaaccagccgtgtggcagccccctggatggcagccagtgcacacccagggtgggtggcctgccctacaacatgcccctggcctacctctccactgtgggcgtgagcttctttatcacctgcatcaccctggtgtacagcatggctcactctttcggggagagctaccgggtgggcagcacctctggcatccacgccatcaccgtcttctgctcctgggactacaaggtgacgcagaagcgggcctcccgcctccagcaggacaatattcgcacccggctgaaggagctgctggccgagtggcagctgcggcacagccccaggagcgtgtgcgggaggctgcggcaggcggctgtgctggggcttgtgtggctgctgtgtctggggaccgcgctgggctgcgccgtggccgtccacgtcttctcggagttcatgatccagagtccagaggctgctggccaggaggctgtgctgctggtcctgcccctggtggttggcctcctcaacctgggggccccctacctgtgccgtgtcctggccgccctggagccgcatgactccccggtactggaggtgtacgtggccatctgcaggaacctcatcctcaagctggccatcctggggacactgtgctaccactggctgggccgcagggtgggcgtcctgcagggccagtgctgggaggattttgtgggccaggagctgtaccggttcctggtgatggacttcgtcctcatgttgctggacacgctttttggggaactggtgtggaggattatctccgagaagaagctgaagaggaggcggaagccggagtttgacattgcccggaatgtcctggagctgatttatgggcagactctgacctggctgggggtgctcttctcgcccctcctccccgccgtgcagatcatcaagctgctgctcgtcttctatgtcaagaagaccagccttctggccaactgccaggcgccgcgccggccctggctggcctcacacatgagcaccgtcttcctcacgctgctctgcttccccgccttcctgggcgccgctgtcttcctctgctacgccgtctggcaggtgaagccctcgagcacctgcggccccttccggaccctggacaccatgtacgaggccggcagggtgtgggtgcgccacctggaggcggcaggccccagggtctcctggctgccctgggtgcaccggtacctgatggaaaacaccttctttgtcttcctggtgtcagccctgctgctggccgtgatctacctcaacatccaggtggtgcggggccagcgcaaggtcatctgcctgctcaaggagcagatcagcaatgagggtgaggacaaaatcttcttaatcaacaagcttcactccatctacgagaggaaggagagggaggagaggagcagggttgggacaaccgaggaggctgcggcaccccctgccctgctcacagatgaacaggatgcctagggggacggcgatgggcctcacgggcccgcccagcaccctgagaccacactgttgcctcccagtgaccctgctgggacaccaggacaaggaagacagtttcgcctctcgaaagccgcagctgcgcctaggctggagctggaagggtgggtgaatccggcttgggcatccccaatgaactctgccctgcctgggactctatttattctgattaaaggggttttgcaaatggg

SEQ ID NO: 171474 - DNA, 2891 bp, Artificial Sequence
  derived and/or modified sequence
gtgcggctactcccccggccccggcagacctgcgactggcccagtcgcccctggggccctttgccactcccttggcaaggagagccgagacctcagttcccggcggctcttgcggggcacaggtgagccctggctgcgcgcgcggcccctcctccccggcgcctcccagatgggggctccggaggtggcgcccaggctctgagctaccctaggtctgcagactagcgggcattggccagagacatggcccagccactggccttcatcctcgatgtccctgagaccccaggggaccagggccagggccccagcccctatgatgaaagcgaagtgcacgactccttccagcagctcatccaggagcagagccagtgcacggcccaggaggggctggagctgcagcagagagagcgggaggtgacaggaagtagccagcagacactctggcggcccgagggcacccagagcacggccacactccgcatcctggccagcatgcccagccgcaccattggccgcagccgaggtgccatcatctcccagtactacaaccgcacggtgcagcttcggtgcaggagcagccggcccctgctcgggaactttgtccgctccgcctggcccagcctccgcctgtacgacctggagctggaccccacggccctggaggaggaggagaagcagagcctcctggtgaaggagctccagagcctggcagtggcacagcgggaccacatgcttcgcgggatgcccttaagcctggctgagaaacgcagcctgcgagagaagagcaggaccccgagggggaagtggaggggccagccgggcagcggcggggtctgctcctgctgtggccggctcagatatgcctgcgtgctggccttgcacagcctgggcctggcgctgctctccgccctgcaggccctgatgccgtggcgctacgccctgaagcgcatcgggggccagttcggctccagcgtgctctcctacttcctctttctcaagaccctgctggctttcaatgccctcctgctgctgctgctggtggccttcatcatgggccctcaggtcgccttcccacccgccctgccgggccctgcccccgtctgcacaggcctggagctcctcacaggcgcgggttgcttcacccacaccgtcatgtactacggccactacagtaacgccacgctgaaccagccgtgtggcagccccctggatggcagccagtgcacacccagggtgggtggcctgccctacaacatgcccctggcctacctctccactgtgggcgtgagcttctttatcacctgcatcaccctggtgtacagcatggctcactctttcggggagagctaccgggtgggcagcacctctggcatccacgccatcaccgtcttctgctcctgggactacaaggtgacgcagaagcgggcctcccgcctccagcaggacaatattcgcacccggctgaaggagctgctggccgagtggcagctgcggcacagccccaggagcgtgtgcgggaggctgcggcaggcggctgtgctggggcttgtgtggctgctgtgtctggggaccgcgctgggctgcgccgtggccgtccacgtcttctcggagttcatgatccagagtccagaggctgctggccaggaggctgtgctgctggtcctgcccctggtggttggcctcctcaacctgggggccccctacctgtgccgtgtcctggccgccctggagccgcatgactccccggtactggaggtgtacgtggccatctgcaggaacctcatcctcaagctggccatcctggggacactgtgctaccactggctgggccgcagggtgggcgtcctgcagggccagtgctgggaggattttgtgggccaggagctgtaccggttcctggtgatggacttcgtcctcatgttgctggacacgctttttggggaactggtgtggaggattatctccgagaagaagctgaagaggaggcggaagccggagtttgacattgcccggaatgtcctggagctgatttatgggcagactctgacctggctgggggtgctcttctcgcccctcctccccgccgtgcagatcatcaagctgctgctcgtcttctatgtcaagaagaccagccttctggccaactgccaggcgccgcgccggccctggctggcctcacacatgagcaccgtcttcctcacgctgctctgcttccccgccttcctgggcgccgctgtcttcctctgctacgccgtctggcaggtgaagccctcgagcacctgcggccccttccggaccctggacaccatgtacgaggccggcagggtgtgggtgcgccacctggaggcggcaggccccagggtctcctggctgccctgggtgcaccggtacctgatggaaaacaccttctttgtcttcctggtgtcagccctgctgctggccgtgatctacctcaacatccaggtggtgcggggccagcgcaaggtcatctgcctgctcaaggagcagatcagcaatgagggtgaggacaaaatcttcttaatcaacaagcttcactccatctacgagaggaaggagagggaggagaggagcagggttgggacaaccgaggaggctgcggcaccccctgccctgctcacagatgaacaggatgcctagggggacggcgatgggcctcacgggcccgcccagcaccctgagaccacactgttgcctcccagtgaccctgctgggacaccaggacaaggaagacagtttcgcctctcgaaagccgcagctgcgcctaggctggagctggaagggtgggtgaatccggcttgggcatccccaatgaactctgccctgcctgggactctatttattctgattaaaggggttttgcaaatggg

SEQ ID NO: 171475 - protein, 399 aa, Artificial Sequence
  derived and/or modified sequence
MGILLGLLLLGHLTVDTYGRPILEVPESVTGPWKGDVNLPCTYDPLQGYTQVLVKWLVQRGSDPVTIFLRDSSGDHIQQAKYQGRLHVSHKVPGDVSLQLSTLEMDDRSHYTCEVTWQTPDGNQVVRDKITELRVQKLSVSKPTVTTGSGYGFTVPQGMRISLQCQARGSPPISYIWYKQQTNNQEPIKVATLSTLLFKPAVIADSGSYFCTAKGQVGSEQHSDIVKFVVKDSSKLLKTKTEAPTTMTYPLKATSTVKQSWDWTTDMDGYLGETSAGPGKSLPVFAIILIISLCCMVVFTMAYIMLCRKTSQQEHVYEAARAHAREANDSGETMRVAIFASGCSSDEPTSQNLGNNYSDEPCIGQEYQIIAQINGNYARLLDTVPLDYEFLATEGKSVC

SEQ ID NO: 171476 - protein, 201 aa, Artificial Sequence
  derived and/or modified sequence
MGILLGLLLLGHLTVDTYGRPILEVPESVTGPWKGDVNLPCTYDPLQGYTQVLVKWLVQRGSDPVTTVTTGSGYGFTVPQGMRISLQCQARGSPPISYIWYKQQTNNQEPIKVATLSTLLFKPAVIADSGSYFCTAKGQVGSEQHSDIVKFVVKDSSKLLKTKTEAPTTMTYPLKATSTVKQSWDWTTDMDGYLGETSAGP

SEQ ID NO: 171477 - protein, 321 aa, Artificial Sequence
  derived and/or modified sequence
MGILLGLLLLGHLTVDTYGRPILEVPESVTGPWKGDVNLPCTYDPLQGYTQVLVKWLVQRGSDPVTIFLRDSSGDHIQQAKYQGRLHVSHKVPGDVSLQLSTLEMDDRSHYTCEVTWQTPDGNQVVRDKITELRVQKLSVSKPTVTTGSGYGFTVPQGMRISLQCQARGSPPISYIWYKQQTNNQEPIKVATLSTLLFKPAVIADSGSYFCTAKGQVGSEQHSDIVKFVVKDSSKLLKTKTEAPTTMTYPLKATSTVKQSWDWTTDMDGYLGETSAGPGKSLPVFAIILIISLCCMVVFTMAYIMLCRKTSQQEHVYEAAR

SEQ ID NO: 171478 - DNA, 1200 bp, Artificial Sequence
  derived and/or modified sequence
atgggcatcctgctgggcctgctgctgctgggccacctgaccgtggacacctacggcagacccatcctggaggtgcccgagagcgtgaccggcccctggaagggcgacgtgaacctgccctgcacctacgaccccctgcagggctacacccaggtgctggtgaagtggctggtgcagagaggcagcgaccccgtgaccatcttcctgagagacagcagcggcgaccacatccagcaggccaagtaccagggcagactgcacgtgagccacaaggtgcccggcgacgtgagcctgcagctgagcaccctggagatggacgacagaagccactacacctgcgaggtgacctggcagacccccgacggcaaccaggtggtgagagacaagatcaccgagctgagagtgcagaagctgagcgtgagcaagcccaccgtgaccaccggcagcggctacggcttcaccgtgccccagggcatgagaatcagcctgcagtgccaggccagaggcagcccccccatcagctacatctggtacaagcagcagaccaacaaccaggagcccatcaaggtggccaccctgagcaccctgctgttcaagcccgccgtgatcgccgacagcggcagctacttctgcaccgccaagggccaggtgggcagcgagcagcacagcgacatcgtgaagttcgtggtgaaggacagcagcaagctgctgaagaccaagaccgaggcccccaccaccatgacctaccccctgaaggccaccagcaccgtgaagcagagctgggactggaccaccgacatggacggctacctgggcgagaccagcgccggccccggcaagagcctgcccgtgttcgccatcatcctgatcatcagcctgtgctgcatggtggtgttcaccatggcctacatcatgctgtgcagaaagaccagccagcaggagcacgtgtacgaggccgccagagcccacgccagagaggccaacgacagcggcgagaccatgagagtggccatcttcgccagcggctgcagcagcgacgagcccaccagccagaacctgggcaacaactacagcgacgagccctgcatcggccaggagtaccagatcatcgcccagatcaacggcaactacgccagactgctggacaccgtgcccctggactacgagttcctggccaccgagggcaagagcgtgtgctag

SEQ ID NO: 171479 - DNA, 1200 bp, Artificial Sequence
  derived and/or modified sequence
atgggcatactcctggggctcctgctgttgggccatctgaccgtggacacatacggaagaccaatcctggaggtaccagagtctgttactggcccttggaagggggacgtgaacctgccgtgtacctacgatccattgcagggctatactcaagtactggtgaagtggttagtgcagcgaggctccgatccagttaccatcttccttagggactcctccggtgatcatattcagcaggcaaagtatcagggcagactgcacgtatcgcacaaggtcccaggcgacgtgagcctccagctcagcactctggaaatggatgatcgaagccattatacttgcgaagtgacttggcaaacccccgatggcaaccaggtcgtcagagataaaatcaccgagttgcgggtgcagaagctttctgtctccaaacccacagtaacgactgggtccggatacggctttacagtccctcaaggcatgagaattagcctgcagtgccaggcccggggttccccccctatctcatatatttggtataaacagcagaccaacaaccaggaacctatcaaagttgctaccctgtccacactgctgttcaaaccagcggtaattgcagactctggtagctatttctgcacagctaaggggcaagtcggaagtgagcagcacagcgacatagtgaagttcgtcgtcaaagattcttctaagctgttgaagactaagactgaagccccaacgacaatgacataccccctgaaggcaacatctacggttaaacaaagttgggactggactacagacatggacgggtacctgggggagacaagtgctggaccggggaaaagtctccctgttttcgctatcattctgattatctctctatgctgtatggtcgtctttaccatggcttatattatgttgtgccgcaagacttctcaacaggaacatgtttatgaggctgctcgggcccacgcccgcgaagcaaacgactccggggaaactatgagagtcgctattttcgccagcggctgttccagcgatgagccgacttctcagaacctcggaaacaactacagtgatgagccttgtattggccaggaataccagattattgcgcagatcaatgggaattacgcaaggttactcgacaccgtccctctagattatgagtttttggctactgaaggcaagagcgtgtgttag

SEQ ID NO: 171480 - DNA, 1200 bp, Artificial Sequence
  derived and/or modified sequence
atgggcatcctgctgggcctgctgctgctgggccacctgactgtggacacctacggccggcccatcctggaggtgcctgagagcgtgacaggcccctggaagggagatgtgaacctgccctgcacctatgaccccctgcagggctacacccaggtgctggtgaagtggctggtgcagaggggcagtgaccctgtgaccatcttcctgcgggacagcagcggggaccacatccagcaggccaagtaccagggccgcctgcacgtgagccacaaggtgcctggagatgtgtccctgcagctgagcaccctggagatggatgacaggagccactacacctgtgaggtgacctggcagaccccagatggcaaccaggtggtgcgggacaagatcacagagctgcgggtgcagaagctgtctgtgtccaagcccaccgtgaccactggaagtggctacggcttcaccgtgccccagggcatgaggatcagcctgcagtgccaggcccggggcagcccccccatctcctacatctggtacaagcagcagaccaacaaccaggagcccatcaaggtggccaccctgagcaccctgctcttcaagccagctgtgattgctgacagcggcagctacttctgcacagccaagggccaggtgggcagcgagcagcacagcgacatcgtgaagtttgtggtgaaggacagcagcaagctgctgaagaccaagacagaggcccccaccaccatgacctaccccctgaaggccaccagcacagtgaagcagagctgggactggaccacagacatggatggctacctgggggagaccagcgctggccctgggaagagcctgcctgtgtttgccatcatcctgatcatcagcctgtgctgcatggtggtgttcaccatggcctacatcatgctgtgcaggaagaccagccagcaggagcacgtgtatgaagctgcccgggcccacgcccgggaggccaatgacagcggggagaccatgagggtggccatctttgccagcggctgcagcagtgatgagcccaccagccagaacctgggcaacaactacagtgatgagccctgcatcggccaggagtaccagatcatcgcccagatcaatggaaattatgcccggctgctggacacagtgcccctggactatgagttcctggccacagagggcaagtctgtgtgctag

SEQ ID NO: 171481 - DNA, 1200 bp, Artificial Sequence
  derived and/or modified sequence
atgggcatcctgctgggcctgctgctgctgggccacctgaccgtggacacttatgggcggccgatcctcgaggtgccagagtctgtgacaggaccctggaaaggcgatgtcaatttgccatgtacctatgatcctctccagggatatacacaggttctggtgaaatggctggtgcagcggggatcagatcctgtgactatcttcctccgggattccagtggggatcatattcagcaagccaaataccaggggcgtctgcacgtctcccataaggtgcccggagacgtgtcacttcaactctccacactggagatggacgaccgctcgcattacacctgtgaagttacttggcagaccccagacggaaatcaggtagtgcgagacaaaataacagaacttcgggttcagaagctgtcggtttcaaaacccacagtgacaaccgggtctggatatgggttcacagtacctcagggcatgcggatatccctgcagtgccaagcacgtggtagcccccctatctcctacatctggtataaacagcagacaaataatcaggaacccatcaaagtggcaactcttagtacactgttattcaagccagccgtgatcgctgattccggcagctacttctgcacagcaaagggccaggtggggtctgaacaacacagcgatatcgtgaaattcgtcgttaaggactctagcaagctgctgaaaacaaagactgaagcgcctaccactatgacctacccgttgaaggctacttccacagttaagcagtcctgggactggacaactgatatggacggctatctgggcgagacatctgccggacccggaaaaagcctgcccgtctttgcaattatccttattatctccttgtgttgcatggttgtctttacaatggcttacattatgttgtgtcggaagacctctcaacaggagcacgtctatgaagccgctagggcccacgctagagaagctaacgatagcggggagactatgagagtagctatcttcgccagtggttgctcctccgacgagcccacgtcccaaaatctgggaaataattactcggatgaaccttgcattgggcaggagtaccagatcattgcgcagattaacggcaactatgctcgactgctagacaccgtgccactggactacgagttccttgctactgagggcaaatcagtgtgctag

SEQ ID NO: 171482 - DNA, 1200 bp, Artificial Sequence
  derived and/or modified sequence
atgggcattctcttgggactcttattgttaggacacctgactgttgatacctatgggaggccaatcctggaggtaccagagagcgtcacagggccatggaagggagatgtaaacctcccctgtacttatgaccccctgcagggttatacccaggtactggttaagtggctggttcagaggggctccgatcctgtcaccatctttctgcgcgatagttcaggggatcacatccagcaagccaagtaccaaggtcgtctgcacgtcagccataaggtaccaggtgatgtttctttgcagttaagtaccttggagatggatgatcgctcccattacacttgcgaggtaacttggcagacccctgatggaaatcaggttgtgcgagataaaatcaccgaacttagagtgcagaaactgtcagtgtccaagccaactgttaccaccggtagcggatacggtttcactgtgccgcaggggatgagaatttccctgcagtgtcaagctagaggatccccacctatatcttacatatggtataaacaacagacaaacaaccaagaacccataaaagtggccacattatctaccctgctgtttaagccagcggtgatcgccgattctggcagctatttttgtaccgcaaaaggacaagtggggtccgagcagcatagcgacatcgtgaagtttgtagtcaaagactctagcaagctactgaagacgaaaaccgaagcgcctacgaccatgacctatccgctgaaggcaacatctactgttaaacagagctgggattggacaactgacatggatggctatctcggcgagacatctgccggaccaggtaagagtctcccagtgttcgcgatcatcttgatcatcagtctgtgctgcatggttgtgttcacgatggcatacataatgttatgccggaagacaagccagcaggagcatgtatatgaggctgctcgggctcatgctcgcgaggcgaatgatagcggagagacaatgcgggttgccatcttcgccagtgggtgttcctctgatgaaccgacctcacagaatctaggcaataattatagcgatgagccctgtattggacaggagtatcagatcatcgcccagattaacgggaattatgctaggcttctggacaccgttccactggattacgagttcttggcaactgaggggaagagcgtatgttag

SEQ ID NO: 171483 - DNA, 1834 bp, Artificial Sequence
  derived and/or modified sequence
atagggaaggaagggaagtaagcagtcacagacgctggcggccaccagaagtttgagcctctttggtagcaggaggctggaagaaaggacagaagtagctctggctgtgatggggatcttactgggcctgctactcctggggcacctaacagtggacacttatggccgtcccatcctggaagtgccagagagtgtaacaggaccttggaaaggggatgtgaatcttccctgcacctatgaccccctgcaaggctacacccaagtcttggtgaagtggctggtacaacgtggctcagaccctgtcaccatctttctacgtgactcttctggagaccatatccagcaggcaaagtaccagggccgcctgcatgtgagccacaaggttccaggagatgtatccctccaattgagcaccctggagatggatgaccggagccactacacgtgtgaagtcacctggcagactcctgatggcaaccaagtcgtgagagataagattactgagctccgtgtccagaaactctctgtctccaagcccacagtgacaactggcagcggttatggcttcacggtgccccagggaatgaggattagccttcaatgccaggctcggggttctcctcccatcagttatatttggtataagcaacagactaataaccaggaacccatcaaagtagcaaccctaagtaccttactcttcaagcctgcggtgatagccgactcaggctcctatttctgcactgccaagggccaggttggctctgagcagcacagcgacattgtgaagtttgtggtcaaagactcctcaaagctactcaagaccaagactgaggcacctacaaccatgacataccccttgaaagcaacatctacagtgaagcagtcctgggactggaccactgacatggatggctaccttggagagaccagtgctgggccaggaaagagcctgcctgtctttgccatcatcctcatcatctccttgtgctgtatggtggtttttaccatggcctatatcatgctctgtcggaagacatcccaacaagagcatgtctacgaagcagccagggcacatgccagagaggccaacgactctggagaaaccatgagggtggccatcttcgcaagtggctgctccagtgatgagccaacttcccagaatctgggcaacaactactctgatgagccctgcataggacaggagtaccagatcatcgcccagatcaatggcaactacgcccgcctgctggacacagttcctctggattatgagtttctggccactgagggcaaaagtgtctgttaaaaatgccccattaggccaggatctgctgacataattgcctagtcagtccttgccttctgcatggccttcttccctgctacctctcttcctggatagcccaaagtgtccgcctaccaacactggagccgctgggagtcactggctttgccctggaatttgccagatgcatctcaagtaagccagctgctggatttggctctgggcccttctagtatctctgccgggggcttctggtactcctctctaaataccagagggaagatgcccatagcactaggacttggtcatcatgcctacagacactattcaactttggcatcttgccaccagaagacccgagggaggctcagctctgccagctcagaggaccagctatatccaggatcatttctctttcttcagggccagacagcttttaattgaaattgttatttcacaggccagggttcagttctgctcctccactataagtctaatgttctgactctctcctggtgctcaataaatatctaatcataacagcaa

SEQ ID NO: 171484 - protein, 570 aa, Artificial Sequence
  derived and/or modified sequence
MAFRGWRPPPPPLLLLLLWVTGQAAPVAGLGSDAELQIERRFVPDECPRTVRSGDFVRYHYVGTFPDGQKFDSSYDRDSTFNVFVGKGQLITGMDQALVGMCVNERRFVKIPPKLAYGNEGVSGVIPPNSVLHFDVLLMDIWNSEDQVQIHTYFKPPSCPRTIQVSDFVRYHYNGTFLDGTLFDSSHNRMKTYDTYVGIGWLIPGMDKGLLGMCVGEKRIITIPPFLAYGEDGDGKDIPGQASLVFDVALLDLHNPKDSISIENKVVPENCERISQSGDFLRYHYNGTLLDGTLFDSSYSRNRTFDTYIGQGYVIPGMDEGLLGVCIGEKRRIVVPPHLGYGEEGRGNIPGSAVLVFDIHVIDFHNPSDSISITSHYKPPDCSVLSKKGDYLKYHYNASLLDGTLLDSTWNLGKTYNIVLGSGQVVLGMDMGLREMCVGEKRTVIIPPHLGYGEAGVDGEVPGSAVLVFDIELLELVAGLPEGYMFIWNGEVSPNLFEEIDKDGNGEVLLEEFSEYIHAQVASGKGKLAPGFDAELIVKNMFTNQDRNGDGKVTAEEFKLKDQEAKHDEL

SEQ ID NO: 171485 - protein, 432 aa, Artificial Sequence
  derived and/or modified sequence
MDIWNSEDQVQIHTYFKPPSCPRTIQVSDFVRYHYNGTFLDGTLFDSSHNRMKTYDTYVGIGWLIPGMDKGLLGMCVGEKRIITIPPFLAYGEDGDGKDIPGQASLVFDVALLDLHNPKDSISIENKVVPENCERISQSGDFLRYHYNGTLLDGTLFDSSYSRNRTFDTYIGQGYVIPGMDEGLLGVCIGEKRRIVVPPHLGYGEEGRGNIPGSAVLVFDIHVIDFHNPSDSISITSHYKPPDCSVLSKKGDYLKYHYNASLLDGTLLDSTWNLGKTYNIVLGSGQVVLGMDMGLREMCVGEKRTVIIPPHLGYGEAGVDGEVPGSAVLVFDIELLELVAGLPEGYMFIWNGEVSPNLFEEIDKDGNGEVLLEEFSEYIHAQVASGKGKLAPGFDAELIVKNMFTNQDRNGDGKVTAEEFKLKDQEAKHDEL

SEQ ID NO: 171486 - DNA, 1713 bp, Artificial Sequence
  derived and/or modified sequence
atggccttcagaggctggagacccccccccccccccctgctgctgctgctgctgtgggtgaccggccaggccgcccccgtggccggcctgggcagcgacgccgagctgcagatcgagagaagattcgtgcccgacgagtgccccagaaccgtgagaagcggcgacttcgtgagataccactacgtgggcaccttccccgacggccagaagttcgacagcagctacgacagagacagcaccttcaacgtgttcgtgggcaagggccagctgatcaccggcatggaccaggccctggtgggcatgtgcgtgaacgagagaagattcgtgaagatcccccccaagctggcctacggcaacgagggcgtgagcggcgtgatcccccccaacagcgtgctgcacttcgacgtgctgctgatggacatctggaacagcgaggaccaggtgcagatccacacctacttcaagccccccagctgccccagaaccatccaggtgagcgacttcgtgagataccactacaacggcaccttcctggacggcaccctgttcgacagcagccacaacagaatgaagacctacgacacctacgtgggcatcggctggctgatccccggcatggacaagggcctgctgggcatgtgcgtgggcgagaagagaatcatcaccatcccccccttcctggcctacggcgaggacggcgacggcaaggacatccccggccaggccagcctggtgttcgacgtggccctgctggacctgcacaaccccaaggacagcatcagcatcgagaacaaggtggtgcccgagaactgcgagagaatcagccagagcggcgacttcctgagataccactacaacggcaccctgctggacggcaccctgttcgacagcagctacagcagaaacagaaccttcgacacctacatcggccagggctacgtgatccccggcatggacgagggcctgctgggcgtgtgcatcggcgagaagagaagaatcgtggtgcccccccacctgggctacggcgaggagggcagaggcaacatccccggcagcgccgtgctggtgttcgacatccacgtgatcgacttccacaaccccagcgacagcatcagcatcaccagccactacaagccccccgactgcagcgtgctgagcaagaagggcgactacctgaagtaccactacaacgccagcctgctggacggcaccctgctggacagcacctggaacctgggcaagacctacaacatcgtgctgggcagcggccaggtggtgctgggcatggacatgggcctgagagagatgtgcgtgggcgagaagagaaccgtgatcatccccccccacctgggctacggcgaggccggcgtggacggcgaggtgcccggcagcgccgtgctggtgttcgacatcgagctgctggagctggtggccggcctgcccgagggctacatgttcatctggaacggcgaggtgagccccaacctgttcgaggagatcgacaaggacggcaacggcgaggtgctgctggaggagttcagcgagtacatccacgcccaggtggccagcggcaagggcaagctggcccccggcttcgacgccgagctgatcgtgaagaacatgttcaccaaccaggacagaaacggcgacggcaaggtgaccgccgaggagttcaagctgaaggaccaggaggccaagcacgacgagctgtag

SEQ ID NO: 171487 - DNA, 1299 bp, Artificial Sequence
  derived and/or modified sequence
atggacatctggaacagcgaggaccaggtgcagatccacacctacttcaagccccccagctgccccagaaccatccaggtgagcgacttcgtgagataccactacaacggcaccttcctggacggcaccctgttcgacagcagccacaacagaatgaagacctacgacacctacgtgggcatcggctggctgatccccggcatggacaagggcctgctgggcatgtgcgtgggcgagaagagaatcatcaccatcccccccttcctggcctacggcgaggacggcgacggcaaggacatccccggccaggccagcctggtgttcgacgtggccctgctggacctgcacaaccccaaggacagcatcagcatcgagaacaaggtggtgcccgagaactgcgagagaatcagccagagcggcgacttcctgagataccactacaacggcaccctgctggacggcaccctgttcgacagcagctacagcagaaacagaaccttcgacacctacatcggccagggctacgtgatccccggcatggacgagggcctgctgggcgtgtgcatcggcgagaagagaagaatcgtggtgcccccccacctgggctacggcgaggagggcagaggcaacatccccggcagcgccgtgctggtgttcgacatccacgtgatcgacttccacaaccccagcgacagcatcagcatcaccagccactacaagccccccgactgcagcgtgctgagcaagaagggcgactacctgaagtaccactacaacgccagcctgctggacggcaccctgctggacagcacctggaacctgggcaagacctacaacatcgtgctgggcagcggccaggtggtgctgggcatggacatgggcctgagagagatgtgcgtgggcgagaagagaaccgtgatcatccccccccacctgggctacggcgaggccggcgtggacggcgaggtgcccggcagcgccgtgctggtgttcgacatcgagctgctggagctggtggccggcctgcccgagggctacatgttcatctggaacggcgaggtgagccccaacctgttcgaggagatcgacaaggacggcaacggcgaggtgctgctggaggagttcagcgagtacatccacgcccaggtggccagcggcaagggcaagctggcccccggcttcgacgccgagctgatcgtgaagaacatgttcaccaaccaggacagaaacggcgacggcaaggtgaccgccgaggagttcaagctgaaggaccaggaggccaagcacgacgagctgtag

SEQ ID NO: 171488 - DNA, 3462 bp, Artificial Sequence
  derived and/or modified sequence
ccctggagctgcggccgggagggcgggcggccggggagacggggtggcggctgcagcccgggtagggccaggagacccggtccacgtttgcaaacgcagccgaacgcccaggccgacccgtgccgcccgagcgccgcgctgcgtccgcgccactcttctcgccgccccgatggcgttccggggctggaggcccccgccgccaccgctgctcctgctgctgctctgggtgaccgggcaggcagcgcccgtggcgggcctgggctccgacgcggagctgcagatcgagcggcgcttcgtgcccgacgagtgcccgcgcaccgtgcgcagcggcgacttcgtgcgctaccactacgtggggacgttccccgacggccagaagttcgactccagctatgacagagactccactttcaatgtgtttgtgggaaaaggacagctgatcacagggatggaccaggctcttgttgggatgtgcgtaaacgagagacgtttcgtgaagattcccccaaagcttgcctacggaaatgaaggagtttctggtgtgatcccccccaattcagtgcttcattttgatgtacttctgatggatatttggaattctgaagaccaggttcagattcacacctatttcaagcccccgagttgccctcggaccatccaggtgtctgattttgtgaggtaccactacaacgggacgttcctggacggaactctgtttgattcgagtcacaatcgcatgaaaacatatgacacgtatgtgggaattggctggctgattcctggaatggataaagggctgctggggatgtgtgtgggtgagaagcgcatcatcaccattcctccttttctggcctatggagaggatggagatgggaaagacattcccggtcaggcatctctggtgtttgatgttgcattattggacctccataaccccaaggacagcatttccattgagaacaaggtagtacctgaaaactgtgagcggataagtcaaagtggggactttctcaggtatcattacaatggcacgcttctggatggcaccctctttgattccagctactctcggaaccgcacgtttgacacgtacattgggcagggctacgtgattcctgggatggatgaaggtctacttggtgtttgcattggagaaaagcgaaggattgtggtcccgcctcacctggggtatggagaggaaggaagagggaatatccccggctcggctgtgctggtgtttgacatccatgtgatcgacttccacaacccttcggactccatcagcatcacctcccactacaaaccccctgactgctcagtgctgagtaagaagggagattacctcaaatatcactacaatgcctcacttctggatgggaccctgctggactccacgtggaatttaggcaaaacttacaatattgttctgggatctgggcaagttgtgttggggatggacatgggtctcagagagatgtgcgttggcgagaaacggacagtgatcattccgcctcacctgggctatggggaagctggcgtggatggagaagtgcccggcagtgccgtattagtgtttgacattgagctgctggagctggtggctggccttcctgaggggtacatgttcatatggaatggtgaggtgtcacccaacctctttgaagaaattgacaaggatggcaacggagaagtcctcctggaagagttctcagagtacattcacgcccaggtggcatctggcaaagggaaactcgctcctggctttgatgctgagctgattgtgaagaatatgttcaccaaccaggaccggaatggagatgggaaggtcacagccgaggaatttaaactcaaagaccaggaagccaaacacgatgaactctaaacctggcatgaaccagatggtgccagggagtacgtgacaccaagccacctgtgtggcaagacgtgcagtgagggtgcaagggtctctcagaagttgcatcattagccagtagtaggtgggtcacatagtacctggtgtacacatcggggtgggttgatatatggggtgagaagtttgggctgatcgccagtgatagtaaacaaaatctgtgcagagggccttagcatgggatgtgtccagtattgaaaaggctgcactgccaaccatgatttgtgagccttctgggaaattttgttattaaaggaatatatagtgtcagacggaagttataatcatcttggaggaaccataagaaaaggtgtccagggtatctatataaagagggttaaatttttttttaacttgctggttaaaacattttagaaatattctagagatgggcaggagagtcaaagggcttgcttgccccagcagagttcccagcagacagccatggctcttcccagcagcctgtgcaaattctgatgatggccccacccccgcacacgcacacgcacatcatgcttttccagctcatcacaccccgccccactatgggcctaccattaatagtgtataacttggaggttaaaagagccttttggacagaaaactgggccaggaaaaggcatctcagaccacaaatagagaatttgattcctcatttgccacataagtcatctgcttagcttttcctttcctttttttttttttttttttttctggaggcagagtctccctttgtcgccaggctggagtgcagtggtgccatctcggctcactgcagcactgtctcggctcactgcagcctccgcctcccgtattcaagcgattctcctgtctcagcctcctgagtagctgggactacaggtgtgcaccaccacgcccggctaatttttgtatttttagtagagacggggtttcactgtgttggccaggatggtctcaatctcgacctcgtgatccgcccaccttggcctcccaaagtgttgggattacaggcgtgactcaccatgcccagccacttagttttttcttattcccacctttctatcccatagaacactcttttttatcttccctgaaccatattgatgagataaatagggctgggggctgggccccgctggtcactcaacagagtatttcccttggccgagatggaagttttgtcccaatagatgagctgctgagcatcaacaaggtgacatttttctgctgcccatttgtgtcctggagacggtggtaccctgaaggcagaggccagctgccgcaagacagcaatgacagtccacctgccgacctgattcctgcatcatggaataaccacatggctaccttctatcctctgttcccaaatggtggtggcacttatcctgaagtcgtcaatgatttccctttgaaactactttattttactaatttaaactattttgtactgatgtagccctgaggtagttcatgaaaatgctgtgcactcattccatggaataaatgttggaaagctgatcttttctgatataaaatgttgaatgatatta

SEQ ID NO: 171489 - DNA, 2055 bp, Artificial Sequence
  derived and/or modified sequence
aggagacccggtccacgtttgcaaacgcagccgaacgcccaggccgacccgtgccgcccgagcgccgcgctgcgtccgcgccactcttctcgccgccccgatggcgttccggggctggaggcccccgccgccaccgctgctcctgctgctgctctgggtgaccgggcaggcagcgcccgtggcgggcctgggctccgacgcggagctgcagatcgagcggcgcttcgtgcccgacgagtgcccgcgcaccgtgcgcagcggcgacttcgtgcgctaccactacgtggggacgttccccgacggccagaagttcgactccagctggtgtgatcccccccaattcagtgcttcattttgatgtacttctgatggatatttggaattctgaagaccaggttcagattcacacctatttcaagcccccgagttgccctcggaccatccaggtgtctgattttgtgaggtaccactacaacgggacgttcctggacggaactctgtttgattcgagtcacaatcgcatgaaaacatatgacacgtatgtgggaattggctggctgattcctggaatggataaagggctgctggggatgtgtgtgggtgagaagcgcatcatcaccattcctccttttctggcctatggagaggatggagatgggaaagacattcccggtcaggcatctctggtgtttgatgttgcattattggacctccataaccccaaggacagcatttccattgagaacaaggtagtacctgaaaactgtgagcggataagtcaaagtggggactttctcaggtatcattacaatggcacgcttctggatggcaccctctttgattccagctactctcggaaccgcacgtttgacacgtacattgggcagggctacgtgattcctgggatggatgaaggtctacttggtgtttgcattggagaaaagcgaaggattgtggtcccgcctcacctggggtatggagaggaaggaagagggaatatccccggctcggctgtgctggtgtttgacatccatgtgatcgacttccacaacccttcggactccatcagcatcacctcccactacaaaccccctgactgctcagtgctgagtaagaagggagattacctcaaatatcactacaatgcctcacttctggatgggaccctgctggactccacgtggaatttaggcaaaacttacaatattgttctgggatctgggcaagttgtgttggggatggacatgggtctcagagagatgtgcgttggcgagaaacggacagtgatcattccgcctcacctgggctatggggaagctggcgtggatggagaagtgcccggcagtgccgtattagtgtttgacattgagctgctggagctggtggctggccttcctgaggggtacatgttcatatggaatggtgaggtgtcacccaacctctttgaagaaattgacaaggatggcaacggagaagtcctcctggaagagttctcagagtacattcacgcccaggtggcatctggcaaagggaaactcgctcctggctttgatgctgagctgattgtgaagaatatgttcaccaaccaggaccggaatggagatgggaaggtcacagccgaggaatttaaactcaaagaccaggaagccaaacacgatgaactctaaacctggcatgaaccagatggtgccagggagtacgtgacaccaagccacctgtgtggcaagacgtgcagtgagggtgcaagggtctctcagaagttgcatcattagccagtagtagatgagctgctgagcatcaacaaggtgacatttttctgctgcccatttgtgtcctggagacggtggtaccctgaaggcagaggccagctgccgcaagacagcaatgacagtccacctgccgacctgattcctgcatcatggaataaccacatggctaccttctatcctctgttcccaaatggtggtggcacttatcctgaagtcgtcaatgatttccctttgaaactactttattttactaatttaaactattttgtactgatgtagccctgag

SEQ ID NO: 171490 - DNA, 1713 bp, Artificial Sequence
  derived and/or modified sequence
atggcgtttcgggggtggagacccccacctcccccactcttgttgctgctgctctgggtcactggacaagccgcccccgtcgccggtctggggtcagatgctgaacttcagattgaaagaaggttcgtgcccgacgaatgccctaggacggtgcgcagtggcgactttgtccgttaccactatgtggggaccttccctgatggccaaaagttcgactcatcctacgacagagactctactttcaacgtctttgtgggaaagggtcagttgattaccgggatggatcaggcactggtggggatgtgtgtgaacgaaagaaggttcgtgaaaattccccctaaactggcttatgggaacgaaggagtttctggagtcattcccccaaactctgtgctccattttgacgttctgttgatggacatctggaactccgaggaccaggtacagatacatacttatttcaagcccccaagttgccctagaacaattcaggtttctgactttgtgaggtaccattacaatggtaccttcctcgacggcactcttttcgactcttcccacaacagaatgaaaacttacgacacatacgtaggcataggttggctgatcccaggcatggataagggtttattgggcatgtgcgtcggagaaaagcgtatcatcaccatccctccctttctggcctatggagaggatggagatgggaaagacattccaggtcaggcaagcctggtatttgacgtggccttgcttgacctgcacaatcccaaggactccataagcatcgagaataaggtcgtgccagaaaactgtgagcggatttctcaatccggggattttttgcgctatcactacaatggaaccctcctggacggcaccctgtttgattctagttacagcagaaatagaacattcgacacctatattgggcagggatatgttattccgggtatggacgaaggccttttgggagtttgcatcggtgagaagcgccgcattgtcgtgcctccacatctgggctatggcgaagaggggagaggaaacatacccggttccgccgtgctcgtgttcgacattcatgtgatcgattttcacaaccccagcgactcaatttcgattacatcacattacaagcccccagactgtagcgtgctatccaaaaaaggggactacttgaaataccactataatgcctcactgctcgatgggacgctgctggactcaacatggaatcttggcaagacttacaatattgtgctcggttcgggtcaggttgtgctaggcatggacatgggactccgggagatgtgtgttggcgagaaacgtacggtgatcataccccctcatttggggtacggcgaggcgggtgtggacggggaggtgcccgggagtgcagttcttgtattcgacatagagcttttagagctggttgccgggctgcccgagggatatatgttcatctggaacggcgaggtgagccccaacttgttcgaggaaattgacaaagacggcaacggggaggtgctgttggaagagttctccgagtacatccatgcacaagtggcatcaggcaaaggcaaactggcccccggtttcgacgccgagctaattgtgaagaacatgttcactaatcaagaccgtaacggagatggcaaggttacggcagaggaatttaaactgaaagatcaagaggcaaagcacgatgagttgtag

SEQ ID NO: 171491 - DNA, 1299 bp, Artificial Sequence
  derived and/or modified sequence
atggatatctggaactcagaagatcaggtgcagatccatacatacttcaaacccccgagctgtccccgaactattcaggtcagcgatttcgtcagataccattataacggcacgttcctggacggcaccctctttgatagcagtcacaatagaatgaaaacctatgacacttacgtcgggatcgggtggctgatccctggcatggacaagggcttgctcggaatgtgtgtcggggaaaaacggataattacaatcccaccatttttagcttatggggaggatggcgacggaaaagatatcccaggccaggcctcgctcgtgtttgatgttgccctgctggatctgcataatcctaaggattccatttccattgagaataaagttgttccagagaactgtgagcgcatcagccagtctggggacttcctgaggtatcactacaacggcactctcttggacggaaccctctttgattctagttattctcgcaacagaacttttgatacctacatcggccagggttatgtgattccgggcatggatgaggggctgctgggggtgtgtatcggtgagaagcgaaggattgtggtaccgccacatctgggatatggtgaagagggccggggaaacatacccggctccgcggtgttggtgttcgatatccatgtcattgattttcacaacccatctgattccatatccattacgagccactacaagccgcctgactgctccgtgctctcgaaaaagggcgattacctgaaatatcattacaacgccagcctgttggatggtaccttgctggatagtacgtggaatctcgggaagacatacaatatagtgttagggagcggccaggtcgttctcggtatggacatgggactcagggaaatgtgcgttggcgaaaaacggacagtcatcatccccccacatctggggtatggagaagcaggagtcgatggggaagttcccggatctgccgttctcgtgttcgacatagagttgttggaactagtggccggtctccccgagggttacatgtttatctggaacggcgaggtctctccaaatctgtttgaggagatagacaaggatggcaatggcgaagtgctcctggaagaattcagcgaatacatccatgcccaggtggcttcaggtaaaggcaaactggcacccggctttgatgccgagctgattgtcaagaatatgttcaccaaccaggaccggaacggcgatggaaaggtgacggccgaggagttcaagctaaaagaccaagaagcgaaacatgatgagctatag

SEQ ID NO: 171492 - DNA, 1713 bp, Artificial Sequence
  derived and/or modified sequence
atggccttccggggctggaggcctcctcctccacccctgctgctgctgctgctgtgggtgacaggccaggccgcccctgtggccggcctgggcagtgatgctgagctgcagatcgagaggagatttgtgcctgatgagtgccccaggacagtgcgcagcggggactttgtgcgctaccactacgtgggcaccttcccagatggccagaagtttgacagcagctatgaccgggacagcaccttcaacgtgtttgtgggcaagggccagctgatcaccggcatggaccaggccctggtgggcatgtgtgtgaatgaaagaagatttgtgaagatcccccccaagctggcctatggaaatgaaggagtgtctggagtcatcccccccaacagcgtgctgcactttgatgtgctgctgatggacatctggaacagcgaggaccaggtgcagatccacacctacttcaagccacccagctgccccaggaccatccaggtgtctgactttgtgcgctaccactacaacggcaccttcctggatggcaccctgtttgacagcagccacaacaggatgaagacctatgacacctacgtgggcatcggctggctgatccctggcatggacaagggcctgctgggcatgtgtgtgggggagaagaggatcatcaccatcccccccttcctggcctatggagaagatggagatggcaaggacatccctggccaggccagcctggtgtttgatgtggccctgctggacctgcacaaccccaaggacagcatcagcattgagaacaaggtggtgcctgagaactgtgagcgcatcagccagagcggggacttcctgcgctaccactacaacggcaccctgctggatggcaccctgtttgacagcagctacagcaggaacagaacatttgacacctacatcggccagggctacgtgattcctggcatggatgagggcctgctgggcgtgtgcattggagagaagagaagaattgtggtgcccccccacctgggctatggagaggagggccggggcaacatccctggcagcgctgtgctggtgtttgacatccacgtgattgacttccacaaccccagcgacagcatcagcatcaccagccactacaagcccccagactgcagcgtgctgagcaagaagggggactacctgaagtaccactacaatgccagcctgctggatggcaccctgctggacagcacctggaacctgggcaagacctacaacatcgtgctgggcagcggccaggtggtgctgggcatggacatgggcctgcgggagatgtgtgtgggggagaagaggacagtcatcatccccccccacctgggctacggggaggccggcgtggatggagaggtgcccggcagcgctgtgctggtgtttgatattgagctgctggagctggtggccggcctgcctgagggctacatgttcatctggaatggagaggtgagccccaacctgtttgaggagattgacaaggatggaaatggagaggtgctgctggaggagttcagcgagtacatccacgcccaggtggccagcggcaagggcaagctggcccctggctttgatgctgagctgattgtgaagaacatgttcaccaaccaggacagaaatggagatggcaaggtgacagctgaggagttcaagctgaaggaccaggaggccaagcatgatgagctgtag

SEQ ID NO: 171493 - DNA, 1299 bp, Artificial Sequence
  derived and/or modified sequence
atggacatctggaacagcgaggaccaggtgcagatccacacctacttcaagccacccagctgccccaggaccatccaggtgtctgactttgtgcgctaccactacaacggcaccttcctggatggcaccctgtttgacagcagccacaacaggatgaagacctatgacacctacgtgggcatcggctggctgatccctggcatggacaagggcctgctgggcatgtgtgtgggggagaagaggatcatcaccatcccccccttcctggcctatggagaagatggagatggcaaggacatccctggccaggccagcctggtgtttgatgtggccctgctggacctgcacaaccccaaggacagcatcagcattgagaacaaggtggtgcctgagaactgtgagcgcatcagccagagcggggacttcctgcgctaccactacaacggcaccctgctggatggcaccctgtttgacagcagctacagcaggaacagaacatttgacacctacatcggccagggctacgtgattcctggcatggatgagggcctgctgggcgtgtgcattggagagaagagaagaattgtggtgcccccccacctgggctatggagaggagggccggggcaacatccctggcagcgctgtgctggtgtttgacatccacgtgattgacttccacaaccccagcgacagcatcagcatcaccagccactacaagcccccagactgcagcgtgctgagcaagaagggggactacctgaagtaccactacaatgccagcctgctggatggcaccctgctggacagcacctggaacctgggcaagacctacaacatcgtgctgggcagcggccaggtggtgctgggcatggacatgggcctgcgggagatgtgtgtgggggagaagaggacagtcatcatccccccccacctgggctacggggaggccggcgtggatggagaggtgcccggcagcgctgtgctggtgtttgatattgagctgctggagctggtggccggcctgcctgagggctacatgttcatctggaatggagaggtgagccccaacctgtttgaggagattgacaaggatggaaatggagaggtgctgctggaggagttcagcgagtacatccacgcccaggtggccagcggcaagggcaagctggcccctggctttgatgctgagctgattgtgaagaacatgttcaccaaccaggacagaaatggagatggcaaggtgacagctgaggagttcaagctgaaggaccaggaggccaagcatgatgagctgtag

SEQ ID NO: 171494 - DNA, 1713 bp, Artificial Sequence
  derived and/or modified sequence
atggccttccggggctggcggcccccccccccccccctgctgctgctcctcctgtgggttacgggccaggccgcgcccgtggccgggttgggctccgatgcagagctgcagatcgaacgaaggttcgtgcccgacgagtgccctagaacagttcggagtggcgatttcgtgaggtaccattacgtgggaacatttcccgatggtcagaagttcgacagtagttatgatagggatagtacctttaacgtgtttgtgggtaagggacagctgataacaggaatggatcaggctcttgtgggaatgtgtgttaacgagcggcgattcgtgaagattccccccaaattagcctacggaaacgaaggggtcagtggggtcataccgcccaacagcgtgctccacttcgacgtgctgctgatggatatctggaatagtgaggaccaggttcaaattcacacatactttaaaccaccctcttgcccacgcaccatccaggtgtcagactttgttcgctatcattacaatggcacttttctagatggaactctcttcgacagcagccacaaccggatgaaaacttatgatacctacgtgggaatcggctggcttatccccggtatggacaaagggctgctgggtatgtgtgtgggggagaagcgaattatcacaatcccaccctttctggcctacggggaggacggagatggcaaggacattcccgggcaagcttctctcgtttttgacgttgccctcttagacctacataatcccaaggattcaatctctatcgagaacaaagtcgtgcccgagaactgcgaaaggattagccagtcgggggattttctgaggtatcattataacgggactttactggacggtacccttttcgactcttcttattcccgcaacaggacctttgatacatacatcggacaggggtacgtgataccaggaatggatgaaggtctactgggggtttgcatcggcgagaaacggaggatcgtggtccctccacacctggggtacggagaggagggacggggaaacatcccgggaagtgctgttcttgtgttcgacatccacgtcatcgattttcacaatccgtcagattctatctcaatcacttcccactataaaccaccggattgctctgtcttgtctaagaagggagactacctgaagtaccactataacgcctccttgttagatgggacgctcctggattctacatggaacctgggtaaaacatacaatatcgtgcttggttctggacaagtagtgttgggcatggacatgggactgagagaaatgtgcgtcggggaaaagcgcacagtaatcatcccgccacatctggggtatggagaggcgggcgtggacggcgaggtccctggatccgctgtcctggtttttgacatcgagctgctcgagctcgtcgctgggctacctgaggggtatatgtttatctggaatggcgaagtttcgccaaatttgttcgaggagatcgacaaagatggcaacggagaggtgcttctagaagagttttctgaatacatccatgctcaggtggcttctggtaaaggtaagctggcgcctggcttcgatgctgagttgatcgttaaaaacatgtttacaaaccaagaccggaatggtgatggcaaagtgaccgccgaggaatttaaactgaaggaccaggaggctaagcacgatgagttgtag

SEQ ID NO: 171495 - DNA, 1299 bp, Artificial Sequence
  derived and/or modified sequence
atggacatctggaacagcgaggaccaggtgcagatccacacctacttcaagcccccctcatgccccaggacaatccaggtctccgactttgtgagatatcactataacggcacatttctggatgggaccttgttcgattcttctcacaataggatgaaaacatatgatacttacgtaggcatcggctggcttatcccgggcatggacaagggcctgttagggatgtgtgttggagagaagcggatcattaccatccctccgttcctggcatatggcgaagatggagatggcaaagacatcccaggccaagcgagcctcgtttttgatgtcgctctcctggaccttcataatcccaaagattctatatcgattgaaaacaaagtggtgcccgagaactgcgagcggattagccaatctggggatttcttacggtatcattataatgggactctcctcgatgggacactgttcgactctagttactcgcgcaatcgaacatttgacacttatattggccagggttacgttatccctggaatggatgaaggcctactgggcgtttgtatcggcgagaaacgccgaatagtggtcccgccacacctggggtatggggaagagggacgggggaatatacctggctccgccgtgctggttttcgacatccatgtaattgatttccacaacccttctgactccatatccatcaccagccactacaaacctcctgattgcagtgtactatctaagaagggcgactacctgaaataccattacaatgccagcttgcttgatggaactctgctggatagcacgtggaacctcgggaagacttacaacatcgtcttgggatcaggacaggtggtcctcgggatggacatgggcctacgcgaaatgtgtgtgggcgaaaaaaggacagtgattatccctcctcatctgggatacggagaggcgggcgtggacggagaagtgccagggtcggctgtgctggtctttgatatcgaactgttggaacttgtggcaggcctgccagaaggatacatgttcatctggaacggtgaggtatctcccaaccttttcgaagagatcgacaaggacggcaatggggaggttctcctggaggagtttagtgagtacatccatgcccaggtcgcctctggcaaaggaaaactcgctccaggttttgacgccgaactaattgtcaagaacatgttcactaaccaggacaggaatggagacggaaaggtgactgcagaggaattcaaactgaaggaccaagaggcgaaacatgatgagttgtag

SEQ ID NO: 171496 - DNA, 1713 bp, Artificial Sequence
  derived and/or modified sequence
atggcttttcggggatggcgccctccacctcctccactgctgctgctcttgctgtgggtcacaggccaagccgcaccagtcgcgggtctgggttctgatgctgaattacagattgagcgccgttttgtaccagatgagtgcccaagaacggtgaggtcaggggatttcgtgcgatatcactacgtcggaacatttcccgatggtcagaagtttgactcctcctacgacagagatagcacattcaatgtctttgtgggcaaagggcagctcattaccgggatggaccaggctttggtcggcatgtgtgtgaacgaaaggaggttcgtgaagattccgcctaagcttgcatatggaaatgaaggtgttagtggtgttattccaccgaactccgtcctacacttcgatgtgttgctcatggatatatggaattcagaagatcaggtccagatccacacgtacttcaagcctccgtcttgtcctagaacaatccaggtcagtgactttgtgcggtatcactacaatggtactttcctcgatggcacactcttcgactcttcacacaacaggatgaagacttacgacacatacgtcgggataggatggctcataccaggcatggacaaaggtctacttggtatgtgcgtcggcgaaaagcggattatcacaatcccgccattcttggcatatggggaggacggcgatgggaaagacatcccaggacaagcctcactggtgtttgatgtggcattactagaccttcacaacccgaaagatagtatctcaattgagaacaaggtggtccccgaaaactgcgagaggatttcacagagtggggattttctgcgctaccactataatggcacactgctagacggtacgctttttgattcgtcttactcccgcaacaggacattcgacacctatattggtcaggggtatgtgatccccggaatggacgaaggtttactgggggtttgcatcggggaaaaaaggcgtatcgtggtcccccctcatttgggttatggcgaggaaggacgagggaacattccaggatccgccgtgctcgtatttgacattcatgtgattgactttcacaatccatcagacagtataagcatcacctcgcactacaagccccctgactgtagcgtgctgtccaagaagggtgattacctcaagtaccattataacgcttcactgttggacgggactttactcgatagcacgtggaacctcggcaaaacatacaatattgtgctgggcagcggccaggttgtcctgggtatggatatgggactcagagaaatgtgcgtgggggagaaacgtactgtgatcatcccaccccatcttggttacggcgaagcaggcgtagacggagaagtcccaggttcagccgtgctggtcttcgatatcgaactcctggaactggttgctggccttccagagggatatatgttcatctggaacggggaggtgtccccaaatttgttcgaagaaattgataaggacggcaatggagaggtgctgttagaagagttctcggagtatatccacgcacaagtcgcctccggtaaagggaagctggcccctggattcgacgccgagctcattgtaaaaaacatgttcactaatcaggatcgaaatggggatggcaaagtgactgccgaagaatttaagctgaaagatcaggaagcaaagcatgatgaactatag

SEQ ID NO: 171497 - DNA, 1299 bp, Artificial Sequence
  derived and/or modified sequence
atggatatctggaactcagaggaccaggtgcaaattcatacttattttaagcctccatcttgcccacggactatccaagtgtccgactttgtgcgctatcactataacggcacattcctggacggaacactgttcgattcttcccacaatcgcatgaagacctatgatacctacgtgggaatcggatggctgattccgggtatggataaaggcttgcttggcatgtgcgtgggagagaaacggattatcactattccacccttcttggcttacggggaggacggagacggaaaggacattcccggtcaggcttctctcgtctttgacgtcgctctccttgatctacacaacccaaaggatagtatttccattgagaataaggtggttccagaaaactgcgagcgcatttcacagtctggcgatttcttgcggtaccactataacggcaccctgttagatggaactcttttcgacagctcatactccaggaaccgaacctttgatacctatattgggcaagggtatgtgattcccggtatggatgaagggctcctgggcgtctgtatcggcgaaaaacgccgaatagtggtgccccctcacctcgggtatggcgaagaaggacgcggaaacataccgggaagcgcagtattagtgttcgatattcatgtgatcgacttccataacccaagtgactcaatatccatcacttcccattacaaacccccagattgtagtgtgctctccaagaagggagactatctgaaataccactacaatgcctccttacttgatggaaccttgctggacagtacatggaatctgggaaagacttataacatcgtcctagggagcggccaggtggtcctggggatggatatgggtttgcgtgaaatgtgcgtcggagagaagcgcacagtgatcatcccaccccacctcgggtatggcgaagccggagtcgacggcgaggtgcctggcagtgcagtgttagtatttgatattgaattattggagttggtcgctggattacctgagggatatatgtttatttggaacggcgaagtcagtcctaatctgtttgaggaaatagacaaagacggaaatggggaagtgctgcttgaagaattttccgagtatattcatgcgcaggttgcctccgggaaaggaaagcttgcaccgggatttgatgctgagctgattgtaaaaaatatgtttacaaatcaggacaggaatggcgacggaaaggtgactgcggaggagttcaagctgaaggaccaggaggctaagcatgacgaactttag

SEQ ID NO: 171498 - protein, 110 aa, Artificial Sequence
  derived and/or modified sequence
MGASGSKARGLWPFASAAGGGGSEAAGAEQALVRPRGRAVPPFVFTRRGSMFYDEDGDLAHEFYEETIVTKNGQKRAKLRRVHKNLIPQGIVKLDHPRIHVDFPVILYEV

SEQ ID NO: 171499 - DNA, 333 bp, Artificial Sequence
  derived and/or modified sequence
atgggcgccagcggcagcaaggccagaggcctgtggcccttcgccagcgccgccggcggcggcggcagcgaggccgccggcgccgagcaggccctggtgagacccagaggcagagccgtgccccccttcgtgttcaccagaagaggcagcatgttctacgacgaggacggcgacctggcccacgagttctacgaggagaccatcgtgaccaagaacggccagaagagagccaagctgagaagagtgcacaagaacctgatcccccagggcatcgtgaagctggaccaccccagaatccacgtggacttccccgtgatcctgtacgaggtgtag

SEQ ID NO: 171500 - DNA, 333 bp, Artificial Sequence
  derived and/or modified sequence
atgggtgctagcggatcaaaagcaagaggactgtggcccttcgcgagtgctgcaggcggtggaggtagcgaggcagccggtgccgagcaagcactggttcgccccaggggtagagccgttcctcctttcgtcttcactcgcagggggtcaatgttctatgatgaagatggggatttggcacatgagttctatgaggaaacaatcgttacgaaaaacgggcaaaaacgggctaaactgagacgtgtccacaagaatctcattccacaaggaatcgttaagctcgaccacccccgcatccacgtcgattttcctgtgatcttgtacgaggtgtag

SEQ ID NO: 171501 - DNA, 333 bp, Artificial Sequence
  derived and/or modified sequence
atgggcgccagcggcagcaaggcccggggcctgtggccctttgccagcgctgctgggggcggcggcagcgaggccgccggggctgagcaggccctggtgcggccccggggccgggctgtgcccccatttgtgttcacccggcggggctccatgttttatgatgaagatggagacctggcccacgagttctatgaggagaccatcgtgaccaagaatggccagaagagggccaagctgcggcgggtgcacaagaacctgatcccccagggcatcgtgaagctggaccacccccgcatccacgtggacttccctgtgatcctgtatgaggtgtag

SEQ ID NO: 171502 - DNA, 333 bp, Artificial Sequence
  derived and/or modified sequence
atgggcgccagcggcagcaaggcccggggcctgtggcccttcgccagcgctgcagggggaggaggctccgaggccgctggagccgaacaagcgctggtccgcccaaggggcagagccgtccccccctttgtcttcactcgccgggggtcgatgttctacgatgaggatggcgacttggcccacgaattctatgaggagactatcgtcaccaaaaacggacagaagcgggctaagttgcgccgtgtgcataaaaacctcataccgcagggcatagtgaagcttgaccaccctcgcatccacgtcgattttcctgtcattttgtatgaggtatag

SEQ ID NO: 171503 - DNA, 333 bp, Artificial Sequence
  derived and/or modified sequence
atgggcgcatctggctcaaaggcccgaggcctgtggcctttcgcctccgccgcagggggaggcggatccgaggccgctggcgctgaacaggccctcgttaggcctcggggaagggcagtgcccccattcgtgtttacgcgacgcggatccatgttctacgacgaagacggcgaccttgctcacgaattctacgaggagactatcgtcactaaaaatggtcagaaacgagccaaactgagaagggtacacaagaaccttatcccacaagggatagtgaagttggaccatccccgtattcacgtggacttccccgtgattctttacgaggtgtag

SEQ ID NO: 171504 - DNA, 1691 bp, Artificial Sequence
  derived and/or modified sequence
agtgaggtttccgtggagacagccgagcctgcggaaggcggcggcggcggcacctgcgatcagcggctggggcaggttatggtagtgcggactgcggtgtgagcagagcggccacggggcccgccatgcgccggcggccctgacatgggcgccagcgggtccaaagctcggggcctgtggcccttcgcctcggcggccggaggcggcggctcagaggcagcaggagctgagcaagctttggtgcggcctcggggccgagctgtgccccccttcgtattcacgcgccgcggctctatgttctatgatgaggatggggatctggctcacgagttctatgaggagacaatcgtcaccaagaacgggcagaagcgggccaagctgaggcgagtgcataagaatctgattcctcagggcatcgtgaagctggatcacccccgcatccacgtggatttccctgtgatcctctatgaggtgtgaccctgggaggtggcagacagaagcaccccctgccccggcaagaaactcccaggctcaatcaaggtgtggcttccattgaggagcccaggctggggccacaaccctgaataaactctgttggcccataaccttcagctgtgagcgggtcggtcccacagtattggttgggtgttggtttgtgtgtggacaagaggtggttggtgggtggtgaaggctaatggcagagttagcaccccactctcccaagccacccctgcaagcagcacagcagggcatataccagtcaggaatgcccgttacctggttccttgcctggtctgctttcttccaagtttgcctggggcctagccctgctagaggctacagcactttacaagcaaggtatgctttcttccagcccctaggctgtgggcactgtatacaagtaggaacttcctttccttcacttcccttttaacccctagtcagagcatttcagccgtttgctacctcgattcctcctgtgttggacagaggctgggggcagtgccagcctgattcttccgacctacctgccatttgttcccgccttcagatggatggacagtttgctggctattgataggagtggggactgggtgggggcttctccctctacccagggctgggctgatccccctactgcaactaactgttgccccccaaccccgaacccccagttgaggagttgagagagtgcaggctggggtcaggacaggctgcggatgcttgtgcctatggggagttactccaacccacctattctgtctaatctccatggctttgcaccaaatcctccacccctccaattgggaggggactgttcaccaccttgtggtaagggacaacaccctaaggctggtgccagtagttatgagtagcctaccaccccctcccttacagtaacccccaccccttcaggatcagtcaagggaaagcactagaacccctgggtagggaaagaaaggagggaaaaaccataaaaggaatacttataatgtgaaggtttgtaaatagtccatgatgatgtcgtggcagagtctgatttctatatagaggtgactttttttttaagtactgtgcaagctctgtgcttctataatgtgggaaatggcttggggaggatggcccctagcttaggaagactgttgtgttatttgttcaatttcaataaaatgatttgtagatcctgcaca

SEQ ID NO: 171505 - protein, 183 aa, Artificial Sequence
  derived and/or modified sequence
MASNKTTLQKMGKKQNGKSKKVEEAEPEEFVVEKVLDRRVVNGKVEYFLKWKGFTDADNTWEPEENLDCPELIEAFLNSQKAGKEKDGTKRKSLSDSESDDSKSKKKRDAADKPRGFARGLDPERIIGATDSSGELMFLMKWKDSDEADLVLAKEANMKCPQIVIAFYEERLTWHSCPEDEAQ

SEQ ID NO: 171506 - protein, 62 aa, Artificial Sequence
  derived and/or modified sequence
MASNKTTLQKMGKKQNGKSKKVEEAEPEEFVVEKVLDRRVVNGKVEYFLKWKGFTDADNTWE

SEQ ID NO: 171507 - DNA, 1837 bp, Artificial Sequence
  derived and/or modified sequence
cgctgaggagactccggtcactgtcctcgccccgcctcccccttccctccccttggggaccaccgggcgccacgccgcgaacgtaatagctcttcaagtctgcaataaaaaatggcctccaacaaaactacattgcaaaaaatgggaaaaaaacagaatggaaagagtaaaaaagttgaagaggcagagcctgaagaatttgtcgtggaaaaagtactagatcgacgtgtagtgaatgggaaagtggaatatttcctgaagtggaagggatttacagatgctgacaatacttgggaacctgaagaaaatttagattgtccagaattgattgaagcgtttcttaactctcagaaagctggcaaagaaaaagatggtacaaaaagaaaatctttatctgacagtgaatctgatgacagcaaatcaaagaagaaaagagatgctgctgacaaaccaagaggatttgccagaggtcttgatcctgaaagaataattggtgccacagacagcagtggagaattgatgtttctcatgaaatggaaagattcagatgaggcagacttggtgctggcgaaagaggcaaatatgaagtgtcctcaaattgtaattgctttttatgaagagagactaacttggcattcttgtccagaagatgaagctcaataattgttcacattgttcttttatatatatttatatatatatataaaaattgggtcttagattttgatttactagtgtgacaaaataactacatcctaatgaaaatcaagtttgatatgtttgttttgaaagtagcgttggaagagttgttgggggttttttgcatccatagcactggttactttgaacaaataaataaaagctttctgtagttgcttcctttatcagaaaagaacatttgataccatggtatatcatttcctcttcattaaagaacagcttttctaaatgttgggggaaatgtccatagtcattactcagtcaaaacttgtgttctcatgagcctaaggaccattctagatttattacgtgttttttgtgtgtgtgtgtgtgtgtgtgtgtgtgtgtatccataaaatgcatatgtaaatttttttttgtttttaagcattcacccaaacaaaaaaatcacaggtaaacccatgtttctgagatgccattattccaagcaaaataagagataatcccttcaagttaaattgaaaattttcctgaaaccatacatttcaagtgaaataagtaattctagataggacaatttaaattggataattttaaagtgtctataattgcagtggtttatttgcaaaattcctaaaaggaaaaattttatcactgccatcacagcaggtttcctcatccagatgaggaaactagacaaatgctagtgtgttttaactagctaaacaaaactaagttaaatgaacatttaaaagtttccctagcgggccattccttagcaaaatgttggaatccctgttgctacattgactaaaaggtcatgatgaatggaatatgtaagacttggctcatagaaacctaatcagatggttagaggtgttggcagtttaggacctgctgtcataaatgtgtgaacaaccttttgtaacctaacctattgacctgcatgttttttctttaccccaattcattacatggaggctcaatcttgagtttgctttactggttcagcaaaagccaggaagaacaactttgtagtaatcaaaatgttatccaactgtatattgtttactttattgtaaatactggtgaacagtggttaataaatagttttatattcctttatgcaaaaaaaaaaaaaaaaaaaaaaaaaaaa

SEQ ID NO: 171508 - DNA, 552 bp, Artificial Sequence
  derived and/or modified sequence
atggccagcaacaagaccaccctgcagaagatgggcaagaagcagaacggcaagagcaagaaggtggaggaggccgagcccgaggagttcgtggtggagaaggtgctggacagaagagtggtgaacggcaaggtggagtacttcctgaagtggaagggcttcaccgacgccgacaacacctgggagcccgaggagaacctggactgccccgagctgatcgaggccttcctgaacagccagaaggccggcaaggagaaggacggcaccaagagaaagagcctgagcgacagcgagagcgacgacagcaagagcaagaagaagagagacgccgccgacaagcccagaggcttcgccagaggcctggaccccgagagaatcatcggcgccaccgacagcagcggcgagctgatgttcctgatgaagtggaaggacagcgacgaggccgacctggtgctggccaaggaggccaacatgaagtgcccccagatcgtgatcgccttctacgaggagagactgacctggcacagctgccccgaggacgaggcccagtag

SEQ ID NO: 171509 - DNA, 2128 bp, Artificial Sequence
  derived and/or modified sequence
agccttccctttttgttttccgtgccccaactcggcggattgactcggccccttccggaaacacccgaatcaacttctagtcaaattattgttcacgccgcaatgacccacccctggcccgcgtctgtggaactgacccctggtgtacaggagagttcgctgctgaaagtggtcccaaaggggtactagtttttaagctcccaactccccctcccccagcgtctggaggattccacaccctcgcaccgcaggggcgaggaagtgggcggagtccggttttggcgccagccgctgaggctgccaagcagaaaagccaccgctgaggagactccggtcactgtcctcgccccgcctcccccttccctccccttggggaccaccgggcgccacgccgcgaacgtaatagctcttcaagtctgcaataaaaaatggcctccaacaaaactacattgcaaaaaatgggaaaaaaacagaatggaaagagtaaaaaagttgaagaggcagagcctgaagaatttgtcgtggaaaaagtactagatcgacgtgtagtgaatgggaaagtggaatatttcctgaagtggaagggatttacagatgctgacaatacttgggaacctgaagaaaatttagattgtccagaattgattgaagcgtttcttaactctcagaaagctggcaaagaaaaagatggtacaaaaagaaaatctttatctgacagtgaatctgatgacagcaaatcaaagaagaaaagagatgctgctgacaaaccaagaggatttgccagaggtcttgatcctgaaagaataattggtgccacagacagcagtggagaattgatgtttctcatgaaatggaaagattcagatgaggcagacttggtgctggcgaaagaggcaaatatgaagtgtcctcaaattgtaattgctttttatgaagagagactaacttggcattcttgtccagaagatgaagctcaataattgttcacattgttcttttatatatatttatatatatatataaaaattgggtcttagattttgatttactagtgtgacaaaataactacatcctaatgaaaatcaagtttgatatgtttgttttgaaagtagcgttggaagagttgttgggggttttttgcatccatagcactggttactttgaacaaataaataaaagctttctgtagttgcttcctttatcagaaaagaacatttgataccatggtatatcatttcctcttcattaaagaacagcttttctaaatgttgggggaaatgtccatagtcattactcagtcaaaacttgtgttctcatgagcctaaggaccattctagatttattacgtgttttttgtgtgtgtgtgtgtgtgtgtgtgtgtgtgtatccataaaatgcatatgtaaatttttttttgtttttaagcattcacccaaacaaaaaaatcacaggtaaacccatgtttctgagatgccattattccaagcaaaataagagataatcccttcaagttaaattgaaaattttcctgaaaccatacatttcaagtgaaataagtaattctagataggacaatttaaattggataattttaaagtgtctataattgcagtggtttatttgcaaaattcctaaaaggaaaaattttatcactgccatcacagcaggtttcctcatccagatgaggaaactagacaaatgctagtgtgttttaactagctaaacaaaactaagttaaatgaacatttaaaagtttccctagcgggccattccttagcaaaatgttggaatccctgttgctacattgactaaaaggtcatgatgaatggaatatgtaagacttggctcatagaaacctaatcagatggttagaggtgttggcagtttaggacctgctgtcataaatgtgtgaacaaccttttgtaacctaacctattgacctgcatgttttttctttaccccaattcattacatggaggctcaatcttgagtttgctttactggttcagcaaaagccaggaagaacaactttgtagtaatcaaaatgttatccaactgtatattgtttactttattgtaaatactggtgaacagtggttaataaatagttttatattcctttatgcaa

SEQ ID NO: 171510 - DNA, 552 bp, Artificial Sequence
  derived and/or modified sequence
atggcaagcaataaaaccacgctgcagaagatgggcaaaaagcagaacggcaaatccaagaaggtagaggaggcagagcccgaggaatttgtggtggaaaaggtactggatcgccgggtcgtgaatgggaaggttgagtattttttgaagtggaaaggttttacagatgccgacaacacatgggagccagaggagaatctggactgcccagagctcattgaagcatttttaaactctcagaaggctgggaaggaaaaagacggaactaaacgaaagagcttgtccgatagtgaaagcgatgattcaaaatctaaaaagaaacgagacgccgccgacaagccccgcggatttgcgagagggctcgatccggagagaatcatcggggcaaccgactcctccggcgagctcatgttcctgatgaaatggaaggatagtgatgaagccgacctggttctggccaaagaggctaacatgaagtgcccacagatcgtgatcgctttctatgaagagcgtctgacctggcattcctgtccggaagatgaggcccagtag

SEQ ID NO: 171511 - DNA, 552 bp, Artificial Sequence
  derived and/or modified sequence
atggccagtaacaaaactaccctccagaagatgggaaagaaacagaatggtaagagcaagaaagtggaggaggctgagcccgaagagtttgtggtcgagaaggttctggacaggcgggtggtgaacggcaaagtcgagtactttctaaaatggaaggggtttactgacgcagacaatacctgggagcctgaggaaaatctggactgtcctgaactgatcgaggccttcctgaacagccaaaaagccgggaaagagaaggatggcactaaaaggaaatccctcagcgactctgagtctgatgacagcaagagtaagaaaaaaagagacgccgcagacaaacctcgcggattcgctcgtggcctcgaccccgagagaatcatcggtgctacagatagctctggggagttaatgttcttgatgaagtggaaggattcagacgaagccgatctcgttctggctaaagaagccaacatgaaatgcccccagattgtaattgcattctacgaagaacgattaacctggcattcatgccccgaagacgaggcccagtag

SEQ ID NO: 171512 - DNA, 552 bp, Artificial Sequence
  derived and/or modified sequence
atggccagcaacaagaccaccctgcagaagatgggcaagaagcagaatggcaagagcaagaaggtggaggaggccgagcctgaggagtttgtggtggagaaggtgctggaccggcgggtggtgaatggcaaggtggagtacttcctgaagtggaagggcttcacagatgctgacaacacctgggagcctgaggagaacctggactgcccagagctgattgaggccttcctgaacagccagaaggccggcaaggagaaggatggcaccaagaggaagagcctgagtgacagcgagagtgatgacagcaagagcaagaagaagagagatgctgctgacaagccccggggctttgcccggggcctggaccctgagcgcatcattggagccacagacagcagtggagagctgatgttcctgatgaagtggaaggacagtgatgaggccgacctggtgctggccaaggaggccaacatgaagtgcccccagatcgtgattgccttctatgaggagcggctgacctggcacagctgcccagaagatgaggcccagtag

SEQ ID NO: 171513 - DNA, 552 bp, Artificial Sequence
  derived and/or modified sequence
atggccagcaacaagaccaccctgcagaagatgggcaagaagcagaacggcaagagcaagaaggttgaggaagcagaacctgaggagttcgtcgtcgagaaggtgcttgacagacgcgtggtgaacggtaaggtggaatacttcctgaaatggaaaggttttacagacgcagacaacacctgggaaccagaggaaaacttggactgcccagagctcatcgaagcattcctgaacagccagaaggccggaaaggaaaaggatggcaccaaacgtaagagcctatccgatagcgagagtgacgacagtaagtcaaaaaaaaaaagggatgcagcggacaagccacggggttttgccaggggcttggatcccgagagaattatcggcgcaacggacagcagcggggaattaatgttcctcatgaaatggaaggacagcgatgaagctgatttggtgttagctaaggaggctaacatgaaatgccctcagatagttattgcgttctacgaggagcggctgacttggcattcttgtcctgaggatgaagcccagtag

SEQ ID NO: 171514 - DNA, 1857 bp, Artificial Sequence
  derived and/or modified sequence
ggtgccacccctccccccggcggccccgcgcgcagctcccggctccctcccccttcggatgtggcttgagctgtaggcgcggagggccggagacgctgcagacccgcgacccggagcagctcggaggcggtgaataatagctcttcaagtctgcaataaaaaatggcctccaacaaaactacattgcaaaaaatgggaaaaaaacagaatggaaagagtaaaaaagttgaagaggcagagcctgaagaatttgtcgtggaaaaagtactagatcgacgtgtagtgaatgggaaagtggaatatttcctgaagtggaagggatttacagatgctgacaatacttgggaacctgaagaaaatttagattgtccagaattgattgaagcgtttcttaactctcagaaagctggcaaagaaaaagatggtacaaaaagaaaatctttatctgacagtgaatctgatgacagcaaatcaaagaagaaaagagatgctgctgacaaaccaagaggatttgccagaggtcttgatcctgaaagaataattggtgccacagacagcagtggagaattgatgtttctcatgaaatggaaagattcagatgaggcagacttggtgctggcgaaagaggcaaatatgaagtgtcctcaaattgtaattgctttttatgaagagagactaacttggcattcttgtccagaagatgaagctcaataattgttcacattgttcttttatatatatttatatatatatataaaaattgggtcttagattttgatttactagtgtgacaaaataactacatcctaatgaaaatcaagtttgatatgtttgttttgaaagtagcgttggaagagttgttgggggttttttgcatccatagcactggttactttgaacaaataaataaaagctttctgtagttgcttcctttatcagaaaagaacatttgataccatggtatatcatttcctcttcattaaagaacagcttttctaaatgttgggggaaatgtccatagtcattactcagtcaaaacttgtgttctcatgagcctaaggaccattctagatttattacgtgttttttgtgtgtgtgtgtgtgtgtgtgtgtgtgtgtatccataaaatgcatatgtaaatttttttttgtttttaagcattcacccaaacaaaaaaatcacaggtaaacccatgtttctgagatgccattattccaagcaaaataagagataatcccttcaagttaaattgaaaattttcctgaaaccatacatttcaagtgaaataagtaattctagataggacaatttaaattggataattttaaagtgtctataattgcagtggtttatttgcaaaattcctaaaaggaaaaattttatcactgccatcacagcaggtttcctcatccagatgaggaaactagacaaatgctagtgtgttttaactagctaaacaaaactaagttaaatgaacatttaaaagtttccctagcgggccattccttagcaaaatgttggaatccctgttgctacattgactaaaaggtcatgatgaatggaatatgtaagacttggctcatagaaacctaatcagatggttagaggtgttggcagtttaggacctgctgtcataaatgtgtgaacaaccttttgtaacctaacctattgacctgcatgttttttctttaccccaattcattacatggaggctcaatcttgagtttgctttactggttcagcaaaagccaggaagaacaactttgtagtaatcaaaatgttatccaactgtatattgtttactttattgtaaatactggtgaacagtggttaataaatagttttatattccttta

SEQ ID NO: 171515 - DNA, 552 bp, Artificial Sequence
  derived and/or modified sequence
atggccagcaacaagaccaccctgcagaagatgggcaagaagcagaacggcaaaagcaagaaggtggaagaagccgaacccgaagaatttgtggtagagaaggtgcttgaccggcgggtggtgaatggaaaagtagaatacttcttgaaatggaaagggttcaccgatgccgataacacttgggaacccgaagagaacctggactgtccagaactgatcgaagcatttctcaattcgcagaaggccggtaaagaaaaggacggtacaaagcgtaagagtctgtctgactcagaatctgacgattctaaaagtaagaagaaaagggacgccgctgataagcctcgcggatttgctagaggcttagatccagagagaatcattggggcaactgacagctcaggagagctcatgtttctgatgaagtggaaggatagcgatgaggctgatctcgtgctagccaaagaggccaacatgaagtgccctcagatcgtcatcgccttttatgaggagcggttgacttggcactcatgccctgaagatgaggcccagtag

SEQ ID NO: 171516 - DNA, 552 bp, Artificial Sequence
  derived and/or modified sequence
atggcgtcaaataagacgactcttcagaaaatgggaaaaaagcagaacgggaagagcaagaaggttgaagaagccgagccggaggaattcgtggtggagaaggtgctcgacaggcgagtggtgaacggcaaggtggaatatttcctgaagtggaagggattcaccgatgccgacaacacttgggagccagaggagaaccttgactgtccagagctgatcgaggcgttcttaaactcacagaaagcagggaaagagaaggacggcacaaagcggaagagcttgtccgattctgagagtgatgactcaaagtccaaaaagaagagggacgctgccgataagcccagaggcttcgcacgcggtttggatcccgaacgcatcatcggagcaactgatagctccggtgaattaatgttcttaatgaaatggaaagattcggacgaagccgatctggtgcttgccaaagaagccaatatgaaatgtccgcagattgtgattgccttttatgaggaacggcttacctggcactcctgtcccgaggatgaggcccaatag

SEQ ID NO: 171517 - DNA, 552 bp, Artificial Sequence
  derived and/or modified sequence
atggcctctaacaagacaacattacaaaaaatggggaagaagcaaaatggaaaatctaaaaaggtggaagaagctgaaccggaggagtttgtcgtagaaaaagtgctggataggcgggtcgtgaacggcaaagtcgaatacttcctgaaatggaaaggctttactgatgccgataatacctgggagcccgaagaaaatcttgattgtccagagcttatcgaagcctttctgaatagtcagaaggcgggtaaggagaaggatggcaccaagcgtaaaagtctttcagatagcgagtcagatgatagcaagtctaaaaaaaagcgcgatgcggcagacaagccaagaggttttgcacgcggactggaccccgaacggattataggcgctaccgacagctccggggaactaatgttcctgatgaagtggaaagattcagatgaagctgatctggtgcttgcaaaggaagccaatatgaagtgtccgcagattgttatcgccttctatgaagagcggctcacctggcacagctgccctgaagacgaagcccagtag

SEQ ID NO: 171518 - DNA, 1717 bp, Artificial Sequence
  derived and/or modified sequence
gtaggcgcggagggccggagacgctgcagacccgcgacccggagcagctcggaggcggtgaataatagctcttcaagtctgcaataaaaaatggcctccaacaaaactacattgcaaaaaatgggaaaaaaacagaatggaaagagtaaaaaagttgaagaggcagagcctgaagaatttgtcgtggaaaaagtactagatcgacgtgtagtgaatgggaaagtggaatatttcctgaagtggaagggatttacagaaaagctggcaaagaaaaagatggtacaaaaagaaaatctttatctgacagtgaatctgatgacagcaaatcaaagaagaaaagagatgctgctgacaaaccaagaggatttgccagaggtcttgatcctgaaagaataattggtgccacagacagcagtggagaattgatgtttctcatgaaatggaaagattcagatgaggcagacttggtgctggcgaaagaggcaaatatgaagtgtcctcaaattgtaattgctttttatgaagagagactaacttggcattcttgtccagaagatgaagctcaataattgttcacattgttcttttatatatatttatatatatatataaaaattgggtcttagattttgatttactagtgtgacaaaataactacatcctaatgaaaatcaagtttgatatgtttgttttgaaagtagcgttggaagagttgttgggggttttttgcatccatagcactggttactttgaacaaataaataaaagctttctgtagttgcttcctttatcagaaaagaacatttgataccatggtatatcatttcctcttcattaaagaacagcttttctaaatgttgggggaaatgtccatagtcattactcagtcaaaacttgtgttctcatgagcctaaggaccattctagatttattacgtgttttttgtgtgtgtgtgtgtgtgtgtgtgtgtgtgtatccataaaatgcatatgtaaatttttttttgtttttaagcattcacccaaacaaaaaaatcacaggtaaacccatgtttctgagatgccattattccaagcaaaataagagataatcccttcaagttaaattgaaaattttcctgaaaccatacatttcaagtgaaataagtaattctagataggacaatttaaattggataattttaaagtgtctataattgcagtggtttatttgcaaaattcctaaaaggaaaaattttatcactgccatcacagcaggtttcctcatccagatgaggaaactagacaaatgctagtgtgttttaactagctaaacaaaactaagttaaatgaacatttaaaagtttccctagcgggccattccttagcaaaatgttggaatccctgttgctacattgactaaaaggtcatgatgaatggaatatgtaagacttggctcatagaaacctaatcagatggttagaggtgttggcagtttaggacctgctgtcataaatgtgtgaacaaccttttgtaacctaacctattgacctgcatgttttttctttaccccaattcattacatggaggctcaatcttgagtttgctttactggttcagcaaaagccaggaagaacaactttgtagtaatcaaaatgttatccaactgtatattgtttactttattgtaaatactggtgaacagtggttaataaatagttttatattcctttatgcaa

SEQ ID NO: 171519 - DNA, 189 bp, Artificial Sequence
  derived and/or modified sequence
atggccagcaacaagaccaccctgcagaagatgggcaagaagcagaacggcaagagcaagaaggtggaggaggccgagcccgaggagttcgtggtggagaaggtgctggacagaagagtggtgaacggcaaggtggagtacttcctgaagtggaagggcttcaccgacgccgacaacacctgggagtag

SEQ ID NO: 171520 - DNA, 189 bp, Artificial Sequence
  derived and/or modified sequence
atggccagtaacaagaccactctgcagaagatgggcaagaagcagaatggcaagtccaagaaagtggaggaagccgaacccgaagagttcgtggtggagaaggtgctggacagacgggtagtgaatggcaaagtggaatatttcctgaagtggaagggatttacagacgctgacaatacttgggaatag

SEQ ID NO: 171521 - DNA, 189 bp, Artificial Sequence
  derived and/or modified sequence
atggccagcaacaagaccaccctgcagaagatgggcaagaagcagaatggcaagagcaagaaggtggaggaggccgagcctgaggagtttgtggtggagaaggtgctggaccggcgggtggtgaatggcaaggtggagtacttcctgaagtggaagggcttcacagatgctgacaacacctgggagtag

SEQ ID NO: 171522 - DNA, 189 bp, Artificial Sequence
  derived and/or modified sequence
atggccagcaacaagaccaccctgcagaagatgggcaagaagcagaatggcaagtctaaaaaagtggaggaggccgaaccagaagaatttgtagtggaaaaagtgctggaccggcgggtcgtcaacggcaaggtcgagtactttcttaagtggaaaggatttactgacgccgataatacatgggaatag

SEQ ID NO: 171523 - DNA, 189 bp, Artificial Sequence
  derived and/or modified sequence
atggcaagcaataaaaccaccctgcagaagatgggtaagaagcaaaacgggaaatcaaagaaagtggaggaggctgagcccgaagagttcgtagtggagaaggtactggatcggcgtgtcgtcaacggcaaggttgaatatttcttgaaatggaaaggatttacggacgctgataacacttgggaatag

SEQ ID NO: 171524 - DNA, 1068 bp, Artificial Sequence
  derived and/or modified sequence
cttgagctgtaggcgcggagggccggagacgctgcagacccgcgacccggagcagctcggaggcggtgaagtcggtggctttccttctctctagctctcgctcgctggtggtgcttcagatgccacacgcgtcccgggggcccggttctccgctcccctcccctccccttctcgccggaccccgcgccgggagctgcgggaaggagtggagggtcgggcggtggcctcgcggctggcctggcgcgcggccagcgccggtagttagtggggggactgctctgccctcgagggggtagggagctgtggcgacggttgccccatttcgagacaaagcgcatttccccctcccctcccccacccgcgttccggcggaggcgccccctcccccagccgccacgcggggctgggtcgagacttgggcctcccggagggcggcgcgtggtcccgcgtccgcgaggcctggcggcgcgcggccggctgtcccgaggctgcggcgaccgcccagttaacgtggccgccgcgggggtaggcgcgtgcggtgtggcgcagtgcccttgagcccccgtgccgcggcctttgtttctccccgcggatgcgctgaccacgaggcccgcgctcccgggtgggggcgggcacccgcgcttaggcctctggacgccgggcttcagcggcgggggtcgggagcgggtgtttgcaagaggtgattcttttttcaaagtgtcacgaaacggggttgaagcatcttaagttttttccttttgttatttaattaccgattggaaagagggagggtttctgagcagaaaccaagttgggattgcagaacagagaagattcacagtgctttaccgtttaatagctcttcaagtctgcaataaaaaatggcctccaacaaaactacattgcaaaaaatgggaaaaaaacagaatggaaagagtaaaaaagttgaagaggcagagcctgaagaatttgtcgtggaaaaagtactagatcgacgtgtagtgaatgggaaagtggaatatttcctgaagtggaagggatttacagatgctgacaatacttgggaac

SEQ ID NO: 171525 - protein, 117 aa, Artificial Sequence
  derived and/or modified sequence
MKFVYKEEHPFEKRRSEGEKIRKKYPDRVPVIVEKAPKARIGDLDKKKYLVPSDLTVGQFYFLIRKRIHLRAEDALFFFVNNVIPPTSATMGQLYQEHHEEDFFLYIAYSDESVYGL

SEQ ID NO: 171526 - DNA, 1317 bp, Artificial Sequence
  derived and/or modified sequence
tggcgcaaattcgtggatcgctccgctgaatccgcccgcgcgtcgccgccgtcgtcgccgccccccgtcccggcccccctgggttccctcagcccagccctgtccagcccggttcccgggaggatgaagttcgtgtacaaagaagagcatccgttcgagaagcgccgctctgagggcgagaagatccgaaagaaatacccggaccgggtgccggtgatagtagaaaaggctcccaaagctcggataggagacctggacaaaaagaaatacctggtgccttctgatctcacagttggtcagttctacttcttgatccggaagcgaattcatctccgagctgaggatgccttgtttttctttgtcaacaatgtcattccacccaccagtgccacaatgggtcagctgtaccaggaacaccatgaagaagacttctttctctacattgcctacagtgacgaaagtgtctacggtctgtgaagctgctgcccctgagctggaggggggtctcattctacaaagagagaggtggcccccctttcttgacctcctcctccttcaagctcaaacaccacctcccttattcaggaccggcacttcttaatgtttgtggctttctctccagcctctcttaggaggggtaatggtggagttggcatcttgtaactctcctttctcctttcttcccctttctctgcccgcctttcccatcctgctgtagacttcttgattgtcagtctgtgtcacatccagtgattgttttggtttctgttccctttctgactgcccaaggggctcagaaccccagcaatcccttcctttcactaccttcttttttgggggtagttggaagggactgaaattgtggggggaaggtaggaggcacatcaataaagaggaaaccaccaagctgaactgaattttgccttgtgttgctcccctcgtcccgctgattttaagtctttccaaggtgtcagtgggtttcagtggtggggaaagaagagtactgggtacaagctggagggatagaagtatattttggtttattctgttcatgttgggcttttccctgtctgcaaaaagagggtgcttttgttgtgatggaatggaatactgaggattatttcttgaaactttagttttataacacgcatgtgaaactaaatgttaaaaatgctcatgtaaaaaaaaatttttttttactgtgggttcctgtggagaaagttccgaagtacctgctttaggtgaacatccacatttgctagaacattctaactaagatattttcatgtgtgcaagctagtaaaacggctgttctca

SEQ ID NO: 171527 - DNA, 354 bp, Artificial Sequence
  derived and/or modified sequence
atgaagtttgtatacaaggaagaacatcctttcgaaaaacggaggagtgagggtgagaagattaggaaaaagtatcccgaccgcgtcccggtgatcgtggaaaaagccccaaaggcacggataggcgatctggacaaaaagaaatatctggtgccctcagacctgactgtgggacagttttactttttgatccgcaagaggattcatctgcgcgccgaagacgcattattctttttcgtaaataacgtcattcctcctacatccgcaactatgggccagctgtatcaggaacaccacgaggaggactttttcttgtatatcgcctattccgatgaatctgtgtacgggctgtag

SEQ ID NO: 171528 - DNA, 354 bp, Artificial Sequence
  derived and/or modified sequence
atgaagtttgtgtacaaggaggagcacccctttgagaagagaagaagtgaaggagagaagatcaggaagaagtacccagacagagtgcctgtgattgtggagaaggcccccaaggccagaattggagacctggacaagaagaagtacctggtgcccagcgacctgactgtgggccagttctacttcctgatcaggaagaggatccacctgcgggcagaagatgccctcttcttctttgtgaacaacgtcatcccccccaccagcgccaccatgggccagctgtaccaggagcaccacgaggaggacttcttcctgtacatcgcctacagtgatgaatctgtgtatggcctgtag

SEQ ID NO: 171529 - DNA, 354 bp, Artificial Sequence
  derived and/or modified sequence
atgaagttcgtgtacaaggaggagcaccccttcgagaagcggcggagcgagggggaaaagatacggaagaagtaccccgatagagtccctgttattgtggaaaaggcacccaaggcccggatcggagatctggataagaaaaagtacctggtcccttcagacctcaccgtcggacagttttattttttgattagaaaaagaattcatctgcgggcggaagacgccttgttcttcttcgtcaacaacgtaattccacccacctcagcgacgatggggcagctctaccaagaacaccacgaagaggattttttcctgtatatcgcctattccgacgaatcggtgtacggcctgtag

SEQ ID NO: 171530 - DNA, 354 bp, Artificial Sequence
  derived and/or modified sequence
atgaaattcgtgtacaaggaggagcacccatttgagaagcgacgctctgagggcgaaaaaattcgcaagaaatacccggaccgggtgcctgtgatagtggagaaggctcccaaggcccgaatcggcgatctggacaaaaaaaagtacttggtacccagcgaccttacagtgggacaattttacttcctcattcggaagcggattcacctacgtgcagaggatgctctgtttttcttcgttaataacgttatacctccgacctctgccactatgggtcagttgtatcaggaacatcatgaagaagactttttcctatacatcgcttacagtgatgagtctgtttatggcctgtag

SEQ ID NO: 171531 - DNA, 354 bp, Artificial Sequence
  derived and/or modified sequence
atgaagttcgtgtacaaggaggagcaccccttcgagaagagaagaagcgagggcgagaagatcagaaagaagtaccccgacagagtgcccgtgatcgtggagaaggcccccaaggccagaatcggcgacctggacaagaagaagtacctggtgcccagcgacctgaccgtgggccagttctacttcctgatcagaaagagaatccacctgagagccgaggacgccctgttcttcttcgtgaacaacgtgatcccccccaccagcgccaccatgggccagctgtaccaggagcaccacgaggaggacttcttcctgtacatcgcctacagcgacgagagcgtgtacggcctgtag

SEQ ID NO: 171532 - protein, 475 aa, Artificial Sequence
  derived and/or modified sequence
MSDFDEFERQLNENKQERDKENRHRKRSHSRSRSRDRKRRSRSRDRRNRDQRSASRDRRRRSKPLTRGAKEEHGGLIRSPRHEKKKKVRKYWDVPPPGFEHITPMQYKAMQAAGQIPATALLPTMTPDGLAVTPTPVPVVGSQMTRQARRLYVGNIPFGITEEAMMDFFNAQMRLGGLTQAPGNPVLAVQINQDKNFAFLEFRSVDETTQAMAFDGIIFQGQSLKIRRPHDYQPLPGMSENPSVYVPGVVSTVVPDSAHKLFIGGLPNYLNDDQVKELLTSFGPLKAFNLVKDSATGLSKGYAFCEYVDINVTDQAIAGLNGMQLGDKKLLVQRASVGAKNATLVSPPSTINQTPVTLQVPGLMSSQVQMGGHPTEVLCLMNMVLPEELLDDEEYEEIVEDVRDECSKYGLVKSIEIPRPVDGVEVPGCGKIFVEFTSVFDCQKAMQGLTGRKFANRVVVTKYCDPDSYHRRDFW

SEQ ID NO: 171533 - DNA, 1428 bp, Artificial Sequence
  derived and/or modified sequence
atgagtgactttgatgagtttgagaggcagctgaacgaaaacaagcaagaacgcgataaggagaacagacatcgaaagaggagccatagtcgctccaggtctcgtgataggaaacgcagatctcgtagccgcgaccggaggaatcgggatcaaaggagcgcatctcgagatcgccgtcgaaggtctaagccactgacgcggggggctaaggaggaacacggcggattgattaggtcaccaagacacgagaagaaaaagaaggttcgtaaatattgggatgtaccaccaccagggttcgaacatataacccccatgcaatacaaggcaatgcaggccgccggccagattcctgccacagcgcttctgcccacgatgactcctgacggacttgcagtcacaccaaccccagtcccggtggttggatctcagatgacccgacaggcaaggcgtctgtacgtcggaaatatcccgtttggtataacagaagaagccatgatggactttttcaacgcacaaatgaggctcggagggctgacccaggccccgggcaaccccgtactggccgttcagataaaccaggacaaaaatttcgcctttctggagtttcggtcggtggacgaaaccacccaggcaatggcattcgatggcatcatatttcaaggacagtcattgaagatccgtcgtcctcacgactatcaaccgctgcctggaatgtcggagaatcccagcgtgtatgtgcccggagtggtgtcgaccgtggtgcccgactccgcgcataagctcttcattggcggcctcccaaactaccttaatgatgaccaggttaaggagctgctgacttccttcggacctctgaaggcctttaacctcgttaaggatagcgcgacaggtctgagcaagggttatgccttttgcgaatacgtggacattaacgtgacagatcaggccatcgcagggctaaacggcatgcagctgggggacaagaagctgcttgtgcagcgagcatctgtcggggccaagaatgcaactctggtttctcctcccagcacgatcaaccagacccccgtgacattgcaagtgccgggcttgatgagtagccaggtgcagatgggcggacatcctaccgaggttctttgcctcatgaatatggtcctgcctgaagagctactggatgacgaagaatatgaagaaattgtcgaggatgtgcgcgatgagtgcagcaagtacggactcgtcaaatccatcgaaatccctcgaccagtggacggtgtagaggttcctggatgcgggaaaatcttcgtcgaattcacatccgtttttgactgccagaaagctatgcaggggctgactggacgtaagttcgcaaaccgcgtggtcgtcacaaaatactgcgaccccgacagctaccaccggagagacttctggtag

SEQ ID NO: 171534 - DNA, 1428 bp, Artificial Sequence
  derived and/or modified sequence
atgtctgactttgatgaatttgagcggcagctgaatgaaaacaagcaggagcgggacaaggaaaatagacacaggaagaggagccacagccgcagccgcagccgggacaggaagagaagaagccgcagccgggacagaagaaacagagaccagaggtctgccagccgggacagaagaagaagaagcaagcccctgaccaggggggccaaggaggagcacggcggcctcatccgcagccccaggcatgagaagaagaagaaggtgaggaagtactgggatgtgcccccacctggctttgagcacatcacccccatgcagtacaaggccatgcaggccgccggccagatcccagccacagccctgctgcccaccatgaccccagatggcctggccgtgacccccacccctgtgcctgtggtgggcagccagatgacccggcaggcccggcggctgtatgtgggcaacatccccttcggcatcacagaggaggccatgatggacttcttcaatgcccagatgaggctgggcggcctgacccaggcccctggcaaccctgtgctggccgtgcagatcaaccaggacaagaactttgccttcctggagttccgctctgtggatgagaccacccaggccatggcctttgatggcatcatcttccagggccagagcctgaagatcagaagacctcatgactaccagcccctgcccggcatgtctgagaaccccagcgtgtatgtgcctggggtggtgtccacagtggtgcctgattctgcccacaagctgttcatcggcggcctgcccaactacctgaatgatgaccaggtgaaggagctgctgaccagctttggccccctgaaggccttcaacctggtgaaggacagcgccaccggcctgagcaagggctacgccttctgtgaatatgtggacatcaacgtgacagaccaggccatcgccggcctgaatggcatgcagctgggggacaagaagctgctggtgcagagggcctctgtgggcgccaagaatgccaccctggtgtccccacccagcaccatcaaccagacccctgtgaccctgcaggtgcccggcctgatgagcagccaggtgcagatgggcggccaccccacagaggtgctgtgcctgatgaacatggtgctgcctgaggagctgctggatgatgaggagtatgaggagatcgtggaggatgtgagagatgaatgttccaaatatggcctggtgaagagcattgagatccccaggcctgtggatggagtggaggtgcccggctgcggcaagatctttgtggagttcacctctgtgtttgactgccagaaggccatgcagggcctgaccggcaggaagtttgccaacagagtggtggtgaccaagtactgtgaccctgacagctaccacagaagagacttctggtag

SEQ ID NO: 171535 - DNA, 1428 bp, Artificial Sequence
  derived and/or modified sequence
atgagcgacttcgacgagttcgagcggcagctgaacgagaacaagcaggagcgcgacaaggaaaatcgccaccgtaaacgaagccattcgagaagcagatcacgggaccgcaagagaaggagtagatccagagacaggcggaatcgcgaccagcggtccgccagcagggatagacgacgccggagcaagccgcttactcgaggcgccaaagaggagcatggcgggctgattcggagcccacggcacgagaagaaaaaaaaagttcggaagtattgggatgtccccccacctggatttgagcatataacccccatgcaatataaggccatgcaagctgccggccagatcccggccacagcacttctccccactatgactcctgatggactggcagtgacaccgacccccgtgccagtggttggaagtcagatgacaaggcaggctcgccgactgtacgtcggcaatatcccgtttggaattacagaggaggcaatgatggacttcttcaacgcccaaatgcgcctgggcggattaactcaggcccctggtaatccggtgctcgctgtccagatcaatcaagacaagaattttgcatttctggaattcagatccgttgatgagaccacacaggcaatggcgtttgatgggattatttttcagggacagagcctgaaaattcgccggccacacgattatcagcccctgcctgggatgtcggaaaacccgtctgtgtacgtgcccggagtggtttcaaccgttgttccggattccgctcataaactgttcattggaggcctgccaaattatctcaatgacgaccaggtgaaggagctgcttacctcattcggtcccttgaaggcctttaacttggttaaagattctgcaacagggctgtctaaggggtacgcattctgcgagtatgtggacatcaacgtgactgaccaggccattgccggcttgaacggcatgcaactgggcgacaagaagttgctcgttcagcgcgcttctgttggtgctaagaacgcaaccctggtgagtccccctagcacaatcaatcagacacccgtgaccctgcaagtgcctggactcatgtccagtcaggttcaaatggggggacaccccacagaggttctttgcctgatgaacatggtactgccagaggagctgctcgacgacgaggaatacgaggaaattgtcgaggacgtcagagatgagtgctcaaagtatggcctcgtgaagtccattgagatccctcggcccgtggacggagtggaagtaccaggttgcggcaaaattttcgtggaattcactagcgtatttgactgtcagaaagccatgcagggcttgaccggaaggaaattcgcgaatcgggtcgtggttacaaaatactgtgatcctgactcgtaccaccgtcgcgacttttggtag

SEQ ID NO: 171536 - DNA, 1428 bp, Artificial Sequence
  derived and/or modified sequence
atgtctgactttgatgaattcgaaagacagctgaatgagaacaaacaggagcgtgataaggagaaccggcacagaaaaaggagtcacagtcgttcccggagcagagatcgcaagcgcagatcccgttccagggaccgacgcaatagggaccagcgaagtgcatcacgggaccggaggcgcagaagtaaaccactgacccgtggcgcaaaagaggaacacgggggattgatcagatcacccagacatgagaaaaagaaaaaggttcggaaatattgggacgtacctccaccagggttcgaacacatcacaccaatgcagtacaaggccatgcaagccgcaggtcagatccctgccactgccttgctgcctaccatgactcccgacggactcgccgttacccctacgcctgtccccgtggtgggcagtcagatgacccgccaagctcggaggctttatgttggcaatatcccattcggaattacagaggaggcaatgatggacttcttcaatgcccagatgaggctgggcggacttacccaagctcccggaaaccctgttctggccgtccagatcaatcaggacaagaatttcgcttttctggagtttcgatcggtggatgagaccacgcaggctatggccttcgatggcatcatcttccaaggccagtcattaaagataagacgaccgcacgactaccaacctcttcccggtatgagcgaaaatccctccgtctacgtgccaggggtggtttcaactgtcgtcccggattccgcccataaacttttcataggaggattgcccaactacctgaatgacgaccaggtaaaggagctcctgacttcgtttggccctctgaaagctttcaacttggttaaggattcggcaaccgggctgtccaagggctacgctttttgcgaatacgttgacataaacgtgaccgaccaggccatcgctggactgaatgggatgcagctaggagacaagaaactcctcgtgcaaagagcttccgttggcgcaaaaaatgctactcttgtctcacccccatctactatcaaccagactccagtgaccttgcaagtgcctggcctgatgagctcccaggttcagatgggtgggcatccaactgaggtgctctgtttgatgaatatggtgctgccagaggaacttctagacgacgaagaatatgaagaaatagtggaagacgtacgggacgagtgctccaagtatgggttggttaagagcatcgagataccccgaccagtagacggagttgaggtgcctggctgcggtaagatcttcgtggaattcactagcgtgttcgactgccagaaggctatgcagggcctcaccggccgtaaattcgccaaccgcgtggttgtgacaaaatattgtgacccggactcataccacagaagagacttctggtag

SEQ ID NO: 171537 - DNA, 3130 bp, Artificial Sequence
  derived and/or modified sequence
ggagagcgcgccacagaacgacttttacgcaggcgcagaagcctgtttcccctcacccgcggcttccaccctgcgcaggcgcaaaaagccgcgctggcaacctccgcagcggtcgcgcgcacccttcatccctcttgctgcttttgtctggcacaaccttctcaggccctccgcgaggccggccctttttttctttcactttccccacccggagagccaggtgccgagaactaggacctcgtccccttctctatcccttcccctgatccatctcgtctctgttctccttcccttttccgttcccgaagccggaaggagccgaggtacccacggaaaaagtcgaagctgtccccggagagtgaggccttcacgaagcggtggcggaaggagccgaagttctctgatcggaggcgtgagcaagtggcatctccggaaagagccgaaacacggactcgagcttaatcccaggaggggcccgagggcgagatccggaaatctccggaaagagccgaaggccgggacggttaggattgtcggaagtggccgattgcttggacagggccggcggagaagatcggagcaagtccgtggaagaagccaaagactgggacggattgaattgttggaagaacccgaactcgcagaggggactgggcgcagtggcacacgaggacacacggaaacctccgaacgttgaggagataatctcggaaaagttacggaaacctgggaagtcggcgaaaccctacgttcgggtgttttcggaagcagccgaagcggccgcctgcttcgccttcgtccagtatccggagatagccgaggcgcttcggagccaggctcggggggaggggcaagctcgcgggcgggcgggcgggtgagggggcggagcccgggcggggcggggagggctgccggaggcttgattaggtaggaggtggcgaagcgccggcggcggccggaagtagccgaagccagcggcggaagtagccgaagcggctggagcgggcggcaaggcgaggcgaaagctgcacagggccctacgcggccgcctcagcatgtcggacttcgacgagttcgagcggcagctcaacgagaataaacaagagcgggacaaggagaaccggcatcggaagcgcagccacagccgctctcggagccgggaccgcaaacgccggagccggagccgcgaccggcgcaaccgggaccagcggagcgcctcccgggacaggcgacgacgcagcaaacctttgaccagaggcgctaaagaggagcacggtggactgattcgttccccccgccacgagaagaagaagaaggtccgtaaatactgggacgtgccacccccaggctttgagcacatcaccccaatgcagtacaaggccatgcaagctgcgggtcagattccagccactgctcttctccccaccatgacccctgacggtctggctgtgaccccaacgccggtgcccgtggtcgggagccagatgaccagacaagcccggcgcctctacgtgggcaacatcccctttggcatcactgaggaggccatgatggatttcttcaacgcccagatgcgcctgggggggctgacccaggcccctggcaacccagtgttggctgtgcagattaaccaggacaagaattttgcctttttggagttccgctcagtggacgagactacccaggctatggcctttgatggcatcatcttccagggccagtcactaaagatccgcaggcctcacgactaccagccgcttcctggcatgtcagagaacccctccgtctatgtgcctggggttgtgtccactgtggtccccgactctgcccacaagctgttcatcgggggcttacccaactacctgaacgatgaccaggtcaaagagctgctgacatcctttgggcccctcaaggccttcaacctggtcaaggacagtgccacggggctctccaagggctacgccttctgtgagtacgtggacatcaacgtcacggatcaggccattgcggggctgaacggcatgcagctgggggataagaagctgctggtccagagggcgagtgtgggagccaagaatgccacgctggtgagccccccgagcaccatcaatcagacgcctgtgaccctgcaagtgccgggcttgatgagctcccaggtgcagatgggcggccacccgactgaggtcctgtgcctcatgaacatggtgctgcctgaggagctgctggacgacgaggagtatgaggagatcgtggaggacgtgcgggacgagtgcagcaagtacgggcttgtcaagtccatcgagatcccccggcctgtggacggcgtcgaggtgcccggctgcggaaagatctttgtggagttcacctctgtgtttgactgccagaaagccatgcagggcctgacgggccgcaagttcgccaacagagtggttgtcacaaaatactgtgaccccgactcttatcaccgccgggacttctggtagaggcggctgggggagggtgggggcagggctggctgggggcttctccccactcccgccccccccttatccccctctgaagacgatgggcagaggagtgacagccgcagacacacgacagccggcagcaactggaatggcagcaattaagggtggggggcgggggttggggggttggggggttagggcagggaggggactggggaagtgcgcacacagcccacacagacaacacgcacccacacagacacagagggaaggggttgggatggggacagggtgcacagcagggcggggtaggaccccagcccctcccaaaacagcctctccttctcccatagacccctttcttctccccttccccacggtaggaacatagcgtgtttatattttatggccaaactattttgaattttgttgtccggccctcagtgccctgccctctcccttaccaggaccacagctctgttccttcggcctctggtcctctctggtcccctcctgggtttcttacgtagttgatttttcctctttagtctcccccgacctgcgcccagccccgtggcccctgcccctctcctactctctgtggcagtttcatatttgctaagacgaatttgctcattaaacattttgttgtattttacttt

SEQ ID NO: 171538 - DNA, 1428 bp, Artificial Sequence
  derived and/or modified sequence
atgagcgacttcgacgagttcgagagacagctgaacgagaacaagcaggagagagacaaggagaacagacacagaaagagaagccacagcagaagcagaagcagagacagaaagagaagaagcagaagcagagacagaagaaacagagaccagagaagcgccagcagagacagaagaagaagaagcaagcccctgaccagaggcgccaaggaggagcacggcggcctgatcagaagccccagacacgagaagaagaagaaggtgagaaagtactgggacgtgcccccccccggcttcgagcacatcacccccatgcagtacaaggccatgcaggccgccggccagatccccgccaccgccctgctgcccaccatgacccccgacggcctggccgtgacccccacccccgtgcccgtggtgggcagccagatgaccagacaggccagaagactgtacgtgggcaacatccccttcggcatcaccgaggaggccatgatggacttcttcaacgcccagatgagactgggcggcctgacccaggcccccggcaaccccgtgctggccgtgcagatcaaccaggacaagaacttcgccttcctggagttcagaagcgtggacgagaccacccaggccatggccttcgacggcatcatcttccagggccagagcctgaagatcagaagaccccacgactaccagcccctgcccggcatgagcgagaaccccagcgtgtacgtgcccggcgtggtgagcaccgtggtgcccgacagcgcccacaagctgttcatcggcggcctgcccaactacctgaacgacgaccaggtgaaggagctgctgaccagcttcggccccctgaaggccttcaacctggtgaaggacagcgccaccggcctgagcaagggctacgccttctgcgagtacgtggacatcaacgtgaccgaccaggccatcgccggcctgaacggcatgcagctgggcgacaagaagctgctggtgcagagagccagcgtgggcgccaagaacgccaccctggtgagcccccccagcaccatcaaccagacccccgtgaccctgcaggtgcccggcctgatgagcagccaggtgcagatgggcggccaccccaccgaggtgctgtgcctgatgaacatggtgctgcccgaggagctgctggacgacgaggagtacgaggagatcgtggaggacgtgagagacgagtgcagcaagtacggcctggtgaagagcatcgagatccccagacccgtggacggcgtggaggtgcccggctgcggcaagatcttcgtggagttcaccagcgtgttcgactgccagaaggccatgcagggcctgaccggcagaaagttcgccaacagagtggtggtgaccaagtactgcgaccccgacagctaccacagaagagacttctggtag

SEQ ID NO: 171539 - protein, 229 aa, Artificial Sequence
  derived and/or modified sequence
MAAQPLRHRSRCATPPRGDFCGGTERAIDQASFTTSMEWDTQVVKGSSPLGPAGLGAEEPAAGPQLPSWLQPERCAVFQCAQCHAVLADSVHLAWDLSRSLGAVVFSRVTNNVVLEAPFLVGIEGSLKGSTYNLLFCGSCGIPVGFHLYSTHAALAALRGHFCLSSDKMVCYLLKTKAIVNASEMDIQNVPLSEKIAELKEKIVLTHNRLKSLMKILSEVTPDQSKPEN

SEQ ID NO: 171540 - DNA, 1236 bp, Artificial Sequence
  derived and/or modified sequence
gagctgtgcttggggcggggcctggcgtgtattcgaaaggaaggcgccggctgcgggaagatggcggctcagccgctgcggcatcgctcacgttgtgcaacgccgccccggggggacttttgtggtggcactgagagggcgattgaccaagcttcttttacgacctccatggagtgggatacgcaggtggtgaaggggtcctcgccgctcggccccgcagggctgggggctgaggagccagccgccggcccgcagctgccgtcttggctgcagcctgagaggtgcgctgtgttccagtgcgcacagtgtcacgcagtgctcgccgactcggtgcacctcgcctgggacctgtcgcggtccctcggggccgtggtcttctccagagttacaaataacgtcgttttggaagcgcccttcctagttggcattgaaggttcactcaaaggcagtacttacaaccttttattctgtggttcttgtgggattcccgttggtttccatctgtattctacccatgctgccctggctgccttgagaggtcacttctgcctttccagtgacaaaatggtgtgctatctcttaaaaacaaaagccatagtaaatgcatcagagatggatattcaaaatgttcctctatcagaaaagattgcagagctgaaagagaagatagtgctaacgcacaatcgcttaaaatcactaatgaagattctgagtgaagtgactcctgaccagtccaagccagaaaactgatcctgtaccaaagcttgagtgtcaggttcaggctttattgctgtcttcaacaacaggtgctgcttagtcatttcttgaaaaagattggcttcaagaatggaggggaaatgcagtttctatttacctttaggctgattttccaaattatttgtgaagctgtttttagaagatgagagactaaggattcttctcttttatagctatttgccttaagaacttactttagattcttattgaattcataatacttatctctgaaaatgtctttgactgtaaatttaggaattaagatgcagagtcccatgtgtcctctgatctaaagttgcatggttggtctgaaaatagagttgggcttaatgttgacttctattactcctgcatggagcagttgttatgaatactaatacatcactttttaacttctgtaaaatacagatcataatattctataggtaatgtttaataaattgcctgaataatatacaa

SEQ ID NO: 171541 - DNA, 690 bp, Artificial Sequence
  derived and/or modified sequence
atggctgcacagcctctgcgccatagatccagatgcgctactccaccccggggagatttctgtggcgggacagaaagagccatcgaccaagccagcttcacaacatccatggagtgggatacacaggtagtgaagggcagctctcctctaggcccggccggccttggggctgaggagcctgctgcagggccacaactgcccagctggttacagcccgaacgctgcgccgtgttccaatgcgctcaatgtcatgccgttctagctgactctgtccacctggcctgggatctaagccgaagtttaggcgctgttgtgtttagccgggtgaccaataacgtggtattagaggcaccattcttggtgggcatcgagggtagcttaaaggggtccacgtacaacctgctgttttgtggaagttgtggaatccccgtgggattccacctgtactccacccatgctgcgctagccgcccttagggggcacttctgcctcagctcagacaaaatggtctgttacttattaaagactaaagccatcgtaaacgcaagtgagatggatattcaaaatgtccctctgtccgagaaaatcgcagaacttaaagaaaagatcgtcctgacccataacaggctgaagagtttaatgaaaatactgagcgaggtgacccctgatcagtccaagccggagaattag

SEQ ID NO: 171542 - DNA, 690 bp, Artificial Sequence
  derived and/or modified sequence
atggccgcccagcccctgcggcacaggagccgctgtgccaccccacccaggggggacttctgtggcggcacagagcgggccatcgaccaggccagcttcaccacctccatggagtgggacacccaggtggtgaagggcagcagccccctgggccctgctggcctgggcgctgaggagcctgctgctggcccccagctgcccagctggctgcagcctgagcgctgtgctgtgttccagtgtgcccagtgccacgctgtgctggccgacagcgtgcacctggcctgggacctgagccgcagcctgggcgctgtggtgttcagccgggtgaccaacaacgtggtgctggaggcccccttcctggtgggcatcgagggcagcctgaagggcagcacctacaacctgctcttctgtggcagctgtggcatccctgtgggcttccacctgtacagcacccatgctgccctggccgccctgcggggccacttctgcctgagcagtgacaagatggtgtgctacctgctgaagaccaaggccatcgtgaatgccagcgagatggacatccagaatgtgcccctgtctgagaagattgctgagctgaaggagaagatcgtgctgacccacaaccggctgaagagcctgatgaagatcctgtctgaggtgaccccagaccagagcaagccagagaactag

SEQ ID NO: 171543 - DNA, 690 bp, Artificial Sequence
  derived and/or modified sequence
atggccgcccagcccctgcggcaccggagccggtgcgccacccccccaaggggagacttctgcggcggcaccgaaagagccatcgaccaggcgtcattcactaccagcatggaatgggacacccaagttgtcaagggcagctcccccctgggccctgcgggacttggagctgaggagccagctgcaggaccccaattaccgtcctggctccagccagaaagatgtgccgtgttccaatgcgctcaatgtcatgccgtgttagctgacagtgtgcatttggcctgggatctgtcccggagcctcggagctgtcgtatttagccgcgtgaccaacaatgtggtgcttgaggcccctttcctagtagggattgagggtagtctaaaagggtctacttataatctgctattttgtggttcatgtggcatcccagtgggattccatctttacagcacacacgcagccctcgccgccctcagagggcacttttgtctctcatctgacaaaatggtatgttatctattaaaaaccaaagccatagtaaacgccagcgagatggacattcagaatgtccccctgtccgagaagattgcagagttgaaagaaaagatcgtcctgactcacaatcgcctgaagtcacttatgaagatcttatcagaggtgacgcccgatcagagcaaacctgaaaattag

SEQ ID NO: 171544 - DNA, 690 bp, Artificial Sequence
  derived and/or modified sequence
atggcggcacagccattgaggcatagaagcaggtgcgctacgccaccacgcggagatttctgcggcggaaccgaacgggcaatcgaccaagccagctttacgaccagcatggaatgggatacccaggttgtgaaaggatcctcgcctttagggcctgccggattaggcgcagaagagcctgccgcagggccacagctgccttcctggctgcaacctgaaaggtgtgccgtgtttcagtgtgcacagtgccatgcagtattggctgattctgtgcatcttgcctgggacctgtctcggagtctgggagccgtggtcttcagtcgggttacaaacaacgttgtcctcgaggcgccatttctcgttggcatagagggttccttaaaagggagcacgtacaaccttcttttctgtgggagctgtggtatccctgtgggattccatttgtactctacacacgctgccctggccgctctgcgcggacacttctgcctgagtagcgataagatggtgtgttatctgctgaaaactaaagctatcgttaacgctagcgagatggatattcagaacgtccccttgtctgaaaagattgctgaactgaaagaaaagatcgtgctcacccataacaggctgaagtctttaatgaagattctgagcgaagtaacgcccgatcaatcgaagcctgaaaactag

SEQ ID NO: 171545 - DNA, 690 bp, Artificial Sequence
  derived and/or modified sequence
atggccgcccagcccctgagacacagaagcagatgcgccaccccccccagaggcgacttctgcggcggcaccgagagagccatcgaccaggccagcttcaccaccagcatggagtgggacacccaggtggtgaagggcagcagccccctgggccccgccggcctgggcgccgaggagcccgccgccggcccccagctgcccagctggctgcagcccgagagatgcgccgtgttccagtgcgcccagtgccacgccgtgctggccgacagcgtgcacctggcctgggacctgagcagaagcctgggcgccgtggtgttcagcagagtgaccaacaacgtggtgctggaggcccccttcctggtgggcatcgagggcagcctgaagggcagcacctacaacctgctgttctgcggcagctgcggcatccccgtgggcttccacctgtacagcacccacgccgccctggccgccctgagaggccacttctgcctgagcagcgacaagatggtgtgctacctgctgaagaccaaggccatcgtgaacgccagcgagatggacatccagaacgtgcccctgagcgagaagatcgccgagctgaaggagaagatcgtgctgacccacaacagactgaagagcctgatgaagatcctgagcgaggtgacccccgaccagagcaagcccgagaactag

SEQ ID NO: 171546 - protein, 313 aa, Artificial Sequence
  derived and/or modified sequence
METGPEDPSSMPEESSPRRTPQSIPYQDLPHLVNADGQYLFCRYWKPTGTPKALIFVSHGAGEHSGRYEELARMLMGLDLLVFAHDHVGHGQSEGERMVVSDFHVFVRDVLQHVDSMQKDYPGLPVFLLGHSMGGAIAILTAAERPGHFAGMVLISPLVLANPESATTFKVLAAKVLNLVLPNLSLGPIDSSVLSRNKTEVDIYNSDPLICRAGLKVCFGIQLLNAVSRVERALPKLTVPFLLLQGSADRLCDSKGAYLLMELAKSQDKTLKIYEGAYHVLHKELPEVTNSVFHEINMWVSQRTATAGTASPP

SEQ ID NO: 171547 - protein, 313 aa, Artificial Sequence
  derived and/or modified sequence
MKTRPEDPSSMPEESSPRRTPQSIPYQDLPHLVNADGQYLFCRYWKPTGTPKALIFVSHGAGEHSGRYEELARMLMGLDLLVFAHDHVGHGQSEGERMVVSDFHVFVRDVLQHVDSMQKDYPGLPVFLLGHSMGGAIAILTAAERPGHFAGMVLISPLVLANPESATTFKVLAAKVLNLVLPNLSLGPIDSSVLSRNKTEVDIYNSDPLICRAGLKVCFGIQLLNAVSRVERALPKLTVPFLLLQGSADRLCDSKGAYLLMELAKSQDKTLKIYEGAYHVLHKELPEVTNSVFHEINMWVSQRTATAGTASPP

SEQ ID NO: 171548 - DNA, 942 bp, Artificial Sequence
  derived and/or modified sequence
atggagactggcccagaagatccaagtagtatgcccgaagagtcaagcccccgcagaaccccccagtccatcccatatcaggaccttccgcacttggtgaacgccgatggccaataccttttctgtaggtactggaagccgacaggcactcccaaggccctgatcttcgtttctcacggtgccggcgaacacagtggaaggtatgaagagctcgccagaatgttgatgggcctggacctgctggtcttcgcacatgaccatgtgggtcatggacagtcagagggggagcgaatggtggtttctgatttccacgtgttcgtgcgcgatgtcttgcagcacgttgactccatgcaaaaagattatcctgggttacctgtttttctattgggccattcaatgggtggagccatagcaatccttactgcggccgagaggccaggccactttgctggcatggtcctgatctctcccctcgttttagcaaaccctgagtccgctaccaccttcaaagttttggcagccaaggtgctcaatcttgtgctgcccaatctcagcttggggcctatcgatagcagcgttctcagcaggaacaagacagaggttgacatatacaacagtgaccctcttatttgtagggctgggctcaaagtctgcttcggaatccagctcctgaatgctgtctcacgggttgaacgcgctctgcctaagctgactgtcccattcctgctgttgcaaggatctgccgaccggttgtgcgactccaagggagcatatctgctcatggagctggccaagtcacaggacaaaactctcaaaatctatgaaggtgcctaccatgtgctgcataaggaactcccagaggtcactaactcggtctttcacgaaataaatatgtgggtgtcccagagaacagcaaccgccggcactgcgtccccaccgtag

SEQ ID NO: 171549 - DNA, 942 bp, Artificial Sequence
  derived and/or modified sequence
atggagactggacctgaggaccccagctccatgcctgaggagagcagccccaggaggaccccccagagcatcccctaccaggacctgccccacctggtgaatgctgatggccagtacctgttctgccgctactggaagcccaccggcacccccaaggccctgatctttgtgtcccatggagctggggagcacagcggccgctatgaggagctggccaggatgctgatgggcctggacctgctggtgtttgcccatgaccacgtgggccacggccagagcgagggggagaggatggtggtgtctgacttccacgtgtttgtgagagatgtgctgcagcacgtggacagcatgcagaaggactacccaggcctgcctgtgttcctgctgggccacagcatgggcggggccatcgccatcctgacagctgctgagcggcccggccactttgctggcatggtgctgatcagccccctggtgctggccaaccctgagagcgccaccaccttcaaggtgctggccgccaaggtgctgaacctggtgctgcccaacctgagcctgggccccatcgacagctctgtgctgagcaggaacaagacagaggtggacatctacaacagcgaccccctcatctgcagagctggcctgaaggtgtgcttcggcatccagctgctgaatgctgtgtcccgggtggagcgggccctgcccaagctgactgtgcccttcctgctgctgcagggcagcgctgaccggctgtgtgacagcaaaggagcctacctgctgatggagctggccaagagccaggacaagaccctgaagatctatgagggcgcctaccacgtgctgcacaaggagctgcctgaggtgaccaacagcgtcttccacgagatcaacatgtgggtgtcccagaggacagccacagctggaacagccagccccccatag

SEQ ID NO: 171550 - DNA, 4612 bp, Artificial Sequence
  derived and/or modified sequence
ctccatctttctagtccccaccttccccggtgcagacacccggcgaagcccacccggttttcccagcggcatttccgatgacagcttcggggctacgtgtcctgtgctgtcggagacgcacaggaagcaaagtttgtgagaagccttgggggcgactttgccttgggcacccgcatttgtgcgtctgcgaggtgcctcggtgtgcgcggagctagtttcccagtttcccgggcccctcccttctccgagcccctctagcgatttgtttaggaaaagtgatgacatgaactagtagtggagaatcgcagcgccgctccccgccctggggagggaggggagccccggagagcctgccggtgggagctggaagcaggctcccggctgagcgccccagcccgaaaggcagggtctgggtgcgggaagagggctcggagctgccttcctgctgccttggggccgcccagatgagggaacagcccgatttgcctggttctgattctccaggctgtcgtggttgtggaatgcaaacgccagcacataatggaaacaggacctgaagacccttccagcatgccagaggaaagttcccccaggcggaccccgcagagcattccctaccaggacctccctcacctggtcaatgcagacggacagtacctcttctgcaggtactggaaacccacaggcacacccaaggccctcatctttgtgtcccatggagccggagagcacagtggccgctatgaagagctggctcggatgctgatggggctggacctgctggtgttcgcccacgaccatgttggccacggacagagcgaaggggagaggatggtagtgtctgacttccacgttttcgtcagggatgtgttgcagcatgtggattccatgcagaaagactaccctgggcttcctgtcttccttctgggccactccatgggaggcgccatcgccatcctcacggccgcagagaggccgggccacttcgccggcatggtactcatttcgcctctggttcttgccaatcctgaatctgcaacaactttcaaggtccttgctgcgaaagtgctcaaccttgtgctgccaaacttgtccctcgggcccatcgactccagcgtgctctctcggaataagacagaggtcgacatttataactcagaccccctgatctgccgggcagggctgaaggtgtgcttcggcatccaactgctgaatgccgtctcacgggtggagcgcgccctccccaagctgactgtgcccttcctgctgctccagggctctgccgatcgcctatgtgacagcaaaggggcctacctgctcatggagttagccaagagccaggacaagactctcaagatttatgaaggtgcctaccatgttctccacaaggagcttcctgaagtcaccaactccgtcttccatgaaataaacatgtgggtctctcaaaggacagccacggcaggaactgcgtccccaccctgaatgcattggccggtgcccggctcatggtctgggggatgcaggcaggggaagggcagagatggcttctcagatatggcttgccaaaaaaaaaaaaaaaaaaaaatcagaaattggagaaatccttagcacaattttctaaaaaataacagacatttttgttatacattagactatcagacactggacctaccttaatggttagacactttatgcaaaaaaagagaaaggtcccaggtgattttccacaaagaatgtgctaaaatgtccactgaaaacaaagccaagcctctgccctgcctctcccagctcccacaagggttccaggaattcctggtgttcccaggacaccagactgcaataactggaggcgcctccttcctgcccacccttcgctcacgccccagcgccctctctgaccagcctccgcttggtggccttcctctggccgtgtgatgaggtggttgctgtctccataggggccagctccccagggcagactcacgtgcccctctgaggctcagaaaatgcccagcccttcctcaaaatgagcagccacccatgactttgtgggctccttgttagcctgagaccaggctttgcagaggggcggggggtgaggcttagcccagaaggagaactgagcaggaaaccaaggctcttctctgtcccctgcccttcccctcctgccagggggaggctcaggttggtccccgagtgccgcctgtactcacaaaggctgcctttcctctagagtcactaattttacctgatgctatgagagaatcatattgaagatgaaatgtctaatatataatgtatattttaaagcagagactattttggtggataggtgggagggagcaaggggagtttgagggaatcagagcttgatgctactgtacagaactggacaggttgggccggcagtggtggggccagagggctctgtgctctaggagctaagccagcagcccccgagaggggacttggctgggcctttcctatgggcaaggcccagtgctcttcctgcccaccagggaccatggagcagtggcaccctatggggctatgatccctaggcctgggcctgggcctgcctatggcccagagctaccctgggagtgtcagtgctagcagcacagctacctctggtggcaggagaagagaggcccagcacagcagcaggccaggccttcctgtccaggtctgcatggagcactcggtgacccagagcagggactggaggcacccccagccctgccccaggccacagcaggacaggccgggacaggcctcacccaaggccaaggctggcatcagccaatcattcagagctgaggccctgggcctagcctgcccttctcaggtgccaataccaccccagccctgcccttggcctcactttttcccagcaataagtggggttcaccacccgcctcgggaatactttccccttctaaatgggacttgctgttacctcaggaggctccttagtgcaaatatgaccctggtcagggctttgccaccgttgaagccctgcagaaggtgcaatgtaggggttctggggccacagaggagaggccacttcccaccaggacccccaacatgaagtctaggcctcaggggctcccgcccttcttcctccagcagcgggaactgccactgctctcccaggccctgttctggaggctaaccttggttcctggagagtgtgcccctccaccctccctccagcagccctgatcacaccatgagagccaggaacgggtcaccctgctgaagatcactctgtgccctgggggaggagccaagccctcaccccacaaggggcaggtgggggcttggttgctgacccggcccaagtccccacagagcaccttctgtagctccagcttgtctccctggcttctctttgaaggagaaaaatgtaaaatatgcactgagaaagccagccccgcctgcttagtcagccccggcagcagggcagccatgggaactcaggaaaagcaggaaccctttccaaaagcccagagatgccctgggctcagatctgtaattctcccaggagctgtgatagagcaggccacacaaagtccctacgcctccctgctgcctcccccagatgcatgtggtggcatcaccattccccaaattgaatatcagcatgcggcctgaccagggactctttagatgcatgaatttatttatatgaaggctctcacagagacacacacagcacttcagtagcatttgcattcctggttaaagaatcaccaatatttaaaataaaaactttcctgaaattgggactgtcatgttatccagaagggctggtacatccgcccaccatgtccccctgctgggtcaggagccaacacaggaccctgcgtgtgagcgtgcctgacatctcacgcacggccactccagagccggtccctgtccttggaaagctgtgaagccttgcgttgagttccttctcgatactgacggctccgtgctgacattctgagctctggagtcacaccagcgcaggggcgtggaggaactgaggtttggaaggaatgccaggtctcgcacagcttggcctcgagaaggtgagaggaaggcaaaggccagggaggggacccagagaggcctggcacacaaggcccaagcaccaccgtcaacacagcccagtccatacagaaatgggtttcatgcctgaaaagctttttacagaaagatgccgcctgtagccagtgacagccgcaaccctacaggcctcagttccttgcagaggtgaggggtagagagtcagcctccctcccttccagcagcgacccagcttccctccacttccaggtggtgctgggctcaccgagggagcactggtgggtgctctgaaaacccacaggatcccacctccaggcccacctgggtcccatctcactctcttcttctttcaccaattgctaacatagaccttgttgggatcacgatggcttcacaagccagctgttgggtttgctatgtcactgtggctcagtcacatccctgcgtgtatactgtctgcggggcacatatgtatccatttagagctaaaggaatcagtgtacactacagctaatcctaataaatccgatgttttcgg

SEQ ID NO: 171551 - DNA, 4941 bp, Artificial Sequence
  derived and/or modified sequence
gtcgccgcgaagccggtcgcgcgcagctcgtcccggccctggcccgccgcaaacgaggatccgctgcgctcggggaacgcgacagcggcgctcgtggccccggtaactgcctcccggcccctgccccagcccgccagtgccgccgtcaggggtggggagcagcactggggtcccggacacgcccggcgtgggctcccgctacccatgtgtgcgtgtgtgtgtgtgcacggtgtgtgtgcgcgcgtgtccgagtgtgcgcgcgtgtgcgcgcgcgcgcgccctccctgctccttcgcaccagcccccaaaccaacttgtccccatcaactccatctttctagtccccaccttccccggtgcagacacccggcgaagcccacccggttttcccagcggcatttccgatgacagcttcggggctacgtgtcctgtgctgtcggagacgcacaggaagcaaagtttgtgagaagccttgggggcgactttgccttgggcacccgcatttgtgcgtctgcgaggtgcctcggtgtgcgcggagctagtttcccagtttcccgggcccctcccttctccgagcccctctagcgatttgtttaggaaaagtgatgacatgaactagtagtggagaatcgcagcgccgctccccgccctggggagggaggggagccccggagagcctgccggtgggagctggaagcaggctcccggctgagcgccccagcccgaaaggcagggtctgggtgcgggaagagggctcggagctgccttcctgctgccttggggccgcccagatgagggaacagcccgatttgcctggttctgattctccaggctgtcgtggttgtggaatgcaaacgccagcacataatggaaacaggacctgaagacccttccagcatgccagaggaaagttcccccaggcggaccccgcagagcattccctaccaggacctccctcacctggtcaatgcagacggacagtacctcttctgcaggtactggaaacccacaggcacacccaaggccctcatctttgtgtcccatggagccggagagcacagtggccgctatgaagagctggctcggatgctgatggggctggacctgctggtgttcgcccacgaccatgttggccacggacagagcgaaggggagaggatggtagtgtctgacttccacgttttcgtcagggatgtgttgcagcatgtggattccatgcagaaagactaccctgggcttcctgtcttccttctgggccactccatgggaggcgccatcgccatcctcacggccgcagagaggccgggccacttcgccggcatggtactcatttcgcctctggttcttgccaatcctgaatctgcaacaactttcaaggtccttgctgcgaaagtgctcaaccttgtgctgccaaacttgtccctcgggcccatcgactccagcgtgctctctcggaataagacagaggtcgacatttataactcagaccccctgatctgccgggcagggctgaaggtgtgcttcggcatccaactgctgaatgccgtctcacgggtggagcgcgccctccccaagctgactgtgcccttcctgctgctccagggctctgccgatcgcctatgtgacagcaaaggggcctacctgctcatggagttagccaagagccaggacaagactctcaagatttatgaaggtgcctaccatgttctccacaaggagcttcctgaagtcaccaactccgtcttccatgaaataaacatgtgggtctctcaaaggacagccacggcaggaactgcgtccccaccctgaatgcattggccggtgcccggctcatggtctgggggatgcaggcaggggaagggcagagatggcttctcagatatggcttgccaaaaaaaaaaaaaaaaaaaaatcagaaattggagaaatccttagcacaattttctaaaaaataacagacatttttgttatacattagactatcagacactggacctaccttaatggttagacactttatgcaaaaaaagagaaaggtcccaggtgattttccacaaagaatgtgctaaaatgtccactgaaaacaaagccaagcctctgccctgcctctcccagctcccacaagggttccaggaattcctggtgttcccaggacaccagactgcaataactggaggcgcctccttcctgcccacccttcgctcacgccccagcgccctctctgaccagcctccgcttggtggccttcctctggccgtgtgatgaggtggttgctgtctccataggggccagctccccagggcagactcacgtgcccctctgaggctcagaaaatgcccagcccttcctcaaaatgagcagccacccatgactttgtgggctccttgttagcctgagaccaggctttgcagaggggcggggggtgaggcttagcccagaaggagaactgagcaggaaaccaaggctcttctctgtcccctgcccttcccctcctgccagggggaggctcaggttggtccccgagtgccgcctgtactcacaaaggctgcctttcctctagagtcactaattttacctgatgctatgagagaatcatattgaagatgaaatgtctaatatataatgtatattttaaagcagagactattttggtggataggtgggagggagcaaggggagtttgagggaatcagagcttgatgctactgtacagaactggacaggttgggccggcagtggtggggccagagggctctgtgctctaggagctaagccagcagcccccgagaggggacttggctgggcctttcctatgggcaaggcccagtgctcttcctgcccaccagggaccatggagcagtggcaccctatggggctatgatccctaggcctgggcctgggcctgcctatggcccagagctaccctgggagtgtcagtgctagcagcacagctacctctggtggcaggagaagagaggcccagcacagcagcaggccaggccttcctgtccaggtctgcatggagcactcggtgacccagagcagggactggaggcacccccagccctgccccaggccacagcaggacaggccgggacaggcctcacccaaggccaaggctggcatcagccaatcattcagagctgaggccctgggcctagcctgcccttctcaggtgccaataccaccccagccctgcccttggcctcactttttcccagcaataagtggggttcaccacccgcctcgggaatactttccccttctaaatgggacttgctgttacctcaggaggctccttagtgcaaatatgaccctggtcagggctttgccaccgttgaagccctgcagaaggtgcaatgtaggggttctggggccacagaggagaggccacttcccaccaggacccccaacatgaagtctaggcctcaggggctcccgcccttcttcctccagcagcgggaactgccactgctctcccaggccctgttctggaggctaaccttggttcctggagagtgtgcccctccaccctccctccagcagccctgatcacaccatgagagccaggaacgggtcaccctgctgaagatcactctgtgccctgggggaggagccaagccctcaccccacaaggggcaggtgggggcttggttgctgacccggcccaagtccccacagagcaccttctgtagctccagcttgtctccctggcttctctttgaaggagaaaaatgtaaaatatgcactgagaaagccagccccgcctgcttagtcagccccggcagcagggcagccatgggaactcaggaaaagcaggaaccctttccaaaagcccagagatgccctgggctcagatctgtaattctcccaggagctgtgatagagcaggccacacaaagtccctacgcctccctgctgcctcccccagatgcatgtggtggcatcaccattccccaaattgaatatcagcatgcggcctgaccagggactctttagatgcatgaatttatttatatgaaggctctcacagagacacacacagcacttcagtagcatttgcattcctggttaaagaatcaccaatatttaaaataaaaactttcctgaaattgggactgtcatgttatccagaagggctggtacatccgcccaccatgtccccctgctgggtcaggagccaacacaggaccctgcgtgtgagcgtgcctgacatctcacgcacggccactccagagccggtccctgtccttggaaagctgtgaagccttgcgttgagttccttctcgatactgacggctccgtgctgacattctgagctctggagtcacaccagcgcaggggcgtggaggaactgaggtttggaaggaatgccaggtctcgcacagcttggcctcgagaaggtgagaggaaggcaaaggccagggaggggacccagagaggcctggcacacaaggcccaagcaccaccgtcaacacagcccagtccatacagaaatgggtttcatgcctgaaaagctttttacagaaagatgccgcctgtagccagtgacagccgcaaccctacaggcctcagttccttgcagaggtgaggggtagagagtcagcctccctcccttccagcagcgacccagcttccctccacttccaggtggtgctgggctcaccgagggagcactggtgggtgctctgaaaacccacaggatcccacctccaggcccacctgggtcccatctcactctcttcttctttcaccaattgctaacatagaccttgttgggatcacgatggcttcacaagccagctgttgggtttgctatgtcactgtggctcagtcacatccctgcgtgtatactgtctgcggggcacatatgtatccatttagagctaaaggaatcagtgtacactacagctaatcctaataaatccgatgttttcggaa

SEQ ID NO: 171552 - DNA, 942 bp, Artificial Sequence
  derived and/or modified sequence
atggagaccggccccgaggaccccagcagcatgcccgaggagagctctcccagacggactccccaaagcatcccctatcaggatctgcctcatctggtgaacgctgacggtcagtacctattttgcaggtattggaagccgaccggtacccccaaagctctgattttcgtctctcacggtgcaggagaacacagtggacgctacgaagaattggcaagaatgttaatgggcctcgacctgctagtgttcgcacatgatcacgtggggcatggccagtccgaaggcgagcgaatggtggtgagtgacttccacgtattcgtacgcgatgtcttgcagcacgtcgatagcatgcagaaggattatcccgggctgcccgtctttttattaggccacagtatgggcggcgcaattgcgattttgactgccgcagagcggcctgggcacttcgcggggatggtgctcatctcccctctagtgctcgctaatccagaatccgcaactactttcaaggtactggcagctaaggtgttgaatctggtgctgcccaacctcagcctcggccctatcgatagttccgtgttatcccgcaataagaccgaagtcgatatctacaatagcgacccactgatctgtagagcaggtcttaaagtctgtttcgggatacaactgctgaatgcagtctctagagttgagagggcgctacccaaattaactgttccctttctcctattgcaggggtccgctgaccggctgtgcgactcaaagggagcctaccttctgatggaacttgccaagagccaagacaaaactctgaagatctacgagggcgcctatcacgtgttgcacaaggagctgcctgaggtgaccaattccgtgtttcatgaaatcaatatgtgggtgtctcagagaactgctaccgccggcacagcgtcccccccatag

SEQ ID NO: 171553 - DNA, 942 bp, Artificial Sequence
  derived and/or modified sequence
atggagactggccctgaagatccttcgtcaatgcccgaagagagctcacccaggaggacaccccaatccatcccttatcaggacttaccacacctggttaacgcggatgggcagtatcttttctgccgctactggaagccaaccggcacacctaaagccttgattttcgtgagccatggagccggagagcactctgggagatatgaggagttggctaggatgctcatgggactggatcttttggtgttcgcccacgaccacgtcgggcacgggcagtccgaaggggaacggatggtcgtgtccgattttcacgtattcgttcgagacgtgctgcagcacgttgattcaatgcagaaggactatcccggattgcccgttttcttactgggtcactctatgggcggagcaatagccatcctgacagccgctgagagacctggacatttcgctggaatggttttgatctccccactggttttagccaatccagaatcagcaactacttttaaggttctcgcagcgaaggtccttaacctggtcctgcccaacctttctctgggccctattgatagctccgtcctcagtcgaaacaagacagaagtggatatctataacagtgatccgttaatctgtcgagcagggctgaaggtgtgctttggaatccaactactcaatgcggtcagtcgggttgaaagggccctccctaagctgactgtacccttcctcctgctccaggggagcgccgatcggctgtgcgactctaaaggcgcttacctcctcatggaacttgccaagagtcaggacaaaactctcaagatctacgagggcgcataccacgtgttgcacaaggagttgccagaagtgaccaactctgtgtttcatgagataaacatgtgggtttctcagcgcactgccaccgccggtacggcttcccccccttag

SEQ ID NO: 171554 - DNA, 942 bp, Artificial Sequence
  derived and/or modified sequence
atggagaccggccccgaggaccccagcagcatgcccgaggagagcagccccagaagaaccccccagagcatcccctaccaggacctgccccacctggtgaacgccgacggccagtacctgttctgcagatactggaagcccaccggcacccccaaggccctgatcttcgtgagccacggcgccggcgagcacagcggcagatacgaggagctggccagaatgctgatgggcctggacctgctggtgttcgcccacgaccacgtgggccacggccagagcgagggcgagagaatggtggtgagcgacttccacgtgttcgtgagagacgtgctgcagcacgtggacagcatgcagaaggactaccccggcctgcccgtgttcctgctgggccacagcatgggcggcgccatcgccatcctgaccgccgccgagagacccggccacttcgccggcatggtgctgatcagccccctggtgctggccaaccccgagagcgccaccaccttcaaggtgctggccgccaaggtgctgaacctggtgctgcccaacctgagcctgggccccatcgacagcagcgtgctgagcagaaacaagaccgaggtggacatctacaacagcgaccccctgatctgcagagccggcctgaaggtgtgcttcggcatccagctgctgaacgccgtgagcagagtggagagagccctgcccaagctgaccgtgcccttcctgctgctgcagggcagcgccgacagactgtgcgacagcaagggcgcctacctgctgatggagctggccaagagccaggacaagaccctgaagatctacgagggcgcctaccacgtgctgcacaaggagctgcccgaggtgaccaacagcgtgttccacgagatcaacatgtgggtgagccagagaaccgccaccgccggcaccgccagccccccctag

SEQ ID NO: 171555 - protein, 117 aa, Artificial Sequence
  derived and/or modified sequence
MKWMFKEDHSLEHRCVESAKIRAKYPDRVPVIVEKVSGSQIVDIDKRKYLVPSDITVAQFMWIIRKRIQLPSEKAIFLFVDKTVPQSSLTMGQLYEKEKDEDGFLYVAYSGENTFGF

SEQ ID NO: 171556 - DNA, 1002 bp, Artificial Sequence
  derived and/or modified sequence
cgacagccggaagtcccgcctgccgtgtagtcgccgccgtcgctgccgctgccgctgccgccgtcgttgttgttgtgctcggtgcgctgagctccgcggctccgcgagccggttccgtccccttcccgccgccgccatgaagtggatgttcaaggaggaccactcgctggaacacagatgcgtggagtccgcgaagattcgagcgaaatatcccgacagggttccggtgattgtggaaaaggtctcaggctctcagattgttgacattgacaaacggaagtacttggttccatctgatatcactgtggctcagttcatgtggatcatcaggaaaaggatccagcttccttctgaaaaggcgatcttcctgtttgtggataagacagtcccacagtccagcctaactatgggacagctttacgagaaggaaaaagatgaagatggattcttatatgtggcctacagcggagagaacacttttggcttctgagggccattgctgggctaggtgcaccgtaactgcttgtgtatcttgtaaatagccagccattttcagttattataccagaacctcttcacatagacctattagtgcatttgtaactggatttatttcttaatatattggaaggttttgtttccttagactagtaaattatcatacagagttttattttgagtttttctttttgtgcattgtcctcatgcctgtattctccaggaaacttgtccttctggaaatcatattgaatgatatttctatatcgaagtgaggtaggtgcggtattaaagtgaaagggaaggtgatgcatttattctgggttatgcttgaagtgttagatggctaagtattaaaattatccaaattaaatccttagcagtcagaacacttgcttcactagaatatgccaactgccaatcatgttggactgagctaatttgttcctctttctgaaactattaaggtaaataattaacaataaaaattctcttataaaggca

SEQ ID NO: 171557 - DNA, 354 bp, Artificial Sequence
  derived and/or modified sequence
atgaagtggatgtttaaagaagaccatagccttgaacataggtgcgttgagtcggccaagatcagagcgaagtacccagatcgagtgcccgtgattgtagaaaaagtgagcggctcccagatcgtggatatagacaagcgaaagtatttggtcccatctgatatcacggtggcacagttcatgtggataatccggaaaagaattcagctgcctagtgagaaagcgatttttttgttcgttgacaaaaccgtgccacaatcatctttaacaatgggccagttgtatgaaaaagagaaggatgaggacggctttctgtacgtcgcctacagtggggagaatactttcggattttag

SEQ ID NO: 171558 - DNA, 354 bp, Artificial Sequence
  derived and/or modified sequence
atgaagtggatgttcaaggaggaccacagcctggagcaccgctgtgtggagagcgccaagatccgggccaagtacccagacagagtgcctgtgattgtggagaaggtgtctggcagccagatcgtggacatcgacaagaggaagtacctggtgcccagcgacatcaccgtggcccagttcatgtggatcatcaggaagaggatccagctgcccagcgagaaggccatcttcctgtttgtggacaagacagtgccccagagcagcctgaccatgggccagctgtatgagaaggagaaggatgaagatggcttcctgtatgtggcctacagcggggagaacaccttcggcttctag

SEQ ID NO: 171559 - DNA, 354 bp, Artificial Sequence
  derived and/or modified sequence
atgaagtggatgttcaaggaggaccacagcctggagcaccggtgcgttgaatcagctaaaatcagggccaaatacccggaccgggtacccgttatcgtcgaaaaggtctctggttcccagatcgtcgatatcgacaaacgcaagtaccttgtgccctccgatatcacggtggcacagtttatgtggattattaggaaacgcattcagcttccttctgagaaagcgattttccttttcgtcgataaaaccgtgccacaatcttcactgaccatgggtcagctgtatgaaaaggagaaggacgaggacggctttctgtacgtggcctacagtggtgagaatacatttggcttctag

SEQ ID NO: 171560 - DNA, 354 bp, Artificial Sequence
  derived and/or modified sequence
atgaaatggatgttcaaagaagaccattctctggaacaccggtgtgtagaaagcgccaagatccgcgctaagtatccagatagggtgcccgtcatagttgaaaaggtgagtgggtcccagatcgtcgacatcgacaagagaaaatacctggttccatccgacatcactgtcgcccagtttatgtggatcattagaaaaaggattcagctgccatcagaaaaagcgattttcttgttcgtggacaagacagtaccacagtccagcctcacgatgggtcagctgtatgagaaagagaaagatgaggatgggttcctgtacgtagcctattccggggaaaacacattcggattctag

SEQ ID NO: 171561 - DNA, 354 bp, Artificial Sequence
  derived and/or modified sequence
atgaagtggatgtttaaagaggatcactcattggaacacagatgtgttgaatctgctaaaatccgtgctaagtaccccgaccgagtgccagtcatcgtggaaaaggtgtccggatctcagatcgtagacattgataagaggaaatacctggttccctctgacattacagtggctcagtttatgtggatcatacgaaaaagaattcaactaccgagcgaaaaggccatttttctatttgtcgataaaacagtcccccaatctagcctgacaatgggccagctttacgaaaaagagaaggacgaagatggcttcctatacgttgcatatagtggggaaaatacatttggtttttag

SEQ ID NO: 171562 - DNA, 354 bp, Artificial Sequence
  derived and/or modified sequence
atgaagtggatgtttaaagaggatcactcattggaacacagatgtgttgaatctgctaaaatccgtgctaagtaccccgaccgagtgccagtcatcgtggaaaaggtgtccggatctcagatcgtagacattgataagaggaaatacctggttccctctgacattacagtggctcagtttatgtggatcatacgaaaaagaattcaactaccgagcgaaaaggccatttttctatttgtcgataaaacagtcccccaatctagcctgacaatgggccagctttacgaaaaagagaaggacgaagatggcttcctttacgttgcatacagtggtgagaacacattcggattttag

SEQ ID NO: 171563 - DNA, 354 bp, Artificial Sequence
  derived and/or modified sequence
atgaagtggatgttcaaggaggaccacagcctggagcacagatgcgtggagagcgccaagatcagagccaagtaccccgacagagtgcccgtgatcgtggagaaggtgagcggcagccagatcgtggacatcgacaagagaaagtacctggtgcccagcgacatcaccgtggcccagttcatgtggatcatcagaaagagaatccagctgcccagcgagaaggccatcttcctgttcgtggacaagaccgtgccccagagcagcctgaccatgggccagctgtacgagaaggagaaggacgaggacggcttcctgtacgtggcctacagcggcgagaacaccttcggcttctag

SEQ ID NO: 171564 - protein, 903 aa, Artificial Sequence
  derived and/or modified sequence
MEGYSEEASLLRHLEKVASEEEEVPLVVYLKENAALLTANGLHLSQNREAQQSSPAPPPAEVHSPAADVNQNLASPSATLTTPTSNSSHNPPATDVNQNPPATVVPQSLPLSSIQQNSSEAQLPSNGTGPASKPSTLCADGQPQAPAEEVRCSTLLIDKVSTPATTTSTFSREATLIPSSRPPASDFMSSSLLIDIQPNTLVVSADQEMSGRAAATTPTKVYSEVHFTLAKPPSVVNRTARPFGIQAPGGTSQMERSPMLERRHFGEKAPAPQPPSLPDRSPRPQRHIMSRSPMVERRMMGQRSPASERRPLGNFTAPPTYTETLSTAPLASWVRSPPSYSVLYPSSDPKSSHLKGQAVPASKTGILEESMARRGSRKSMFTFVEKPKVTPNPDLLDLVQTADEKRRQRDQGEVGVEEEPFALGAEASNFQQEPAPRDRASPAAAEEVVPEWASCLKSPRIQAKPKPKPNQNLSEASGKGAELYARRQSRMEKYVIESSSHTPELARCPSPTMSLPSSWKYPTNAPGAFRVASRSPARTPPASLYHGYLPENGVLRPEPTKQPPYQLRPSLFVLSPIKEPAKVSPRAASPAKPSSLDLVPNLPKGALPPSPALPRPSRSSPGLYTSPGQDSLQPTAVSPPYGGDISPVSPSRAWSPRAKQAPRPSFSTRNAGIEAQDRRESLPTSPPWTPGASRPPSSLDGWVSPGPWEPGRGSSMSSPPPLPPPPPMSPSWSERSVSPLRPETEARPPSRQLQALLARNIINAARRKSASPRSAGAENPRPFSPPRAPPPPPPPPPPPPRMRSPQPARPGSAAVPGAAFAPIPRSPLPAGPSSCTSPRSPLPAPPRPFLYRRSPTDSDVSLDSEDSGAKSPGILGYNICPRGWNGSLRLKRGSLPAEASCTT

SEQ ID NO: 171565 - DNA, 2712 bp, Artificial Sequence
  derived and/or modified sequence
atggagggctacagcgaggaggccagcctgctgagacacctggagaaggtggccagcgaggaggaggaggtgcccctggtggtgtacctgaaggagaacgccgccctgctgaccgccaacggcctgcacctgagccagaacagagaggcccagcagagcagccccgcccccccccccgccgaggtgcacagccccgccgccgacgtgaaccagaacctggccagccccagcgccaccctgaccacccccaccagcaacagcagccacaacccccccgccaccgacgtgaaccagaacccccccgccaccgtggtgccccagagcctgcccctgagcagcatccagcagaacagcagcgaggcccagctgcccagcaacggcaccggccccgccagcaagcccagcaccctgtgcgccgacggccagccccaggcccccgccgaggaggtgagatgcagcaccctgctgatcgacaaggtgagcacccccgccaccaccaccagcaccttcagcagagaggccaccctgatccccagcagcagaccccccgccagcgacttcatgagcagcagcctgctgatcgacatccagcccaacaccctggtggtgagcgccgaccaggagatgagcggcagagccgccgccaccacccccaccaaggtgtacagcgaggtgcacttcaccctggccaagccccccagcgtggtgaacagaaccgccagacccttcggcatccaggcccccggcggcaccagccagatggagagaagccccatgctggagagaagacacttcggcgagaaggcccccgccccccagccccccagcctgcccgacagaagccccagaccccagagacacatcatgagcagaagccccatggtggagagaagaatgatgggccagagaagccccgccagcgagagaagacccctgggcaacttcaccgccccccccacctacaccgagaccctgagcaccgcccccctggccagctgggtgagaagcccccccagctacagcgtgctgtaccccagcagcgaccccaagagcagccacctgaagggccaggccgtgcccgccagcaagaccggcatcctggaggagagcatggccagaagaggcagcagaaagagcatgttcaccttcgtggagaagcccaaggtgacccccaaccccgacctgctggacctggtgcagaccgccgacgagaagagaagacagagagaccagggcgaggtgggcgtggaggaggagcccttcgccctgggcgccgaggccagcaacttccagcaggagcccgcccccagagacagagccagccccgccgccgccgaggaggtggtgcccgagtgggccagctgcctgaagagccccagaatccaggccaagcccaagcccaagcccaaccagaacctgagcgaggccagcggcaagggcgccgagctgtacgccagaagacagagcagaatggagaagtacgtgatcgagagcagcagccacacccccgagctggccagatgccccagccccaccatgagcctgcccagcagctggaagtaccccaccaacgcccccggcgccttcagagtggccagcagaagccccgccagaaccccccccgccagcctgtaccacggctacctgcccgagaacggcgtgctgagacccgagcccaccaagcagcccccctaccagctgagacccagcctgttcgtgctgagccccatcaaggagcccgccaaggtgagccccagagccgccagccccgccaagcccagcagcctggacctggtgcccaacctgcccaagggcgccctgccccccagccccgccctgcccagacccagcagaagcagccccggcctgtacaccagccccggccaggacagcctgcagcccaccgccgtgagccccccctacggcggcgacatcagccccgtgagccccagcagagcctggagccccagagccaagcaggcccccagacccagcttcagcaccagaaacgccggcatcgaggcccaggacagaagagagagcctgcccaccagccccccctggacccccggcgccagcagaccccccagcagcctggacggctgggtgagccccggcccctgggagcccggcagaggcagcagcatgagcagccccccccccctgcccccccccccccccatgagccccagctggagcgagagaagcgtgagccccctgagacccgagaccgaggccagaccccccagcagacagctgcaggccctgctggccagaaacatcatcaacgccgccagaagaaagagcgccagccccagaagcgccggcgccgagaaccccagacccttcagcccccccagagccccccccccccccccccccccccccccccccccccccagaatgagaagcccccagcccgccagacccggcagcgccgccgtgcccggcgccgccttcgcccccatccccagaagccccctgcccgccggccccagcagctgcaccagccccagaagccccctgcccgccccccccagacccttcctgtacagaagaagccccaccgacagcgacgtgagcctggacagcgaggacagcggcgccaagagccccggcatcctgggctacaacatctgccccagaggctggaacggcagcctgagactgaagagaggcagcctgcccgccgaggccagctgcaccacctag

SEQ ID NO: 171566 - DNA, 2712 bp, Artificial Sequence
  derived and/or modified sequence
atggaaggctattcagaggaggcgtccctcctccgccacctggagaaggtcgcttctgaggaagaggaggtccccttggtggtctacctcaaagagaatgcggctctgctgacagccaatggcctgcatctctcccaaaaccgagaagcccagcagagttctcctgcgccccctcccgccgaggtccactctcccgcagccgacgtaaaccagaacctggctagccccagtgcgacgctcactacccctacctccaattcttcgcataatccccctgccaccgatgtgaaccagaatccacctgccaccgtggtgccccagagcctgccactatcatcaattcagcaaaattcttcagaggctcaactgcctagcaacgggacggggcccgcctctaaaccaagtacattatgtgctgacgggcaaccccaggcaccggccgaagaagtcaggtgtagtaccctgttgatcgataaggtgtcgacccctgccaccaccacctctacgttcagtagagaggctaccttaataccaagtagtaggccacccgccagtgacttcatgagctctagcctgctaatcgatattcagcctaacactcttgtggtctcagcggatcaggaaatgtccggtagggccgccgcaactactcccactaaggtttattctgaagtgcattttacgctggcgaaaccacccagcgtggttaaccggacggctagaccctttggtatccaggcacccggaggtacaagccagatggaacgctcgccgatgctggagcggcgccacttcggggaaaaggcaccagctccccagcctcccagcctgcccgaccgcagcccgaggccacagcgccacattatgtcccgctctcccatggtggaacgacgcatgatggggcagagatctccagcctcggagcgccgacccctcgggaacttcaccgccccccccacatatactgagacactctctaccgcaccactggcatcgtgggtgagatcacctccatcttattctgtcctttatcctagttccgacccaaagtcctcacacctgaaaggccaggccgtccccgcctcaaagacaggcattctggaggagagtatggccagacggggctcccgaaagagcatgtttacattcgtcgagaaaccaaaggtgacccccaaccccgacctgctcgacctggttcagaccgctgacgagaaaagacgtcagcgagatcaaggagaggtgggcgtggaggaagaaccctttgccctcggtgctgaggcatctaacttccagcaggaaccagctccaagggatcgagcgagtcccgctgcagctgaggaggtcgtgcccgaatgggcttcctgtttgaaatctccccgcattcaggccaagccaaaacctaagcccaaccagaatcttagcgaggcttctggtaagggagctgagctctacgcaaggagacagtcgcgcatggagaaatacgtgatcgagagcagttcccatactcccgaactggcccggtgcccaagccccactatgtccctcccctcttcatggaagtatcctaccaacgctcccggggcattccgggtggctagcaggtctcctgcccgcactccgccagcatcgttataccatggttacctccctgagaatggcgtcttgcgcccagagcctacgaagcagcccccctatcagctaagaccatctctgttcgtacttagccccattaaagagcctgccaaagtatcccctcgagccgcgagcccagccaaaccatcttctctggacctggtgccgaatttgcccaagggtgctttgcccccgagccccgccctgccgcggcccagtcggtcgtctcccggcttgtacacatcccctggtcaggattctcttcaacctaccgcggtgagccccccttatggcggtgacatcagcccggtctctcctagtcgagcgtggagcccgcgcgcgaagcaagcccctcggcctagtttttcgacccgtaatgctgggattgaggcgcaggatcggagggagtctctacctacgagtcctccatggaccccgggggccagtagacctccatcatctctcgatggatgggtaagcccaggcccctgggagcccggaaggggctcctccatgagttcaccccctcctctaccccccccaccacctatgagccccagttggtccgagcgctccgtgagccctctgagacctgaaacagaggctagaccgccatcgagacagctgcaggcattgctggctcgaaatattataaacgcagccagacggaagagtgcctcccccagatctgcaggcgctgagaatcctcggccgttttctccaccccgagcccccccgcccccacctccaccacctcccccccctcccaggatgcggagcccacaacctgccaggcctgggtcagcagccgtgcctggggcggctttcgcccctatcccaagatccccactcccggccggaccgtcctcttgcacgtcacctagatcccccctgcctgcaccgcccagaccattcctatacaggagaagccccacagattcagatgtgtcccttgactctgaagactcaggggccaagtctccaggcattctgggatacaatatctgtcctagaggctggaacgggtctctgcgcctgaagcgggggtctctgcccgcagaggcttcttgtaccacctag

SEQ ID NO: 171567 - DNA, 2712 bp, Artificial Sequence
  derived and/or modified sequence
atggagggctacagcgaggaggccagcctgctgcggcacctggagaaggtggccagcgaggaggaggaggtgcccctggtggtgtacctgaaggaaaatgctgccctgctgacagccaacggcctgcacctgagccagaaccgggaggcccagcagagcagccctgcccctcctcctgctgaggtgcacagccctgctgctgatgtgaaccagaacctggccagccccagcgccaccctgaccacccccaccagcaacagcagccacaaccccccagccacagatgtgaaccagaaccccccagccaccgtggtgccccagagcctgcccctgagcagcatccagcagaacagcagcgaggcccagctgcccagcaatggcaccggccctgccagcaagcccagcaccctgtgtgctgatggccagccccaggccccagctgaggaggtgcgctgcagcaccctgctgattgacaaggtgtccaccccagccaccaccaccagcaccttcagccgggaggccaccctcatccccagcagccggcccccagccagtgacttcatgagcagcagcctgctgattgacatccagcccaacaccctggtggtgtctgctgaccaggagatgagcggccgggccgccgccaccacccccaccaaggtgtacagcgaggtgcacttcaccctggccaagccacccagcgtggtgaacagaacagcccggcccttcggcatccaggcccctgggggcaccagccagatggagaggagccccatgctggagcggcggcactttggagagaaggccccagccccccagccccccagcctgcctgacaggagcccccggccccagaggcacatcatgagccgcagccccatggtggagaggaggatgatgggccagaggagccctgccagcgagcggcggcccctgggcaacttcaccgccccacccacctacacagagaccctgagcacagcccccctggcctcctgggtgcgcagccccccatcctacagcgtgctgtaccccagcagtgaccccaagagcagccacctgaagggccaggccgtgcctgccagcaagacaggcatcctggaggagagcatggcccggcggggcagcaggaagtccatgttcacctttgtggagaagcccaaggtgacccccaacccagacctgctggacctggtgcagacagcagatgagaagaggcggcagagggaccagggcgaggtgggcgtggaggaggagccctttgccctgggcgctgaggccagcaacttccagcaggagcccgccccccgggaccgggccagccctgctgctgctgaggaggtggtgcctgagtgggccagctgcctgaagagcccccgcatccaggccaagcccaagcccaagcccaaccagaacctgtctgaggccagcgggaaaggagctgagctgtatgcccggcggcagagcaggatggagaagtatgtgattgagagcagcagccacaccccagagctggcccgctgccccagccccaccatgagcctgcccagctcctggaagtaccccaccaatgcccctggggccttccgggtggccagccgcagccctgcccggaccccaccagccagcctgtaccacggctacctgcctgaaaatggagtgctgcggcctgagcccaccaagcagcccccctaccagctgcggcccagcctgtttgtgctgagccccatcaaggagcccgccaaggtgagccccagggctgccagccctgccaagcccagcagcctggacctggtgcccaacctgcccaagggggccctgccccccagccctgccctgccccggcccagccgcagcagccctggcctgtacaccagccctggccaggacagcctgcagcccacagctgtgtccccaccctatggaggagacatcagccctgtgagccccagccgggcctggagcccccgggccaagcaggccccccggcccagcttcagcaccagaaatgccggcatcgaggcccaggaccggcgggagagcctgcccaccagccccccctggacccctggggccagcaggcctcccagcagcctggatggctgggtgtccccaggcccctgggagcccggccggggcagctccatgagcagccccccacccctgcccccacctccacccatgagccccagctggagcgagaggtctgtgagccccctgcggcctgagacagaggcccggccccccagccggcagctgcaggccctgctggccaggaacatcatcaatgctgcccggaggaagagcgccagccccaggtctgctggagctgagaacccccggcccttcagccccccccgggcccctcctcctcctcctcctcctcctcctcctccacccaggatgaggagcccccagcctgcccggcccggcagcgctgctgtgcctggggccgcctttgcccccatccccaggagccccctgcctgctggccccagcagctgcaccagccccaggagccccctgcctgccccaccccggcccttcctgtaccgccgcagccccacagacagtgatgtgtccctggacagtgaagattctggggccaagagccctggcatcctgggctacaacatctgcccccggggctggaatggcagcctgcggctgaagaggggcagcctgcctgctgaggccagctgcaccacctag

SEQ ID NO: 171568 - DNA, 2712 bp, Artificial Sequence
  derived and/or modified sequence
atggagggctacagcgaggaggccagcctgctgcggcacctggagaaagttgcctcggaggaagaagaagtgccgttagttgtgtatttgaaagaaaacgcggcccttctcacagccaatggccttcacttgagccagaaccgagaggctcagcaatctagccctgccccccccccagccgaagttcactcacctgccgctgacgtcaaccagaatctggcatctccgagcgctacattaacgacacctacaagcaactcctcccacaaccctcccgcaacagatgtgaatcagaacccacctgccaccgtggtgccgcaaagtttgccactcagtagcatccagcagaactcttccgaggcccagcttccatcaaacgggacagggcccgctagtaagccgtcaactctttgtgcggatggccagccgcaggcgcccgctgaagaggtccggtgcagtaccctgttgatagacaaagtgtccactcctgctaccacaacttctactttttctcgcgaagcgacccttataccctcttcacggccccctgcttcagattttatgagttcctctctgctgattgacatacaaccaaacacgttagtggtgtccgccgatcaagagatgtcagggagagccgcggccaccactcccacaaaggtgtatagcgaggttcactttaccctggcgaaaccgccgtcagtagtgaatcgaaccgctagacccttcggaattcaggcacccgggggcacgtcccaaatggaaaggtctcccatgctggaacggagacacttcggggagaaagctccagccccccagccaccttccctgcctgaccggagcccgcggccccagcggcatatcatgtcaaggtcgccaatggtcgaacgtcgcatgatggggcagcggagcccagctagtgaacgtaggccactgggcaattttactgcacccccaacatacacagagaccttgtccactgctcccctagccagctgggtgcggtccccaccgtcttatagcgtgttgtatcctagctccgatccaaagtcatcccatctcaaaggccaggccgtgcctgcgtctaaaaccggtattttagaagagtcaatggcccgccgcggaagcaggaagtccatgtttacgtttgtagaaaaacctaaagttactcccaacccggatctgctagatctggtacagaccgctgacgaaaagcggaggcaaagggaccagggcgaagtcggggtcgaagaggagccgtttgccctgggtgccgaggcatccaactttcagcaggagccggcaccccgcgaccgagctagtcctgctgcagcggaggaggtggtccccgagtgggcgagttgtctgaaatctccccggatccaggctaaacccaaaccaaagcctaaccagaatttatccgaagcaagtggcaagggagctgagctgtacgctcgacgccagagcagaatggagaaatacgtaatagagagttcttctcatacgcctgagttggcccgctgcccttcccctaccatgagcctgcctagtagctggaaataccctacgaatgcccccggcgcctttcgagtggcatccaggagtcccgcccgtacgcctccagcctccctgtatcatggctacctgcccgaaaacggcgtgctgcgaccagagccaacaaagcaaccaccataccagctccggccctctcttttcgtgctgagcccgattaaagagcctgccaaagtgagcccacgggccgcatctccagctaaacccagcagtctcgacctagtgcccaacctgcccaagggcgccctccccccgagtcccgccctcccgcggccgagcaggagcagccccggactgtacacatcccccggccaggattcactccaacctacagcagtgtccccaccctacgggggtgacatttctcctgtgagcccttcaagggcctggtccccacgggccaagcaagccccccgcccatctttttcaactagaaacgccggtatagaggcacaggacagacgggaatcccttcctacttcaccaccttggactccaggcgctagtaggccaccctcaagtctggatggctgggtaagtcctggaccctgggagccaggccgcggttcgtctatgtcttctcctcctccattgcccccacctcctccaatgagtccctcttggtccgagcggagcgtgagtccgctcaggccagagaccgaggcacggccaccctcacgccagctgcaggccctgctcgctaggaatattataaatgccgcccggaggaaaagcgcatctccgcgtagcgcgggcgctgaaaatcctcggcccttcagtcctcctagagcaccaccacccccacccccccctccacccccacccccacgcatgcgaagcccccaaccggcgcgccctgggtccgctgccgtccctggggcagctttcgccccaattcccaggtcacccctccctgcaggtcccagctcatgcacatcaccgcgatctcctttgcctgctccccctcggcctttcctgtaccgacgttccccaacggacagtgatgtgtctttggattccgaagattctggggctaagagccctggaattttagggtacaatatctgccctagggggtggaacgggagcctccggctgaaaagaggctcactcccagccgaagcatcttgtaccacttag

SEQ ID NO: 171569 - DNA, 2712 bp, Artificial Sequence
  derived and/or modified sequence
atggaaggctacagtgaagaggcaagcctgctgcggcacctcgagaaggtagcaagtgaggaagaggaggtgcctctggtggtgtacctgaaagagaatgccgctctccttactgccaacggcctccacttgtcccagaacagagaagcacagcagtccagcccagcccctccacctgcagaagtgcactcacctgcagccgatgtaaatcaaaacctggcatctccgtcagcgactctcaccaccccaacgtccaacagctcacataatcccccagcaaccgacgttaatcaaaaccctcccgcaaccgtagtgcctcaatcattgccactgagtagcatccaacagaacagctctgaagcgcagctgccatcaaatgggacagggccagcatctaaaccatccacactgtgtgccgacggccaaccccaagctccagcagaggaggtccgatgttctacactacttatcgacaaggtgagcacaccggcaaccaccacctctacattttcacgtgaggccaccctgatcccatccagccgaccgccagctagcgatttcatgtccagcagtctgctcatagatatccagcctaacacgttggtcgtctctgccgatcaggaaatgtccggacgagccgctgccaccactccaactaaggtgtattctgaagtgcacttcacgctggccaagcctccctccgtggttaacaggaccgcccgtccatttggtatccaggcgcctggaggaacgtcacagatggagaggtcccctatgctcgaacggagacactttggcgaaaaggcgccagcccctcaacctccatcattgcccgatcgtagcccaagaccccagcgccacatcatgagtcgatcacccatggtagaaagacgcatgatgggacagcgtagtcccgctagtgaaaggcggccactgggaaacttcacagccccacccacctacaccgaaaccctctccaccgcacccctcgcctcatgggtgaggtcaccaccctcgtactccgtgctctacccgtcaagtgatcccaaaagttcccatctgaaaggccaggccgtccccgcttcgaagaccggaatcctcgaggaaagcatggccaggcggggttcgagaaaaagcatgtttaccttcgtggagaaaccaaaggtcacacccaatcccgacctcctggatctggtccagaccgccgatgaaaagaggagacaaagggaccaaggggaagtcggagtggaggaagagccattcgctcttggagcagaggcctctaactttcagcaagagcctgcccctagagatcgagcctctccagccgctgccgaggaagttgtaccggaatgggcctcttgtctgaagagtcccaggattcaggccaagcctaaacctaagccaaatcagaatttgagtgaagcgagtggtaagggggctgagctctacgccagacggcagagccgtatggaaaagtatgtcatcgaatcatcatcgcacactccagagctcgctagatgcccttcaccgaccatgagtctgccatcgtcctggaagtaccctacgaatgcgccaggtgctttccgtgtagcatcaagaagtcccgctcgtacaccaccggctagcttataccatggctacctcccagaaaatggagtccttaggcctgagcccacaaagcagcccccataccagttgagacccagtctctttgtgctgagtccgattaaagagccagctaaggtctccccgagggcggcaagcccagcgaaaccatcctccctcgatcttgttcctaatctgcctaagggtgctctgcccccaagtccagcccttcctaggccatcacgctcctcaccagggttgtatacttcccccggacaggattcactccagccgaccgcagtgtccccaccttacggtggagatatctccccagtgagtccatcccgcgcttggagtcctagggccaaacaggccccacggccttccttcagcactaggaatgccggtattgaggcccaggacaggcgagaatctctgcccacatcacccccatggacaccaggcgcttctaggcctccctccagcctggacggctgggtttcacccggaccttgggaaccaggcagaggctctagcatgagtagcccacctcctttaccccctccccctcccatgagccctagttggtctgaacggtctgtatcacctttacggcctgagaccgaggcgcgacccccatcaagacagctgcaggccttgctcgcgagaaatataattaacgccgctagaagaaaatccgcctctccacggtctgcgggtgccgagaaccctcgaccgttcagtccccctcgcgctcctcctcccccacctccaccacctccccctcctcccagaatgcggagcccccagcccgctcgccctggcagcgctgctgtgcccggagcagcatttgccccaattcccaggtcaccactgcccgcagggcctagtagctgcacatcgcctagatcacctctgccggctccacccaggccctttctctaccgtcgatcgccaaccgattcagacgtgagcctggactcagaagattccggagctaaaagcccagggattctggggtacaacatttgtccccgagggtggaacggttcgctgaggcttaaaaggggtagcttgccagcggaagcctcttgcaccacttag

SEQ ID NO: 171570 - protein, 660 aa, Artificial Sequence
  derived and/or modified sequence
MNPDLRRERDSASFNPELLTHILDGSPEKTRRRREIENMILNDPDFQHEDLNFLTRSQRYEVAVRKSAIMVKKMREFGIADPDEIMWFKKLHLVNFVEPVGLNYSMFIPTLLNQGTTAQKEKWLLSSKGLQIIGTYAQTEMGHGTHLRGLETTATYDPETQEFILNSPTVTSIKWWPGGLGKTSNHAIVLAQLITKGKCYGLHAFIVPIREIGTHKPLPGITVGDIGPKFGYDEIDNGYLKMDNHRIPRENMLMKYAQVKPDGTYVKPLSNKLTYGTMVFVRSFLVGEAARALSKACTIAIRYSAVRHQSEIKPGEPEPQILDFQTQQYKLFPLLATAYAFQFVGAYMKETYHRINEGIGQGDLSELPELHALTAGLKAFTSWTANTGIEACRMACGGHGYSHCSGLPNIYVNFTPSCTFEGENTVMMLQTARFLMKSYDQVHSGKLVCGMVSYLNDLPSQRIQPQQVAVWPTMVDINSPESLTEAYKLRAARLVEIAAKNLQKEVIHRKSKEVAWNLTSVDLVRASEAHCHYVVVKLFSEKLLKIQDKAIQAVLRSLCLLYSLYGISQNAGDFLQGSIMTEPQITQVNQRVKELLTLIRSDAVALVDAFDFQDVTLGSVLGRYDGNVYENLFEWAKNSPLNKAEVHESYKHLKSLQSKL

SEQ ID NO: 171571 - DNA, 1983 bp, Artificial Sequence
  derived and/or modified sequence
atgaacccggatcttcgccgggagagggatagcgcctccttcaatcccgagttactcacacatatcctggacgggtccccagagaagaccaggcgccggagagagatcgagaacatgatcctgaatgacccagattttcagcatgaggacctcaactttctgactcggagccagcgttatgaggtcgctgtcaggaagtcagccattatggtgaagaagatgcgggaatttggcatcgcagatcccgacgagatcatgtggtttaaaaaactccacctagtgaactttgtggagccagtggggcttaactactctatgttcatccccacactgctcaatcaggggactactgcacagaaagagaagtggctcttgtcctccaaaggactgcagatcatcggcacctacgcacagaccgaaatgggacatgggacacaccttaggggtctagaaactacagctacttacgatcccgagacccaggaattcatcctcaacagccctacagtgacatccattaaatggtggcctgggggcctgggtaagacatcaaaccacgctattgttctcgctcaactcatcaccaaaggcaagtgttatggtctacacgcctttattgttcccattagggaaatagggacccataaacccctgccaggcatcaccgttggcgacatcggtcccaagttcggatacgatgagatcgataatgggtacctaaaaatggataatcaccgcatccctagagagaacatgttgatgaagtatgcccaagtgaaacccgatggcacttatgtcaaaccattgtcaaacaagttgacttatggcaccatggtgttcgtaagatcattcctggtaggagaagccgcaagggccctgagtaaagcctgcactattgctattcgctacagcgccgtcaggcaccagtctgagattaaacccggggagcccgagccacagattctggatttccaaacccagcagtacaagctcttcccccttctggccacagcatacgccttccagtttgtgggggcttacatgaaggaaacttaccacagaatcaacgagggtataggccaaggtgatctgtcagaactgccagagctgcacgctttaaccgcgggcctgaaggccttcacgtcttggaccgccaataccggcattgaggcatgtcgcatggcctgtggaggacacgggtacagccattgctcagggcttcctaacatctacgttaatttcacacccagttgtacttttgagggggagaacacagtgatgatgctccagacggctcgcttcctcatgaagagttatgaccaagtgcattcaggaaagctggtttgtggtatggtgagttacttgaatgatctgcccagccagagaatccagccgcagcaagttgctgtgtggcccacaatggtggacattaactctccagagagcttaaccgaggcctataagctgagagcagccaggctggtcgagatcgccgcaaaaaatttacagaaggaggtcatccacaggaaatctaaagaagtcgcctggaatttgacatcagtggacttagtccgggcttctgaagctcactgtcattatgtggtggtcaaattgttttccgaaaaacttctcaagatccaagacaaggctattcaggccgtgcttagatctctatgtctgctgtactctctgtacggaataagccagaacgccggtgattttcttcaagggtccatcatgacagagccccagattacccaggtcaaccagagggttaaagagctgctgactttgattcgctcagacgcagtggccttggtggatgctttcgattttcaggacgttactctcggcagtgttttaggaagatacgacggcaacgtttacgaaaacctgtttgaatgggccaagaattctcctctgaacaaagccgaagttcacgagtcttacaaacacctgaagtcactgcagagtaagctctag

SEQ ID NO: 171572 - DNA, 1983 bp, Artificial Sequence
  derived and/or modified sequence
atgaacccagacctgcggcgggagcgggacagcgccagcttcaaccctgagctgctgacccacatcctggatggcagccctgagaagaccaggagaagaagagaaattgagaacatgatcctgaatgaccctgacttccagcacgaggacctgaacttcctgaccaggagccagagatatgaggtggccgtgaggaagagcgccatcatggtgaagaagatgagggagtttggaattgctgaccctgatgagatcatgtggttcaagaagctgcacctggtgaactttgtggagcctgtgggcctgaactacagcatgttcatccccaccctgctgaaccagggcaccacagcccagaaggagaagtggctgctgagcagcaagggcctgcagatcatcggcacctacgcccagacagagatgggccacggcacccacctgcggggcctggagaccacagccacctatgaccctgagacccaggagttcatcctgaacagccccaccgtgaccagcatcaagtggtggccaggcggcctgggcaagaccagcaaccacgccatcgtgctggcccagctgatcaccaagggcaagtgctacggcctgcacgccttcatcgtgcccatccgggagatcggcacccacaagcccctgcccggcatcaccgtgggggacatcggccccaagtttggctatgatgaaattgacaatggctacctgaagatggacaaccaccgcatcccccgggagaacatgctgatgaagtatgcccaggtgaagccagatggcacctacgtgaagcccctgagcaacaagctgacctacggcaccatggtgtttgtgcgctccttcctggtgggggaggccgcccgggccctgagcaaggcctgcaccatcgccatccgctacagcgctgtgcgccaccagagcgagatcaagccaggagagcctgagccccagatcctggacttccagacccagcagtacaagctgttccccctgctggccacagcctatgccttccagtttgtgggcgcctacatgaaggagacctaccaccgcatcaatgaaggaattggccagggcgacctgtctgagctgcctgagctgcacgccctgacagctggcctgaaggccttcacctcctggacagccaacacaggaattgaggcctgcaggatggcctgtggcggccacggctacagccactgcagcggcctgcccaacatctacgtgaacttcacccccagctgcacctttgaaggagaaaatacagtgatgatgctgcagacagcccgcttcctgatgaagagctatgaccaggtgcacagcggcaagctggtgtgtggcatggtgtcctacctgaatgacctgcccagccagaggatccagccccagcaggtggccgtgtggcccaccatggtggacatcaacagccctgagagcctgacagaggcctacaagctgcgggccgcccggctggtggagattgctgccaagaacctgcagaaggaggtgatccacaggaagagcaaggaggtggcctggaacctgacctctgtggacctggtgcgggccagcgaggcccactgccactacgtggtggtgaagctgttcagcgagaagctgctgaagatccaggacaaggccatccaggccgtgctgcggagcctgtgcctgctgtacagcctgtatggcatcagccagaatgctggggacttcctgcagggcagcatcatgacagagccccagatcacccaggtgaaccagagggtgaaggagctgctgaccctcatccgcagtgatgctgtggccctggtggatgcctttgacttccaggatgtgaccctgggctctgtgctgggccgctatgatggaaatgtgtatgagaacctgtttgagtgggccaagaacagccccctgaacaaggccgaggtgcatgagagctacaagcacctgaagagcctgcagagcaagctgtag

SEQ ID NO: 171573 - DNA, 1983 bp, Artificial Sequence
  derived and/or modified sequence
atgaaccccgacctgcggcgggagcgggacagcgccagcttcaaccccgaattgctgacccacatcttggacggaagcccagaaaagacaagacggcgccgggaaatcgaaaacatgatcctcaacgatcccgattttcaacacgaggatctgaattttctaacaaggtcacaaaggtatgaagtggccgtgcggaagtcagctatcatggttaaaaaaatgcgagagttcggtatcgctgatcctgatgaaatcatgtggttcaagaagcttcacctggtaaatttcgtagaacccgtgggtctgaattactccatgttcatccccaccctgctcaatcagggcacaacagcgcaaaaggagaagtggctgttatcttccaaaggcctgcagatcatcggtacatatgcacagaccgaaatgggccacgggacacatctgcgcggactggagaccacagccacctacgatcccgaaacacaggagttcatcctgaattcccccaccgtgacgtccatcaaatggtggccgggaggccttgggaagacttcaaatcacgccattgtgctggctcaactcattactaagggtaagtgttacgggctgcacgccttcatcgtgccaattagggagattgggactcataaaccgctgcccggaatcaccgtgggcgatatcggccccaaatttgggtacgacgagattgacaatggctacttgaagatggacaaccataggatccccagagagaacatgttaatgaaatacgcacaggtgaaaccggatgggacctacgtgaaaccactcagtaataagctcacttacgggaccatggtgttcgtccggtcattcctggttggcgaggctgcgcgtgcactctccaaagcctgtaccatagccattaggtattctgcggtccgacaccagagcgagataaagcccggcgagcccgagccacagattcttgacttccagacccagcagtacaagctgtttcccctcctcgcgaccgcttatgcttttcaatttgtaggagcctatatgaaggagacctaccatagaataaacgaggggatcgggcagggggatctatccgagttgcccgagcttcacgctctgaccgccggcctcaaggcctttacctcttggacagcgaacaccggaattgaggcctgccgcatggcatgtggaggacatggatatagccactgttccggcctgccaaacatctatgtcaactttaccccgtcctgtacttttgagggggagaacacagtgatgatgctgcagaccgctcgattcctaatgaagagctatgaccaggtccacagcggcaagctggtttgtggcatggtcagctacctgaacgatcttccatcacagagaatccagcctcagcaggtggcagtgtggcccaccatggttgacattaactcccccgaaagcctgactgaggcatataagctgagagcggcaaggctcgtggagatcgctgcaaaaaatctgcagaaggaagtgattcacaggaaaagcaaagaagttgcatggaatttgacctcagtcgacctggtgagagccagcgaagctcactgccactacgttgtggtcaaattgttcagcgagaagctgttgaaaattcaggataaagccattcaagctgttttaagaagcctgtgcttgctttatagtctctatggcatcagccagaatgcaggagatttccttcaggggtccattatgaccgagcctcagataacccaggtaaatcaaagagtaaaggagcttttaacgcttatacggtctgatgcagtagccctcgttgatgccttcgatttccaagatgtgaccctgggttccgtgcttggacgctatgacgggaatgtatacgaaaatcttttcgaatgggcaaagaactctccgctgaacaaggcagaggtgcacgaatcttacaagcatttgaagtctctccagtctaaactgtag

SEQ ID NO: 171574 - DNA, 1983 bp, Artificial Sequence
  derived and/or modified sequence
atgaaccctgatctgaggcgagaacgcgattctgcctcattcaatcccgagcttctcacccacattcttgacgggtctcctgagaagacacgcagacggagggagattgaaaacatgatccttaatgaccctgatttccaacatgaggacttaaattttctcaccaggagtcaaaggtacgaggttgctgtgcggaagtcagcaattatggtcaagaaaatgagagaatttggcattgcagacccagatgagatcatgtggtttaagaagttacacctggtgaatttcgtcgagcccgtcggccttaactattcaatgtttattcctacacttctgaaccagggcacgacagctcagaaggaaaagtggttactcagcagtaagggcctgcagattattggcacctacgcccagacagaaatggggcatggaacccacctcaggggcctcgaaaccacagccacctatgatccggagacacaggagttcatcctaaacagtcccactgttacttcaatcaagtggtggcccggtggactcgggaaaactagtaaccatgccatcgtcctcgcccaactgataaccaaaggcaagtgctatgggctgcacgcctttattgttcccatccgggagattgggacacacaaacccctgccgggtatcaccgtgggcgacataggcccaaaattcggatatgacgagatcgacaacggatatctgaagatggacaaccatcggatacctagagagaacatgctcatgaagtatgcgcaggtgaagccagatggtacgtatgttaagccgctgagcaataaactaacatacggcaccatggtgtttgtgcgttccttccttgtgggtgaagcggctcgggcactgtccaaagcatgtacaatcgcaattagatactccgccgtccggcaccaaagtgagataaaacctggcgagccggagcctcagattctagacttccagacacagcaatataagctctttcctctactggccaccgcttacgcatttcagtttgtgggtgcctatatgaaagaaacctaccataggatcaatgaaggcataggacaaggggacttgtcagagctgccagaactgcatgccctgaccgccggtttgaaagctttcacatcttggactgctaacactggcatagaagcatgtaggatggcgtgcggcggacacgggtactcgcactgctcaggcttacctaacatttatgttaattttacaccctcctgtaccttcgagggagagaacactgtgatgatgctgcagacagccaggttcctcatgaagagctacgatcaggtccacagcggaaagttagtttgcggaatggtgtcttatctgaatgaccttccctcacagcgtattcagccacagcaagttgcagtctggccaactatggtggacatcaatagcccagagagtctgactgaggcatataagctgcgggctgctcggcttgtggagatcgccgctaagaatctccaaaaggaggtgattcatcgaaagtccaaggaagtagcatggaatcttacaagtgtggatctggtgcgggcttccgaggcacactgtcactacgtggtagtgaagctcttcagtgaaaagctgctcaaaatccaagacaaggcaatccaggcagtactacggagtctttgtttgctgtacagtttatatggcatttcccagaatgccggtgactttctccaggggagcatcatgacagagcctcaaattacccaagtcaatcaacgtgtcaaagagctgcttactctgattcgcagcgatgcagtagccctggtcgacgcctttgatttccaggatgttactctgggatccgtgctcggcagatatgacggaaatgtctacgagaatctatttgaatgggccaagaactctcctctgaacaaggctgaggtccatgaatcctacaagcacctgaagtccctgcagtcgaagctgtag

SEQ ID NO: 171575 - DNA, 1983 bp, Artificial Sequence
  derived and/or modified sequence
atgaaccccgacctgagaagagagagagacagcgccagcttcaaccccgagctgctgacccacatcctggacggcagccccgagaagaccagaagaagaagagagatcgagaacatgatcctgaacgaccccgacttccagcacgaggacctgaacttcctgaccagaagccagagatacgaggtggccgtgagaaagagcgccatcatggtgaagaagatgagagagttcggcatcgccgaccccgacgagatcatgtggttcaagaagctgcacctggtgaacttcgtggagcccgtgggcctgaactacagcatgttcatccccaccctgctgaaccagggcaccaccgcccagaaggagaagtggctgctgagcagcaagggcctgcagatcatcggcacctacgcccagaccgagatgggccacggcacccacctgagaggcctggagaccaccgccacctacgaccccgagacccaggagttcatcctgaacagccccaccgtgaccagcatcaagtggtggcccggcggcctgggcaagaccagcaaccacgccatcgtgctggcccagctgatcaccaagggcaagtgctacggcctgcacgccttcatcgtgcccatcagagagatcggcacccacaagcccctgcccggcatcaccgtgggcgacatcggccccaagttcggctacgacgagatcgacaacggctacctgaagatggacaaccacagaatccccagagagaacatgctgatgaagtacgcccaggtgaagcccgacggcacctacgtgaagcccctgagcaacaagctgacctacggcaccatggtgttcgtgagaagcttcctggtgggcgaggccgccagagccctgagcaaggcctgcaccatcgccatcagatacagcgccgtgagacaccagagcgagatcaagcccggcgagcccgagccccagatcctggacttccagacccagcagtacaagctgttccccctgctggccaccgcctacgccttccagttcgtgggcgcctacatgaaggagacctaccacagaatcaacgagggcatcggccagggcgacctgagcgagctgcccgagctgcacgccctgaccgccggcctgaaggccttcaccagctggaccgccaacaccggcatcgaggcctgcagaatggcctgcggcggccacggctacagccactgcagcggcctgcccaacatctacgtgaacttcacccccagctgcaccttcgagggcgagaacaccgtgatgatgctgcagaccgccagattcctgatgaagagctacgaccaggtgcacagcggcaagctggtgtgcggcatggtgagctacctgaacgacctgcccagccagagaatccagccccagcaggtggccgtgtggcccaccatggtggacatcaacagccccgagagcctgaccgaggcctacaagctgagagccgccagactggtggagatcgccgccaagaacctgcagaaggaggtgatccacagaaagagcaaggaggtggcctggaacctgaccagcgtggacctggtgagagccagcgaggcccactgccactacgtggtggtgaagctgttcagcgagaagctgctgaagatccaggacaaggccatccaggccgtgctgagaagcctgtgcctgctgtacagcctgtacggcatcagccagaacgccggcgacttcctgcagggcagcatcatgaccgagccccagatcacccaggtgaaccagagagtgaaggagctgctgaccctgatcagaagcgacgccgtggccctggtggacgccttcgacttccaggacgtgaccctgggcagcgtgctgggcagatacgacggcaacgtgtacgagaacctgttcgagtgggccaagaacagccccctgaacaaggccgaggtgcacgagagctacaagcacctgaagagcctgcagagcaagctgtag

SEQ ID NO: 171576 - DNA, 7577 bp, Artificial Sequence
  derived and/or modified sequence
aaaaagtgctttattttcccactccccggacgcccagcagggcagtttcttgaccttcggagcccctttcccgaggatccgctcgggagcctcccctggccaggagcaggggattagtctgccccgcgaccggccccagccacgacgcggacatcgccccctctgtctgggccgctgtcactcacgcgccaaagggccacggagaaagaaggggcgggccggggcgggccgggcgagcggaggcggggacttgcgccgtcctgaggctgcctcctagggtccggccggcgctggagctgcggatttagattgtcactgccacctcggtcggtgcttacttcgctgccagctggtcgtcgccatgaacccggacctgcgcagggagcgggattccgccagcttcaacccggagctgcttacacacatcctggacggcagccccgagaaaacccggcgccgccgagagatcgagaacatgatcctgaacgacccagacttccagcatgaggacttgaacttcctcactcgcagccagcgttatgaggtggctgtcaggaaaagtgccatcatggtgaagaagatgagggagtttggcatcgctgaccctgatgaaattatgtggtttaaaaaactacatttggtcaattttgtggaacctgtgggcctcaattactccatgtttattcctaccttgctgaatcagggcaccactgctcagaaagagaaatggctgctttcatccaaaggactccagataattggcacctacgcccagacggaaatgggccacggaactcaccttcgaggcttggaaaccacagccacgtatgaccctgaaacccaggagttcattctcaacagtcctactgtgacctccattaaatggtggcctggtgggcttggaaagacttcaaatcatgcaatagttcttgcccagctcatcactaaggggaaatgctatggattacatgcctttatcgtacctattcgtgaaatcgggacccataagcctttgccaggaattaccgttggtgacatcggccccaaatttggttatgatgagatagacaatggctacctcaaaatggacaaccatcgtattcccagagaaaacatgctgatgaagtatgcccaggtgaagcctgatggcacatacgtgaaaccgctgagtaacaagctgacttacgggaccatggtgtttgtcaggtccttccttgtgggagaagctgctcgggctctgtctaaggcgtgcaccattgccatccgatacagcgctgtgaggcaccagtctgaaatcaagccaggtgaaccagaaccacagattttggattttcaaacccagcagtataaactctttccactcctggccactgcctatgccttccagtttgtgggcgcatacatgaaggagacctatcaccggattaacgaaggcattggtcaaggggacctgagtgaactgcctgagcttcatgccctcaccgctggactgaaggctttcacctcctggactgcaaacactggcattgaagcatgtcggatggcttgtggtgggcatggctattctcattgcagtggtcttccaaatatttatgtcaatttcaccccaagctgtacctttgagggagaaaacactgtcatgatgctccagacggctaggttcctgatgaaaagttatgatcaggtgcactcaggaaagttggtgtgtggcatggtgtcctatttgaacgacctgcccagtcagcgcatccagccacagcaggtagcagtctggccaaccatggtggatatcaacagccccgaaagcctaaccgaagcatataaactccgtgcagccagattagtagaaattgctgcaaaaaaccttcaaaaagaagtgattcacagaaaaagcaaggaggtagcttggaacctaacttctgttgaccttgttcgagcaagtgaggcacattgccactatgtggtagttaagctcttttcagaaaaactcctcaaaattcaagataaagccattcaagctgtcttaaggagtttatgtctgctgtattctctgtatggaatcagtcagaacgcgggggatttccttcaggggagcatcatgacagagcctcagattacacaagtaaaccagcgtgtaaaggagttactcactctgattcgctcagatgctgttgctttggttgatgcatttgattttcaggatgtgacacttggctctgtgcttggccgctatgatgggaatgtgtatgaaaacttgtttgagtgggctaagaactccccactgaacaaagcagaggtccacgaatcttacaagcacctgaagtcactgcagtccaagctctgaagtgtcacaaggacaagtttaatctgcttcagaaagcgcctgtgtgcaactcaaattttgtggaatctttttcgaattcaaatagctatagagcaaatgataaattgacccctttttataaatggagggaaaaaatgaacagatttcagagattaaatgaaaaaaagcagatgttttaagtgcaattaacactgaaagagacctgttaaaccattcagaaaaagcttaagaaatgcgatatgacttccttttgtaatgctgctgatcccagtagactatgacttttgataattagcagaatttaactactgagtagttgattattttcacattttaattgctaatcactggctatataagtgtttttaagcaaaggtatttttgaagtggtgtagaacccttccaagctttcctgctcagtgttctaccagacttaccctggggcctggcttaaaagcaggattgaagaaaagggactgggggaaggaaacttattggaaaacttgatgcgaatgagtttctgcttggcacagtctctgcctgcttgctctcctttgctgatggattgcatttatcaaactattcatgctagcatttttccaacgagggaacttattccgcacgggcctactgtaggaccattgtctcgtgtaattaggaattttccatttgaaggattgctaaattgtcacagtagtaggaagtatagggaaacctctcagctgtggcactgttgtagctttggagtgcagagtgtaactctgggacaatcagatttcacatattctgtcatcttggcataagccattaaaagcttggagattactgtatttggcattaaaaaaaaatgtcacttaggtcagcactcccagacgtagcacagaaaaaccctttgacacaaaccatgtgttctgatttttggttcagaaaatattgaaactgtgagttgttttttttttaacaactgggaaaaaacaaaaacaaaaaactatagttagaaaaatggaagttccataggttctatttcttactctatgtatggctttgttttcagtctatttctaggagctttctctgaatcgctaattgtcctttcagttgaaatctaatttatacaatcattctatacttaaaggttaaatacatcttaattaattttttcttaaagtcaatgtaagtcactttgttttgtttttttttaatctacgccatatgcctcatgaaaccagctgttctagaatcagtcctgagaatatggcttaattccatggaaacataactcctatcttgggacctgacataatatctatctatcctggggaactggtaatatgagacttataggttacagcagaaatgctacatgttgacaaaagccttaatcgttccactgggagaactaattgataattgtgttaagattgaagattaaccctgtgttaatctcacttgagtctatcctgacagtagttcagattctggaaaatgataaactgacctgctagatgtagaattgtttcaaaattagtgttgaaataccttgttcacagatgaatatctgggcaggatctgagggtgtttggaatgacaccccccaatccagttgcatagatgggatgtctttgcaggtttgaggagatcatcgacctgcagagccccctttgacccagtacctcacgttttatttaaaatctaaatctggggccaggcgtggtggctcacgcctgtaatccaagcactttgggaggccgaagcgggtggatcacctgaggtcaggagtttgagaccatcctggccaacatggtgaaaccccgtctctactgaaaaaaatacaaaaattagctgggcatggtggtagcacgcgcctgtagtcccagctactcgggaggctgaggcaggataatcgcttgaacttggcgggtagaggttgcagtgagccaagatggtgccactacactgcagcctgggtggctgagcgagactccgtctcaaaaaaaaaatctaaatctgacatttgatgctatttttattaatattggaatgttctgtcttgaactttattcaatataatcaagaataaagatagagtaaacgtcactgatttgtactattaagagagaaaaaatatgccacacaactaaacataggtttaaattatgaagaaatttagaatagaggtttattagatttagggaacactaagaacaaaaaaggaaggagtgatacctgcctgagtggacagctgtaaatcagctgtaattactgcagttgtaccaatagttgtgagtggctccagtcactttaggagtccttggaagtacttggtacacatttgttggctgtaccttaaaggaagtggcaagtccagtttgttctctctaccacactagactgccactgacaagtttgggtctgttggattcaaaattttgtaagccattttcacaagtacaaagatacattttaaccttgtcttctccaaaattactgagtaggaattttatttttatctttttgagacagggtatcactgtcacccagactggagtgcagtggtgggatcttggcttactgtgacctctgcctcccgggttcaaatggtcctccctcctcagtctcctgagtagctgggacgacaggcacgtgccaccatgcccagctaatttgttctattttttctgtagagacggggttttgccatgttgcccaggctggtctcagactcctgggctcaagcgatcatttcgcctcagcctcccaaagtgctgagattataggtgtgagccacagcatctggcccagagtgaggagaattaatgagattttttgtgtgtgttagataatattgatttaagcctttttttaaaaagtactctcaaccaaatacaaaattgaaaatgtgaggtttaatagaaatgtgttggctatttgcaatggattttcttcttgcccaagtgtttggagttctactttatgctctgtatttaaaaattagtgacctcaaagcagagttgatgacacaggctttggggccctcatgttcttgtctttagaacatatcactactaagtatcagcttatcttcagaacattacaacattcaccgtgttcatatgctttctgagaagtcaccacttgtaatttcagatcacatacacctgaaggcattttatagttcctaaagttaacatgttagatcttttttttccaccccatgagggtctcactctcacccaggctggaatgcagtggtgtgattgtagcacactttggccaccaactcctgggctcaagtgatcctcctgctttggcctcctctgagaagctgggattactggtgcacaccaccacacctggctaattttttatttttttttatttttggaaatagggtatggctatgttgccttgggcccgtcatgaactcctagcctcaggtgaccctcccacctcaggcctcccaaagggttgggattacaggagtgagctactgcactgggccaacatgttaatttttttttttttttttttgagatggagtctcccaggcgggaatgcaatggtgcgatctcgacttcactgcaatcttcacctcccgggttcgagcgattctcccacctcagcctcctgagtagctgggattacaggcacctgccatcacgctcggctaatttttgtattttgagcagagatggagtttcaccatgttggccaggtgatctgcactcccactccccccacacttcccaaagtgctgggattacaggcataagccacaagccacctcacccagccaacatgttacatcttaattcttggattttcttcactgcagggctttgggtggagaaataaaactcttcaaatgcatgatcttggagatccctgtgaatcaataattctttagacaactgcggctcaaaatccctcctttcccttttccgagttattccatccatcttattagaaaggaagtgaattaggtgtaggtggtctgtaacacctgcacatctttttatacgtgtagagggtatgcctgggatatataggttgtcttcaagcagtagctgctactacagctagagagaggaggagtgccaggaaactgatgacctgagaccaagagtcttgttgatgttctgacttagataaaggttttgatcattttcatgaaataatgcagggaagtcatttctgctgtttctttactactccattcttggaggattagaacaagtcacactgtaattgactaaaacgactttttattttaaaatattgatggtggggttttgcttttttttttttttttttttttgagacgttgtcttgctctttcacccagggtagagtgcagtggcgaaatcttggctcactgcaacctctgcctcccgggttcaagcaattctctgcctcagcctcctgagaagctgggattacagcgcctgccaccatgcctgtctagtttttttgtatttttagtagagacaggggtttcaccaagttggccaggctggtcttgaactcctgacctcgtgatccacccacctcggcctcccaaagtgctgggattacaggcgtgagccaccgtgccgggccagtgtttttaactgtccacacttactaaattttccagtacttcttcctatggttcatgatagtaaacacagaaacatataaggaacattattagagttaccagatgttagctgttgcatatgtgcacattcctagattcaagggtgtttttgccttaaatttaagtgggtcattggttgtcttgggaagatcatggaaaattcgggattttttagaattctgaaccaaaatatgttttgagtgtttcttagtaaatgtgtgatcttccaccttccacattcagactgcggactacacttcataaatgcctttttatttccagttatggattcaactaaatgactgccttgggagcacataattactttgctacctttttccccctttgctgttgtggctcgagtttggttctcacctgagaagatgcattgagcatatgttgttacccagccctggcttaatggtgtcctgtggggtaggggtgggaggacgaggggcacggggccagagcatgtgaatggatcatggttggacagctgtgacctgccagcactgcgggtaagcaaaactacaaaccgttctttcctctgtgacattgaataaaccttaataaaattcataattagcacatact

SEQ ID NO: 171577 - protein, 1744 aa, Artificial Sequence
  derived and/or modified sequence
MRLLWGLIWASSFFTLSLQKPRLLLFSPSVVHLGVPLSVGVQLQDVPRGQVVKGSVFLRNPSRNNVPCSPKVDFTLSSERDFALLSLQVPLKDAKSCGLHQLLRGPEVQLVAHSPWLKDSLSRTTNIQGINLLFSSRRGHLFLQTDQPIYNPGQRVRYRVFALDQKMRPSTDTITVMVENSHGLRVRKKEVYMPSSIFQDDFVIPDISEPGTWKISARFSDGLESNSSTQFEVKKYVLPNFEVKITPGKPYILTVPGHLDEMQLDIQARYIYGKPVQGVAYVRFGLLDEDGKKTFFRGLESQTKLVNGQSHISLSKAEFQDALEKLNMGITDLQGLRLYVAAAIIEYPGGEMEEAELTSWYFVSSPFSLDLSKTKRHLVPGAPFLLQALVREMSGSPASGIPVKVSATVSSPGSVPEVQDIQQNTDGSGQVSIPIIIPQTISELQLSVSAGSPHPAIARLTVAAPPSGGPGFLSIEWPDSRPPRVGDTLNLNLRAVGSGATFSHYYYMILSRGQIVFMNREPKRTLTSVSVFVDHHLAPSFYFVAFYYHGDHPVANSLRVDVQAGACEGKLELSVDGAKQYRNGESVKLHLETDSLALVALGALDTALYAAGSKSHKPLNMGKVFEAMNSYDLGCGPGGGDSALQVFQAAGLAFSDGDQWTLSRKRLSCPKEKTTRKKRNVNFQKAINEKLGQYASPTAKRCCQDGVTRLPMMRSCEQRAARVQQPDCREPFLSCCQFAESLRKKSRDKGQAGLQRALEILQEEDLIDEDDIPVRSFFPENWLWRVETVDRFQILTLWLPDSLTTWEIHGLSLSKTKGLCVATPVQLRVFREFHLHLRLPMSVRRFEQLELRPVLYNYLDKNLTVSVHVSPVEGLCLAGGGGLAQQVLVPAGSARPVAFSVVPTAAAAVSLKVVARGSFEFPVGDAVSKVLQIEKEGAIHREELVYELNPLDHRGRTLEIPGNSDPNMIPDGDFNSYVRVTASDPLDTLGSEGALSPGGVASLLRLPRGCGEQTMIYLAPTLAASRYLDKTEQWSTLPPETKDHAVDLIQKGYMRIQQFRKADGSYAAWLSRDSSTWLTAFVLKVLSLAQEQVGGSPEKLQETSNWLLSQQQADGSFQDPCPVLDRSMQGGLVGNDETVALTAFVTIALHHGLAVFQDEGAEPLKQRVEASISKANSFLGEKASAGLLGAHAAAITAYALTLTKAPVDLLGVAHNNLMAMAQETGDNLYWGSVTGSQSNAVSPTPAPRNPSDPMPQAPALWIETTAYALLHLLLHEGKAEMADQAAAWLTRQGSFQGGFRSTQDTVIALDALSAYWIASHTTEERGLNVTLSSTGRNGFKSHALQLNNRQIRGLEEELQFSLGSKINVKVGGNSKGTLKVLRTYNVLDMKNTTCQDLQIEVTVKGHVEYTMEANEDYEDYEYDELPAKDDPDAPLQPVTPLQLFEGRRNRRRREAPKVVEEQESRVHYTVCIWRNGKVGLSGMAIADVTLLSGFHALRADLEKLTSLSDRYVSHFETEGPHVLLYFDSVPTSRECVGFEAVQEVPVGLVQPASATLYDYYNPERRCSVFYGAPSKSRLLATLCSAEVCQCAEGKCPRQRRALERGLQDEDGYRMKFACYYPRVEYGFQVKVLREDSRAAFRLFETKITQVLHFTKDVKAAANQMRNFLVRASCRLRLEPGKEYLIMGLDGATYDLEGHPQYLLDSNSWIEEMPSERLCRSTRQRAACAQLNDFLQEYGTQGCQV

SEQ ID NO: 171578 - protein, 1744 aa, Artificial Sequence [sequence omitted]

SEQ ID NO: 171579 - protein, 1744 aa, Artificial Sequence
  derived and/or modified sequence
MRLLWGLIWASSFFTLSLQKPRLLLFSPSVVHLGVPLSVGVQLQDVPRGQVVKGSVFLRNPSRNNVPCSPKVDFTLSSERDFALLSLQVPLKDAKSCGLHQLLRGPEVQLVAHSPWLKDSLSRTTNIQGINLLFSSRRGHLFLQTDQPIYNPGQRVRYRVFALDQKMRPSTDTITVMVENSHGLRVRKKEVYMPSSIFQDDFVIPDISEPGTWKISARFSDGLESNSSTQFEVKKYVLPNFEVKITPGKPYILTVPGHLDEMQLDIQARYIYGKPVQGVAYVRFGLLDEDGKKTFFRGLESQTKLVNGQSHISLSKAEFQDALEKLNMGITDLQGLRLYVAAAIIEYPGGEMEEAELTSWYFVSSPFSLDLSKTKRHLVPGAPFLLQALVREMSGSPASGIPVKVSATVSSPGSVPEVQDIQQNTDGSGQVSIPIIIPQTISELQLSVSAGSPHPAIARLTVAAPPSGGPGFLSIERPDSRPPRVGDTLNLNLRAVGSGATFSHYYYMILSRGQIVFMNREPKRTLTSVSVFVDHHLAPSFYFVAFYYHGDHPVANSLRVDVQAGACEGKLELSVDGAKQYRNGESVKLHLETDSLALVALGALDTALYAAGSKSHKPLNMGKVFEAMNSYDLGCGPGGGDSALQVFQAAGLAFSDGDQWTLSRKRLSCPKEKTTRKKRNVNFQKAINEKLGQYASPTAKRCCQDGVTRLPMMRSCEQRAARVQQPDCREPFLSCCQFAESLRKKSRDKGQAGLQRALEILQEEDLIDEDDIPVRSFFPENWLWRVETVDRFQILTLWLPDSLTTWEIHGLSLSKTKGLCVATPVQLRVFREFHLHLRLPMSVRRFEQLELRPVLYNYLDKNLTVSVHVSPVEGLCLAGGGGLAQQVLVPAGSARPVAFSVVPTAAAAVSLKVVARGSFEFPVGDAVSKVLQIEKEGAIHREELVYELNPLDHRGRTLEIPGNSDPNMIPDGDFNSYVRVTASDPLDTLGSEGALSPGGVASLLRLPRGCGEQTMIYLAPTLAASRYLDKTEQWSTLPPETKDHAVDLIQKGYMRIQQFRKADGSYAAWLSRDSSTWLTAFVLKVLSLAQEQVGGSPEKLQETSNWLLSQQQADGSFQDPCPVLDRSMQGGLVGNDETVALTAFVTIALHHGLAVFQDEGAEPLKQRVEASISKANSFLGEKASAGLLGAHAAAITAYALTLTKAPVDLLGVAHNNLMAMAQETGDNLYWGSVTGSQSNAVSPTPAPRNPSDPMPQAPALWIETTAYALLHLLLHEGKAEMADQAAAWLTRQGSFQGGFRSTQDTVIALDALSAYWIASHTTEERGLNVTLSSTGRNGFKSHALQLNNRQIRGLEEELQFSLGSKINVKVGGNSKGTLKVLRTYNVLDMKNTTCQDLQIEVTVKGHVEYTMEANEDYEDYEYDELPAKDDPDAPLQPVTPLQLFEGRRNRRRREAPKVVEEQESRVHYTVCIWRNGKVGLSGMAIADVTLLSGFHALRADLEKLTSLSDRYVSHFETEGPHVLLYFDSVPTSRECVGFEAVQEVPVGLVQPASATLYDYYNPERRCSVFYGAPSKSRLLATLCSAEVCQCAEGKCPRQRRALERGLQDEDGYRMKFACYYPRVEYGFQVKVLREDSRAAFRLFETKITQVLHFTKDVKAAANQMRNFLVRASCRLRLEPGKEYLIMGLDGATYDLEGHPQYLLDSNSWIEEMPSERLCRSTRQRAACAQLNDFLQEYGTQGCQV

SEQ ID NO: 171580 - protein, 1744 aa, Artificial Sequence
  derived and/or modified sequence
MRLLWGLIWASSFFTLSLQKPRLLLFSPSVVHLGVPLSVGVQLQDVPRGQVVKGSVFLRNPSRNNVPCSPKVDFTLSSERDFALLSLQVPLKDAKSCGLHQLLRGPEVQLVAHSPWLKDSLSRTTNIQGINLLFSSRRGHLFLQTDQPIYNPGQRVRYRVFALDQKMRPSTDTITVMVENSHGLRVRKKEVYMPSSIFQDDFVIPDISEPGTWKISARFSDGLESNSSTQFEVKKYVLPNFEVKITPGKPYILTVPGHLDEMQLDIQARYIYGKPVQGVAYVRFGLLDEDGKKTFFRGLESQTKLVNGQSHISLSKAEFQDALEKLNMGITDLQGLRLYVAAAIIESPGGEMEEAELTSWYFVSSPFSLDLSKTKRHLVPGAPFLLQALVREMSGSPASGIPVKVSATVSSPGSVPEVQDIQQNTDGSGQVSIPIIIPQTISELQLSVSAGSPHPAIARLTVAAPPSGGPGFLSIERPDSRPPRVGDTLNLNLRAVGSGATFSHYYYMILSRGQIVFMNREPKRTLTSVSVFVDHHLAPSFYFVAFYYHGDHPVANSLRVDVQAGACEGKLELSVDGAKQYRNGESVKLHLETDSLALVALGALDTALYAAGSKSHKPLNMGKVFEAMNSYDLGCGPGGGDSALQVFQAAGLAFSDGDQWTLSRKRLSCPKEKTTRKKRNVNFQKAINEKLGQYASPTAKRCCQDGVTRLPMMRSCEQRAARVQQPDCREPFLSCCQFAESLRKKSRDKGQAGLQRALEILQEEDLIDEDDIPVRSFFPENWLWRVETVDRFQILTLWLPDSLTTWEIHGLSLSKTKGLCVATPVQLRVFREFHLHLRLPMSVRRFEQLELRPVLYNYLDKNLTVSVHVSPVEGLCLAGGGGLAQQVLVPAGSARPVAFSVVPTAAAAVSLKVVARGSFEFPVGDAVSKVLQIEKEGAIHREELVYELNPLDHRGRTLEIPGNSDPNMIPDGDFNSYVRVTASDPLDTLGSEGALSPGGVASLLRLPRGCGEQTMIYLAPTLAASRYLDKTEQWSTLPPETKDHAVDLIQKGYMRIQQFRKADGSYAAWLSRDSSTWLTAFVLKVLSLAQEQVGGSPEKLQETSNWLLSQQQADGSFQDPCPVLDRSMQGGLVGNDETVALTAFVTIALHHGLAVFQDEGAEPLKQRVEASISKANSFLGEKASAGLLGAHAAAITAYALTLTKAPVDLLGVAHNNLMAMAQETGDNLYWGSVTGSQSNAVSPTPAPRNPSDPMPQAPALWIETTAYALLHLLLHEGKAEMADQASAWLTRQGSFQGGFRSTQDTVIALDALSAYWIASHTTEERGLNVTLSSTGRNGFKSHALQLNNRQIRGLEEELQFSLGSKINVKVGGNSKGTLKVLRTYNVLDMKNTTCQDLQIEVTVKGHVEYTMEANEDYEDYEYDELPAKDDPDAPLQPVTPLQLFEGRRNRRRREAPKVVEEQESRVHYTVCIWRNGKVGLSGMAIADVTLLSGFHALRADLEKLTSLSDRYVSHFETEGPHVLLYFDSVPTSRECVGFEAVQEVPVGLVQPASATLYDYYNPERRCSVFYGAPSKSRLLATLCSAEVCQCAEGKCPRQRRALERGLQDEDGYRMKFACYYPRVEYGFQVKVLREDSRAAFRLFETKITQVLHFTKDVKAAANQMRNFLVRASCRLRLEPGKEYLIMGLDGATYDLEGHPQYLLDSNSWIEEMPSERLCRSTRQRAACAQLNDFLQEYGTQGCQV

SEQ ID NO: 171581 - DNA, 5235 bp, Artificial Sequence
  derived and/or modified sequence
atgcgactcttgtggggcctcatttgggctagtagtttctttactcttagcctccagaaaccacgcctgctgctatttagccccagcgtggtgcacctaggagtgccactttctgtgggtgtgcaactgcaggacgtgcccagaggccaggtggtcaaaggctccgtctttttacgtaacccctcccgcaataatgtaccatgtagccccaaggttgattttaccttgagttctgagcgggacttcgcacttctcagtctgcaagtccccctgaaggacgcaaagagctgcggcctgcatcagctgctcagagggccggaggtccaacttgtggcccactccccctggttaaaggattcactgtccaggaccacaaacattcagggcattaacctcttgttttcctcccgcaggggccacctttttcttcagacagaccagcccatctacaatcccggtcagcgcgtaaggtaccgagtattcgcactggatcagaagatgcgtccgtccacagatactatcaccgtcatggtggaaaattcccacggcctcagggttagaaagaaggaggtgtacatgccaagttctattttccaggacgatttcgttatcccagacatcagtgaacctggcacttggaagatcagcgctagattttctgatggattggaatccaacagtagcactcagttcgaggtgaagaaatatgtcctgcctaactttgaagtaaaaataacaccaggcaagccatacattttaaccgttccgggtcacctcgacgagatgcaactggacattcaggccaggtatatttacggaaaacctgtccaaggagtcgcttacgtcaggttcggtttgctcgacgaagacggtaagaaaacatttttcaggggactggagagtcaaactaagctggtgaacgggcaatcccacatctctttgtccaaagccgagtttcaggacgcactggaaaagctgaacatgggtatcacagatctgcagggactgcgcttgtacgtggcagctgccattatcgaatacccaggcggggagatggaggaagcggagctgacttcttggtactttgtgtccagtccgttttcgcttgatttgtcgaagaccaagagacatctcgtgccgggcgctccatttctgttacaagctctggtgagggagatgtctggctctcctgcttcaggcattccggtcaaggtgtccgccaccgtgtcttctccaggttctgtgccagaggttcaggacatccagcagaacacagacggctccggacaggtaagcattccaatcataatccctcagaccatctctgaactgcagctgagtgtgtctgctggctcaccacatcccgcaatagcccgtctgacggtggccgctcccccctccggaggacctggttttctgagcattgagtggcccgactctcgccctccgcgcgttggtgacacacttaacctcaaccttcgcgcggtcggctccggggcaactttttcccactattactatatgatcctgtcccgtggccaaattgtttttatgaacagagagcccaagcggacccttactagcgtatccgtgttcgtagaccaccatcttgccccttctttttacttcgtagctttctattaccacggcgaccaccccgtggctaattcattgcgcgtggatgttcaggccggcgcctgcgagggtaagctcgagctgtcagtggatggcgcgaaacagtaccgaaatggagagagcgtcaagctgcatctagaaactgacagccttgcactggtcgcactgggcgcgctggacactgctctatatgccgcaggatccaagagccacaagcccctgaatatggggaaagtgtttgaagccatgaatagctacgaccttggttgtgggcccggcggaggagactctgctttgcaggtttttcaagctgccggtttggcctttagtgatggcgaccaatggaccctgtcacgcaaaaggctgtcatgcccaaaagagaaaacaactcgtaagaaaagaaatgtaaatttccagaaagccatcaacgagaagctgggccaatacgcttcacccactgctaaacgttgctgtcaagacggcgttacaagactgcctatgatgcgtagctgcgagcagcgcgcagctcgtgtacagcagccagactgtcgcgagccgtttctgagttgttgccaattcgccgagtcccttcgcaaaaagagccgcgataaaggccaagccgggctgcaaagagctctggaaatcctgcaggaagaggacctcatcgatgaggacgacatccccgtcagaagttttttccctgaaaactggttatggagggtggagaccgtggaccggttccagatactgaccctgtggcttccagacagcctcacaacatgggagatccatgggctgtcactgagcaagaccaagggcctttgtgttgccaccccggtacagctgagggtgtttcgcgaatttcatctgcacttacggctgccaatgtcagtgcgccgctttgagcagttagagttaaggccagtgctttataattaccttgataaaaacctcactgtgtctgtccacgtgtcccctgtcgagggactgtgcttagccggcggtggcggcttagctcagcaggtcttagtccccgctggcagcgcaaggcccgtggcattttctgtcgtccccacagccgcagcggccgtttcattaaaagtggtcgcacgaggctccttcgagttccctgtgggggatgccgtatcaaaggtgctccagattgagaaagaaggagcaattcatcgggaggagctggtatatgagcttaaccccttagatcatcggggtcgcacattagagatcccggggaattccgatccaaatatgattcccgacggtgactttaactcatatgtccgggtgaccgcaagtgacccactggatactttaggatccgagggggccctatcccctggtggggtggcatcactgctgcggctcccaagagggtgcggagaacaaaccatgatctatctcgctccaacccttgcagcttcacggtacttagacaaaaccgaacagtggtcaacattaccacctgagactaaggatcacgccgtagatctaattcagaaggggtatatgcgaattcagcagttccggaaagctgatgggtcctacgccgcctggctgagtagggattcatcgacctggctgaccgcttttgtgctgaaagtccttagcctagcacaggagcaagtggggggatcaccagaaaagttgcaggagacgagcaattggctgctgtctcagcagcaggctgacggttccttccaggatccctgtcctgtactggacaggtccatgcagggcggtctcgtcgggaatgatgagaccgtcgctttgaccgcgttcgtaacaattgcactccaccatggactggcagtgttccaagatgagggtgctgaacctttaaagcagagggtggaggcgagcatttcaaaggcaaattctttcctgggggagaaagccagcgccggtttactcggagctcacgccgcagccatcaccgcatacgccctgacgctgaccaaagctcccgtagacctcctgggcgtagcacataacaaccttatggctatggctcaggagactggagacaatctgtattggggttctgtgactgggtcccagtctaacgcggtatctcccaccccggcaccccgcaacccaagcgaccccatgcctcaggctccagccctctggattgagactaccgcgtacgcactgcttcatctgctcctgcacgagggaaaggccgagatggcagatcaggccgccgcctggttaacccgacaaggcagctttcaaggcggatttaggtccacacaggacactgtcattgccctcgatgccctgtccgcctattggatcgcttctcatacaaccgaagaaagaggactgaatgtgaccctgtctagcactggaaggaacgggttcaagtcacacgctttgcagctgaataacaggcagattaggggtttggaggaggaactccagtttagcctcggaagcaaaatcaacgtgaaggtcggaggaaactctaaaggtacacttaaggttctgcggacatacaatgtgttggatatgaagaataccacctgccaggatctccagatcgaggtgaccgtgaagggccatgtggaatacaccatggaggcgaatgaagactatgaagactatgaatatgacgaactccctgccaaagacgacccagacgccccactacaacctgtcactccactccagttattcgaaggccgcaggaacaggcgtcgtcgggaagcaccaaaggtggtcgaagagcaggagtcccgggtacattatactgtgtgcatctggagaaacggcaaggtaggtctgtcaggaatggcgatcgctgacgtgacactcttgtcaggctttcatgctcttcgggccgacctggagaagctcaccagtctgagtgacagatacgtgtcacattttgagactgagggtccacatgtactgctttatttcgattctgtacccacttcccgagaatgcgtgggctttgaagcagtgcaggaggtcccagtgggacttgtccagcccgcatctgccactttatacgactattacaaccctgagagacgttgctccgtgttctacggcgcccctagcaagtccagattgcttgccactctctgttcagctgaagtttgccagtgtgccgagggtaagtgtcctcggcagcgacgggctctggaaaggggacttcaggatgaggacgggtaccggatgaagttcgcatgctattatccgcgggtggagtatggattccaggtgaaggtcttaagagaggacagccgcgctgcatttagactattcgaaaccaaaatcactcaagtactgcacttcaccaaggacgtcaaggcggcagccaatcagatgcgaaatttcctggtgcgggcctcatgtaggctacgactcgagcccggcaaggagtatctgatcatgggcttagacggtgccacctacgatctggaaggccatccccagtacctgctcgattctaactcgtggattgaagagatgccttccgaacggctctgtagatcaaccaggcaacgtgctgcatgtgcccaactcaatgactttctccaagagtatggcactcaaggctgtcaggtgtag

SEQ ID NO: 171582 - DNA, 5235 bp, Artificial Sequence
  derived and/or modified sequence
atgaggttgctctggggactgatttgggcctcatctttctttactctttcgctgcaaaaacccaggttattgctgttctcaccatccgtggtccacctgggggtgcctttatccgtgggagttcaactgcaggacgtgcccaggggtcaggtggtgaagggatctgtcttcctgagaaatccatcgcggaataacgtgccatgcagccccaaagtggatttcactcttagctccgaaagggactttgcgctactgtcactgcaagtgcccctgaaagacgctaagtcctgtggccttcatcaactgcttcggggcccagaggtgcagctggtggcccattccccatggctgaaggactcgttgtcccggaccacaaatatacagggcattaatttactgttcagttcgcggcgcggacacctgttcctgcagaccgaccaaccaatttataatccaggtcagagggttcggtaccgggtgtttgctttggaccagaaaatgcgcccctccaccgacacaataacggtgatggtggagaacagccacggcctacgtgtccgtaaaaaggaagtgtacatgccttcaagtatattccaggacgacttcgtgattcccgacatttccgagcctggaacgtggaaaatatccgctcgtttttctgacgggcttgaaagcaactcctcaactcagttcgaggtcaagaaatatgtcctgcccaatttcgaagttaagattactcccggtaagccatatattctgactgtgcctgggcacttagacgagatgcagctcgacatccaggcccggtacatttatgggaagcctgtccaaggggtcgcgtacgttcgcttcggcctcttggatgaggacggaaaaaaaacattcttcaggggattagagagccagacaaagctcgtcaacggccagtcccatattagtttatcgaaagctgaattccaggacgccctggagaaactcaacatggggattactgacctgcaggggctgagactgtacgtcgctgctgctatcatcgaatcacctgggggggaaatggaagaagcagagctaacatcctggtattttgtctctagccccttctcactcgacttatcgaaaacaaaaagacatcttgtaccaggagcacccttcctgctacaggcgctggtgagagaaatgagtgggagtccagcgagcgggataccagttaaggtgagcgccactgtgtccagcccagggtccgtacccgaagtgcaggacatccagcagaataccgatggctctggccaggtgagcattcccatcattattccacagaccatctcagagctgcagctttctgtcagtgccggctcgccccaccctgcaattgcgcgcctgaccgtggcagcaccaccgtcaggcggacctgggttcctgagtattgagagacccgattcacggcctccaagggttggcgacactcttaatctgaacctgcgggccgtgggtagtggggccacatttagccattattactacatgatactgtcacgaggacagattgttttcatgaatcgggagccaaagaggacactgaccagtgtctcagttttcgtagaccaccacctcgccccttctttctacttcgtggccttttactatcacggagatcaccccgtggccaacagcctccgagtggatgtccaggctggggcttgtgagggaaagctggaactgtccgttgacggagccaagcagtaccgaaacggtgaaagcgtgaagttacacctggaaaccgactcattagcgctggtggccctcggagcactcgatactgcactgtacgcagccggatcgaaatctcacaaacctctaaatatgggaaaggtgtttgaggccatgaatagttacgatctggggtgcgggccgggagggggcgattctgccttacaagtctttcaggcagccggcctggcgttttctgacggcgatcagtggacattgtcacggaaacgcctgtcttgtcccaaggagaagacaacccggaaaaaacgaaacgtgaatttccaaaaagcaattaacgagaaactgggtcaatacgcatcacctacggcgaagcggtgctgccaggatggcgtcacgagacttccaatgatgcgaagctgtgagcagcgcgctgccagggttcagcagccggattgcagagagcccttcctgagctgttgccagttcgccgagtcactgaggaaaaagtctcgcgacaaggggcaggcaggcttgcaacgagctctcgaaatcctgcaggaggaggacttgatagatgaggacgacattcctgtcaggagcttcttccccgagaactggctgtggagagtggaaactgtcgaccgcttccagattttaacactgtggcttcccgattcactgacaacatgggaaatccacggattaagcttaagtaaaaccaagggcctgtgcgttgcaactcccgtgcagcttcgggtcttcagagagtttcatctgcacttgcggctccctatgtccgtgcggcgatttgagcagctggagttgcgccctgtgctgtacaattacctggacaaaaacctgactgtctccgtgcacgtgtctcctgttgagggactctgtctcgctggcggtggaggcctggcacagcaagtgctcgtgcccgctggtagtgcaaggcccgtggcattctctgtggtgcctactgctgccgctgccgtgtcactcaaagttgtcgctaggggatctttcgagtttcccgtcggagacgccgtgtccaaagtgctgcagattgagaaagaaggagctatccacagggaagaattggtctacgagttaaatcctctggaccatcgcgggcgaacactcgagatacccggcaatagcgacccaaatatgataccagatggggacttcaactcctacgtgcgcgtaacagctagcgatcctctggatacactgggctctgagggagcattgtcccctgggggagttgcctctctgctacgccttcccagaggctgcggagaacaaactatgatctacctggctcccactcttgccgctagtagatatctggataaaaccgagcagtggtccaccctaccgcctgaaacaaaagaccacgccgtggacctgatccagaagggatatatgcgcatccaacaattcaggaaagccgatggctcttatgctgcatggctttcccgcgactcttcgacatggctcaccgcattcgtgttaaaagtgctgagcctggcgcaggagcaagtcggaggctcccccgagaagctgcaggaaacttctaattggttgttgtcacaacaacaggcagacggaagttttcaggatccttgtcctgtgctcgaccggtccatgcagggcgggctagttggcaatgacgaaaccgtagccctcacagccttcgtcactatagctctccatcacggcctggccgtgtttcaggacgaaggggccgagcctttaaagcagcgcgttgaagcaagcatctccaaggcctcttcctttttaggtgaaaaagcttctgccggactgctgggcgcacatgctgccgcaataaccgcctacgctctcaccctgacgaaggctcccgtcgacctgcttggagtggcccacaacaacctgatggccatggcacaggaaaccggtgacaacctgtactggggctccgtgaccggcagtcaatcaaacgctgtgtccccaacccctgccccaagaaatcctagcgatcctatgccccaggcaccagccctctggattgagacgaccgcctacgcattgttgcacctactgcttcatgagggtaaagccgaaatggcagaccaagcagcagcctggttaactcggcagggaagctttcagggagggtttagaagtacccaggatacagtcatcgccctggacgctctctcggcttattggattgcctctcatactacggaagagcggggcctgaatgtgaccctcagctcaactgggcgcaatggattcaagtcacatgctctgcagctgaataaccgtcaaatacgaggcttggaggaagaattgcagttctcacttggatcaaaaataaatgtgaaggtgggcgggaattccaagggaactctgaaggtgttaagaacttacaatgtcttggatatgaagaacaccacctgtcaggatctgcaaatagaggtgactgtcaagggccacgttgaatatacaatggaggccaatgaagattacgaggattacgagtatgacgagcttccagccaaggatgacccagacgcccccttacagcccgtcacaccactgcaactgttcgaaggacggcggaaccggcgtcgaagagaggctccaaaagtggtggaagagcaggaatcccgtgtacattacaccgtctgtatctggcgtaacggtaaagtgggcctttccggaatggcaattgccgacgtcacactgttgtccggctttcatgccctgcgggccgatctggaaaaacttacctcgctgtcggacaggtatgtgagtcactttgagacggaaggcccccatgtacttctctatttcgattcggtcccaacttctcgtgaatgcgtaggcttcgaggcagtgcaggaggtccctgtcgggttggtgcagccagcatcggccactttgtacgattattataatccagaaaggaggtgcagtgtcttttacggggcccccagtaagtcacgactgctggctactctctgctcggccgaagtctgtcagtgcgccgagggcaaatgcccgaggcagcgcagggccctggagcgtggcttgcaagacgaagatgggtaccgcatgaaattcgcttgttactatccgagagttgagtacgggttccaggtgaaggttctacgggaagactcgcgcgcggcattcaggttattcgagactaaaattacgcaagtgttgcatttcactaaggacgtgaaagccgctgcaaaccagatgcgaaactttcttgtgagggcctcctgccgccttaggttggagcctggtaaggaatatttgataatgggcttggacggtgccacctatgacttagagggccatcctcagtatcttttagattcaaatagctggatcgaggagatgccgtcagagcgcctttgccggagtactcgacagcgggcggcctgcgctcagttgaacgattttctccaggagtacggtacccagggctgccaggtgtag

SEQ ID NO: 171583 - DNA, 5235 bp, Artificial Sequence
  derived and/or modified sequence
atgagactgctgtgggggctgatatgggccagtagctttttcaccctttccctccagaaacccaggctgctcttatttagcccatcagttgtccatctcggcgtgccattatcagttggggtccagcttcaggacgtcccacgggggcaggtggtgaaggggagtgtattcctgagaaacccgtctagaaataacgtgccctgctcacctaaggtagacttcacactcagcagtgagagggattttgcccttctttccctgcaggtccccctgaaggatgcgaagtcgtgcgggctgcaccagctcctgcgggggcctgaggtgcagctagtcgcccacagtccatggcttaaagactctctctccaggaccactaacattcagggcattaatctcctctttagctcacgaagaggccacctgtttttgcagaccgatcaaccgatttacaacccgggccaacgggtcagatatcgcgtctttgctctggatcagaagatgcggcccagcactgacacaataacagtgatggttgaaaacagtcacggcctgagagtacgcaagaaagaagtttacatgccttcatctatatttcaagacgatttcgtaatccccgatatatcagaaccgggcacatggaaaatttcagccagatttagcgacggactcgagagtaactcttcgactcagttcgaggttaagaagtatgtgcttcccaacttcgaggttaaaatcacaccagggaagccctatatactgacagttcccggacacttggacgaaatgcagttggatatccaagcccgatacatttatggcaaaccagtgcagggcgtggcatacgtccggtttggtctgttagatgaggacggaaaaaaaactttctttaggggcctagagtcccagacaaaactagtgaatggccaaagccacatttctttgtccaaggccgaattccaggatgccctcgagaagttaaacatgggtatcacggacctgcaggggctccggctgtacgtggccgctgcgatcattgagtacccaggaggtgagatggaagaggcggagctgacctcttggtattttgtctcaagtccatttagcttggacctgtccaagactaagcgccacctggtccccggcgcgccgttcctgctccaggccttagtgagagagatgagcggatcccctgcttcgggaatccctgttaaagtgtccgctaccgtctcgagccctggaagcgtgcctgaggttcaagacattcagcagaacaccgatggctctggacaggtcagcattccaatcattatccctcaaaccatcagcgaattgcaactttctgtctccgcaggatcgcctcatccagctatcgctcgcttgacagtagccgctccgccttctggcgggcccggtttcttgtccatcgaacgccccgacagtcggcctccacgcgtgggtgatactctgaatttgaacctgagagccgttggctccggggccacgttttctcactattattacatgattctctcccgcgggcaaatagtgttcatgaatcgagagccaaagaggactctgactagcgtgagtgtgttcgtggatcaccacctcgccccatccttttatttcgtcgccttctattaccatggagatcacccagtggctaatagcctccgggtcgatgtgcaagccggcgcctgtgagggaaagctggagctgtctgtggatggcgctaagcaataccgcaatggggagagcgtgaaactgcacttggagacagactcccttgcactcgtggcattgggggcgctcgacaccgcgctctacgctgctggttcaaaatcccataagcccctgaatatgggaaaggtcttcgaagctatgaactcgtacgacctgggttgcgggcccggcggaggtgactctgccctgcaggtgttccaagctgccggcttggcattcagtgacggagatcagtggaccctgtcacgtaagcggttatcgtgcccaaaagagaagaccacgcgcaaaaagcgcaacgttaacttccaaaaggctatcaatgagaagctcgggcagtacgccagtccaacagcaaaaagatgttgccaagacggcgttaccaggttaccaatgatgaggagttgtgaacaacgcgcagcccgcgtgcagcagccggactgtcgtgaaccctttctctcctgttgtcagtttgcagagagcctccggaagaaatctcgcgacaagggtcaggctggacttcagcgcgccttggagatcttacaggaggaggatctcatcgacgaggacgacatacccgtaaggagcttcttccctgaaaattggctttggcgtgtagagacagtagacagattccagattctgaccctctggctacccgacagcctcactacttgggaaatccatggcctgagcttgagcaagacaaagggactctgtgtagctactcccgtacagctcagggtgtttagggaatttcatttgcatctaagactgccaatgtccgtccgccgcttcgagcagctcgagcttcgcccagttctatacaattacctagataaaaacctgactgtgtcagtgcatgtttcaccggttgaaggcctgtgcttggctggaggtggcggtttggctcagcaggtcctggtgcccgctggctctgcacgccctgtggcatttagcgtcgttcctactgcggccgccgccgtttccctgaaagtagtggcaagagggtcctttgaatttcctgtgggtgatgcggtctctaaggtgctgcagatcgagaaagagggcgctattcatcgtgaagaactggtgtacgagctgaaccctttggaccatagggggcgcacacttgagatcccaggcaattcagacccaaacatgataccagatggcgactttaattcttacgtgcgcgtgactgcctcagatccgttagacaccttaggaagtgaaggggcactgtcaccagggggcgtggctagtttgctcaggctcccgcgggggtgcggggagcagactatgatctatctcgcgcctaccctcgccgcatcacgctacctagacaagaccgagcagtggagcactttgccccctgagaccaaagaccacgctgtggacctgatccaaaagggttatatgagaattcaacagttccggaaggcagacggctcatacgcggcttggctgtccagggacagtagtacttggctcactgccttcgtcctcaaagtactctcgctcgcccaggaacaggtcggcggcagcccggagaaacttcaggaaactagtaactggctgctttcccaacagcaggctgatggctctttccaggatccttgtccagtattggaccggtctatgcagggtggcttagtgggcaatgacgaaacggttgcattgacggcctttgtgacaattgcactgcaccatgggcttgcagtgttccaagatgaaggagcagagcctctcaagcagagagtcgaagcgagtatcagcaaggcaaactcttttctgggtgaaaaggccagtgctggcctcctgggcgctcatgctgcagcaatcactgcctatgccctgaccctgactaaagcaccagtggatttgcttggcgtggcacacaataacttgatggctatggctcaggaaactggcgataacctgtattggggatccgtgacgggctcacagtccaatgcggtgagccccacacccgctccacgcaatcccagcgaccctatgccgcaggcgcccgcactgtggattgaaaccaccgcatacgccctcctgcatctgctcctgcatgaaggtaaggccgagatggcagatcaggctgccgcctggctgacgcgccaaggcagtttccagggtgggttccgtagtacccaggacactgtgatcgctctcgatgcgctctccgcctactggatcgccagtcacactaccgaggaacggggcctaaatgtgacactgagttctacgggccgaaatggattcaaatcacacgctctccagctgaacaataggcaaattagaggcctcgaagaggagctgcagttttcattgggcagcaagatcaatgtgaaggtgggtggtaactcaaaaggtaccctcaaagtattaagaacctataatgtgctggatatgaaaaataccacctgccaggatttacaaattgaggtgaccgttaagggccatgtggaatatacaatggaagctaacgaagactacgaggactacgaatacgacgaactgcctgccaaggacgatccagacgcccctttgcagcctgtaactcctctgcagctgtttgagggcagacgcaaccggcggcgtcgcgaggccccgaaggttgtagaagagcaggagtccagggtgcactataccgtttgtatatggaggaatgggaaagtgggcctgagcgggatggctattgccgacgtcactctgctgagcgggtttcacgctcttcgcgcggatcttgagaaattgactagcctttcagacagatacgtctcccactttgaaactgagggaccccacgttctgctctacttcgattcagtgcctacctcgagggaatgtgtgggtttcgaagccgttcaggaagttccagtcggtctcgtccaaccagcctcagccacactgtatgactattataaccctgagagaagatgctccgtgttctacggcgctccatccaagagccgtttgctggcaacactttgtagtgctgaagtatgtcaatgtgccgaaggaaagtgcccccggcagagacgtgctctggaaaggggcctgcaagacgaagacggatataggatgaagtttgcttgttattacccacgggtggaatatgggtttcaggtaaaggtgcttcgcgaagactcccgggccgcgttcaggctattcgaaacgaagatcactcaggtgctgcatttcaccaaggatgtcaaggccgctgccaatcagatgcgaaacttcttggtaagggccagttgcaggctgaggttggagcctggcaaggagtacttaattatgggtctggatggagctacgtatgatttagagggacaccctcagtaccttctagatagcaattcttggattgaggaaatgcctagtgagcgcctatgccgcagtactaggcaacgcgcagcctgcgcccaactcaatgatttcctgcaggaatacgggactcaaggatgtcaagtatag

SEQ ID NO: 171584 - DNA, 5235 bp, Artificial Sequence
  derived and/or modified sequence
atgcgtctgctttggggtctgatctgggccagctccttcttcacacttagcttgcagaagccgcgcctcctgcttttcagtccctctgtggtccacctgggagtgcctctgtctgtcggcgtccagttgcaagacgtgccaagaggccaggtcgtgaaaggcagcgtattcctgcgcaacccttcccggaataacgtgccttgtagcccaaaagtggactttaccctcagctctgaacgggacttcgccctgctgtccctccaggtacctctgaaagatgctaaaagttgtggactgcatcagctcctgcggggtcccgaggttcagctggttgcccacagcccatggttaaaagacagcttatcaaggacaactaatatacagggcatcaatttactgttctcctctagaaggggacacctcttcctgcagacagatcagcctatctacaaccccgggcaacgcgtgagatacagggtgttcgcacttgaccaaaagatgcggccttccactgatacaattactgtgatggtcgagaactcccatggcctgagagtgcgcaagaaagaggtgtacatgccctcatccatcttccaggacgacttcgttatccctgatataagtgagcccggaacctggaaaatctccgcaagattctccgatggtctggaatccaatagctccacccagttcgaggtgaaaaagtacgtgctcccaaactttgaagtcaaaattacccccggaaaaccctacatcctcaccgtccccggtcacctggacgagatgcaactagacatccaggcccgctatatctatgggaaacctgtccagggtgttgcctatgtccgctttgggctactcgatgaggatggaaaaaaaacctttttcagagggttggagtcccagacgaagctcgtgaacgggcagtcccacatcagcctatcaaaggcagagtttcaggacgctctagagaagctcaatatgggtatcacggacttgcaggggctgcggctctacgttgcagcagccatcatcgagtctcccggaggagagatggaggaggctgaacttacatcctggtactttgtttctagtccatttagcctcgatctcagtaaaactaaacggcacctggtccccggggctcctttcctgctccaagcattggtacgtgagatgtctggctctcctgccagtggcattcctgttaaagttagcgctaccgtgtcgtcacccgggtcagttcccgaagtccaagacatccagcagaatacggacggaagcggccaggtgtcaattccaataatcattccacagaccatcagcgaactgcagctctccgtctctgcgggcagcccccacccagcgatagccagactgactgtcgcggcaccaccatcaggaggccctggtttccttagcatcgagcgcccagacagccgccctccccgtgtgggcgatacgctgaacttaaacctgagggccgtgggttccggtgctactttcagtcactactactatatgatcctttcacgggggcaaatagttttcatgaatagagagcccaaacggacacttacaagtgtgagcgtctttgtcgaccatcacttagcacccagcttctactttgtggctttctactaccacggtgaccacccagtagccaattctctgcgcgttgatgtgcaggcaggggcctgcgaaggaaagctcgagctctctgttgatggggccaaacagtacagaaacggagaaagtgtgaagcttcacctggagacagattcgctcgccctggtggcccttggtgctttggatacggctctgtatgctgccggctccaagagtcacaagccattgaatatgggcaaggtttttgaggcgatgaactcttatgaccttggatgtggcccagggggcggcgattcagccctgcaggtctttcaagccgcaggactcgcctttagtgatggggaccaatggacactgtccaggaagcgtctcagttgtcctaaggaaaagacaactcgcaaaaagaggaacgtgaacttccaaaaggcgatcaatgagaaacttggccagtatgcctcacccaccgctaagcgctgttgccaggacggtgtgacccggctgcctatgatgaggtcctgtgaacaacgtgctgcacgggtgcagcagccagattgtcgggaaccattcctatcctgttgtcagttcgctgaatctctccggaagaaaagcagagataaagggcaggccgggctgcagcgggctcttgagattctccaagaggaagaccttattgacgaggatgacatcccagtgcgatctttttttccagagaactggctatggcgcgtagagacggtagataggttccagattctcacactttggctccccgattcgctgacaacatgggagattcacgggctgagtcttagcaaaacgaaggggttgtgtgtcgcaacccctgttcagctgcgcgtcttccgagaatttcacctgcacctgcggctcccaatgagtgtgcggcggttcgaacagctcgagctgagacctgttctatacaactatctggacaaaaacttgacagttagcgtgcatgtgtcccctgtagaggggctctgcctggccggcggcgggggcttggctcaacaggttctcgtgccagccggttctgcccggcccgtcgcctttagcgtcgtgccgacagccgccgccgccgtgtcacttaaagttgtcgctcgcggatcctttgagttccccgtgggcgatgctgtgagcaaagtacttcaaatcgagaaagagggcgcaatccaccgagaggagcttgtctacgagctgaatcccttagaccaccgcgggcgcaccctggagataccaggtaactccgatcctaacatgatacctgatggcgattttaattcctatgtacgggttactgcctcagatcctctggacactctgggatccgaaggggccctcagtcccggcggcgtggccagtctgctgcggctcccccgaggatgcggcgaacagacaatgatctatctggcccccactctggcggctagtcggtatttggacaagaccgagcaatggtctaccctcccacccgagaccaaggaccatgcagtagacctcatccagaaagggtacatgaggatccagcagtttcggaaggctgatggaagttacgctgcctggctgagccgcgacagtagtacctggctgaccgcctttgtacttaaggtgttatccctggctcaggagcaggtggggggctcccctgagaagctccaagagacatcaaactggttattaagtcagcaacaggcagacggcagcttccaggatccctgtccggtactcgatcgcagtatgcaaggtggcctcgttggcaacgacgagacagtggccctgaccgcctttgtcacaatcgcattacaccatgggctagctgtcttccaagacgaaggtgccgagcctctcaaacagagggtggaagccagtataagtaaggctaactcgtttctgggcgagaaagcctcagctggactgctcggagcccatgccgcggctattacagcctatgcattgactctaacaaaggcaccggtcgacctcctcggtgtggcccataataaccttatggccatggcacaggaaaccggggataacttgtattggggatcggtaactgggtcccagagtaacgcagtctcccctaccccagctccaagaaatccatccgatcccatgccccaggcaccagccctctggattgaaacgacagcttatgcactgttgcacttgctcctccatgaaggcaaagcagagatggccgaccaagcctccgcatggctgactcgccaagggtcctttcagggaggcttccgctcaactcaggatactgtcatcgctcttgacgccctttccgcatattggatagcatcacataccacagaagaacgcggtttaaatgtaacactcagttcgactggccggaacggctttaaatcccacgcactgcagttgaacaatcgccaaatccgcggcttagaagaagagctgcagttttctctcggaagcaagatcaatgttaaggtgggcgggaactcaaagggcacgttgaaggtactgcgaacctataatgtgcttgatatgaagaacaccacttgccaagatctccaaatcgaggtgaccgttaaggggcacgttgaatataccatggaagcaaatgaagactacgaggattacgagtacgacgagcttcccgcgaaggatgatccggacgctcctctccagcccgtgactcctttacagctttttgaggggaggaggaaccgacggcggcgggaggcgccgaaagtggtcgaggagcaggagtcccgggttcactatacagtttgcatatggcgaaacgggaaggtgggcctatccggaatggcaattgccgatgtgactttacttagcgggttccacgccctgcgagccgatctcgagaagctgacctctctgagtgatcgttacgtgtcccactttgaaaccgagggcccccatgtcctgctctactttgatagtgtgcccacctcacgtgaatgcgtcgggttcgaagctgtacaggaggttcctgttggactggttcagccagctagtgccactctctacgattactataacccagaaaggaggtgtagtgtgttttatggagctccatcaaagagccgcctgcttgctacgctttgtagcgccgaggtttgtcaatgcgccgagggcaaatgtccaaggcagcgacgcgcactggaacgcggactacaggacgaggatggatacaggatgaagtttgcctgctactaccctcgtgtcgaatatggcttccaggtgaaggtccttagggaggactcacgcgccgccttcaggctctttgaaactaaaattactcaagtgctgcacttcacgaaagatgtcaaagctgcagctaatcagatgaggaatttcctggtcagagcctcctgtaggctgaggctggagcccggaaaagagtacctgatcatgggccttgacggcgctacttatgatctagaggggcatccgcagtacctactcgactccaatagttggatcgaggagatgccaagtgagcggctgtgtcggagcacacggcagcgggccgcatgtgctcagctgaacgattttctgcaagagtacggcactcaggggtgccaagtctag

SEQ ID NO: 171585 - DNA, 5235 bp, Artificial Sequence
  derived and/or modified sequence
atgaggctgctgtggggcctcatctgggccagcagcttcttcaccctgagcctgcagaagccccggctgctgctcttcagccccagcgtggtgcacctgggcgtgcccctgtctgtgggcgtgcagctgcaggatgtgccccggggccaggtggtgaagggctctgtgttcctgaggaaccccagcagaaataatgtgccctgcagccccaaggtggacttcaccctgagcagcgagcgggactttgccctgctgagcctgcaggtgcccctgaaggatgccaagagctgtggcctgcaccagctgctgcggggccctgaggtgcagctggtggcccacagcccctggctgaaggacagcctgagcaggaccaccaacatccagggcatcaacctgctcttcagcagcagaagaggccacctgttcctgcagacagaccagcccatctacaaccctggccagagggtgcgctacagagtgtttgccctggaccagaagatgaggcccagcacagacaccatcaccgtgatggtggagaacagccacggcctgcgggtgaggaagaaggaggtgtacatgcccagcagcatcttccaggatgactttgtgatcccagacatcagcgagcccggcacctggaagatcagcgcccgcttcagtgatggcctggagagcaacagcagcacccagtttgaggtgaagaagtatgtgctgcccaactttgaggtgaagatcaccccaggcaagccctacatcctgactgtgcccggccacctggatgagatgcagctggacatccaggcccgctacatctacggcaagcctgtgcagggcgtggcctacgtgcgcttcggcctgctggatgaagatggcaagaagaccttcttccggggcctggagagccagaccaagctggtgaatggccagagccacatcagcctgagcaaggccgagttccaggatgccctggagaagctgaacatgggcatcacagacctgcagggcctgcggctgtatgtggccgccgccatcatcgagtacccaggaggagagatggaggaggccgagctgacctcctggtactttgtgagcagccccttcagcctggacctgagcaagaccaagaggcacctggtgcctggggcccccttcctgctgcaggccctggtgcgggagatgagcggcagccctgccagcggcatccctgtgaaggtgtctgccaccgtgagcagccctggctctgtgcctgaggtgcaggacatccagcagaacacagatggcagcggccaggtgtccatccccatcatcatcccccagaccatcagcgagctgcagctgtctgtgtctgctggcagcccccacccagccatcgcccggctgactgtggccgcccctccttctgggggccctggcttcctgagcattgagtggccagacagccggcccccccgggtgggggacaccctgaacctgaacctgcgggctgtgggcagcggggccaccttcagccactactactacatgatcctgagccggggccagatcgtgttcatgaaccgggagcccaagaggaccctgacctctgtgtctgtgtttgtggaccaccacctggcccccagcttctactttgtggccttctactaccatggagaccaccctgtggccaacagcctgcgggtggatgtgcaggccggggcctgtgagggcaagctggagctgtctgtggatggagccaagcagtacagaaatggagagagcgtgaagctgcacctggagacagacagcctggccctggtggccctgggcgccctggacacagccctgtatgctgctggcagcaagagccacaagcccctgaacatgggcaaggtgtttgaggccatgaacagctatgacctgggctgcggccctgggggcggggacagcgccctgcaggtgttccaggccgccggcctggccttcagtgatggagaccagtggaccctgagcaggaagaggctgagctgccccaaggagaagaccaccaggaagaagagaaatgtgaacttccagaaggccatcaatgagaagctgggccagtatgccagccccacagccaagcgctgctgccaggatggagtgacccggctgcccatgatgaggagctgtgagcagagagctgcccgggtgcagcagcctgactgccgggagcccttcctgagctgctgccagtttgctgagagcctgaggaagaagagccgggacaagggccaggccggcctgcagagggccctggagatcctgcaggaggaggacctgattgatgaagatgacatccctgtgcgctccttcttccctgagaactggctgtggagggtggagaccgtggaccgcttccagatcctgaccctgtggctgcctgacagcctgaccacctgggagatccacggcctgagcctgagcaagaccaagggcctgtgtgtggccacccctgtgcagctgcgggtcttccgggagttccacctgcacctgcggctgcccatgtctgtgagaagatttgagcagctggagctgcggcctgtgctgtacaactacctggacaagaacctgactgtgtctgtgcacgtgtcccctgtggagggcctgtgcctggccggcggcggcggcctggcccagcaggtgctggtgcctgctggcagcgcccggcctgtggccttctctgtggtgcccacagctgctgctgctgtgtccctgaaggtggtggcccggggcagctttgagttccctgtgggagatgctgtgtccaaggtgctgcagatcgagaaggagggcgccatccaccgggaggagctggtgtatgagctgaaccccctggaccaccggggccgcaccctggagatccctggcaacagcgaccccaacatgatcccagatggagacttcaacagctatgtgcgggtgacagccagtgaccccctggacaccctgggcagcgagggcgccctgagccctggaggagtggccagcctgctgcggctgccccggggctgtggggagcagaccatgatctacctggcccccaccctggccgccagccgctacctggacaagacagagcagtggagcaccctgcccccagagaccaaggaccatgctgtggacctgatccagaagggctacatgaggatccagcagttcaggaaggcagatggcagctatgctgcctggctgagccgggacagcagcacctggctgacagcctttgtgctgaaggtgctgagcctggcccaggagcaggtgggcggcagccctgagaagctgcaggagaccagcaactggctgctgagccagcagcaggctgatggcagcttccaggacccctgccctgtgctggaccgctccatgcagggcggcctggtgggcaatgatgagaccgtggccctgacagcctttgtgaccatcgccctgcaccacggcctggccgtgttccaggatgagggcgctgagcccctgaagcagagggtggaggccagcatcagcaaggccaacagcttcctgggggagaaggccagcgctggcctgctgggcgcccacgccgccgccatcacagcctatgccctgaccctgaccaaggcccctgtggacctgctgggcgtggcccacaacaacctgatggccatggcccaggagaccggggacaacctgtactggggctctgtgacaggcagccagagcaatgctgtgagccccaccccagcccccaggaaccccagcgaccccatgccccaggccccagccctgtggattgagaccacagcctatgccctgctgcacctgctgctgcacgagggcaaggccgagatggctgaccaggccgccgcctggctgacccggcagggcagcttccagggcggcttccgcagcacccaggacacagtgattgccctggatgccctgagcgcctactggatcgccagccacaccacagaggagcggggcctgaatgtgaccctgagcagcactggaagaaatggcttcaagagccacgccctgcagctgaacaaccggcagatccggggcctggaggaggagctgcagttcagcctgggcagcaagatcaacgtgaaggtgggcggcaacagcaagggcaccctgaaggtgctgcggacctacaacgtgctggacatgaagaacaccacctgccaggacctgcagatcgaggtgacagtgaagggccacgtggagtacaccatggaggccaatgaagattatgaggactatgaatatgatgagctgcctgccaaggatgatcctgatgcccccctgcagcctgtgacccccctgcagctgtttgagggcagaagaaacagaagaagaagagaggcccccaaggtggtggaggagcaggagagccgggtgcactacacagtgtgcatctggagaaatggcaaggtgggcctgagcggcatggccatcgcagatgtgaccctgctgagcggcttccacgccctgcgggctgacctggagaagctgaccagcctgagtgacagatatgtgagccactttgaaacagagggcccccacgtgctgctgtactttgacagcgtgcccaccagccgggagtgtgtgggctttgaggccgtgcaggaggtgcctgtgggcctggtgcagcctgccagcgccaccctgtatgactactacaaccctgagcggcgctgcagcgtcttctacggggcccccagcaagagccggctgctggccaccctgtgcagcgctgaggtgtgccagtgtgccgagggcaagtgcccccggcagaggcgggccctggagcggggcctgcaggatgaagatggctacaggatgaagtttgcctgctactacccccgggtggagtatggcttccaggtgaaggtgctgcgggaggacagccgggccgccttccggctgtttgagaccaagatcacccaggtgctgcacttcaccaaggatgtgaaggccgccgccaaccagatgaggaacttcctggtgcgggccagctgccgcctgcggctggagcccgggaaggagtacctgatcatgggcctggatggagccacctatgacctggagggccacccccagtacctgctggacagcaacagctggattgaggagatgcccagcgagcggctgtgccgcagcacccggcagagagctgcctgtgcccagctgaatgacttcctgcaggagtatggcacccagggctgccaggtgtag

SEQ ID NO: 171586 - DNA, 5235 bp, Artificial Sequence
  derived and/or modified sequence
atgaggctgctgtggggcctcatctgggccagcagcttcttcaccctgagcctgcagaagccccggctgctgctcttcagccccagcgtggtgcacctgggcgtgcccctgtctgtgggcgtgcagctgcaggatgtgccccggggccaggtggtgaagggctctgtgttcctgaggaaccccagcagaaataatgtgccctgcagccccaaggtggacttcaccctgagcagcgagcgggactttgccctgctgagcctgcaggtgcccctgaaggatgccaagagctgtggcctgcaccagctgctgcggggccctgaggtgcagctggtggcccacagcccctggctgaaggacagcctgagcaggaccaccaacatccagggcatcaacctgctcttcagcagcagaagaggccacctgttcctgcagacagaccagcccatctacaaccctggccagagggtgcgctacagagtgtttgccctggaccagaagatgaggcccagcacagacaccatcaccgtgatggtggagaacagccacggcctgcgggtgaggaagaaggaggtgtacatgcccagcagcatcttccaggatgactttgtgatcccagacatcagcgagcccggcacctggaagatcagcgcccgcttcagtgatggcctggagagcaacagcagcacccagtttgaggtgaagaagtatgtgctgcccaactttgaggtgaagatcaccccaggcaagccctacatcctgactgtgcccggccacctggatgagatgcagctggacatccaggcccgctacatctacggcaagcctgtgcagggcgtggcctacgtgcgcttcggcctgctggatgaagatggcaagaagaccttcttccggggcctggagagccagaccaagctggtgaatggccagagccacatcagcctgagcaaggccgagttccaggatgccctggagaagctgaacatgggcatcacagacctgcagggcctgcggctgtatgtggccgccgccatcatcgagagccctggaggagagatggaggaggccgagctgacctcctggtactttgtgagcagccccttcagcctggacctgagcaagaccaagaggcacctggtgcctggggcccccttcctgctgcaggccctggtgcgggagatgagcggcagccctgccagcggcatccctgtgaaggtgtctgccaccgtgagcagccctggctctgtgcctgaggtgcaggacatccagcagaacacagatggcagcggccaggtgtccatccccatcatcatcccccagaccatcagcgagctgcagctgtctgtgtctgctggcagcccccacccagccatcgcccggctgactgtggccgcccctccttctgggggccctggcttcctgagcattgaaagaccagacagccggcccccccgggtgggggacaccctgaacctgaacctgcgggctgtgggcagcggggccaccttcagccactactactacatgatcctgagccggggccagatcgtgttcatgaaccgggagcccaagaggaccctgacctctgtgtctgtgtttgtggaccaccacctggcccccagcttctactttgtggccttctactaccatggagaccaccctgtggccaacagcctgcgggtggatgtgcaggccggggcctgtgagggcaagctggagctgtctgtggatggagccaagcagtacagaaatggagagagcgtgaagctgcacctggagacagacagcctggccctggtggccctgggcgccctggacacagccctgtatgctgctggcagcaagagccacaagcccctgaacatgggcaaggtgtttgaggccatgaacagctatgacctgggctgcggccctgggggcggggacagcgccctgcaggtgttccaggccgccggcctggccttcagtgatggagaccagtggaccctgagcaggaagaggctgagctgccccaaggagaagaccaccaggaagaagagaaatgtgaacttccagaaggccatcaatgagaagctgggccagtatgccagccccacagccaagcgctgctgccaggatggagtgacccggctgcccatgatgaggagctgtgagcagagagctgcccgggtgcagcagcctgactgccgggagcccttcctgagctgctgccagtttgctgagagcctgaggaagaagagccgggacaagggccaggccggcctgcagagggccctggagatcctgcaggaggaggacctgattgatgaagatgacatccctgtgcgctccttcttccctgagaactggctgtggagggtggagaccgtggaccgcttccagatcctgaccctgtggctgcctgacagcctgaccacctgggagatccacggcctgagcctgagcaagaccaagggcctgtgtgtggccacccctgtgcagctgcgggtcttccgggagttccacctgcacctgcggctgcccatgtctgtgagaagatttgagcagctggagctgcggcctgtgctgtacaactacctggacaagaacctgactgtgtctgtgcacgtgtcccctgtggagggcctgtgcctggccggcggcggcggcctggcccagcaggtgctggtgcctgctggcagcgcccggcctgtggccttctctgtggtgcccacagctgctgctgctgtgtccctgaaggtggtggcccggggcagctttgagttccctgtgggagatgctgtgtccaaggtgctgcagatcgagaaggagggcgccatccaccgggaggagctggtgtatgagctgaaccccctggaccaccggggccgcaccctggagatccctggcaacagcgaccccaacatgatcccagatggagacttcaacagctatgtgcgggtgacagccagtgaccccctggacaccctgggcagcgagggcgccctgagccctggaggagtggccagcctgctgcggctgccccggggctgtggggagcagaccatgatctacctggcccccaccctggccgccagccgctacctggacaagacagagcagtggagcaccctgcccccagagaccaaggaccatgctgtggacctgatccagaagggctacatgaggatccagcagttcaggaaggcagatggcagctatgctgcctggctgagccgggacagcagcacctggctgacagcctttgtgctgaaggtgctgagcctggcccaggagcaggtgggcggcagccctgagaagctgcaggagaccagcaactggctgctgagccagcagcaggctgatggcagcttccaggacccctgccctgtgctggaccgctccatgcagggcggcctggtgggcaatgatgagaccgtggccctgacagcctttgtgaccatcgccctgcaccacggcctggccgtgttccaggatgagggcgctgagcccctgaagcagagggtggaggccagcatcagcaaggccagcagcttcctgggggagaaggccagcgctggcctgctgggcgcccacgccgccgccatcacagcctatgccctgaccctgaccaaggcccctgtggacctgctgggcgtggcccacaacaacctgatggccatggcccaggagaccggggacaacctgtactggggctctgtgacaggcagccagagcaatgctgtgagccccaccccagcccccaggaaccccagcgaccccatgccccaggccccagccctgtggattgagaccacagcctatgccctgctgcacctgctgctgcacgagggcaaggccgagatggctgaccaggccgccgcctggctgacccggcagggcagcttccagggcggcttccgcagcacccaggacacagtgattgccctggatgccctgagcgcctactggatcgccagccacaccacagaggagcggggcctgaatgtgaccctgagcagcactggaagaaatggcttcaagagccacgccctgcagctgaacaaccggcagatccggggcctggaggaggagctgcagttcagcctgggcagcaagatcaacgtgaaggtgggcggcaacagcaagggcaccctgaaggtgctgcggacctacaacgtgctggacatgaagaacaccacctgccaggacctgcagatcgaggtgacagtgaagggccacgtggagtacaccatggaggccaatgaagattatgaggactatgaatatgatgagctgcctgccaaggatgatcctgatgcccccctgcagcctgtgacccccctgcagctgtttgagggcagaagaaacagaagaagaagagaggcccccaaggtggtggaggagcaggagagccgggtgcactacacagtgtgcatctggagaaatggcaaggtgggcctgagcggcatggccatcgcagatgtgaccctgctgagcggcttccacgccctgcgggctgacctggagaagctgaccagcctgagtgacagatatgtgagccactttgaaacagagggcccccacgtgctgctgtactttgacagcgtgcccaccagccgggagtgtgtgggctttgaggccgtgcaggaggtgcctgtgggcctggtgcagcctgccagcgccaccctgtatgactactacaaccctgagcggcgctgcagcgtcttctacggggcccccagcaagagccggctgctggccaccctgtgcagcgctgaggtgtgccagtgtgccgagggcaagtgcccccggcagaggcgggccctggagcggggcctgcaggatgaagatggctacaggatgaagtttgcctgctactacccccgggtggagtatggcttccaggtgaaggtgctgcgggaggacagccgggccgccttccggctgtttgagaccaagatcacccaggtgctgcacttcaccaaggatgtgaaggccgccgccaaccagatgaggaacttcctggtgcgggccagctgccgcctgcggctggagcccgggaaggagtacctgatcatgggcctggatggagccacctatgacctggagggccacccccagtacctgctggacagcaacagctggattgaggagatgcccagcgagcggctgtgccgcagcacccggcagagagctgcctgtgcccagctgaatgacttcctgcaggagtatggcacccagggctgccaggtgtag

SEQ ID NO: 171587 - DNA, 5235 bp, Artificial Sequence
  derived and/or modified sequence
atgaggctgctgtggggcctcatctgggccagcagcttcttcaccctgagcctgcagaagccccggctgctgctcttcagccccagcgtggtgcacctgggcgtgcccctgtctgtgggcgtgcagctgcaggatgtgccccggggccaggtggtgaagggctctgtgttcctgaggaaccccagcagaaataatgtgccctgcagccccaaggtggacttcaccctgagcagcgagcgggactttgccctgctgagcctgcaggtgcccctgaaggatgccaagagctgtggcctgcaccagctgctgcggggccctgaggtgcagctggtggcccacagcccctggctgaaggacagcctgagcaggaccaccaacatccagggcatcaacctgctcttcagcagcagaagaggccacctgttcctgcagacagaccagcccatctacaaccctggccagagggtgcgctacagagtgtttgccctggaccagaagatgaggcccagcacagacaccatcaccgtgatggtggagaacagccacggcctgcgggtgaggaagaaggaggtgtacatgcccagcagcatcttccaggatgactttgtgatcccagacatcagcgagcccggcacctggaagatcagcgcccgcttcagtgatggcctggagagcaacagcagcacccagtttgaggtgaagaagtatgtgctgcccaactttgaggtgaagatcaccccaggcaagccctacatcctgactgtgcccggccacctggatgagatgcagctggacatccaggcccgctacatctacggcaagcctgtgcagggcgtggcctacgtgcgcttcggcctgctggatgaagatggcaagaagaccttcttccggggcctggagagccagaccaagctggtgaatggccagagccacatcagcctgagcaaggccgagttccaggatgccctggagaagctgaacatgggcatcacagacctgcagggcctgcggctgtatgtggccgccgccatcatcgagtacccaggaggagagatggaggaggccgagctgacctcctggtactttgtgagcagccccttcagcctggacctgagcaagaccaagaggcacctggtgcctggggcccccttcctgctgcaggccctggtgcgggagatgagcggcagccctgccagcggcatccctgtgaaggtgtctgccaccgtgagcagccctggctctgtgcctgaggtgcaggacatccagcagaacacagatggcagcggccaggtgtccatccccatcatcatcccccagaccatcagcgagctgcagctgtctgtgtctgctggcagcccccacccagccatcgcccggctgactgtggccgcccctccttctgggggccctggcttcctgagcattgaaagaccagacagccggcccccccgggtgggggacaccctgaacctgaacctgcgggctgtgggcagcggggccaccttcagccactactactacatgatcctgagccggggccagatcgtgttcatgaaccgggagcccaagaggaccctgacctctgtgtctgtgtttgtggaccaccacctggcccccagcttctactttgtggccttctactaccatggagaccaccctgtggccaacagcctgcgggtggatgtgcaggccggggcctgtgagggcaagctggagctgtctgtggatggagccaagcagtacagaaatggagagagcgtgaagctgcacctggagacagacagcctggccctggtggccctgggcgccctggacacagccctgtatgctgctggcagcaagagccacaagcccctgaacatgggcaaggtgtttgaggccatgaacagctatgacctgggctgcggccctgggggcggggacagcgccctgcaggtgttccaggccgccggcctggccttcagtgatggagaccagtggaccctgagcaggaagaggctgagctgccccaaggagaagaccaccaggaagaagagaaatgtgaacttccagaaggccatcaatgagaagctgggccagtatgccagccccacagccaagcgctgctgccaggatggagtgacccggctgcccatgatgaggagctgtgagcagagagctgcccgggtgcagcagcctgactgccgggagcccttcctgagctgctgccagtttgctgagagcctgaggaagaagagccgggacaagggccaggccggcctgcagagggccctggagatcctgcaggaggaggacctgattgatgaagatgacatccctgtgcgctccttcttccctgagaactggctgtggagggtggagaccgtggaccgcttccagatcctgaccctgtggctgcctgacagcctgaccacctgggagatccacggcctgagcctgagcaagaccaagggcctgtgtgtggccacccctgtgcagctgcgggtcttccgggagttccacctgcacctgcggctgcccatgtctgtgagaagatttgagcagctggagctgcggcctgtgctgtacaactacctggacaagaacctgactgtgtctgtgcacgtgtcccctgtggagggcctgtgcctggccggcggcggcggcctggcccagcaggtgctggtgcctgctggcagcgcccggcctgtggccttctctgtggtgcccacagctgctgctgctgtgtccctgaaggtggtggcccggggcagctttgagttccctgtgggagatgctgtgtccaaggtgctgcagatcgagaaggagggcgccatccaccgggaggagctggtgtatgagctgaaccccctggaccaccggggccgcaccctggagatccctggcaacagcgaccccaacatgatcccagatggagacttcaacagctatgtgcgggtgacagccagtgaccccctggacaccctgggcagcgagggcgccctgagccctggaggagtggccagcctgctgcggctgccccggggctgtggggagcagaccatgatctacctggcccccaccctggccgccagccgctacctggacaagacagagcagtggagcaccctgcccccagagaccaaggaccatgctgtggacctgatccagaagggctacatgaggatccagcagttcaggaaggcagatggcagctatgctgcctggctgagccgggacagcagcacctggctgacagcctttgtgctgaaggtgctgagcctggcccaggagcaggtgggcggcagccctgagaagctgcaggagaccagcaactggctgctgagccagcagcaggctgatggcagcttccaggacccctgccctgtgctggaccgctccatgcagggcggcctggtgggcaatgatgagaccgtggccctgacagcctttgtgaccatcgccctgcaccacggcctggccgtgttccaggatgagggcgctgagcccctgaagcagagggtggaggccagcatcagcaaggccaacagcttcctgggggagaaggccagcgctggcctgctgggcgcccacgccgccgccatcacagcctatgccctgaccctgaccaaggcccctgtggacctgctgggcgtggcccacaacaacctgatggccatggcccaggagaccggggacaacctgtactggggctctgtgacaggcagccagagcaatgctgtgagccccaccccagcccccaggaaccccagcgaccccatgccccaggccccagccctgtggattgagaccacagcctatgccctgctgcacctgctgctgcacgagggcaaggccgagatggctgaccaggccgccgcctggctgacccggcagggcagcttccagggcggcttccgcagcacccaggacacagtgattgccctggatgccctgagcgcctactggatcgccagccacaccacagaggagcggggcctgaatgtgaccctgagcagcactggaagaaatggcttcaagagccacgccctgcagctgaacaaccggcagatccggggcctggaggaggagctgcagttcagcctgggcagcaagatcaacgtgaaggtgggcggcaacagcaagggcaccctgaaggtgctgcggacctacaacgtgctggacatgaagaacaccacctgccaggacctgcagatcgaggtgacagtgaagggccacgtggagtacaccatggaggccaatgaagattatgaggactatgaatatgatgagctgcctgccaaggatgatcctgatgcccccctgcagcctgtgacccccctgcagctgtttgagggcagaagaaacagaagaagaagagaggcccccaaggtggtggaggagcaggagagccgggtgcactacacagtgtgcatctggagaaatggcaaggtgggcctgagcggcatggccatcgcagatgtgaccctgctgagcggcttccacgccctgcgggctgacctggagaagctgaccagcctgagtgacagatatgtgagccactttgaaacagagggcccccacgtgctgctgtactttgacagcgtgcccaccagccgggagtgtgtgggctttgaggccgtgcaggaggtgcctgtgggcctggtgcagcctgccagcgccaccctgtatgactactacaaccctgagcggcgctgcagcgtcttctacggggcccccagcaagagccggctgctggccaccctgtgcagcgctgaggtgtgccagtgtgccgagggcaagtgcccccggcagaggcgggccctggagcggggcctgcaggatgaagatggctacaggatgaagtttgcctgctactacccccgggtggagtatggcttccaggtgaaggtgctgcgggaggacagccgggccgccttccggctgtttgagaccaagatcacccaggtgctgcacttcaccaaggatgtgaaggccgccgccaaccagatgaggaacttcctggtgcgggccagctgccgcctgcggctggagcccgggaaggagtacctgatcatgggcctggatggagccacctatgacctggagggccacccccagtacctgctggacagcaacagctggattgaggagatgcccagcgagcggctgtgccgcagcacccggcagagagctgcctgtgcccagctgaatgacttcctgcaggagtatggcacccagggctgccaggtgtag

SEQ ID NO: 171588 - DNA, 5235 bp, Artificial Sequence
  derived and/or modified sequence
atgaggctgctgtggggcctcatctgggccagcagcttcttcaccctgagcctgcagaagccccggctgctgctcttcagccccagcgtggtgcacctgggcgtgcccctgtctgtgggcgtgcagctgcaggatgtgccccggggccaggtggtgaagggctctgtgttcctgaggaaccccagcagaaataatgtgccctgcagccccaaggtggacttcaccctgagcagcgagcgggactttgccctgctgagcctgcaggtgcccctgaaggatgccaagagctgtggcctgcaccagctgctgcggggccctgaggtgcagctggtggcccacagcccctggctgaaggacagcctgagcaggaccaccaacatccagggcatcaacctgctcttcagcagcagaagaggccacctgttcctgcagacagaccagcccatctacaaccctggccagagggtgcgctacagagtgtttgccctggaccagaagatgaggcccagcacagacaccatcaccgtgatggtggagaacagccacggcctgcgggtgaggaagaaggaggtgtacatgcccagcagcatcttccaggatgactttgtgatcccagacatcagcgagcccggcacctggaagatcagcgcccgcttcagtgatggcctggagagcaacagcagcacccagtttgaggtgaagaagtatgtgctgcccaactttgaggtgaagatcaccccaggcaagccctacatcctgactgtgcccggccacctggatgagatgcagctggacatccaggcccgctacatctacggcaagcctgtgcagggcgtggcctacgtgcgcttcggcctgctggatgaagatggcaagaagaccttcttccggggcctggagagccagaccaagctggtgaatggccagagccacatcagcctgagcaaggccgagttccaggatgccctggagaagctgaacatgggcatcacagacctgcagggcctgcggctgtatgtggccgccgccatcatcgagagccctggaggagagatggaggaggccgagctgacctcctggtactttgtgagcagccccttcagcctggacctgagcaagaccaagaggcacctggtgcctggggcccccttcctgctgcaggccctggtgcgggagatgagcggcagccctgccagcggcatccctgtgaaggtgtctgccaccgtgagcagccctggctctgtgcctgaggtgcaggacatccagcagaacacagatggcagcggccaggtgtccatccccatcatcatcccccagaccatcagcgagctgcagctgtctgtgtctgctggcagcccccacccagccatcgcccggctgactgtggccgcccctccttctgggggccctggcttcctgagcattgaaagaccagacagccggcccccccgggtgggggacaccctgaacctgaacctgcgggctgtgggcagcggggccaccttcagccactactactacatgatcctgagccggggccagatcgtgttcatgaaccgggagcccaagaggaccctgacctctgtgtctgtgtttgtggaccaccacctggcccccagcttctactttgtggccttctactaccatggagaccaccctgtggccaacagcctgcgggtggatgtgcaggccggggcctgtgagggcaagctggagctgtctgtggatggagccaagcagtacagaaatggagagagcgtgaagctgcacctggagacagacagcctggccctggtggccctgggcgccctggacacagccctgtatgctgctggcagcaagagccacaagcccctgaacatgggcaaggtgtttgaggccatgaacagctatgacctgggctgcggccctgggggcggggacagcgccctgcaggtgttccaggccgccggcctggccttcagtgatggagaccagtggaccctgagcaggaagaggctgagctgccccaaggagaagaccaccaggaagaagagaaatgtgaacttccagaaggccatcaatgagaagctgggccagtatgccagccccacagccaagcgctgctgccaggatggagtgacccggctgcccatgatgaggagctgtgagcagagagctgcccgggtgcagcagcctgactgccgggagcccttcctgagctgctgccagtttgctgagagcctgaggaagaagagccgggacaagggccaggccggcctgcagagggccctggagatcctgcaggaggaggacctgattgatgaagatgacatccctgtgcgctccttcttccctgagaactggctgtggagggtggagaccgtggaccgcttccagatcctgaccctgtggctgcctgacagcctgaccacctgggagatccacggcctgagcctgagcaagaccaagggcctgtgtgtggccacccctgtgcagctgcgggtcttccgggagttccacctgcacctgcggctgcccatgtctgtgagaagatttgagcagctggagctgcggcctgtgctgtacaactacctggacaagaacctgactgtgtctgtgcacgtgtcccctgtggagggcctgtgcctggccggcggcggcggcctggcccagcaggtgctggtgcctgctggcagcgcccggcctgtggccttctctgtggtgcccacagctgctgctgctgtgtccctgaaggtggtggcccggggcagctttgagttccctgtgggagatgctgtgtccaaggtgctgcagatcgagaaggagggcgccatccaccgggaggagctggtgtatgagctgaaccccctggaccaccggggccgcaccctggagatccctggcaacagcgaccccaacatgatcccagatggagacttcaacagctatgtgcgggtgacagccagtgaccccctggacaccctgggcagcgagggcgccctgagccctggaggagtggccagcctgctgcggctgccccggggctgtggggagcagaccatgatctacctggcccccaccctggccgccagccgctacctggacaagacagagcagtggagcaccctgcccccagagaccaaggaccatgctgtggacctgatccagaagggctacatgaggatccagcagttcaggaaggcagatggcagctatgctgcctggctgagccgggacagcagcacctggctgacagcctttgtgctgaaggtgctgagcctggcccaggagcaggtgggcggcagccctgagaagctgcaggagaccagcaactggctgctgagccagcagcaggctgatggcagcttccaggacccctgccctgtgctggaccgctccatgcagggcggcctggtgggcaatgatgagaccgtggccctgacagcctttgtgaccatcgccctgcaccacggcctggccgtgttccaggatgagggcgctgagcccctgaagcagagggtggaggccagcatcagcaaggccaacagcttcctgggggagaaggccagcgctggcctgctgggcgcccacgccgccgccatcacagcctatgccctgaccctgaccaaggcccctgtggacctgctgggcgtggcccacaacaacctgatggccatggcccaggagaccggggacaacctgtactggggctctgtgacaggcagccagagcaatgctgtgagccccaccccagcccccaggaaccccagcgaccccatgccccaggccccagccctgtggattgagaccacagcctatgccctgctgcacctgctgctgcacgagggcaaggccgagatggctgaccaggccagcgcctggctgacccggcagggcagcttccagggcggcttccgcagcacccaggacacagtgattgccctggatgccctgagcgcctactggatcgccagccacaccacagaggagcggggcctgaatgtgaccctgagcagcactggaagaaatggcttcaagagccacgccctgcagctgaacaaccggcagatccggggcctggaggaggagctgcagttcagcctgggcagcaagatcaacgtgaaggtgggcggcaacagcaagggcaccctgaaggtgctgcggacctacaacgtgctggacatgaagaacaccacctgccaggacctgcagatcgaggtgacagtgaagggccacgtggagtacaccatggaggccaatgaagattatgaggactatgaatatgatgagctgcctgccaaggatgatcctgatgcccccctgcagcctgtgacccccctgcagctgtttgagggcagaagaaacagaagaagaagagaggcccccaaggtggtggaggagcaggagagccgggtgcactacacagtgtgcatctggagaaatggcaaggtgggcctgagcggcatggccatcgcagatgtgaccctgctgagcggcttccacgccctgcgggctgacctggagaagctgaccagcctgagtgacagatatgtgagccactttgaaacagagggcccccacgtgctgctgtactttgacagcgtgcccaccagccgggagtgtgtgggctttgaggccgtgcaggaggtgcctgtgggcctggtgcagcctgccagcgccaccctgtatgactactacaaccctgagcggcgctgcagcgtcttctacggggcccccagcaagagccggctgctggccaccctgtgcagcgctgaggtgtgccagtgtgccgagggcaagtgcccccggcagaggcgggccctggagcggggcctgcaggatgaagatggctacaggatgaagtttgcctgctactacccccgggtggagtatggcttccaggtgaaggtgctgcgggaggacagccgggccgccttccggctgtttgagaccaagatcacccaggtgctgcacttcaccaaggatgtgaaggccgccgccaaccagatgaggaacttcctggtgcgggccagctgccgcctgcggctggagcccgggaaggagtacctgatcatgggcctggatggagccacctatgacctggagggccacccccagtacctgctggacagcaacagctggattgaggagatgcccagcgagcggctgtgccgcagcacccggcagagagctgcctgtgcccagctgaatgacttcctgcaggagtatggcacccagggctgccaggtgtag

SEQ ID NO: 171589 - DNA, 5235 bp, Artificial Sequence
  derived and/or modified sequence
atgcggctgctgtggggcctgatctgggccagcagcttcttcaccctctcactgcagaaaccacgactcctgcttttctctccctcagtggtgcatctcggagtgccgctgtctgtgggagtccagctgcaggatgtgccccgtggccaggtcgtgaaggggagcgtcttcctgcggaaccctagtagaaataatgtgccatgtagccccaaggtggacttcaccctttcaagcgaacgcgacttcgccttgctgagcttacaagtcccgctgaaagacgccaagtcctgcggtcttcatcagctactgcgcgggccggaggttcaattggttgcacactctccttggctgaaagacagcctgtcccgaactaccaacattcaggggatcaaccttttgtttagttcacgacgagggcatctgttcctgcagacagatcaaccgatctacaaccctggtcagcgcgttcggtatcgagtgttcgcactggaccagaagatgcggccttccactgacacaattacagtgatggtggagaactctcacgggctgcgggtgcgtaaaaaagaggtgtatatgccaagctcaatattccaggacgacttcgtgatccccgatatcagtgaaccggggacttggaaaatctcagctagattcagcgacggactcgagagcaattcctcaacacaattcgaggttaagaaatatgtgttgcctaactttgaagtcaagatcacacccggcaagccgtatattctgaccgtccccggtcacctggatgagatgcagttggatatccaggcgcgatacatatacgggaaacccgtgcagggtgtcgcatatgtgaggtttggcctgttagacgaggacggcaagaaaactttttttagggggctggaatcccagaccaagctcgtaaatggacagtcccatattagtctatcaaaggccgagttccaagatgccctggagaaactcaatatgggtattacagacttacaggggttaaggctgtatgtcgcagccgctataatcgaataccccggaggtgaaatggaagaagctgagctcaccagctggtactttgtctcttcgcccttctcattggacctgtcaaagaccaaacggcaccttgtgcctggcgcgccttttttgctccaggccctggtacgagagatgtctggcagtcccgcctctggaataccagtgaaagtttcagcaaccgtctcttccccaggctccgtccctgaagtccaagacatccaacagaacaccgatggatccggtcaggtgtctatccccataattatcccccagacaattagcgagctgcagctgagcgtgtcggccggctccccacacccggcgatagctcgtcttactgtcgcggcccccccttctggaggacctggattcctgagcattgagtggcctgacagccggcctcccagagtgggcgacactctgaacctgaacctgagagccgtgggctccggggcaaccttctctcactactattacatgattctgtcacggggccagatcgtctttatgaacagggagccaaaaaggactctaacaagtgtctcagtcttcgttgaccaccacctggcaccttccttctacttcgtcgccttctactatcacggcgatcatccagtggccaacagcttgagggtagacgtccaggccggcgcctgtgaaggcaagttggagctgtccgtggatggggctaagcagtaccggaacggcgaatccgtcaaactgcacctggagacagactccctcgctcttgtggctctcggagccctggatacggctctatatgctgcaggcagcaagagccataagcctttgaacatggggaaagtgttcgaagccatgaactcctatgaccttgggtgcggaccggggggcggcgatagtgctttgcaggtgtttcaggccgcgggcctggccttctccgatggggatcagtggacactgtccaggaaaaggctcagctgtcccaaggagaaaaccacccgcaaaaagcgaaacgttaatttccagaaggctattaatgaaaagttagggcagtatgctagtccaaccgccaaaaggtgttgtcaggacggggtcacacggctaccgatgatgcgctcctgcgagcagagagcagccagggtccagcagccggactgccgggagcctttcttgagttgctgccaatttgctgaatcactgaggaagaaatcacgggataaaggccaagccggactccagagggctctggaaattctgcaggaggaagacttgatagacgaagatgatattccggtgcgcagtttttttcccgagaactggctgtggagggtggaaactgtggaccgcttccagatccttaccctgtggttgccggatagcttgacaacttgggagatacatggcctgtccctgagtaagaccaagggcctctgtgtagcaacccctgtgcagctgcgagtgtttagggagttccacctgcatctgcgactccctatgtctgttcgtcgcttcgaacagcttgagctgagacccgttctatataactacctggataaaaacttgactgtttctgtgcacgtttcccctgttgaaggtttgtgtctggcggggggcggaggactggctcagcaggtgctggtaccagcagggagcgctaggcctgtggcgtttagtgtcgtccccactgcggccgccgccgtttcattgaaggtcgtggctaggggttccttcgaattcccagtgggagatgccgttagtaaagtgttgcagattgaaaaggagggagcgatccacagggaagagttggtctacgagttgaatcccttggaccaccgaggtcgcaccctagaaatcccgggtaactccgacccaaatatgatcccagatggtgacttcaacagttatgtgcgggtaacagccagtgatccgttagatacactggggagtgaaggcgccttatcaccaggcggcgtagcatctctactgaggctcccccgaggatgcggggagcaaacaatgatctacttagcccccaccctggctgcctcccgttatctggataagacagaacagtggtccacactgcccccggaaaccaaagaccatgctgtcgatcttatccagaaaggctatatgaggatccagcagttcagaaaggcagacggctcgtacgccgcctggctcagcagggatagcagtacctggttgacagcttttgtactgaaggtgctgagtctggcccaggagcaagtcggtgggtctcctgagaaattacaggaaacaagcaactggctgctttcccagcagcaggcggatggatctttccaagacccctgcccagtgcttgacaggtctatgcaaggcgggttggtgggcaacgatgagacagtcgcactcacagcctttgtgacaatcgcgctccatcacggcctcgcagtgtttcaggacgaaggcgctgaaccccttaaacaaagggtagaagctagcatatcaaaggccaattccttcctaggagaaaaagcatccgcgggcctcttgggggcacacgcggccgctatcaccgcctatgcactgacgctcaccaaagcccctgtggacctcctcggagtagctcacaataatctgatggccatggcccaggaaacgggggataacttatactgggggtctgtcaccggctcccagagcaatgcagtgtccccaacacccgctcccagaaaccccagtgatcccatgccacaggcccccgcactttggatcgaaacgacagcttatgcgttgctgcacttactcctccatgagggcaaagcagagatggccgaccaggccgctgcatggcttacacggcagggctcatttcaggggggttttagatctacgcaggatacagtgatcgccctggatgcccttagcgcctactggattgcctctcacactacagaagaaagaggactgaacgtgacgttgagcagcaccggcaggaatggttttaagagccatgcattgcagctgaataaccggcaaattagaggattggaggaagagctgcaattcagtctggggtcaaagatcaacgtgaaggtgggagggaactctaaagggacccttaaggtgcttcgaacatacaatgtccttgatatgaagaataccacctgccaggacctacaaatcgaagtgaccgtgaaggggcatgtggaatacactatggaggctaacgaggactacgaggactacgaatacgacgagctgccggcaaaggacgatcccgacgctcccctgcaaccggtaacccccctccagttgttcgaagggcggaggaaccgaagaagaagagaggctcccaaagtcgtggaggaacaagagagcagagtgcactacacagtgtgcatctggagaaatgggaaagtagggctgtccgggatggccatcgccgacgtaacactactgagtggcttccatgcacttcgggccgacctcgagaaattgacttccctctcagacaggtatgtgagccatttcgagactgagggccctcatgtgctgttatatttcgattctgtgcctacaagccgcgaatgcgtcggatttgaagcagtgcaggaggtgcccgtaggactggtgcagccagcgtccgctacactgtacgattattataatcctgagcgccgttgctcagtcttctacggggccccttccaaatctaggctcctggccacgctctgctccgctgaagtttgccagtgtgccgagggtaagtgccctcgccaacgcagggcactggagcgagggctgcaagacgaagacgggtatcgtatgaagtttgcttgctactacccacgtgtggagtatgggttccaagttaaggtgctaagggaagactcacgggccgcattccgcctctttgagactaagatcacacaggtcctgcactttaccaaggatgtaaaggctgccgccaaccaaatgagaaattttctcgtgagggcctcttgtagactgaggctcgagccaggcaaggaatacctaatcatgggtctggacggggccacttacgacctcgaggggcatccacagtatctgcttgatagcaactcctggattgaagagatgcctagcgagcgcctgtgtaggtccactaggcagcgggcagcctgcgcgcagctgaatgacttcctgcaggaatacggcacccagggctgccaggtatag

SEQ ID NO: 171590 - DNA, 5235 bp, Artificial Sequence
  derived and/or modified sequence
atgcggctgctgtggggcctgatctgggccagcagcttcttcaccttgagtttgcagaaacccagactgctccttttctcaccatctgtggtccacctcggggtacccttatccgtgggagttcaactgcaggatgtgcccaggggacaagtagtgaagggatctgtattcctgcgaaacccatcaagaaacaatgtgccatgcagtccaaaagtcgactttactttgtccagtgagcgggacttcgccttactgtccttgcaggtaccgttgaaagatgctaagagctgcggactgcatcagttgctgcggggacccgaagtacagctggtcgcacattccccatggctgaaggacagcctgtctcgcacgaccaatattcagggcatcaacttgctgttctccagcagacgaggccacctctttctgcaaaccgaccagcccatctacaatccagggcagcgggtgagatacagggtgttcgctttggatcaaaagatgcgccccagcacagacaccataaccgtgatggtggaaaactcacatggcctcagagtcagaaagaaggaagtctatatgcccagttctatctttcaggatgactttgtgattcccgacattagcgagcctgggacatggaaaatctcggcaaggtttagcgacggactggaaagcaactcatcaacccagtttgaggtcaagaaatacgttctgcctaactttgaggtaaagattacacctggaaaaccctatatactgacggttccagggcatttggatgaaatgcagttggacatccaggcacgatacatctacggaaaacctgtgcaaggggtggcctacgtgcggtttggtcttttagatgaagatggcaaaaaaacgtttttcagaggccttgaaagccagactaagctggtaaatggccagtcccacatatcgctgagcaaagccgagttccaggacgctttggagaagttaaatatgggcattactgacctgcagggactcagactgtatgtcgcggcagccatcattgaaagtcccgggggagaaatggaagaagctgagttgacttcatggtacttcgtcagcagtccattttccctggacctcagtaagaccaagaggcatctcgtcccaggtgccccatttctactccaggctctagtcagagaaatgagcggcagccctgcctctggcattcccgtcaaagtgtccgcaactgtctcttcccctggctcagtccctgaagtacaagatatccagcagaacactgatgggtccggccaagtttcgattccaattattataccccagaccattagcgagttacagctctcagtgtccgccggaagtccccaccctgccattgcacgcttgaccgtcgccgccccgccaagcgggggccccggttttctttccattgagcgtcctgatagcaggccacccagggtaggcgacacattgaacttgaatttacgcgccgtgggaagcggagccaccttttcacactattattacatgatcctctcacgtggacaaatcgtgtttatgaatagagagcctaagcggacgttgacctcagtgtcagtgttcgtcgaccatcacctggccccttccttctacttcgttgccttttactaccatggggatcacccggtcgccaactcactccgagtggacgtccaggccggtgcatgtgaagggaaattggagctgtctgtggacggcgctaagcagtatcgcaacggggagtctgtgaagctgcatttagagactgatagcctagcactggttgcgttaggcgctctggatactgcgctgtatgccgccgggtctaaatcacacaagcctctgaacatgggtaaggtgtttgaggcaatgaactcctacgacctcggatgcggaccggggggtggagattccgctttgcaagtctttcaggctgcaggcctggcttttagcgacggggatcaatggaccctttcacggaaacggctgtcgtgccccaaagaaaagaccacgaggaaaaaaaggaatgtcaatttccagaaagcgatcaacgagaaactaggccagtatgcttcacctacagcgaagagatgttgtcaagacggcgtgactagactgccaatgatgaggagttgcgagcaacgggccgctcgcgtgcagcagccagactgcagggaaccctttctctcctgttgccagtttgcagagtctctgcggaaaaagagcagagacaaagggcaggctggtctgcaaagggccttagaaattctgcaagaggaggatttgatcgatgaggacgacatcccagtcagaagcttttttcctgagaactggctctggcgcgtagagaccgtggaccggtttcaaatactcactctttggctacccgatagcctcactacttgggaaatccatggcctgagtctgagcaagacgaagggactatgcgtggcaacacctgtacaactaagggtgttcagggagtttcatcttcacctacggcttcctatgagtgtgaggcggttcgaacaactggaactacgccccgtcctgtacaactatctggacaagaaccttactgtatccgtacacgtcagtccggtggaaggcctgtgcttggcaggaggaggaggcttagctcagcaggtcctcgtgccggcggggtcagcaaggcccgtggcattcagtgtcgtgcctactgctgctgcggcagtcagcctgaaagttgtggcaagaggtagctttgaattccctgttggcgatgccgtgagcaaagtgctgcaaattgaaaaggaaggggcaattcacagggaagagctggtttacgagctaaatccactggaccacagggggcgaactcttgagattccaggcaattcagatcctaacatgattccagatggagattttaatagctatgtgagggtgacggcctcagaccctctagatacactcgggagcgagggcgccctgtcccccggcggtgtggctagtttgcttagactgcctcgagggtgcggggaacagaccatgatctatctggctcctaccctggctgcatcccggtacctggataaaaccgaacagtggtccacactgcctcccgagaccaaggaccatgccgtggacctcattcagaagggatatatgcgcatccaacaattcagaaaggctgatgggagctatgcagcatggctgtcaagggacagttccacgtggcttaccgccttcgtcctgaaagtgttgtcgctggctcaagaacaggtggggggatcgcctgagaaactgcaggaaacctcgaattggctgctctcacagcaacaggcggatggaagttttcaggacccttgtcccgtgctagaccgctccatgcagggagggctcgtgggcaacgacgaaacagtagcacttacggcctttgttaccatcgccctccatcatgggcttgccgtgtttcaagatgaaggggctgagccgctgaaacaacgcgttgaagcgtctatcagtaaggcaagttctttcttaggggagaaagctagtgcgggcctgcttggtgcccacgccgccgccattaccgcatacgccttgaccctgaccaaggctcccgttgatcttcttggcgtggcacacaacaacctgatggccatggcgcaggaaacaggcgacaacctttactggggatccgtgactggcagccaatcaaacgccgtgtctcccacacccgcaccgaggaacccgagcgatcccatgccccaagctccagcattgtggatagagaccacagcctacgcgctcttgcatttgctgctgcatgagggtaaagcagagatggccgatcaggccgcagcatggcttacccggcaaggctcatttcagggaggtttccggtcaacccaggacactgtaattgcccttgatgccctgtctgcttattggatcgccagccataccacagaagaaagaggcctgaatgttacactgtcgtctaccggcaggaatggttttaaatctcatgcactacagctaaacaataggcagataagaggactcgaagaggagctgcagttctcgctgggctcaaagattaatgtgaaggttggcggaaactccaaaggcacactcaaagtgttgaggacgtacaacgtcctggacatgaagaataccacctgccaggaccttcagatagaagtcactgtcaaaggccacgtcgaatataccatggaggccaatgaagattacgaagattatgaatatgacgagttacccgctaaagacgaccccgatgcacccctccagccggtgacaccactccaactgttcgagggacggagaaatcgcaggcgtcgcgaggccccaaaggtagtcgaagagcaggagagccgcgtccactacacagtgtgcatctggcgtaacggaaaagtgggcttgtcaggaatggctattgcggacgttactttgctgtccgggttccatgcactgcgcgctgacttggagaagctgacctccctgtccgatagatacgtgagccattttgagaccgagggccctcacgtgcttctctactttgatagtgtgccaacatcacgcgaatgtgtcggctttgaggcagttcaagaggtccccgtggggctggtgcaaccagcttcagctactctgtacgactactacaaccccgaacgcaggtgtagtgtgttttatggggccccctcaaagagccgactcttggctactctctgctccgcagaggtttgccagtgtgctgaggggaaatgtccacgtcaaaggagagccctcgagagaggcctccaggatgaagacggctacagaatgaaatttgcgtgctactacccaagggtcgagtatggttttcaggtgaaggtcctgcgggaagattcacgtgctgcattccggctcttcgaaacaaagatcacccaggtgctgcatttcactaaagacgtcaaagccgccgcgaatcagatgcggaacttcctggttcgcgcttcctgtagactgcgacttgagccgggtaaagaatacttaattatgggactagatggagccacctatgacctagagggccacccacagtatctcctggattctaacagctggatagaggaaatgccctcagagcggttatgccgatcaactcggcagcgcgccgcgtgcgcccaacttaatgatttcttgcaagagtacggtacacagggatgtcaggtatag

SEQ ID NO: 171591 - DNA, 5235 bp, Artificial Sequence
  derived and/or modified sequence
atgcggctgctgtggggcctgatctgggccagcagcttcttcaccctgagcctgcaaaaacccaggcttctgctttttagcccctccgtagtacatctgggcgtgccattgagtgtgggcgtccaactgcaagatgtgcctcgggggcaggtggtgaagggatctgtgtttctacgaaacccctcccggaacaacgttccatgctccccaaaggtggatttcacactctcatcagaacgcgatttcgctctgctgtctcttcaggtaccactgaaagacgccaagtcctgtggtctgcatcagcttctgaggggtcctgaagtccagctcgtggcccattcaccgtggctaaaagacagcttgtctagaacaaccaatatccagggcatcaacctcctgttctcatcaagacgtggtcatctgttccttcagaccgatcagccaatctataacccaggacaacgcgtccgctatcgtgttttcgcccttgatcaaaaaatgcgtccaagcacagacacaattaccgtcatggtggaaaactcacacgggctacgggtgaggaaaaaggaagtctacatgccaagctcaatttttcaggatgacttcgtcatcccagacataagtgagcccgggacatggaagatatccgcacgattcagtgatggcttggaatccaacagttccactcagttcgaggtgaagaagtacgtgttgcctaatttcgaggttaagatcacgccagggaaaccttacatcctgacagtacccggccatctcgacgagatgcaacttgacatacaggcgagatacatttacggcaaacccgtccaaggtgtcgcttacgtgcggtttggactgctagacgaggatggaaaaaagacattcttccgaggacttgagtcgcagaccaaattagtaaatggacagtcgcatatttctctatcaaaagcagaatttcaggatgccctggaaaaactgaatatggggattaccgacctgcaaggactgcgcctgtacgtggccgcagccattattgagtaccccggaggagagatggaagaagccgagctgacctcctggtacttcgtctcctctccattctctctggatctaagcaagacgaaacggcatcttgtgccaggtgcaccttttctgctgcaggccctggttcgggagatgtccggatcacctgcatccggaatccccgttaaagtttcggccactgtttctagtcccggttctgttcccgaggtgcaggatatccagcagaacaccgacggctcaggccaggtatcgatcccaattatcatcccccagactatcagtgagctccaactgtcggtgagtgcaggctcccctcacccagccatagctcgtctgactgtggcagcccctcctagcggggggcctggctttttgtccatagagagaccggattccagaccccctcgggtgggtgacaccctgaatctgaatttgcgagctgtagggagcggcgctacgttctcccactattattacatgattctgtcaagagggcagattgtgtttatgaatagggaacccaagcggacactgaccagtgtgagcgtgttcgttgaccatcacctggcaccttccttttatttcgtcgcattctattatcacggggaccaccccgtagccaacagccttcgcgtggatgtgcaggctggggcttgtgagggtaagctagaactttctgtggatggtgcgaagcaatacagaaatggtgagtccgtgaagctgcatctggaaaccgatagcctcgcccttgttgcactgggcgcccttgacactgctctctacgcagctgggtccaaatcccataaaccgctcaacatgggtaaagtgtttgaggcgatgaacagctacgatttgggatgcgggcctggagggggggattcagcccttcaggtgtttcaagccgccggactcgcattttcagatggcgatcagtggacactgagtaggaaaagactaagctgccccaaggaaaaaaccactcgcaaaaagcgcaatgttaatttccagaaagctatcaacgagaagttagggcagtacgcgtcacctacagccaagcgttgttgtcaggatggcgttaccagactgcccatgatgcggagctgcgagcagcgggccgcccgggtacaacagccggattgtcgggagcccttcctgtcatgttgccaatttgcggaatctcttagaaagaagtccagagacaagggtcaggcgggtctccaacgcgcgctggagatccttcaggaagaagatttgattgatgaagatgacatcccagtgagaagttttttccctgagaactggctctggcgagtggagacggtcgatcggtttcagatcctcactttgtggctgccagactcactgacaacttgggaaatccacggactgtcactctctaagaccaaaggcctttgtgtggccacccccgttcagttgagggtttttcgcgagttccacctccaccttcgtctgcctatgagcgtgaggcggtttgagcagctcgaactgagaccagtactgtacaattaccttgacaagaatttaactgtgtccgtacacgtgagccccgttgaaggtctgtgtctcgctggcggcggcggattggcccagcaggtgctggttccagccggatctgcccggcctgtggcgttcagcgttgtgccaaccgcagcggcagccgtctctctcaaagtggtcgccagagggtcatttgagttccccgtcggcgacgccgtgtccaaggtccttcaaattgaaaaggagggcgccattcaccgagaagaacttgtgtacgaactcaaccccctggaccaccgcgggcggactttagagatccccggaaactctgaccctaatatgatcccggacggcgattttaacagctacgtacgtgtcaccgcgagtgacccattggataccctaggttccgagggggcgctcagtcctggtggcgtggcatccctactaagactgccacgtggctgtggcgagcagaccatgatctatctggctcccaccttggccgcctcccgctacttggacaagacagagcaatggagcacccttccacctgagacaaaggatcatgccgtcgatctcatccagaagggatatatgcgcatccagcagtttaggaaggcagatgggagctacgctgcctggctctcccgagactcatctacatggctcacagccttcgtcttaaaagtactgtccttagctcaagagcaagtaggtggctctcctgagaagctgcaggagacctcaaactggctgcttagccagcaacaggcagacggctctttccaagatccctgccccgtattggaccgtagcatgcaaggaggactggtagggaacgatgaaaccgtcgcattgactgccttcgtcacaatcgctctccaccatggcttggcagttttccaggatgaaggcgccgaacccctcaaacagcgcgtggaggctagcatttcgaaagctaactccttcctaggagagaaagcgagtgccggcctcctgggtgcacatgctgccgctataaccgcttacgcactgacgctcactaaggcccccgtagaccttctgggggttgcacataataatcttatggctatggcacaagaaactggagacaatctgtactggggctctgtaacaggatcccaatccaacgctgtgagcccaacccccgctcccaggaaccccagcgatcccatgccacaggcgccagctctctggatcgagacgacggcgtatgcccttctccacctcttgcttcacgagggcaaggctgagatggctgaccaggctgcagcctggctgactaggcagggtagcttccagggaggttttcggtcaacccaggacacagttattgccttagatgccctgtccgcatactggatagcctctcacaccactgaagaaagaggactgaacgttaccctgagcagtactggaagaaacggattcaagtcccacgcacttcaattgaataaccgacagatacgaggattagaagaagagcttcagttcagcctgggctccaagataaatgttaaggtggggggtaacagcaaaggcactttaaaagtactgcgaacttataacgttctcgatatgaagaacacaacttgccaggatctgcagattgaggttacagtcaaaggtcatgtggagtatacaatggaggccaacgaagattatgaggactatgagtatgacgagttacctgcgaaggacgatcctgacgctcctttgcagcccgtcacaccattgcagttgttcgaaggacgccggaaccgcagacgtcgagaggccccaaaggtggtagaagaacaagagagcagggtgcattacaccgtgtgtatttggaggaacggaaaagtgggcctatcaggaatggcaatagcagacgtgacactgctgagcgggtttcacgcacttagggcagacctcgaaaagttaacatcactgtccgaccgctacgtttcacactttgaaactgaagggccccacgtgctcctgtattttgatagtgtaccgactagtagggagtgcgtgggttttgaagccgttcaagaggtccctgttggcctggtccagcccgcaagcgccacgctgtatgactactataaccccgagagaagatgcagcgttttttatggagcaccatccaaatcacggctgctggctaccctctgctctgcggaagtttgtcagtgcgcggaaggcaagtgcccaaggcagcgccgcgcactggagcgggggctacaggacgaggatggttaccgcatgaagtttgcatgctactacccccgcgttgagtatgggtttcaggtgaaggttcttagagaagatagtagggcggcttttaggctattcgaaaccaagataacccaggtgctgcattttactaaagacgtcaaagccgctgcgaaccagatgcgcaactttctggttcgcgcctcctgccgacttaggctggaaccgggtaaggaatatttgatcatgggcctggacggggccacatacgatttggaaggacacccccagtatctcttggattccaattcatggatcgaagagatgccgtccgagagactgtgtaggtccacccgtcagcgcgccgcctgtgcgcaactaaacgacttcctccaagaatatggtacccagggatgccaggtgtag

SEQ ID NO: 171592 - DNA, 5235 bp, Artificial Sequence
  derived and/or modified sequence
atgcggctgctgtggggcctgatctgggccagcagcttcttcaccctgagtctccagaaaccccgactgctcttgttttcacctagtgtcgtgcatctcggtgttccccttagcgtcggtgtgcagctccaggacgtgccgcgcggtcaggttgtgaaggggtccgtcttcttacggaacccctctcgcaacaatgtgccatgttctcccaaagtcgacttcaccctcagttccgagagggactttgcgctgttatcgctccaagtccctttgaaagacgctaagagctgcggtctgcaccaattgctgcgtggaccagaggtgcagctggttgcccactctccgtggttaaaggattcgctttccaggactacaaacatacaggggatcaatctccttttctcctcaagaagaggtcacctttttctgcagactgatcagcctatttacaaccccgggcagcgcgtgcgctatagggtcttcgcgttagaccaaaaaatgcggccaagtacggacaccatcaccgtgatggtagagaattcacatgggctgcgggttcgcaagaaggaggtatatatgccaagttccatatttcaggatgactttgtcattcccgacatctccgagccaggaacatggaagatctcagcaaggttctcggacggactggaaagtaacagctccactcagtttgaagtgaagaagtacgttctacccaacttcgaggtaaagatcaccccgggtaagccttacatcctgaccgtgcccgggcatctggatgaaatgcaattggacattcaggcgcggtatatctacggcaagcccgtgcagggcgttgcgtacgtaaggtttgggctgttggatgaggacggcaagaaaacattctttcgcggcctcgagtctcagactaaactggtgaacgggcagagtcatatttccctttccaaggctgagtttcaggacgctctcgagaaactgaacatgggcatcaccgatctccagggcctgagattgtatgtcgccgccgcaattatcgaatcgcctgggggcgaaatggaggaggctgagctcacatcctggtactttgtgagctcccctttctcccttgatctgtctaagaccaagaggcacttggtgccaggcgcccctttcttgctacaggcattggttagggagatgtcaggttctcctgcatcaggcatccctgtcaaggtgtctgccacggtgtcatcaccaggaagcgtgccggaagtgcaggacatccaacagaacactgatgggtccgggcaagtgtccatccctattatcatccctcagaccatctccgaactgcagctgagcgtgagtgcaggtagcccccatcccgcaatcgcacggcttaccgtagccgcacccccaagtgggggcccaggattccttagcatcgagcgcccagatagcagacctccccgtgttggtgacaccctcaacctcaatctgagggctgtcggctcaggtgccaccttctctcactactactatatgatactgtctagaggccagattgttttcatgaaccgggaaccaaaaaggactctaacatctgtcagcgttttcgtggatcaccacctcgctccgtcgttttatttcgtggctttttattaccacggcgaccacccggttgctaacagtttgagggtggatgttcaggctggtgcttgcgagggcaagttggaactcagcgtcgacggtgctaaacaatatagaaatggcgagtctgtcaagcttcacctggagactgactcgttggccctggtggctttgggcgcattggataccgccctgtacgcggctggatccaagtctcataaacccttgaatatgggtaaggtgtttgaggctatgaacagctacgatctggggtgtggccccggcggtggagacagtgccctccaggtgttccaagccgctggcctggccttcagtgatggagatcagtggactctctcgcgcaagcgcctttcctgtcctaaggagaagaccacacgcaaaaaacgaaacgtcaactttcaaaaggccatcaatgagaagttaggtcaatatgcctcgccaactgcaaagaggtgctgtcaggatggggtgactcgcctgcctatgatgagaagttgcgagcagagagcagctcgggtccagcaaccagactgcagagagcccttcctgtcatgttgtcagtttgctgagtccctgcggaagaaatccagagacaaggggcaggctggactgcagcgcgctctggagatcctccaggaggaggaccttatagatgaggacgacatccctgtgcggagtttcttcccagagaactggctctggcgggtggagaccgttgaccgttttcagatcctgacgttgtggctcccggattccctgaccacctgggagatccacgggctctcattgtccaagactaaagggctgtgcgtggcaacgccagtacagctaagagtttttcgggaatttcacctgcatctgcggttgcctatgtctgtccgccgctttgagcagttggaacttcgtcctgtcctttataactatcttgataagaaccttacagtgtctgtccacgtctctccagtagagggtctgtgtttggctggaggcggtggactggctcagcaggtactggtgcctgcgggctcagcgcgaccagtggccttctctgtggtcccaacagccgccgctgctgttagcttgaaagtggttgcaagaggatcatttgagttcccggtaggtgatgctgtgtccaaagtgctgcaaattgagaaggagggagctattcatcgggaggagctggtgtacgagctaaatcccttggatcaccgcggaagaacgctggagatccctggtaattctgatcccaatatgattcccgatggggacttcaatagctatgtgagggtaacagcatccgatcccctggacacactggggtccgagggcgctctctccccgggaggggttgcgtcgctcctgcggcttccccgggggtgtggcgagcagaccatgatttatttggcccccactctcgccgcatcaaggtatttggataagaccgaacagtggagcactctacctcctgagacaaaagaccatgccgtcgatctcattcagaaagggtacatgaggatccagcagtttagaaaggctgatggatcctacgctgcatggctgtccagagattcttccacttggttaactgcgttcgttttgaaagtgcttagtctcgctcaggaacaagttggcggatctccggagaagttacaggaaacatcaaattggctgctgagccagcagcaggcagacggaagttttcaggatccatgtcccgtgctcgataggagcatgcagggagggctggtagggaatgacgagacagtggctcttacagcatttgtcactattgcccttcatcacggactcgctgtgtttcaagatgagggagcagaacctttgaaacagcgagtggaagccagcatttccaaggccaacagcttcctgggcgagaaggcaagcgctggattgttgggtgcccacgcagccgccataaccgcttatgccctcacactcacaaaagcccccgtcgacctgttgggcgtggctcacaataatttgatggccatggcccaggagaccggtgacaacctctactggggctccgtgacaggaagtcagagcaatgcagtgagcccaacaccagctccgaggaatcccagcgaccctatgcctcaggcaccagccctatggattgagacaacagcttatgctctgctccacctcttgcttcacgagggaaaagctgaaatggctgaccaggctagcgcatggctcacacgccagggctcattccagggaggcttccgcagcactcaggacactgttatagccctggacgctctgtcagcctattggattgcctctcatacaaccgaagaacgggggcttaacgtcactctgtcgtccaccggcagaaacggctttaagagtcatgctctccagctaaacaatcgccagattcgcgggctggaggaggagcttcagttctccctaggatccaagatcaatgttaaagtgggcggtaacagcaagggcactctgaaggtgttgcgcacgtataatgtgctggatatgaaaaacactacttgtcaggacctgcagatcgaagtgaccgttaaaggacatgtggagtataccatggaggctaatgaggactacgaggactatgagtatgatgaactccccgccaaggatgacccagatgcacctctgcagcccgtgactcccctccagctgttcgaaggtagaaggaatagacgaaggcgcgaggcccctaaggttgtagaggaacaggagagcagagttcactacaccgtttgtatctggcgtaacggaaaggtgggcctgtcgggtatggcaatcgccgacgtcactctgctcagcggttttcacgcgttaagagccgatttagagaaactcacttccctctcggacagatatgtgagtcacttcgagacagaaggtccgcatgtgctgttgtatttcgactctgtgccaacttcacgagagtgcgtgggattcgaagcagtccaagaggtgccagttggcctggtgcagcctgccagcgcaaccctctatgattactataaccctgagaggcgatgttctgttttttacggggctccttctaagagtagattgttagcgaccttgtgttctgccgaggtttgtcagtgcgcagaaggcaagtgtccccggcaacggcgcgcccttgaacgtgggctgcaagacgaggatggataccgcatgaaattcgcgtgctactatcccagggtcgagtacggctttcaggtcaaggtgctccgggaagattctagagctgctttccggctttttgaaaccaagattacccaggtgcttcactttactaaggatgtgaaagccgcagccaatcagatgcgcaactttctagtgagggcctcctgccggctgaggctcgagccagggaaggagtatctgatcatgggtttggatggcgccacctatgatctggaagggcacccccagtacctgctcgactccaactcctggattgaggagatgccaagcgagaggttgtgtcggagcacaaggcagcgagctgcttgtgcgcagttgaatgatttcttgcaggaatacggcactcagggatgccaggtttag

SEQ ID NO: 171593 - DNA, 5234 bp, Artificial Sequence
  derived and/or modified sequence
atgaggctgctctggggtttaatatgggcatccagcttcttcacgctgagcctccagaagcctaggctcctactgttttctccttctgtggtgcacctcggggtgccactttcagtgggagtccagctgcaggacgtaccaaggggccaggtagtgaaaggctctgtttttttaaggaacccatcacgtaataatgtgccttgctcgcccaaggtggacttcacattatccagcgaaagagattttgcgctgctgtcattgcaagtaccactgaaggatgccaagtcctgtgggctgcatcagctgctaagagggccagaggtgcaactcgttgctcatagtccgtggctgaaggactctttgtctcgaactacaaacattcagggcatcaacctgctgttctcctcacggaggggccaccttttcctgcaaactgaccagccaatctacaaccctggacagcgggtcagataccgcgtgtttgctcttgaccagaagatgcgcccttcgaccgacacgatcactgtcatggtggaaaactcacacggactcagggtaagaaagaaggaagtgtacatgccatccagtatcttccaggacgattttgtcataccagacatctcagaacccggaacatggaagatctctgcacgcttcagtgatgggctggagtctaactccagtacgcaatttgaggtgaagaagtatgtgctgcctaacttcgaggttaagataactcccggaaagccctatatactcaccgtgccgggacacctggacgagatgcagctggacattcaagccagatatatctatggcaagccggttcagggagttgcctacgtaaggttcggtttactggatgaggatggaaagaaaactttctttcgtgggctggagtctcagactaagcttgtcaacggacagagtcacatctcgctctccaaggcagaattccaggatgccttggagaagctgaatatgggcataaccgacctccagggtctcaggctgtatgtggctgctgccataatcgagtaccccggtggagaaatggaggaggccgagctaacaagttggtatttcgtttcctcacccttcagcctcgatctgtccaagaccaaacgccacttggtgccaggggcacctttcctactgcaggcccttgtcagagagatgtcaggctcacccgcttcaggcatacccgtgaaggtgtccgcaactgtgagctctcccggaagcgtccctgaagtgcaggacattcagcagaacacggacggatctggtcaagtttccatacccataattattcctcaaacaatttcagagctgcagctctcagtgtcagccggttcaccccaccctgcgatcgcgaggctgacagtggccgctcccccatccggaggccctgggttcctgagtatcgaatggccagatagtaggccgcctagggtgggtgacaccctcaacctgaatttgcgcgctgtcggaagtggggcaactttctctcactattactacatgatcttatctagaggccagatcgtgttcatgaacagagaacctaaaagaaccctgacctccgtaagcgtgtttgtcgatcaccatttggctccctccttctattttgtagccttctactatcatggggaccacccagtggctaatagcctgcgtgtcgacgtgcaggctggagcttgcgagggtaaactggaactgagcgtggatggagccaaacagtaccgaaatggagaatccgttaagttacacttggagactgacagcctcgcattggttgcccttggagcgctcgatactgctctctatgcagccggtagcaagtctcacaagcctctgaacatgggaaaggtgtttgaggctatgaactcatacgatcttggctgtggaccgggaggtggcgactctgcccttcaagtgtttcaggccgcagggttagcttttagcgacggagaccagtggaccctgtcccgcaagcgcttaagctgccccaaagaaaagaccacccgtaagaaaagaaacgtgaactttcaaaaagccatcaacgagaaactgggccagtatgcatctcccacagcaaagagatgttgccaagacggagttacacgtctgcccatgatgcgctcgtgcgaacaacgagccgcaagagttcagcaacccgactgccgagaaccatttctctcttgctgccagttcgcagagtccctgaggaaaaagagccgggataaaggccaggctgggctgcagcgcgctctcgagatcttacaggaagaagacttgattgacgaggacgacattcctgtccggagtttcttcccagaaaattggctctggcgtgtcgaaacagttgacagatttcagatcctgactctgtggctgcccgactcattgaccacctgggagatacatggcctgtccttgtctaaaactaagggtctctgtgtcgccaccccagtccagctcagagtgtttcgcgaattccatctacacctgcgactgcccatgagtgtgcggagattcgagcagttagaactcagacctgtactttataattacctggacaagaacctcacagtgtcagttcacgtgtctcctgtggaaggattatgtctcgcgggtgggggagggttggctcagcaggttctcgtccctgccggttctgcgcgtcccgtggctttctctgtcgtgccaactgccgctgccgctgtgagcttgaaggtggtcgcaaggggatcttttgagttcccagtaggcgatgccgtgtccaaagtgctacagatcgaaaaagaaggcgctattcacagagaagagttagtctacgagcttaatcccttggaccatcggggtcgtacattggagatcccgggtaacagcgaccctaatatgatcccagacggagacttcaactcgtatgtacgcgttactgcttccgacccactggacacgctcggctcagagggggctctcagtcccggaggggtggcttccctgctgcggctccccaggggatgtggtgaacagacgatgatttacttagctccgaccttagccgcttccaggtacttggacaaaacagagcaatggtctacactgccacctgagaccaaggaccacgcagtcgatctgattcagaagggttacatgcgtatccaacagttccggaaggctgacggcagttatgccgcatggctgtcacgggactcatctacatggctgacagcctttgtattgaaggttctgtctctggcccaggaacaagttgggggttcccctgaaaaactccaggagacaagcaattggctcctaagccagcagcaagccgacggctctttccaggatccatgtcccgtgctggacagaagtatgcagggcggtctggtgggcaacgacgagactgttgcactcacagctttcgttaccattgccctgcaccacgggttagctgtgttccaggatgagggggcagaaccgttgaaacagcgcgtcgaagcctccatctccaaggctaactcgtttctgggcgagaaagcctcagctggcctgctgggggctcatgcggcagccattaccgcatacgcccttactttaaccaaggcgccagtggacttgttaggcgtggcccacaacaatttaatggctatggctcaggagactggagacaatctatactggggttccgtgacagggagtcagagcaatgcggtgagcccaacgcccgctcctagaaatccatcagaccccatgccccaggccccagctctgtggatagagaccacagcttatgccctgttgcacctgctgctgcacgaaggaaaagccgagatggccgaccaggcggctgcttggcttaccaggcaggggtctttccagggtggttttcgctctacacaggacactgtgatcgcgctagacgccctgagcgcttattggatcgcctcccacacaactgaggaaaggggcctcaacgtcaccctgtcctcaactgggagaaacggctttaaatctcatgccctgcaacttaacaaccggcagatccggggactggaggaggagctgcagttttcactgggatcaaaaatcaatgtcaaagtgggagggaactctaaggggacattgaaagtgctgcgcacatataatgttctggatatgaaaaatactacttgtcaggacttacagattgaggtgactgtcaagggacacgttgagtataccatggaggccaacgaagattatgaggactacgagtatgacgagctgccagctaaagacgaccccgatgcgccacttcagcccgtcacccctcttcagctatttgagggtaggcggaacagaagacgccgagaagcacccaaggttgtggaggagcaggagtcaagggtgcattacactgtatgtatttggcgcaatggaaaagtgggcctctcaggcatggccattgccgatgtgaccctgctctcagggtttcatgcgcttagagctgacctcgagaaacttacctccctgagcgatcgctacgtgagccattttgaaacggagggtcctcacgtcttgctctactttgactcagtgcctacgagtagagaatgtgttgggttcgaggccgtacaggaggtgcccgtgggcttggtccagcccgcatccgctactctttatgactattataaccccgaaaggcgatgctctgtattttatggagcacctagtaagtcacgcttgctggctaccctctgcagcgccgaggtgtgtcaatgtgctgaaggtaaatgccctcggcaacggagagccctcgagaggggcctgcaggatgaagacgggtacaggatgaaatttgcctgttactaccccagagttgaatacggattccaggttaaggtgctgcgagaggatagtcgggcagccttcaggctgttcgaaacaaaaatcactcaagtgctccacttcactaaagatgtgaaagcagcagccaaccagatgaggaatttcttggttcgtgcaagctgtcggcttcgcctggagcccggaaaagagtacttaataatggggctcgatggagccacctacgacctagaggggcacccgcagtatttgctggatagcaacagctggatagaggaaatgccctccgaacgcttgtgccgcagcacacgccagagggctgcttgcgctcagctcaacgacttcctgcaggagtacggcacacaggggtgtcaagttta

SEQ ID NO: 171594 - DNA, 5234 bp, Artificial Sequence
  derived and/or modified sequence
atgaggctactgtggggattaatctgggccagttcttttttcactctaagcctgcaaaagccacgcctcctgctgttctctccctccgtggtacatctaggagtgccactgtcagtgggcgtacagctgcaggacgtgccgagagggcaggtcgtgaaggggtctgttttcctgcggaatccctcaaggaacaatgtcccgtgctcgcctaaggtggatttcacgctctccagcgagagggattttgcactgctgtccttacaggtgccccttaaagacgctaaaagctgcggcctgcatcaattgctacgcggtcccgaagtgcaactggttgcccacagcccctggcttaaggattctttgtctcgcacgacaaatatccaggggattaacctgttgtttagttcgcgcagaggtcatctcttcttacagactgaccagcctatatacaatcctggccagcgagtgaggtatagggtcttcgcattggaccagaagatgagaccaagcacggacaccatcactgttatggtggaaaattcacacgggttgcgagtgcgaaagaaggaagtttatatgccgagtagtatcttccaagatgactttgtgatccccgacatttctgagcctgggacttggaagatctctgctaggttcagcgacggactggaatccaattcaagcacacaattcgaggtgaagaagtatgtgctgccaaatttcgaggtgaaaatcacacctggaaagccatacattctgacagtgcccggtcatctcgacgagatgcaactggacatccaggccaggtatatttatgggaagccagtccaaggcgtggcctatgttcggtttggcctgctcgatgaagacggcaagaagacattctttagagggcttgagagtcagactaaactggtgaatggacagtcacatattagcctaagtaaggccgagtttcaggacgcactggagaaattaaacatgggaattaccgatttgcaggggctcaggctctacgtcgccgctgccataattgagagccctggaggcgagatggaagaggccgaactcacatcatggtacttcgtgtcttctccgttttctcttgaccttagcaaaactaagcggcacctggtgcccggtgctccctttcttttgcaggcacttgtcagggaaatgtccggctcgcctgcttcaggcatccccgtgaaggtgagtgccaccgtctctagcccaggcagtgttcccgaggtgcaagatatacagcagaatactgacgggagcggccaagttagcatcccaataatcatccctcagaccatctcagagctccagttaagtgtctccgctggctccccccaccccgctattgccaggctaacagtagcagctccccctagcggaggcccagggtttctttctatcgagcggccagacagcagacctccacgagtcggggatacactgaatctcaacctgagggccgtaggttctggagcgacgttcagccattattattacatgattctgtctcggggacaaatagtgtttatgaaccgggagccaaaaagaaccctgacgtccgtgagtgtgtttgttgatcaccacctggccccaagcttctatttcgtcgcattctattatcacggagatcaccctgtagcgaactctctccgcgttgatgtccaggccggagcttgcgagggcaaattggagctgtcggtcgacggcgctaaacagtaccgcaacggcgaatcagtgaagctgcatctggagacagactctctcgctctcgtggcactgggcgcattggacaccgccctatacgcagctggaagcaagtctcataaaccacttaacatgggaaaggtcttcgaagctatgaatagctacgatttgggatgcggacccggaggcggagactccgcccttcaagtgtttcaggctgccggattagccttctcagatggcgaccagtggaccctctcaaggaaacggctgtcctgtccaaaagagaaaacaacaaggaagaaacggaacgttaactttcagaaagctatcaacgagaagctggggcagtatgcaagccccactgcaaaacgatgttgccaggacggtgtcacaagactgcctatgatgcggtcctgcgaacagagagctgccagggtccaacaacctgactgcagggagcccttcctgtcttgttgccagttcgccgaaagtctccgcaagaaatctcgagacaaggggcaggcaggtcttcaaagagctcttgaaatcctgcaggaagaagacctgatagatgaggacgacatccctgtgcgtagtttttttcccgagaattggctctggagggttgagactgtggacagatttcaaatcctcactctatggctgcccgatagcctaactacatgggaaatccatgggttgagcttatcgaaaacgaaggggctctgtgtggcaacacctgttcaactccgggtcttcagggagtttcatctgcatttaaggctgccaatgagtgtgcgccgatttgaacagctcgaactcaggcccgtcttgtataattatcttgacaagaatttaacagtgagcgttcatgtgtcccctgtggaaggcctgtgtctcgctggaggcggagggctcgctcagcaagtgttggtccctgccggatctgctcgccctgtggcatttagcgtcgtgcctaccgcggcagccgctgtgtccctgaaagtggtggccaggggttctttcgaatttcccgttggtgatgccgtgagcaaggtgcttcagattgagaaggagggcgctattcacagagaggaactggtgtacgagttgaatcctttggaccaccgtggccgaactcttgagatccctggcaatagcgatccaaacatgatccctgatggcgacttcaattcatacgtgcgagttacggctagcgacccactggatacactggggagcgagggagccctgtctccaggaggtgtggcctccctgctgcgcctgcctcgaggttgcggagagcagacaatgatctatctggcccctacgctcgctgcctccaggtacctagacaagacagagcagtggagtaccctgccgcctgagaccaaggaccacgctgtggatctcattcagaaggggtacatgcgaatacagcagttccgaaaagctgacggctcttacgcagcctggttgtcaagggacagctctacctggctgaccgccttcgttcttaaggtcttgtctttggcacaggaacaggtcggtggctccccagagaaactacaggaaacctcaaactggcttctttcccagcaacaggcagatggatcttttcaggatccgtgtcctgtgttagacaggtctatgcagggcggattggtggggaacgatgaaactgtggccctgactgcgtttgttactattgccctccaccacggactcgcggtgtttcaggatgaaggtgcagagcccctgaagcaacgggtggaggcctctatttccaaggcctcctccttcctcggggaaaaggcctccgcgggacttttgggcgcacacgcggcagcgataaccgcgtacgctctgaccctgaccaaggcgccagtagacctgctgggcgtcgcccataataatcttatggcgatggcccaggagactggcgacaatctgtactggggaagcgtaacaggctcccagagcaacgcagtcagtcctacacctgctccgaggaacccgtcggatcctatgccacaagcaccagctttgtggatcgaaacaactgcatatgccctgctgcacctgctgttgcacgagggaaaggccgagatggctgaccaggctgcagcctggcttaccagacagggatcctttcagggaggcttcaggagtacgcaggataccgtcatagccctggatgccttatctgcctactggatagcctcacacacaaccgaggagagaggcttaaacgttactttgtcttcaacgggaagaaacggattcaaaagccacgctctgcagctgaacaatcggcagattcggggactggaggaagagctgcagttcagtctggggtctaagatcaacgtcaaagtgggcggaaactccaaagggaccctgaaagttttgcgaacctacaacgtattggatatgaagaataccacatgccaggaccttcagatcgaagtgacggtgaaggggcatgtagaatacactatggaggctaacgaagattatgaggactacgaatatgatgaacttcccgcaaaggatgatcccgacgcccctttgcagccagtgaccccacttcagctgttcgagggacggcgaaaccggcgacggcgtgaggcgccaaaagtagttgaggaacaagaatcccgtgtgcactacaccgtttgcatctggaggaatggaaaagtcgggttaagtggaatggccatcgccgacgtgacccttttgagcggattccatgcactacgggctgatctggagaaattaactagcttatccgacaggtacgtgtctcacttcgagactgagggtcctcatgttttgctctattttgattccgtgcctactagtagggaatgtgtgggctttgaagcagttcaggaagttcccgtcgggctggtacaacccgcatcagctacgctgtatgactactataatcccgaacgtcggtgctcggttttttatggcgctccttcaaagagtcggttgctggcaaccctttgctctgcggaggtatgccaatgcgctgaaggtaaatgtcctagacagcgacgagccctcgagagaggtctacaggacgaggacggatacaggatgaagttcgcttgctattatcctcgagtggagtacggctttcaggtaaaggtgctgagggaggactcccgggcagcatttcgactctttgagaccaaaatcacccaggtgttgcactttacgaaggacgtcaaggctgctgccaaccagatgcgtaactttctcgtccgggcttcatgccgtctccggttagagccaggtaaggaatatctcattatggggttggatggcgcaacatatgacctcgagggccatcctcagtacctgctggacagtaattcatggatcgaagaaatgccatctgaacggctgtgtcgctcaactcgacagagggccgcatgcgctcaactaaatgactttctgcaggaatacggaacgcaaggatgtcaggtata

SEQ ID NO: 171595 - DNA, 5234 bp, Artificial Sequence
  derived and/or modified sequence
atgcgcttgctgtggggtctgatatgggcgagttcattcttcactctatcgctgcaaaagccacgtctgctgctcttctccccctcggtggtccaccttggagttcctctgtccgtcggggtacaactccaggacgtcccgaggggacaggtcgttaagggaagcgtttttctgcggaacccatccaggaataacgtaccttgctcccctaaagtggacttcactctgtcttccgaaagagatttcgccctgttgagcctccaggtccccctaaaagacgcgaagtcttgcggtctacatcagctgctgcggggacctgaagtacagttggtcgcacactccccctggcttaaggattcactgagtaggaccacaaacatccagggcataaacctcctgttttcatcacgtagaggacaccttttcctgcaaacagatcagcccatctacaacccaggacagagggtccgctatagggtctttgccttagaccaaaagatgcgaccaagtacagataccatcaccgtcatggttgagaattctcacgggttaagagtacggaaaaaagaagtctatatgccttcatccatctttcaagacgatttcgtcattcccgatattagtgaacccggtacttggaaaatttccgcccgattcagcgacggacttgagagtaactcctctacgcagttcgaagtgaaaaagtatgtgttgccaaattttgaagtcaaaataacccctggtaagccgtacatattaacagtgcctggccacttagacgagatgcagctggacatccaggcaagatacatctatggcaagcctgtgcagggcgtcgcttacgtgcgattcggattacttgacgaggacggaaagaaaaccttttttcgaggtctggagagtcaaactaagctcgtgaatggccaaagccacataagccttagtaaggctgaatttcaggacgctctggagaaactgaatatggggatcactgatctccagggcctgcgtctttacgttgccgctgcgatcattgaataccccggaggggagatggaggaggctgaacttacttcatggtatttcgtgtcttcccccttttctctcgacttaagcaagaccaaacgacatctcgtcccaggcgctccctttctcctgcaggcactcgttcgcgaaatgtcaggtagtcctgccagtggcatcccggtcaaagtctctgctactgtgagcagccccggaagtgtccctgaagtccaggatatccagcagaacacagatggaagcggccaggtgagtattcccatcatcatcccacaaaccattagtgaactgcagcttagcgtaagcgctggttccccacaccccgcaattgccaggctgaccgtcgcggcaccaccatccggcggtcctgggtttttatcaattgaaagacccgattcaagaccccctagggttggggacaccctcaatctgaatctgcgggcagtggggtccggtgcgacattttcgcactactattacatgatattgagccgtgggcagatcgtctttatgaatagagaaccaaagagaacgctgactagtgtttctgttttcgtagatcaccacctcgccccttcattttacttcgtggcattctactaccacggcgaccacccagtggcaaacagtcttcgagtagacgtgcaggcaggcgcatgcgagggcaagcttgaactctccgtggacggtgctaagcagtatcgcaacggcgaatctgtcaaactgcatctcgagactgacagtctcgcactggttgccttgggggcactagacaccgctctgtacgctgctggctccaagagccacaagcccctgaatatgggcaaagtgtttgaggcaatgaacagctacgacctaggttgcggacccggagggggagattcggcactccaggtcttccaggccgctggcctagcgtttagcgatggcgatcagtggacactctcccgcaagcgcctgtcttgcccaaaagagaagacaacgaggaaaaagagaaacgtgaacttccagaaggctatcaatgagaaactcgggcagtacgccagcccgaccgctaagcggtgttgtcaggacggagtcaccaggcttcctatgatgaggtcttgtgagcagagagcagccagagtccagcagcctgattgccgagagccatttctcagctgctgccagttcgccgagtctctgagaaagaaatccagggataaaggtcaggctgggttgcagcgggctctcgagattcttcaggaagaggacttgatagacgaagacgacattcctgtccggagcttttttccggaaaactggctttggcgcgttgaaactgtcgatagatttcagatactgaccctctggctgcccgactccctaaccacctgggagatccacgggttatccctctctaagacaaagggactatgcgtcgctacaccagtccaactgcgggtgtttcgcgagttccacctgcacctgcggctcccgatgtcagttcgcaggtttgaacagctggagttgcggcctgtgctgtacaattacctggacaagaatctgaccgtgtctgtgcacgtgtcacccgtagaggggctgtgtctggccggaggcggtggtttggcgcaacaagttctcgtgcctgccggttcagcgcgaccggtggccttctccgtagtccccacagcagccgctgctgtgtcgctaaaagttgttgcgcgtgggtcttttgagtttccggtgggggatgctgtaagcaaggtgctccaaattgagaaggagggcgctattcacagggaagagttggtgtatgaattgaatccgctcgatcaccggggaagaactttggagatacctgggaatagtgaccctaatatgattcccgatggagactttaatagttacgtacgagtgaccgctagcgacccgctggacactctgggcagcgagggagctctcagtcctggtggcgtcgcttcgttgcttaggttgccgcgtggttgtggcgaacagacaatgatttacctggctccaactctggcagcaagtaggtacctggataagacggaacagtggtctactctgcctcctgagaccaaagaccacgctgtggacctgattcaaaaagggtacatgcgcatccagcagttccggaaggctgatggttcttatgccgcatggttgtctagggactcatcaacgtggcttactgcattcgtcctaaaggttctttctcttgcccaagaacaagtcggcggatcccctgagaagctacaggagactagcaattggctgctgagtcagcaacaggccgatggatctttccaggacccctgccctgttttagatcgctccatgcagggtggactggtagggaatgacgagacggtcgcattgactgcattcgttacaattgcgctgcaccatggactcgccgttttccaggatgagggtgcggagccactgaaacagcgagtcgaggcctccatttcaaaagccaactcgtttctgggcgaaaaggcgtctgcaggacttctgggcgctcacgctgcggctatcaccgcctatgctctgactttgacaaaagcacccgtggacctgctcggggttgcacacaacaatttaatggccatggcgcaagaaactggggacaatctatactggggtagtgtcaccggatcacagagtaacgccgtttctcccacacctgcccctaggaatccctccgacccaatgccacaggctcctgcactgtggatagaaaccacagcgtacgctctcctccatctcctgctccatgagggcaaagccgagatggctgaccaggcggcagcctggctcactcgtcaaggttccttccagggcggtttccgttcaacacaggatacagtaattgccttggatgccctgtcggcgtactggattgctagccatacaaccgaagagcgtggccttaatgtgaccttatcctcgactggcagaaatgggttcaagagccacgctctgcagttgaacaatcgacagatccgcggtctggaagaggagttgcagttttctctgggtagcaagatcaatgtgaaggtggggggtaacagcaaaggtacactgaaagttttacgaacttataacgtcctggacatgaaaaacaccacctgccaggaccttcagatcgaggttacagtaaaagggcatgtcgaatatactatggaggctaacgaagattacgaagactatgagtatgatgagctccccgctaaggatgatcctgacgcccctctccagccagtcactcccttacagctctttgaggggcgaaggaatagaagacgaagagaggcacccaaagtcgttgaagagcaggagtcgagggtgcattatactgtgtgcatctggcggaacggcaaagttggattgtccggcatggctatcgctgacgtcacccttctgagcgggtttcatgccttacgcgctgatctcgaaaagctgacctccctgtccgaccgttacgtgagtcacttcgaaactgaaggtccccatgtgttattatacttcgacagtgtaccaaccagccgagaatgtgtagggtttgaagcggtccaggaggtgccagtggggcttgtgcaaccagcttcggccaccctgtacgattattataacccagaacggagatgctctgtgttctacggcgctccctcaaaatctcgacttcttgctactctgtgcagtgccgaggtttgtcagtgtgctgagggaaagtgccccagacagaggcgagccctcgagaggggtctccaagatgaggacggatatcggatgaaatttgcctgttactatccaagggtggaatatgggttccaggtgaaagtcctgagagaggactctagagccgctttccgcctgttcgaaactaagattacccaggtgttgcatttcactaaggacgtgaaagccgcagcaaatcagatgcgcaatttcctggtcagggcctcttgtcgcctcagactggaaccaggcaaggagtaccttatcatgggactggacggggcaacctacgatctggaaggccatccccagtacctactggactccaacagttggattgaggagatgcccagcgagaggctctgtaggtccaccagacaacgggcagcatgtgctcagctgaacgatttcctgcaggagtacggtacccaggggtgccaggttta

SEQ ID NO: 171596 - DNA, 5235 bp, Artificial Sequence
  derived and/or modified sequence
atgcgacttctgtgggggctcatttgggcaagctctttctttaccttatccctgcaaaagccaagactgctcctgttcagcccctcagtggtccacttaggggtgcctctttcagtgggcgtacagctgcaggatgtcccacgaggccaagtggtgaagggttcagtctttctgaggaacccatcccgcaacaacgtgccctgtagccctaaagtggactttaccttgtcgagcgaaagagattttgccctcctgagcctgcaagtgcctctgaaagatgcaaaatcgtgtggactgcatcaactgctccgcggacccgaagtccagttggtggcccattcaccctggctgaaggactcgctttcgcggacaacaaatatccagggcattaacctgcttttctcttcccggaggggccacctgtttctccagactgatcagcccatctacaatcctggccaacgcgttcggtacagagtgttcgccctcgaccagaaaatgcgcccttctacagacactatcacagtcatggtggaaaactcgcatgggctgcgcgtcagaaaaaaagaggtttacatgcccagttccatctttcaggatgacttcgtgattccagatatctcagagccgggaacttggaagatttccgcacgcttctcagatgggctcgaatcaaatagcagtacacagttcgaggtgaagaagtacgtccttccaaattttgaggtaaaaattaccccaggaaaaccttatatattgacggttccaggacatctggatgagatgcaacttgacatccaagcccgatatatctacgggaagcctgtgcaaggagtagcttacgtgagattcggccttctggatgaggatggcaagaagaccttttttcgaggactggaatcacagactaagctggtgaatggccaaagtcatatttccctttcaaaagccgagttccaggacgctctggagaagctgaatatgggcatcaccgacctccagggattgagactttacgtcgctgccgctatcattgagtctcccggtggtgagatggaagaggcagaacttacgtcttggtatttcgtaagcagccctttctccctggacctgtccaaaaccaaaaggcacctggtgccaggtgcacctttcctccttcaggctcttgtgagggagatgagtggttcccccgctagcgggatacctgtcaaagttagtgccacagtgagctctcctggttctgtgcccgaggtgcaagatatccagcagaacacagatggatctggccaggtaagcattccaatcataatacctcagaccattagcgaattacaactatcggtgagtgccggatcaccacaccccgctatcgccaggctgacagtcgctgcccctccttcggggggacccggattcctgagcatcgaacgtcctgactcaagacctcctcgtgtgggggataccctcaacctgaatctccgtgcggttggctcgggagccacatttagtcactactactatatgattttgtctaggggtcagattgttttcatgaacagagagcccaagagaactctcacgtccgtcagtgtatttgttgaccaccaccttgcccctagcttctatttcgtcgcattttattatcatggagaccatccagtcgcgaactctttacgcgttgatgtgcaagcaggcgcatgtgagggcaagttagagctcagcgtcgacggggctaaacagtaccgaaacggagagtcagtgaagcttcaccttgagactgatagtttagcgcttgtggcgctcggagctctcgacaccgccctctacgctgcaggaagcaagtcgcacaaaccactcaacatgggcaaagtctttgaggcgatgaacagctacgacctgggatgtggacccggaggcggagacagcgcgctgcaagtgttccaagccgcaggattggccttctcggacggcgaccagtggacactcagcaggaagcggctcagctgccctaaagagaagactacaagaaaaaaacggaatgtgaacttccagaaggcgataaatgagaagcttggtcagtatgccagccccacagctaaacggtgctgccaggacggtgttacacggctgcctatgatgcggagttgcgagcagagggccgctagggttcagcaacctgattgccgggagccctttctgtcttgctgccagttcgccgaatctctcagaaaaaaatccagagataagggccaggcaggattacagagggcgctcgagatactccaggaagaggacctcatcgatgaggacgacatcccagtgcgctctttttttcccgagaactggctttggagagtggagaccgttgaccggtttcaaattttaaccctgtggctgccagacagcctcactacatgggaaatccacggactgtccctgagtaagactaaaggtctgtgcgtggctacgccagtgcagcttcgggtcttccgtgagttccacctccaccttaggcttccgatgagcgtgcggagattcgagcagcttgagttgaggccagtcctgtacaactatctggacaaaaatctcactgtgagtgtacatgttagtcccgtggagggactgtgtctggccggtgggggagggttagcacaacaggtgcttgtgccagccggatcagcacggcctgttgcattctccgtcgtgcccacagcagcggcagccgtctctctcaaagtcgttgcaaggggatcattcgagtttccggtaggagatgctgtgtcaaaggtgctgcagatcgaaaaagaaggggcaatccacagggaggaactggtgtacgagctgaatcctctggaccacaggggtcggacgctcgagatcccgggaaatagcgaccccaacatgattccggacggagattttaatagttacgtgcgagtgacagcttctgatccattggatacattgggcagcgagggcgcactctcacccggtggcgtggcaagccttctgagactgccacggggttgcggcgagcagacaatgatataccttgcgccaacccttgccgctagccgctacctcgataaaaccgagcagtggtctaccttgccgcctgaaaccaaagaccatgcggtggatctgatccagaaggggtatatgcgcatacagcagtttaggaaagctgatggatcctatgccgcatggctttccagggattcatctacatggcttactgcattcgttctgaaggttctgagcctggctcaggaacaggtgggtggaagcccagagaagctgcaggagacgtcaaactggctgctttcccagcagcaggccgatggcagcttccaggatccttgtcccgtgctggacagatcaatgcaaggcggtctggtcgggaacgacgagacagtcgccctcactgccttcgtgactatagcgctccatcatgggcttgcagttttccaagacgagggggctgagccactaaagcaacgtgtagaagctagtatctcgaaggccaactccttcctgggggagaaagccagtgctgggctgctgggggcacatgctgcagccattacagcatatgctctcacactgaccaaggccccagtggacctactgggagtcgcccataacaacctcatggccatggcccaggaaacaggcgacaacctgtactggggaagcgtgactggtagccagtcaaacgctgtctctcccacgcctgctccaagaaatccttccgacccgatgcctcaggcccctgcgctgtggatcgagacaaccgcatatgccttgctgcacttgcttcttcatgaaggcaaagctgaaatggccgaccaggcctctgcctggctgactaggcagggcagctttcagggcggttttaggtctacccaggacaccgtgatagcactggacgccctgtcggcatactggattgcctcccacaccacagaggaaagggggctgaacgtcactttgtcctcaacagggaggaacggtttcaagtcacacgccctgcaactaaacaacaggcagatccgtgggctggaggaagagctgcagttcagtttgggttccaagattaacgtaaaggttggtggaaattctaagggcacactgaaggtactgcgcacctataacgttctggatatgaaaaacaccacctgtcaagacttacaaatcgaggtaaccgtgaaagggcacgtagagtacacaatggaggcgaatgaagactatgaggattacgaatatgacgagttgcccgctaaagatgatcccgatgcccctctccaacccgtgacaccactccagttgtttgaagggaggcgcaaccgaagacggcgtgaagcacctaaagtcgtggaagagcaggagtctcgtgtgcattacactgtgtgcatttggcgcaacggtaaagtgggactgagtggaatggcaatcgccgacgttacactcttgtccggatttcacgctctgcgcgctgacctcgaaaaactgacttccctgtcagataggtatgtctcccattttgagacagaggggccacatgtgttgttgtatttcgatagcgttccaaccagcagggagtgcgtcgggttcgaagccgtacaggaggtgcctgtggggctggtccagcccgcaagcgccacactctatgactattacaatcccgaaaggcgatgctctgtgttttacggtgctcctagcaagagccgactgcttgccactctgtgctccgcagaggtgtgtcagtgcgctgagggaaagtgtccgcgacagcggcgagccctcgagagagggcttcaggatgaggatggatacaggatgaaatttgcgtgctattacccaagagtggaatacgggttccaggtaaaggtccttagagaggattcccgcgctgcttttcggctgtttgagaccaagatcactcaggtgttgcactttacgaaagatgttaaggccgctgccaatcaaatgagaaatttcctcgtgagggcgagctgcaggctgagacttgaacctgggaaggagtatctaataatgggcttggatggagctacctatgacttggagggccatcctcagtatctgttagacagtaatagttggattgaggagatgccctcagaacgcttgtgtcggagcacaagacagcgggcagcctgcgcccagctgaacgatttcctgcaggagtacggtacacaggggtgccaagtgtac

SEQ ID NO: 171597 - DNA, 5235 bp, Artificial Sequence
  derived and/or modified sequence
atgcggctcctgtggggattgatatgggcatcaagcttcttcaccctgtcactccaaaaacccagactcctgctgttttctcccagcgtcgtgcatttgggtgtgcctcttagtgttggggtccagctgcaagatgttcctcgcggccaggtggtcaagggcagcgtctttctcaggaacccaagcagaaataatgtcccatgttcacccaaagtcgatttcactctctcctcagagcgggacttcgctcttctgtctctgcaggttccactcaaggacgcaaaatcctgcggacttcaccaattactgagagggcccgaagtccaacttgtcgctcatagtccttggctgaaggatagtcttagtaggacaactaacatccaggggataaatctgctgttttcgagtaggcgcggccacctgttcttgcagaccgatcagcccatctacaaccctggacagcgcgtaaggtaccgcgtctttgccttagaccaaaaaatgaggccatccaccgatacaataactgttatggtagagaacagtcacggcttgcgcgtgcggaagaaagaggtgtacatgccctcgtccatctttcaggacgacttcgtgatcccagacatttccgaacccgggacttggaaaatctccgcccgcttttctgatggtttggaaagtaactcatcgacacaattcgaagttaaaaaatacgtcctccctaactttgaggtgaaaattactccaggaaagccctatatactgaccgtgccgggccatttggacgagatgcagctggacattcaagccagatatatttatggcaaaccagtacaaggagtggcttatgtgcggttcgggctcctcgatgaagatggaaagaagactttttttcgaggccttgagtcccaaacaaagctggtgaatggccagagccatatctctctatccaaggcggagttccaagatgcactcgagaaactgaatatggggattacagatctgcaaggactacgcctgtacgttgctgcagccatcattgagtcacccggcggcgaaatggaagaggccgagttaacttcatggtatttcgtgagctcgcctttttctctggacctgagcaagacgaagagacacctagtcccaggtgcaccctttctccttcaggccttagtccgggagatgtctggttctccagccagcgggattcctgtaaaagtcagtgcaacagtctcttcgcctggctccgtcccagaagttcaggacatccaacagaatactgacgggagcggccaggtttcaatacctataatcatcccacagacaatctccgaacttcagctctcggttagtgccggaagtccacatcccgcaattgctcggctgacggttgcagcaccccccagcggcggaccaggattcctgtctatcgagcgaccggactctcggccacccagagtgggggatacactgaatctgaacctgcgggccgttgggtccggggccaccttttcacactactactacatgatcctttcgagagggcagatcgtgttcatgaatagggagcccaaacggaccctgacatccgtcagtgttttcgtcgatcaccacctggccccctctttctatttcgtggccttctattaccacggtgaccatcccgtcgcgaatagcctacgcgtagatgtccaagctggagcctgcgaggggaaactcgaactgtcagttgacggcgcaaaacagtaccggaacggagagtcagtgaagctgcacctcgagacagactcactggctctcgtcgcactgggggctctcgacaccgcgctttatgccgctggctctaagtctcacaaacccctgaacatgggcaaggtttttgaagccatgaacagctatgacctggggtgtggtcctggtgggggagactcagctctgcaggtcttccaagctgctggattagctttctctgatggagatcagtggacactgtctagaaaaagactgagttgccctaaggagaagaccactcggaaaaagcgcaacgtgaatttccaaaaggctatcaacgaaaaattaggacagtacgcatctccgaccgctaagagatgttgccaagacggagtaacacgcctgcccatgatgcgctcctgtgaacagcgcgcagctcgggtgcagcagcctgactgtcgcgagcccttcttaagctgctgccaattcgctgaaagcctaagaaagaaatctcgagataaaggacaggcaggcctgcagcgagccctagagatcctgcaagaggaggaccttatagacgaagatgatatcccagtgcggtccttctttccggaaaattggttatggcgggtggaaaccgtagacagattccagattctcaccctatggctccccgattccctgacaacatgggagatccatggactcagcctctcgaagaccaagggcctatgtgtagcaactcctgtacagttgcgggtctttcgcgagtttcacctgcacctgcggttacctatgtccgtaaggcggttcgagcaactggagttgagaccagtgctctataactacctagataagaacctgacagtttccgtgcacgtgagtcccgtggaggggctgtgtctggccggaggcgggggattagcacaacaggtgctggtcccagccggctcagcacgtcctgttgcattcagtgtggtgcccactgcagctgctgccgtttcattaaaggtggttgccagaggctctttcgagttccccgtcggagacgctgtgtcaaaggtcctacagatagaaaaggagggggccattcatcgcgaagaactggtttatgaacttaacccactcgatcataggggccggaccctggagatccctggcaatagcgaccccaatatgatacccgatggggacttcaactcttacgttagagttactgctagtgaccctttggataccctcggcagcgagggcgccctcagccccgggggggtggcctccctccttagactgccccggggttgcggagaacagacgatgatttacctcgcccccactttagccgcaagccgttatttggacaaaactgaacagtggtcaaccctcccgccagaaactaaagatcatgctgttgatctgattcaaaagggttatatgcggatccagcagttccgaaaggccgatggctcctacgcagcctggctttcgagggatagctctacatggctgacagccttcgttctgaaggtactgagtctagctcaagagcaggtcggaggatcccctgagaaactgcaggaaacttcaaattggcttctgagccagcaacaagctgatgggtcattccaggatccttgtccagtcctcgaccgctccatgcagggtggtttagtagggaacgatgagaccgtcgctctcaccgcctttgtcacaatcgctctgcatcacgggctcgctgtttttcaagatgaaggtgccgagccactcaaacaaagagtcgaagcctcgatttctaaagccaacagttttctgggcgaaaaggctagcgcgggcctgttgggagcccatgctgctgccataactgcctacgccctcacactgactaaagcgcccgtcgacttgcttggtgtcgcacacaacaatcttatggcaatggcacaggagactggagacaatttgtattggggttctgtgactggatcacagtctaacgccgtgtcccccacacctgccccaaggaatccatcagatccaatgccccaagctcccgctctctggatcgagacaacggcttacgccctcctgcatctcctactccacgaggggaaggcggagatggccgaccaggcttcagcctggctgacccgccagggaagctttcagggcggctttcgaagcacccaagatactgtgatcgccctggacgctctttcagcttactggatcgctagccacaccaccgaagagcgcgggttgaacgttaccctctcaagcaccggacgcaatggattcaaaagccatgcccttcaattgaataaccggcagatcagaggactggaggaggagctacagtttagcctgggttcaaagatcaatgtgaaagttggaggaaacagcaaaggtactctgaaggtgcttaggacgtacaacgtgttggacatgaagaacactacctgtcaggatcttcaaattgaagtgaccgttaaaggacacgtggagtacaccatggaggccaacgaggactacgaggactacgagtacgacgagctgcctgcaaaggatgatccggatgcaccactccagcctgtgactccgcttcaattgtttgaggggcggcggaaccggaggaggagggaggctccgaaggttgtcgaggaacaggagtcgcgggtccactacaccgtatgtatttggcggaatggtaaggtggggttatcggggatggcaattgctgacgtgaccttactttcagggttccatgccctccgcgctgatctggagaagctcacctcgctcagtgatcggtacgtcagccacttcgaaacggagggtccccatgtgttactgtacttcgattcggtcccaaccagtagagagtgtgtgggttttgaagcagtccaggaagtaccagtgggcctcgtacaacctgcaagcgctactttgtatgactactataacccagaaagacgttgctccgtgttttatggcgccccatctaaatctcggctattggccacactgtgttcagccgaggtgtgtcaatgcgccgaaggtaaatgtccgagacaaagacgcgctttagaaagaggattacaggacgaagacgggtatcgcatgaagtttgcctgttattatccccgggtggagtacggttttcaagttaaggttctaagagaggactcccgcgccgcctttcgactattcgagaccaagatcacacaggttttacatttcacaaaagacgtcaaagctgctgccaatcagatgcggaacttcctggtgagggctagctgcagactgcgtctggagcctggaaaggagtatcttattatgggcctcgatggtgcaacttacgacctagagggtcatccacaatacttgttagactcaaacagctggatcgaggagatgcctagtgagaggctgtgccgctctactcgacaaagagctgcttgcgcacagctgaacgatttcttacaagaatatggtacccaggggtgccaggtctag

SEQ ID NO: 171598 - DNA, 5235 bp, Artificial Sequence
  derived and/or modified sequence
atgcgcctgctttggggcctgatttgggcatctagtttctttacactttctctgcaaaagccccgcttattgctgttttctccttctgtcgtgcatttaggcgtccctctgagcgttggcgtgcagctccaggacgtgcctaggggtcaggtcgtgaagggaagtgtgttcttacgaaatcccagcagaaataacgtgccttgctcaccgaaagtcgattttactctctcgagcgagcgggattttgctctactctcattacaggtaccactcaaagacgcaaagagttgtgggcttcatcagctcctccgtggccctgaagtccaattagtcgcccattcaccctggctcaaggacagtcttagccggacgaccaatatacagggcataaacctgctcttctcttcgcggagaggccaccttttccttcagaccgatcagcctatttataatcctggacagagagtgaggtaccgcgtgtttgcgttagatcagaagatgaggccgagtactgatacaatcactgtgatggtagaaaactcacatggactgagagtacgtaagaaggaagtttacatgcctagcagtatctttcaggacgactttgtgatccccgatatttcagaacctgggacctggaagatctccgccagatttagtgacgggctggaatctaacagtagcacgcaattcgaggtgaaaaagtatgttctgccgaattttgaggtcaagatcaccccaggcaagccctacattttaacggttcccggccatctcgatgagatgcagttagatatccaggcacgatacatttacggaaaacctgtacagggagtggcatacgtgcgatttgggctgctggacgaggatgggaaaaagaccttctttagaggactggagagtcagacaaagcttgtgaatggtcaatcgcatatctccctttctaaagccgaatttcaagatgcactggaaaagttaaatatgggcatcaccgacttacagggtctccgactttatgttgccgccgctatcatcgaatccccaggcggggagatggaggaagccgaattgacatcgtggtatttcgtttcttcacccttcagtctcgacttgtctaaaacaaaacgtcacctcgtgcccggcgcccctttcttgttacaggccctggtccgggaaatgagtgggtcacctgctagtgggatcccagtgaaagtgtccgccaccgtgtcaagtccaggtagcgtgcccgaagtccaagacatccagcagaacacggatgggtccggacaggtaagtattccaatcatcattccacaaacaataagtgaactgcaactctccgtcagtgctggtagcccccatccagctatcgcaagattgaccgttgcagcccccccgagtggcggacccggtttcctgtctatagagcgccctgatagcaggcctccaagggtgggcgacactctgaacttaaatttgagagccgtcggatccggagccacgttttcacactactactacatgattctttccaggggccaaattgttttcatgaaccgggagcctaagcgtaccttaacttcagtcagtgtttttgtcgaccaccacttagctccttcgttttacttcgtagctttctactaccacggggaccatccagtcgcaaactcgctacgcgtggatgttcaggccggagcctgtgaaggtaaacttgaattgagtgtggacggggctaagcaataccgaaacggggaatccgtaaaactgcacttggaaactgactctttggccctagttgccctcggagcgttagacacggcactctacgcagccggtagcaaaagccataagccactgaacatgggaaaagttttcgaagcaatgaactcatatgacttaggatgcggccctggaggcggagacagtgccctgcaagtgttccaagcagccggactggcattcagcgacggagatcagtggacgctctctcgtaagagactttcttgcccaaaggagaagacgacaagaaagaaacggaacgtaaactttcagaaagctattaatgaaaagctcggccaatacgcgtcgccaaccgccaagagatgctgccaggatggtgtgacccgactgcccatgatgcgttcctgtgagcagcgagccgcacgtgtccagcagcccgactgtcgtgaacccttcttgtcttgttgtcaatttgccgagtccctgagaaagaaaagcagagataagggtcaggctggcctgcagcgcgccctcgagatactgcaagaggaggatttgattgacgaagatgatattcccgtgcgctcgttctttccggagaattggctctggcgggtggaaacggtagacaggttccagatcttaaccctttggctccccgactcactgaccacctgggagatccacggcctgtcactatctaagactaagggactctgcgtcgccactccagtgcaactgagggtctttcgtgaattccacttacatttgaggctaccaatgtcagtcagaagattcgaacagcttgagctccggcccgtactatacaattatctggacaaaaatttaacagtgtccgttcacgtcagcccagtggaaggcctgtgtctcgcaggagggggtggcttggcacagcaagtcctggtacctgctggctctgcccgaccggtagccttcagcgtagtgccaacagcagctgctgccgtgtcactcaaagtcgtagcccggggaagcttcgagtttccagttggagatgccgtctccaaagtgcttcaaatcgagaaagagggcgccatccacagagaagagcttgtgtacgaattaaaccccctggaccaccgcggaagaacacttgaaattcctggcaacagtgaccctaatatgattccagatggagacttcaattcgtacgtcagggtgaccgcttcagaccctctggacaccttgggcagtgagggagctttgtctcccgggggtgttgcaagtctactgcgactgccaaggggatgcggcgaacagacaatgatctatctcgcccctaccttagccgcctcaagatatctggataagaccgaacaatggtcaaccttgcccccagaaaccaaagatcacgccgtcgatctgatccagaaaggatacatgcgcatacagcaatttcggaaggctgacggatcctacgccgcatggctcagccgagactcttccacatggctaactgccttcgtacttaaagtccttagtttagcacaagagcaagttggcggttctcccgagaaactgcaggaaacatccaattggcttcttagccagcaacaggcggacggctcatttcaagacccctgccctgtgttagacaggtccatgcaaggtggactggttggtaacgacgagaccgtggctttgacagcttttgtaaccatcgccctccaccacgggctggcagtgttccaggatgagggcgctgagccactgaaacagcgcgtggaagcatcaatctcgaaggctaactctttcctaggtgagaaggcctctgcaggcctattgggcgctcatgctgcagcaatcactgcatatgctctgactctcacaaaagcgccagtggatctcctgggagtcgcccacaacaacctgatggctatggcacaagagaccggtgacaacctctactggggctcagtgacaggctctcaatccaacgcagtgtctccaactcccgccccccgtaacccctccgacccaatgcctcaggctcccgctctgtggatagaaacgacggcatacgcattgctgcatctcctactgcatgaaggcaaagccgaaatggccgaccaagccagtgcttggctgacgcgccagggatcatttcagggtgggttccggagcacgcaagatacagtgattgccctagatgctttatcagcctattggatcgcctctcataccaccgaggaaagagggttaaatgttactctgagttctacaggccggaatggcttcaagtctcatgcactgcaattgaacaatagacagatacggggcctagaagaagaacttcaattcagcttggggtcaaagatcaacgttaaggtgggtggtaactccaagggcacattgaaggtcttaagaacctataacgtgttagacatgaaaaataccacctgtcaggacctgcagatcgaggttactgtgaaaggacacgttgaatataccatggaggccaatgaggattatgaagactacgagtatgacgaacttccagccaaggatgaccccgacgctccccttcagcccgtgacacctttgcagctttttgaaggccggcgcaataggcgtagacgagaagcacctaaagtggtggaagaacaggagtcaagagtccattatactgtgtgtatctggagaaacggcaaggtgggcctgtccggaatggccattgccgacgtgacattgctctctgggttccacgccctgagagcagatctggagaagctcacctcgctcagtgatcggtacgtcagccacttcgaaacggagggtccccatgtgttactgtacttcgattcggtcccaaccagtagagagtgtgtgggttttgaagcagtccaggaagtaccagtgggcctcgtacaacctgcaagcgctactttgtatgactactataacccagaaagacgttgctccgtgttttatggcgccccatctaaatctcggctattggccacactgtgttcagccgaggtgtgtcaatgcgccgaaggtaaatgtccgagacaaagacgcgctttagaaagaggattacaggacgaagacgggtatcgcatgaagtttgcctgttattatccccgggtggagtacggttttcaagttaaggttctaagagaggactcccgcgccgcctttcgactattcgagaccaagatcacacaggttttacatttcacaaaagacgtcaaagctgctgccaatcagatgcggaacttcctggtgagggctagctgcagactgcgtctggagcctggaaaggagtatcttattatgggcctcgatggtgcaacttacgacctagagggtcatccacaatacttgctcgattccaacagctggattgaagaaatgccctctgagcgcctatgtaggtctaccagacagagagcagcatgcgcccagctgaatgactttctccaagaatacggtacccagggctgccaggtctag

SEQ ID NO: 171599 - DNA, 5460 bp, Artificial Sequence
  derived and/or modified sequence
agagtcaactctgccccgaggcctagcttggccagaaggtagcagacagacagacggatctaacctctcttggatcctccagccatgaggctgctctgggggctgatctgggcatccagcttcttcaccttatctctgcagaagcccaggttgctcttgttctctccttctgtggttcatctgggggtccccctatcggtgggggtgcagctccaggatgtgccccgaggacaggtagtgaaaggatcagtgttcctgagaaacccatctcgtaataatgtcccctgctccccaaaggtggacttcacccttagctcagaaagagacttcgcactcctcagtctccaggtgcccttgaaagatgcgaagagctgtggcctccatcaactcctcagaggccctgaggtccagctggtggcccattcgccatggctaaaggactctctgtccagaacgacaaacatccagggtatcaacctgctcttctcctctcgccgggggcacctctttttgcagacggaccagcccatttacaaccctggccagcgggttcggtaccgggtctttgctctggatcagaagatgcgcccgagcactgacaccatcacagtcatggtggagaactctcacggcctccgcgtgcggaagaaggaggtgtacatgccctcgtccatcttccaggatgactttgtgatcccagacatctcagagccagggacctggaagatctcagcccgattctcagatggcctggaatccaacagcagcacccagtttgaggtgaagaaatatgtccttcccaactttgaggtgaagatcacccctggaaagccctacatcctgacggtgccaggccatcttgatgaaatgcagttagacatccaggccaggtacatctatgggaagccagtgcagggggtggcatatgtgcgctttgggctcctagatgaggatggtaagaagactttctttcgggggctggagagtcagaccaagctggtgaatggacagagccacatttccctctcaaaggcagagttccaggacgccctggagaagctgaatatgggcattactgacctccaggggctgcgcctctacgttgctgcagccatcattgagtatccaggtggggagatggaggaggcagagctcacatcctggtattttgtgtcatctcccttctccttggatcttagcaagaccaagcgacaccttgtgcctggggcccccttcctgctgcaggccttggtccgtgagatgtcaggctccccagcttctggcattcctgtcaaagtttctgccacggtgtcttctcctgggtctgttcctgaagtccaggacattcagcaaaacacagacgggagcggccaagtcagcattccaataattatccctcagaccatctcagagctgcagctctcagtatctgcaggctccccacatccagcgatagccaggctcactgtggcagccccaccttcaggaggccccgggtttctgtctattgagtggccggattctcgacctcctcgtgttggggacactctgaacctgaacttgcgagccgtgggcagtggggccaccttttctcattactactacatgatcctatcccgagggcagatcgtgttcatgaatcgagagcccaagaggaccctgacctcggtctcggtgtttgtggaccatcacctggcaccctccttctactttgtggccttctactaccatggagaccacccagtggccaactccctgcgagtggatgtccaggctggggcctgcgagggcaagctggagctcagcgtggacggtgccaagcagtaccggaacggggagtccgtgaagctccacttagaaaccgactccctagccctggtggcgctgggagccttggacacagctctgtatgctgcaggcagcaagtcccacaagcccctcaacatgggcaaggtctttgaagctatgaacagctatgacctcggctgtggtcctgggggtggggacagtgcccttcaggtgttccaggcagcgggcctggccttttctgatggagaccagtggaccttatccagaaagagactaagctgtcccaaggagaagacaacccggaaaaagagaaacgtgaacttccaaaaggcgattaatgagaaattgggtcagtatgcttccccgacagccaagcgctgctgccaggatggggtgacacgtctgcccatgatgcgttcctgcgagcagcgggcagcccgcgtgcagcagccggactgccgggagcccttcctgtcctgctgccaatttgctgagagtctgcgcaagaagagcagggacaagggccaggcgggcctccaacgagccctggagatcctgcaggaggaggacctgattgatgaggatgacattcccgtgcgcagcttcttcccagagaactggctctggagagtggaaacagtggaccgctttcaaatattgacactgtggctccccgactctctgaccacgtgggagatccatggcctgagcctgtccaaaaccaaaggcctatgtgtggccaccccagtccagctccgggtgttccgcgagttccacctgcacctccgcctgcccatgtctgtccgccgctttgagcagctggagctgcggcctgtcctctataactacctggataaaaacctgactgtgagcgtccacgtgtccccagtggaggggctgtgcctggctgggggcggagggctggcccagcaggtgctggtgcctgcgggctctgcccggcctgttgccttctctgtggtgcccacggcagccgccgctgtgtctctgaaggtggtggctcgagggtccttcgaattccctgtgggagatgcggtgtccaaggttctgcagattgagaaggaaggggccatccatagagaggagctggtctatgaactcaaccccttggaccaccgaggccggaccttggaaatacctggcaactctgatcccaatatgatccctgatggggactttaacagctacgtcagggttacagcctcagatccattggacactttaggctctgagggggccttgtcaccaggaggcgtggcctccctcttgaggcttcctcgaggctgtggggagcaaaccatgatctacttggctccgacactggctgcttcccgctacctggacaagacagagcagtggagcacactgcctcccgagaccaaggaccacgccgtggatctgatccagaaaggctacatgcggatccagcagtttcggaaggcggatggttcctatgcggcttggttgtcacgggacagcagcacctggctcacagcctttgtgttgaaggtcctgagtttggcccaggagcaggtaggaggctcgcctgagaaactgcaggagacatctaactggcttctgtcccagcagcaggctgacggctcgttccaggacccctgtccagtgttagacaggagcatgcaggggggtttggtgggcaatgatgagactgtggcactcacagcctttgtgaccatcgcccttcatcatgggctggccgtcttccaggatgagggtgcagagccattgaagcagagagtggaagcctccatctcaaaggcaaactcatttttgggggagaaagcaagtgctgggctcctgggtgcccacgcagctgccatcacggcctatgccctgacactgaccaaggcgcctgtggacctgctcggtgttgcccacaacaacctcatggcaatggcccaggagactggagataacctgtactggggctcagtcactggttctcagagcaatgccgtgtcgcccaccccggctcctcgcaacccatccgaccccatgccccaggccccagccctgtggattgaaaccacagcctacgccctgctgcacctcctgcttcacgagggcaaagcagagatggcagaccaggctgcggcctggctcacccgtcagggcagcttccaagggggattccgcagtacccaagacacggtgattgccctggatgccctgtctgcctactggattgcctcccacaccactgaggagaggggtctcaatgtgactctcagctccacaggccggaatgggttcaagtcccacgcgctgcagctgaacaaccgccagattcgcggcctggaggaggagctgcagttttccttgggcagcaagatcaatgtgaaggtgggaggaaacagcaaaggaaccctgaaggtccttcgtacctacaatgtcctggacatgaagaacacgacctgccaggacctacagatagaagtgacagtcaaaggccacgtcgagtacacgatggaagcaaacgaggactatgaggactatgagtacgatgagcttccagccaaggatgacccagatgcccctctgcagcccgtgacacccctgcagctgtttgagggtcggaggaaccgccgcaggagggaggcgcccaaggtggtggaggagcaggagtccagggtgcactacaccgtgtgcatctggcggaacggcaaggtggggctgtctggcatggccatcgcggacgtcaccctcctgagtggattccacgccctgcgtgctgacctggagaagctgacctccctctctgaccgttacgtgagtcactttgagaccgaggggccccacgtcctgctgtattttgactcggtccccacctcccgggagtgcgtgggctttgaggctgtgcaggaagtgccggtggggctggtgcagccggccagcgcaaccctgtacgactactacaaccccgagcgcagatgttctgtgttttacggggcaccaagtaagagcagactcttggccaccttgtgttctgctgaagtctgccagtgtgctgaggggaagtgccctcgccagcgtcgcgccctggagcggggtctgcaggacgaggatggctacaggatgaagtttgcctgctactacccccgtgtggagtacggcttccaggttaaggttctccgagaagacagcagagctgctttccgcctctttgagaccaagatcacccaagtcctgcacttcaccaaggatgtcaaggccgctgctaatcagatgcgcaacttcctggttcgagcctcctgccgccttcgcttggaacctgggaaagaatatttgatcatgggtctggatggggccacctatgacctcgagggacacccccagtacctgctggactcgaatagctggatcgaggagatgccctctgaacgcctgtgccggagcacccgccagcgggcagcctgtgcccagctcaacgacttcctccaggagtatggcactcaggggtgccaggtgtgagggctgccctcccacctccactgggaggaacctgaacctgggaaccatgaagctggaagcactgctgtgtccgctttcatgaacacagcctgggaccagggcatattaaaggcttttggcagcaaagtgtcagtgttggca

SEQ ID NO: 171600 - DNA, 5460 bp, Artificial Sequence
  derived and/or modified sequence
agagtcaactctgccccgaggcctagcttggccagaaggtagcagacagacagacggatctaacctctcttggatcctccagccatgaggctgctctgggggctgatctgggcatccagcttcttcaccttatctctgcagaagcccaggttgctcttgttctctccttctgtggttcatctgggggtccccctatcggtgggggtgcagctccaggatgtgccccgaggacaggtagtgaaaggatcagtgttcctgagaaacccatctcgtaataatgtcccctgctccccaaaggtggacttcacccttagctcagaaagagacttcgcactcctcagtctccaggtgcccttgaaagatgcgaagagctgtggcctccatcaactcctcagaggccctgaggtccagctggtggcccattcgccatggctaaaggactctctgtccagaacgacaaacatccagggtatcaacctgctcttctcctctcgccgggggcacctctttttgcagacggaccagcccatttacaaccctggccagcgggttcggtaccgggtctttgctctggatcagaagatgcgcccgagcactgacaccatcacagtcatggtggagaactctcacggcctccgcgtgcggaagaaggaggtgtacatgccctcgtccatcttccaggatgactttgtgatcccagacatctcagagccagggacctggaagatctcagcccgattctcagatggcctggaatccaacagcagcacccagtttgaggtgaagaaatatgtccttcccaactttgaggtgaagatcacccctggaaagccctacatcctgacggtgccaggccatcttgatgaaatgcagttagacatccaggccaggtacatctatgggaagccagtgcagggggtggcatatgtgcgctttgggctcctagatgaggatggtaagaagactttctttcgggggctggagagtcagaccaagctggtgaatggacagagccacatttccctctcaaaggcagagttccaggacgccctggagaagctgaatatgggcattactgacctccaggggctgcgcctctacgttgctgcagccatcattgagtctccaggtggggagatggaggaggcagagctcacatcctggtattttgtgtcatctcccttctccttggatcttagcaagaccaagcgacaccttgtgcctggggcccccttcctgctgcaggccttggtccgtgagatgtcaggctccccagcttctggcattcctgtcaaagtttctgccacggtgtcttctcctgggtctgttcctgaagtccaggacattcagcaaaacacagacgggagcggccaagtcagcattccaataattatccctcagaccatctcagagctgcagctctcagtatctgcaggctccccacatccagcgatagccaggctcactgtggcagccccaccttcaggaggccccgggtttctgtctattgagcggccggattctcgacctcctcgtgttggggacactctgaacctgaacttgcgagccgtgggcagtggggccaccttttctcattactactacatgatcctatcccgagggcagatcgtgttcatgaatcgagagcccaagaggaccctgacctcggtctcggtgtttgtggaccatcacctggcaccctccttctactttgtggccttctactaccatggagaccacccagtggccaactccctgcgagtggatgtccaggctggggcctgcgagggcaagctggagctcagcgtggacggtgccaagcagtaccggaacggggagtccgtgaagctccacttagaaaccgactccctagccctggtggcgctgggagccttggacacagctctgtatgctgcaggcagcaagtcccacaagcccctcaacatgggcaaggtctttgaagctatgaacagctatgacctcggctgtggtcctgggggtggggacagtgcccttcaggtgttccaggcagcgggcctggccttttctgatggagaccagtggaccttatccagaaagagactaagctgtcccaaggagaagacaacccggaaaaagagaaacgtgaacttccaaaaggcgattaatgagaaattgggtcagtatgcttccccgacagccaagcgctgctgccaggatggggtgacacgtctgcccatgatgcgttcctgcgagcagcgggcagcccgcgtgcagcagccggactgccgggagcccttcctgtcctgctgccaatttgctgagagtctgcgcaagaagagcagggacaagggccaggcgggcctccaacgagccctggagatcctgcaggaggaggacctgattgatgaggatgacattcccgtgcgcagcttcttcccagagaactggctctggagagtggaaacagtggaccgctttcaaatattgacactgtggctccccgactctctgaccacgtgggagatccatggcctgagcctgtccaaaaccaaaggcctatgtgtggccaccccagtccagctccgggtgttccgcgagttccacctgcacctccgcctgcccatgtctgtccgccgctttgagcagctggagctgcggcctgtcctctataactacctggataaaaacctgactgtgagcgtccacgtgtccccagtggaggggctgtgcctggctgggggcggagggctggcccagcaggtgctggtgcctgcgggctctgcccggcctgttgccttctctgtggtgcccacggcagccgccgctgtgtctctgaaggtggtggctcgagggtccttcgaattccctgtgggagatgcggtgtccaaggttctgcagattgagaaggaaggggccatccatagagaggagctggtctatgaactcaaccccttggaccaccgaggccggaccttggaaatacctggcaactctgatcccaatatgatccctgatggggactttaacagctacgtcagggttacagcctcagatccattggacactttaggctctgagggggccttgtcaccaggaggcgtggcctccctcttgaggcttcctcgaggctgtggggagcaaaccatgatctacttggctccgacactggctgcttcccgctacctggacaagacagagcagtggagcacactgcctcccgagaccaaggaccacgccgtggatctgatccagaaaggctacatgcggatccagcagtttcggaaggcggatggttcctatgcggcttggttgtcacgggacagcagcacctggctcacagcctttgtgttgaaggtcctgagtttggcccaggagcaggtaggaggctcgcctgagaaactgcaggagacatctaactggcttctgtcccagcagcaggctgacggctcgttccaggacccctgtccagtgttagacaggagcatgcaggggggtttggtgggcaatgatgagactgtggcactcacagcctttgtgaccatcgcccttcatcatgggctggccgtcttccaggatgagggtgcagagccattgaagcagagagtggaagcctccatctcaaaggcaagctcatttttgggggagaaagcaagtgctgggctcctgggtgcccacgcagctgccatcacggcctatgccctgacactgaccaaggcgcctgtggacctgctcggtgttgcccacaacaacctcatggcaatggcccaggagactggagataacctgtactggggctcagtcactggttctcagagcaatgccgtgtcgcccaccccggctcctcgcaacccatccgaccccatgccccaggccccagccctgtggattgaaaccacagcctacgccctgctgcacctcctgcttcacgagggcaaagcagagatggcagaccaggctgcggcctggctcacccgtcagggcagcttccaagggggattccgcagtacccaagacacggtgattgccctggatgccctgtctgcctactggattgcctcccacaccactgaggagaggggtctcaatgtgactctcagctccacaggccggaatgggttcaagtcccacgcgctgcagctgaacaaccgccagattcgcggcctggaggaggagctgcagttttccttgggcagcaagatcaatgtgaaggtgggaggaaacagcaaaggaaccctgaaggtccttcgtacctacaatgtcctggacatgaagaacacgacctgccaggacctacagatagaagtgacagtcaaaggccacgtcgagtacacgatggaagcaaacgaggactatgaggactatgagtacgatgagcttccagccaaggatgacccagatgcccctctgcagcccgtgacacccctgcagctgtttgagggtcggaggaaccgccgcaggagggaggcgcccaaggtggtggaggagcaggagtccagggtgcactacaccgtgtgcatctggcggaacggcaaggtggggctgtctggcatggccatcgcggacgtcaccctcctgagtggattccacgccctgcgtgctgacctggagaagctgacctccctctctgaccgttacgtgagtcactttgagaccgaggggccccacgtcctgctgtattttgactcggtccccacctcccgggagtgcgtgggctttgaggctgtgcaggaagtgccggtggggctggtgcagccggccagcgcaaccctgtacgactactacaaccccgagcgcagatgttctgtgttttacggggcaccaagtaagagcagactcttggccaccttgtgttctgctgaagtctgccagtgtgctgaggggaagtgccctcgccagcgtcgcgccctggagcggggtctgcaggacgaggatggctacaggatgaagtttgcctgctactacccccgtgtggagtacggcttccaggttaaggttctccgagaagacagcagagctgctttccgcctctttgagaccaagatcacccaagtcctgcacttcaccaaggatgtcaaggccgctgctaatcagatgcgcaacttcctggttcgagcctcctgccgccttcgcttggaacctgggaaagaatatttgatcatgggtctggatggggccacctatgacctcgagggacacccccagtacctgctggactcgaatagctggatcgaggagatgccctctgaacgcctgtgccggagcacccgccagcgggcagcctgtgcccagctcaacgacttcctccaggagtatggcactcaggggtgccaggtgtgagggctgccctcccacctccgctgggaggaacctgaacctgggaaccatgaagctggaagcactgctgtgtccgctttcatgaacacagcctgggaccagggcatattaaaggcttttggcagcaaagtgtcagtgttggca

SEQ ID NO: 171601 - DNA, 5460 bp, Artificial Sequence
  derived and/or modified sequence
agagtcaactctgccccgaggcctagcttggccagaaggtagcagacagacagacggatctaacctctcttggatcctccagccatgaggctgctctgggggctgatctgggcatccagcttcttcaccttatctctgcagaagcccaggttgctcttgttctctccttctgtggttcatctgggggtccccctatcggtgggggtgcagctccaggatgtgccccgaggacaggtagtgaaaggatcagtgttcctgagaaacccatctcgtaataatgtcccctgctccccaaaggtggacttcacccttagctcagaaagagacttcgcactcctcagtctccaggtgcccttgaaagatgcgaagagctgtggcctccatcaactcctcagaggccctgaggtccagctggtggcccattcgccatggctaaaggactctctgtccagaacgacaaacatccagggtatcaacctgctcttctcctctcgccgggggcacctctttttgcagacggaccagcccatttacaaccctggccagcgggttcggtaccgggtctttgctctggatcagaagatgcgcccgagcactgacaccatcacagtcatggtggagaactctcacggcctccgcgtgcggaagaaggaggtgtacatgccctcgtccatcttccaggatgactttgtgatcccagacatctcagagccagggacctggaagatctcagcccgattctcagatggcctggaatccaacagcagcacccagtttgaggtgaagaaatatgtccttcccaactttgaggtgaagatcacccctggaaagccctacatcctgacggtgccaggccatcttgatgaaatgcagttagacatccaggccaggtacatctatgggaagccagtgcagggggtggcatatgtgcgctttgggctcctagatgaggatggtaagaagactttctttcgggggctggagagtcagaccaagctggtgaatggacagagccacatttccctctcaaaggcagagttccaggacgccctggagaagctgaatatgggcattactgacctccaggggctgcgcctctacgttgctgcagccatcattgagtatccaggtggggagatggaggaggcagagctcacatcctggtattttgtgtcatctcccttctccttggatcttagcaagaccaagcgacaccttgtgcctggggcccccttcctgctgcaggccttggtccgtgagatgtcaggctccccagcttctggcattcctgtcaaagtttctgccacggtgtcttctcctgggtctgttcctgaagtccaggacattcagcaaaacacagacgggagcggccaagtcagcattccaataattatccctcagaccatctcagagctgcagctctcagtatctgcaggctccccacatccagcgatagccaggctcactgtggcagccccaccttcaggaggccccgggtttctgtctattgagcggccggattctcgacctcctcgtgttggggacactctgaacctgaacttgcgagccgtgggcagtggggccaccttttctcattactactacatgatcctatcccgagggcagatcgtgttcatgaatcgagagcccaagaggaccctgacctcggtctcggtgtttgtggaccatcacctggcaccctccttctactttgtggccttctactaccatggagaccacccagtggccaactccctgcgagtggatgtccaggctggggcctgcgagggcaagctggagctcagcgtggacggtgccaagcagtaccggaacggggagtccgtgaagctccacttagaaaccgactccctagccctggtggcgctgggagccttggacacagctctgtatgctgcaggcagcaagtcccacaagcccctcaacatgggcaaggtctttgaagctatgaacagctatgacctcggctgtggtcctgggggtggggacagtgcccttcaggtgttccaggcagcgggcctggccttttctgatggagaccagtggaccttatccagaaagagactaagctgtcccaaggagaagacaacccggaaaaagagaaacgtgaacttccaaaaggcgattaatgagaaattgggtcagtatgcttccccgacagccaagcgctgctgccaggatggggtgacacgtctgcccatgatgcgttcctgcgagcagcgggcagcccgcgtgcagcagccggactgccgggagcccttcctgtcctgctgccaatttgctgagagtctgcgcaagaagagcagggacaagggccaggcgggcctccaacgagccctggagatcctgcaggaggaggacctgattgatgaggatgacattcccgtgcgcagcttcttcccagagaactggctctggagagtggaaacagtggaccgctttcaaatattgacactgtggctccccgactctctgaccacgtgggagatccatggcctgagcctgtccaaaaccaaaggcctatgtgtggccaccccagtccagctccgggtgttccgcgagttccacctgcacctccgcctgcccatgtctgtccgccgctttgagcagctggagctgcggcctgtcctctataactacctggataaaaacctgactgtgagcgtccacgtgtccccagtggaggggctgtgcctggctgggggcggagggctggcccagcaggtgctggtgcctgcgggctctgcccggcctgttgccttctctgtggtgcccacggcagccgccgctgtgtctctgaaggtggtggctcgagggtccttcgaattccctgtgggagatgcggtgtccaaggttctgcagattgagaaggaaggggccatccatagagaggagctggtctatgaactcaaccccttggaccaccgaggccggaccttggaaatacctggcaactctgatcccaatatgatccctgatggggactttaacagctacgtcagggttacagcctcagatccattggacactttaggctctgagggggccttgtcaccaggaggcgtggcctccctcttgaggcttcctcgaggctgtggggagcaaaccatgatctacttggctccgacactggctgcttcccgctacctggacaagacagagcagtggagcacactgcctcccgagaccaaggaccacgccgtggatctgatccagaaaggctacatgcggatccagcagtttcggaaggcggatggttcctatgcggcttggttgtcacgggacagcagcacctggctcacagcctttgtgttgaaggtcctgagtttggcccaggagcaggtaggaggctcgcctgagaaactgcaggagacatctaactggcttctgtcccagcagcaggctgacggctcgttccaggacccctgtccagtgttagacaggagcatgcaggggggtttggtgggcaatgatgagactgtggcactcacagcctttgtgaccatcgcccttcatcatgggctggccgtcttccaggatgagggtgcagagccattgaagcagagagtggaagcctccatctcaaaggcaaactcatttttgggggagaaagcaagtgctgggctcctgggtgcccacgcagctgccatcacggcctatgccctgacactgaccaaggcgcctgtggacctgctcggtgttgcccacaacaacctcatggcaatggcccaggagactggagataacctgtactggggctcagtcactggttctcagagcaatgccgtgtcgcccaccccggctcctcgcaacccatccgaccccatgccccaggccccagccctgtggattgaaaccacagcctacgccctgctgcacctcctgcttcacgagggcaaagcagagatggcagaccaggctgcggcctggctcacccgtcagggcagcttccaagggggattccgcagtacccaagacacggtgattgccctggatgccctgtctgcctactggattgcctcccacaccactgaggagaggggtctcaatgtgactctcagctccacaggccggaatgggttcaagtcccacgcgctgcagctgaacaaccgccagattcgcggcctggaggaggagctgcagttttccttgggcagcaagatcaatgtgaaggtgggaggaaacagcaaaggaaccctgaaggtccttcgtacctacaatgtcctggacatgaagaacacgacctgccaggacctacagatagaagtgacagtcaaaggccacgtcgagtacacgatggaagcaaacgaggactatgaggactatgagtacgatgagcttccagccaaggatgacccagatgcccctctgcagcccgtgacacccctgcagctgtttgagggtcggaggaaccgccgcaggagggaggcgcccaaggtggtggaggagcaggagtccagggtgcactacaccgtgtgcatctggcggaacggcaaggtggggctgtctggcatggccatcgcggacgtcaccctcctgagtggattccacgccctgcgtgctgacctggagaagctgacctccctctctgaccgttacgtgagtcactttgagaccgaggggccccacgtcctgctgtattttgactcggtccccacctcccgggagtgcgtgggctttgaggctgtgcaggaagtgccggtggggctggtgcagccggccagcgcaaccctgtacgactactacaaccccgagcgcagatgttctgtgttttacggggcaccaagtaagagcagactcttggccaccttgtgttctgctgaagtctgccagtgtgctgaggggaagtgccctcgccagcgtcgcgccctggagcggggtctgcaggacgaggatggctacaggatgaagtttgcctgctactacccccgtgtggagtacggcttccaggttaaggttctccgagaagacagcagagctgctttccgcctctttgagaccaagatcacccaagtcctgcacttcaccaaggatgtcaaggccgctgctaatcagatgcgcaacttcctggttcgagcctcctgccgccttcgcttggaacctgggaaagaatatttgatcatgggtctagatggggccacctatgacctcgagggacacccccagtacctgctggactcgaatagctggatcgaggagatgccctctgaacgcctgtgccggagcacccgccagcgggcagcctgtgcccagctcaacgacttcctccaggagtatggcactcaggggtgccaggtgtgagggctgccctcccacctccgctgggaggaacctgaacctgggaaccatgaagctggaagcactgctgtgtccgctttcatgaacacagcctgggaccagggcatattaaaggcttttggcagcaaagtgtcagtgttggca

SEQ ID NO: 171602 - DNA, 5460 bp, Artificial Sequence
  derived and/or modified sequence
agagtcaactctgccccgaggcctagcttggccagaaggtagcagacagacagacggatctaacctctcttggatcctccagccatgaggctgctctgggggctgatctgggcatccagcttcttcaccttatctctgcagaagcccaggttgctcttgttctctccttctgtggttcatctgggggtccccctatcggtgggggtgcagctccaggatgtgccccgaggacaggtagtgaaaggatcagtgttcctgagaaacccatctcgtaataatgtcccctgctccccaaaggtggacttcacccttagctcagaaagagacttcgcactcctcagtctccaggtgcccttgaaagatgcgaagagctgtggcctccatcaactcctcagaggccctgaggtccagctggtggcccattcgccatggctaaaggactctctgtccagaacgacaaacatccagggtatcaacctgctcttctcctctcgccgggggcacctctttttgcagacggaccagcccatttacaaccctggccagcgggttcggtaccgggtctttgctctggatcagaagatgcgcccgagcactgacaccatcacagtcatggtggagaactctcacggcctccgcgtgcggaagaaggaggtgtacatgccctcgtccatcttccaggatgactttgtgatcccagacatctcagagccagggacctggaagatctcagcccgattctcagatggcctggaatccaacagcagcacccagtttgaggtgaagaaatatgtccttcccaactttgaggtgaagatcacccctggaaagccctacatcctgacggtgccaggccatcttgatgaaatgcagttagacatccaggccaggtacatctatgggaagccagtgcagggggtggcatatgtgcgctttgggctcctagatgaggatggtaagaagactttctttcgggggctggagagtcagaccaagctggtgaatggacagagccacatttccctctcaaaggcagagttccaggacgccctggagaagctgaatatgggcattactgacctccaggggctgcgcctctacgttgctgcagccatcattgagtctccaggtggggagatggaggaggcagagctcacatcctggtattttgtgtcatctcccttctccttggatcttagcaagaccaagcgacaccttgtgcctggggcccccttcctgctgcaggccttggtccgtgagatgtcaggctccccagcttctggcattcctgtcaaagtttctgccacggtgtcttctcctgggtctgttcctgaagtccaggacattcagcaaaacacagacgggagcggccaagtcagcattccaataattatccctcagaccatctcagagctgcagctctcagtatctgcaggctccccacatccagcgatagccaggctcactgtggcagccccaccttcaggaggccccgggtttctgtctattgagcggccggattctcgacctcctcgtgttggggacactctgaacctgaacttgcgagccgtgggcagtggggccaccttttctcattactactacatgatcctatcccgagggcagatcgtgttcatgaatcgagagcccaagaggaccctgacctcggtctcggtgtttgtggaccatcacctggcaccctccttctactttgtggccttctactaccatggagaccacccagtggccaactccctgcgagtggatgtccaggctggggcctgcgagggcaagctggagctcagcgtggacggtgccaagcagtaccggaacggggagtccgtgaagctccacttagaaaccgactccctagccctggtggcgctgggagccttggacacagctctgtatgctgcaggcagcaagtcccacaagcccctcaacatgggcaaggtctttgaagctatgaacagctatgacctcggctgtggtcctgggggtggggacagtgcccttcaggtgttccaggcagcgggcctggccttttctgatggagaccagtggaccttatccagaaagagactaagctgtcccaaggagaagacaacccggaaaaagagaaacgtgaacttccaaaaggcgattaatgagaaattgggtcagtatgcttccccgacagccaagcgctgctgccaggatggggtgacacgtctgcccatgatgcgttcctgcgagcagcgggcagcccgcgtgcagcagccggactgccgggagcccttcctgtcctgctgccaatttgctgagagtctgcgcaagaagagcagggacaagggccaggcgggcctccaacgagccctggagatcctgcaggaggaggacctgattgatgaggatgacattcccgtgcgcagcttcttcccagagaactggctctggagagtggaaacagtggaccgctttcaaatattgacactgtggctccccgactctctgaccacgtgggagatccatggcctgagcctgtccaaaaccaaaggcctatgtgtggccaccccagtccagctccgggtgttccgcgagttccacctgcacctccgcctgcccatgtctgtccgccgctttgagcagctggagctgcggcctgtcctctataactacctggataaaaacctgactgtgagcgtccacgtgtccccagtggaggggctgtgcctggctgggggcggagggctggcccagcaggtgctggtgcctgcgggctctgcccggcctgttgccttctctgtggtgcccacggcagccgccgctgtgtctctgaaggtggtggctcgagggtccttcgaattccctgtgggagatgcggtgtccaaggttctgcagattgagaaggaaggggccatccatagagaggagctggtctatgaactcaaccccttggaccaccgaggccggaccttggaaatacctggcaactctgatcccaatatgatccctgatggggactttaacagctacgtcagggttacagcctcagatccattggacactttaggctctgagggggccttgtcaccaggaggcgtggcctccctcttgaggcttcctcgaggctgtggggagcaaaccatgatctacttggctccgacactggctgcttcccgctacctggacaagacagagcagtggagcacactgcctcccgagaccaaggaccacgccgtggatctgatccagaaaggctacatgcggatccagcagtttcggaaggcggatggttcctatgcggcttggttgtcacgggacagcagcacctggctcacagcctttgtgttgaaggtcctgagtttggcccaggagcaggtaggaggctcgcctgagaaactgcaggagacatctaactggcttctgtcccagcagcaggctgacggctcgttccaggacccctgtccagtgttagacaggagcatgcaggggggtttggtgggcaatgatgagactgtggcactcacagcctttgtgaccatcgcccttcatcatgggctggccgtcttccaggatgagggtgcagagccattgaagcagagagtggaagcctccatctcaaaggcaaactcatttttgggggagaaagcaagtgctgggctcctgggtgcccacgcagctgccatcacggcctatgccctgacactgaccaaggcgcctgtggacctgctcggtgttgcccacaacaacctcatggcaatggcccaggagactggagataacctgtactggggctcagtcactggttctcagagcaatgccgtgtcgcccaccccggctcctcgcaacccatccgaccccatgccccaggccccagccctgtggattgaaaccacagcctacgccctgctgcacctcctgcttcacgagggcaaagcagagatggcagaccaggcttcggcctggctcacccgtcagggcagcttccaagggggattccgcagtacccaagacacggtgattgccctggatgccctgtctgcctactggattgcctcccacaccactgaggagaggggtctcaatgtgactctcagctccacaggccggaatgggttcaagtcccacgcgctgcagctgaacaaccgccagattcgcggcctggaggaggagctgcagttttccttgggcagcaagatcaatgtgaaggtgggaggaaacagcaaaggaaccctgaaggtccttcgtacctacaatgtcctggacatgaagaacacgacctgccaggacctacagatagaagtgacagtcaaaggccacgtcgagtacacgatggaagcaaacgaggactatgaggactatgagtacgatgagcttccagccaaggatgacccagatgcccctctgcagcccgtgacacccctgcagctgtttgagggtcggaggaaccgccgcaggagggaggcgcccaaggtggtggaggagcaggagtccagggtgcactacaccgtgtgcatctggcggaacggcaaggtggggctgtctggcatggccatcgcggacgtcaccctcctgagtggattccacgccctgcgtgctgacctggagaagctgacctccctctctgaccgttacgtgagtcactttgagaccgaggggccccacgtcctgctgtattttgactcggtccccacctcccgggagtgcgtgggctttgaggctgtgcaggaagtgccggtggggctggtgcagccggccagcgcaaccctgtacgactactacaaccccgagcgcagatgttctgtgttttacggggcaccaagtaagagcagactcttggccaccttgtgttctgctgaagtctgccagtgtgctgaggggaagtgccctcgccagcgtcgcgccctggagcggggtctgcaggacgaggatggctacaggatgaagtttgcctgctactacccccgtgtggagtacggcttccaggttaaggttctccgagaagacagcagagctgctttccgcctctttgagaccaagatcacccaagtcctgcacttcaccaaggatgtcaaggccgctgctaatcagatgcgcaacttcctggttcgagcctcctgccgccttcgcttggaacctgggaaagaatatttgatcatgggtctggatggggccacctatgacctcgagggacacccccagtacctgctggactcgaatagctggatcgaggagatgccctctgaacgcctgtgccggagcacccgccagcgggcagcctgtgcccagctcaacgacttcctccaggagtatggcactcaggggtgccaggtgtgagggctgccctcccacctccgctgggaggaacctgaacctgggaaccatgaagctggaagcactgctgtgtccgctttcatgaacacagcctgggaccagggcatattaaaggcttttggcagcaaagtgtcagtgttggca

SEQ ID NO: 171603 - DNA, 5235 bp, Artificial Sequence
  derived and/or modified sequence
atgagactgctgtggggcctgatctgggccagcagcttcttcaccctgagcctgcagaagcccagactgctgctgttcagccccagcgtggtgcacctgggcgtgcccctgagcgtgggcgtgcagctgcaggacgtgcccagaggccaggtggtgaagggcagcgtgttcctgagaaaccccagcagaaacaacgtgccctgcagccccaaggtggacttcaccctgagcagcgagagagacttcgccctgctgagcctgcaggtgcccctgaaggacgccaagagctgcggcctgcaccagctgctgagaggccccgaggtgcagctggtggcccacagcccctggctgaaggacagcctgagcagaaccaccaacatccagggcatcaacctgctgttcagcagcagaagaggccacctgttcctgcagaccgaccagcccatctacaaccccggccagagagtgagatacagagtgttcgccctggaccagaagatgagacccagcaccgacaccatcaccgtgatggtggagaacagccacggcctgagagtgagaaagaaggaggtgtacatgcccagcagcatcttccaggacgacttcgtgatccccgacatcagcgagcccggcacctggaagatcagcgccagattcagcgacggcctggagagcaacagcagcacccagttcgaggtgaagaagtacgtgctgcccaacttcgaggtgaagatcacccccggcaagccctacatcctgaccgtgcccggccacctggacgagatgcagctggacatccaggccagatacatctacggcaagcccgtgcagggcgtggcctacgtgagattcggcctgctggacgaggacggcaagaagaccttcttcagaggcctggagagccagaccaagctggtgaacggccagagccacatcagcctgagcaaggccgagttccaggacgccctggagaagctgaacatgggcatcaccgacctgcagggcctgagactgtacgtggccgccgccatcatcgagtaccccggcggcgagatggaggaggccgagctgaccagctggtacttcgtgagcagccccttcagcctggacctgagcaagaccaagagacacctggtgcccggcgcccccttcctgctgcaggccctggtgagagagatgagcggcagccccgccagcggcatccccgtgaaggtgagcgccaccgtgagcagccccggcagcgtgcccgaggtgcaggacatccagcagaacaccgacggcagcggccaggtgagcatccccatcatcatcccccagaccatcagcgagctgcagctgagcgtgagcgccggcagcccccaccccgccatcgccagactgaccgtggccgccccccccagcggcggccccggcttcctgagcatcgagtggcccgacagcagaccccccagagtgggcgacaccctgaacctgaacctgagagccgtgggcagcggcgccaccttcagccactactactacatgatcctgagcagaggccagatcgtgttcatgaacagagagcccaagagaaccctgaccagcgtgagcgtgttcgtggaccaccacctggcccccagcttctacttcgtggccttctactaccacggcgaccaccccgtggccaacagcctgagagtggacgtgcaggccggcgcctgcgagggcaagctggagctgagcgtggacggcgccaagcagtacagaaacggcgagagcgtgaagctgcacctggagaccgacagcctggccctggtggccctgggcgccctggacaccgccctgtacgccgccggcagcaagagccacaagcccctgaacatgggcaaggtgttcgaggccatgaacagctacgacctgggctgcggccccggcggcggcgacagcgccctgcaggtgttccaggccgccggcctggccttcagcgacggcgaccagtggaccctgagcagaaagagactgagctgccccaaggagaagaccaccagaaagaagagaaacgtgaacttccagaaggccatcaacgagaagctgggccagtacgccagccccaccgccaagagatgctgccaggacggcgtgaccagactgcccatgatgagaagctgcgagcagagagccgccagagtgcagcagcccgactgcagagagcccttcctgagctgctgccagttcgccgagagcctgagaaagaagagcagagacaagggccaggccggcctgcagagagccctggagatcctgcaggaggaggacctgatcgacgaggacgacatccccgtgagaagcttcttccccgagaactggctgtggagagtggagaccgtggacagattccagatcctgaccctgtggctgcccgacagcctgaccacctgggagatccacggcctgagcctgagcaagaccaagggcctgtgcgtggccacccccgtgcagctgagagtgttcagagagttccacctgcacctgagactgcccatgagcgtgagaagattcgagcagctggagctgagacccgtgctgtacaactacctggacaagaacctgaccgtgagcgtgcacgtgagccccgtggagggcctgtgcctggccggcggcggcggcctggcccagcaggtgctggtgcccgccggcagcgccagacccgtggccttcagcgtggtgcccaccgccgccgccgccgtgagcctgaaggtggtggccagaggcagcttcgagttccccgtgggcgacgccgtgagcaaggtgctgcagatcgagaaggagggcgccatccacagagaggagctggtgtacgagctgaaccccctggaccacagaggcagaaccctggagatccccggcaacagcgaccccaacatgatccccgacggcgacttcaacagctacgtgagagtgaccgccagcgaccccctggacaccctgggcagcgagggcgccctgagccccggcggcgtggccagcctgctgagactgcccagaggctgcggcgagcagaccatgatctacctggcccccaccctggccgccagcagatacctggacaagaccgagcagtggagcaccctgccccccgagaccaaggaccacgccgtggacctgatccagaagggctacatgagaatccagcagttcagaaaggccgacggcagctacgccgcctggctgagcagagacagcagcacctggctgaccgccttcgtgctgaaggtgctgagcctggcccaggagcaggtgggcggcagccccgagaagctgcaggagaccagcaactggctgctgagccagcagcaggccgacggcagcttccaggacccctgccccgtgctggacagaagcatgcagggcggcctggtgggcaacgacgagaccgtggccctgaccgccttcgtgaccatcgccctgcaccacggcctggccgtgttccaggacgagggcgccgagcccctgaagcagagagtggaggccagcatcagcaaggccaacagcttcctgggcgagaaggccagcgccggcctgctgggcgcccacgccgccgccatcaccgcctacgccctgaccctgaccaaggcccccgtggacctgctgggcgtggcccacaacaacctgatggccatggcccaggagaccggcgacaacctgtactggggcagcgtgaccggcagccagagcaacgccgtgagccccacccccgcccccagaaaccccagcgaccccatgccccaggcccccgccctgtggatcgagaccaccgcctacgccctgctgcacctgctgctgcacgagggcaaggccgagatggccgaccaggccgccgcctggctgaccagacagggcagcttccagggcggcttcagaagcacccaggacaccgtgatcgccctggacgccctgagcgcctactggatcgccagccacaccaccgaggagagaggcctgaacgtgaccctgagcagcaccggcagaaacggcttcaagagccacgccctgcagctgaacaacagacagatcagaggcctggaggaggagctgcagttcagcctgggcagcaagatcaacgtgaaggtgggcggcaacagcaagggcaccctgaaggtgctgagaacctacaacgtgctggacatgaagaacaccacctgccaggacctgcagatcgaggtgaccgtgaagggccacgtggagtacaccatggaggccaacgaggactacgaggactacgagtacgacgagctgcccgccaaggacgaccccgacgcccccctgcagcccgtgacccccctgcagctgttcgagggcagaagaaacagaagaagaagagaggcccccaaggtggtggaggagcaggagagcagagtgcactacaccgtgtgcatctggagaaacggcaaggtgggcctgagcggcatggccatcgccgacgtgaccctgctgagcggcttccacgccctgagagccgacctggagaagctgaccagcctgagcgacagatacgtgagccacttcgagaccgagggcccccacgtgctgctgtacttcgacagcgtgcccaccagcagagagtgcgtgggcttcgaggccgtgcaggaggtgcccgtgggcctggtgcagcccgccagcgccaccctgtacgactactacaaccccgagagaagatgcagcgtgttctacggcgcccccagcaagagcagactgctggccaccctgtgcagcgccgaggtgtgccagtgcgccgagggcaagtgccccagacagagaagagccctggagagaggcctgcaggacgaggacggctacagaatgaagttcgcctgctactaccccagagtggagtacggcttccaggtgaaggtgctgagagaggacagcagagccgccttcagactgttcgagaccaagatcacccaggtgctgcacttcaccaaggacgtgaaggccgccgccaaccagatgagaaacttcctggtgagagccagctgcagactgagactggagcccggcaaggagtacctgatcatgggcctggacggcgccacctacgacctggagggccacccccagtacctgctggacagcaacagctggatcgaggagatgcccagcgagagactgtgcagaagcaccagacagagagccgcctgcgcccagctgaacgacttcctgcaggagtacggcacccagggctgccaggtgtag

SEQ ID NO: 171604 - DNA, 5235 bp, Artificial Sequence
  derived and/or modified sequence
atgagactgctgtggggcctgatctgggccagcagcttcttcaccctgagcctgcagaagcccagactgctgctgttcagccccagcgtggtgcacctgggcgtgcccctgagcgtgggcgtgcagctgcaggacgtgcccagaggccaggtggtgaagggcagcgtgttcctgagaaaccccagcagaaacaacgtgccctgcagccccaaggtggacttcaccctgagcagcgagagagacttcgccctgctgagcctgcaggtgcccctgaaggacgccaagagctgcggcctgcaccagctgctgagaggccccgaggtgcagctggtggcccacagcccctggctgaaggacagcctgagcagaaccaccaacatccagggcatcaacctgctgttcagcagcagaagaggccacctgttcctgcagaccgaccagcccatctacaaccccggccagagagtgagatacagagtgttcgccctggaccagaagatgagacccagcaccgacaccatcaccgtgatggtggagaacagccacggcctgagagtgagaaagaaggaggtgtacatgcccagcagcatcttccaggacgacttcgtgatccccgacatcagcgagcccggcacctggaagatcagcgccagattcagcgacggcctggagagcaacagcagcacccagttcgaggtgaagaagtacgtgctgcccaacttcgaggtgaagatcacccccggcaagccctacatcctgaccgtgcccggccacctggacgagatgcagctggacatccaggccagatacatctacggcaagcccgtgcagggcgtggcctacgtgagattcggcctgctggacgaggacggcaagaagaccttcttcagaggcctggagagccagaccaagctggtgaacggccagagccacatcagcctgagcaaggccgagttccaggacgccctggagaagctgaacatgggcatcaccgacctgcagggcctgagactgtacgtggccgccgccatcatcgagagccccggcggcgagatggaggaggccgagctgaccagctggtacttcgtgagcagccccttcagcctggacctgagcaagaccaagagacacctggtgcccggcgcccccttcctgctgcaggccctggtgagagagatgagcggcagccccgccagcggcatccccgtgaaggtgagcgccaccgtgagcagccccggcagcgtgcccgaggtgcaggacatccagcagaacaccgacggcagcggccaggtgagcatccccatcatcatcccccagaccatcagcgagctgcagctgagcgtgagcgccggcagcccccaccccgccatcgccagactgaccgtggccgccccccccagcggcggccccggcttcctgagcatcgagagacccgacagcagaccccccagagtgggcgacaccctgaacctgaacctgagagccgtgggcagcggcgccaccttcagccactactactacatgatcctgagcagaggccagatcgtgttcatgaacagagagcccaagagaaccctgaccagcgtgagcgtgttcgtggaccaccacctggcccccagcttctacttcgtggccttctactaccacggcgaccaccccgtggccaacagcctgagagtggacgtgcaggccggcgcctgcgagggcaagctggagctgagcgtggacggcgccaagcagtacagaaacggcgagagcgtgaagctgcacctggagaccgacagcctggccctggtggccctgggcgccctggacaccgccctgtacgccgccggcagcaagagccacaagcccctgaacatgggcaaggtgttcgaggccatgaacagctacgacctgggctgcggccccggcggcggcgacagcgccctgcaggtgttccaggccgccggcctggccttcagcgacggcgaccagtggaccctgagcagaaagagactgagctgccccaaggagaagaccaccagaaagaagagaaacgtgaacttccagaaggccatcaacgagaagctgggccagtacgccagccccaccgccaagagatgctgccaggacggcgtgaccagactgcccatgatgagaagctgcgagcagagagccgccagagtgcagcagcccgactgcagagagcccttcctgagctgctgccagttcgccgagagcctgagaaagaagagcagagacaagggccaggccggcctgcagagagccctggagatcctgcaggaggaggacctgatcgacgaggacgacatccccgtgagaagcttcttccccgagaactggctgtggagagtggagaccgtggacagattccagatcctgaccctgtggctgcccgacagcctgaccacctgggagatccacggcctgagcctgagcaagaccaagggcctgtgcgtggccacccccgtgcagctgagagtgttcagagagttccacctgcacctgagactgcccatgagcgtgagaagattcgagcagctggagctgagacccgtgctgtacaactacctggacaagaacctgaccgtgagcgtgcacgtgagccccgtggagggcctgtgcctggccggcggcggcggcctggcccagcaggtgctggtgcccgccggcagcgccagacccgtggccttcagcgtggtgcccaccgccgccgccgccgtgagcctgaaggtggtggccagaggcagcttcgagttccccgtgggcgacgccgtgagcaaggtgctgcagatcgagaaggagggcgccatccacagagaggagctggtgtacgagctgaaccccctggaccacagaggcagaaccctggagatccccggcaacagcgaccccaacatgatccccgacggcgacttcaacagctacgtgagagtgaccgccagcgaccccctggacaccctgggcagcgagggcgccctgagccccggcggcgtggccagcctgctgagactgcccagaggctgcggcgagcagaccatgatctacctggcccccaccctggccgccagcagatacctggacaagaccgagcagtggagcaccctgccccccgagaccaaggaccacgccgtggacctgatccagaagggctacatgagaatccagcagttcagaaaggccgacggcagctacgccgcctggctgagcagagacagcagcacctggctgaccgccttcgtgctgaaggtgctgagcctggcccaggagcaggtgggcggcagccccgagaagctgcaggagaccagcaactggctgctgagccagcagcaggccgacggcagcttccaggacccctgccccgtgctggacagaagcatgcagggcggcctggtgggcaacgacgagaccgtggccctgaccgccttcgtgaccatcgccctgcaccacggcctggccgtgttccaggacgagggcgccgagcccctgaagcagagagtggaggccagcatcagcaaggccagcagcttcctgggcgagaaggccagcgccggcctgctgggcgcccacgccgccgccatcaccgcctacgccctgaccctgaccaaggcccccgtggacctgctgggcgtggcccacaacaacctgatggccatggcccaggagaccggcgacaacctgtactggggcagcgtgaccggcagccagagcaacgccgtgagccccacccccgcccccagaaaccccagcgaccccatgccccaggcccccgccctgtggatcgagaccaccgcctacgccctgctgcacctgctgctgcacgagggcaaggccgagatggccgaccaggccgccgcctggctgaccagacagggcagcttccagggcggcttcagaagcacccaggacaccgtgatcgccctggacgccctgagcgcctactggatcgccagccacaccaccgaggagagaggcctgaacgtgaccctgagcagcaccggcagaaacggcttcaagagccacgccctgcagctgaacaacagacagatcagaggcctggaggaggagctgcagttcagcctgggcagcaagatcaacgtgaaggtgggcggcaacagcaagggcaccctgaaggtgctgagaacctacaacgtgctggacatgaagaacaccacctgccaggacctgcagatcgaggtgaccgtgaagggccacgtggagtacaccatggaggccaacgaggactacgaggactacgagtacgacgagctgcccgccaaggacgaccccgacgcccccctgcagcccgtgacccccctgcagctgttcgagggcagaagaaacagaagaagaagagaggcccccaaggtggtggaggagcaggagagcagagtgcactacaccgtgtgcatctggagaaacggcaaggtgggcctgagcggcatggccatcgccgacgtgaccctgctgagcggcttccacgccctgagagccgacctggagaagctgaccagcctgagcgacagatacgtgagccacttcgagaccgagggcccccacgtgctgctgtacttcgacagcgtgcccaccagcagagagtgcgtgggcttcgaggccgtgcaggaggtgcccgtgggcctggtgcagcccgccagcgccaccctgtacgactactacaaccccgagagaagatgcagcgtgttctacggcgcccccagcaagagcagactgctggccaccctgtgcagcgccgaggtgtgccagtgcgccgagggcaagtgccccagacagagaagagccctggagagaggcctgcaggacgaggacggctacagaatgaagttcgcctgctactaccccagagtggagtacggcttccaggtgaaggtgctgagagaggacagcagagccgccttcagactgttcgagaccaagatcacccaggtgctgcacttcaccaaggacgtgaaggccgccgccaaccagatgagaaacttcctggtgagagccagctgcagactgagactggagcccggcaaggagtacctgatcatgggcctggacggcgccacctacgacctggagggccacccccagtacctgctggacagcaacagctggatcgaggagatgcccagcgagagactgtgcagaagcaccagacagagagccgcctgcgcccagctgaacgacttcctgcaggagtacggcacccagggctgccaggtgtag

SEQ ID NO: 171605 - DNA, 5235 bp, Artificial Sequence
  derived and/or modified sequence
atgagactgctgtggggcctgatctgggccagcagcttcttcaccctgagcctgcagaagcccagactgctgctgttcagccccagcgtggtgcacctgggcgtgcccctgagcgtgggcgtgcagctgcaggacgtgcccagaggccaggtggtgaagggcagcgtgttcctgagaaaccccagcagaaacaacgtgccctgcagccccaaggtggacttcaccctgagcagcgagagagacttcgccctgctgagcctgcaggtgcccctgaaggacgccaagagctgcggcctgcaccagctgctgagaggccccgaggtgcagctggtggcccacagcccctggctgaaggacagcctgagcagaaccaccaacatccagggcatcaacctgctgttcagcagcagaagaggccacctgttcctgcagaccgaccagcccatctacaaccccggccagagagtgagatacagagtgttcgccctggaccagaagatgagacccagcaccgacaccatcaccgtgatggtggagaacagccacggcctgagagtgagaaagaaggaggtgtacatgcccagcagcatcttccaggacgacttcgtgatccccgacatcagcgagcccggcacctggaagatcagcgccagattcagcgacggcctggagagcaacagcagcacccagttcgaggtgaagaagtacgtgctgcccaacttcgaggtgaagatcacccccggcaagccctacatcctgaccgtgcccggccacctggacgagatgcagctggacatccaggccagatacatctacggcaagcccgtgcagggcgtggcctacgtgagattcggcctgctggacgaggacggcaagaagaccttcttcagaggcctggagagccagaccaagctggtgaacggccagagccacatcagcctgagcaaggccgagttccaggacgccctggagaagctgaacatgggcatcaccgacctgcagggcctgagactgtacgtggccgccgccatcatcgagtaccccggcggcgagatggaggaggccgagctgaccagctggtacttcgtgagcagccccttcagcctggacctgagcaagaccaagagacacctggtgcccggcgcccccttcctgctgcaggccctggtgagagagatgagcggcagccccgccagcggcatccccgtgaaggtgagcgccaccgtgagcagccccggcagcgtgcccgaggtgcaggacatccagcagaacaccgacggcagcggccaggtgagcatccccatcatcatcccccagaccatcagcgagctgcagctgagcgtgagcgccggcagcccccaccccgccatcgccagactgaccgtggccgccccccccagcggcggccccggcttcctgagcatcgagagacccgacagcagaccccccagagtgggcgacaccctgaacctgaacctgagagccgtgggcagcggcgccaccttcagccactactactacatgatcctgagcagaggccagatcgtgttcatgaacagagagcccaagagaaccctgaccagcgtgagcgtgttcgtggaccaccacctggcccccagcttctacttcgtggccttctactaccacggcgaccaccccgtggccaacagcctgagagtggacgtgcaggccggcgcctgcgagggcaagctggagctgagcgtggacggcgccaagcagtacagaaacggcgagagcgtgaagctgcacctggagaccgacagcctggccctggtggccctgggcgccctggacaccgccctgtacgccgccggcagcaagagccacaagcccctgaacatgggcaaggtgttcgaggccatgaacagctacgacctgggctgcggccccggcggcggcgacagcgccctgcaggtgttccaggccgccggcctggccttcagcgacggcgaccagtggaccctgagcagaaagagactgagctgccccaaggagaagaccaccagaaagaagagaaacgtgaacttccagaaggccatcaacgagaagctgggccagtacgccagccccaccgccaagagatgctgccaggacggcgtgaccagactgcccatgatgagaagctgcgagcagagagccgccagagtgcagcagcccgactgcagagagcccttcctgagctgctgccagttcgccgagagcctgagaaagaagagcagagacaagggccaggccggcctgcagagagccctggagatcctgcaggaggaggacctgatcgacgaggacgacatccccgtgagaagcttcttccccgagaactggctgtggagagtggagaccgtggacagattccagatcctgaccctgtggctgcccgacagcctgaccacctgggagatccacggcctgagcctgagcaagaccaagggcctgtgcgtggccacccccgtgcagctgagagtgttcagagagttccacctgcacctgagactgcccatgagcgtgagaagattcgagcagctggagctgagacccgtgctgtacaactacctggacaagaacctgaccgtgagcgtgcacgtgagccccgtggagggcctgtgcctggccggcggcggcggcctggcccagcaggtgctggtgcccgccggcagcgccagacccgtggccttcagcgtggtgcccaccgccgccgccgccgtgagcctgaaggtggtggccagaggcagcttcgagttccccgtgggcgacgccgtgagcaaggtgctgcagatcgagaaggagggcgccatccacagagaggagctggtgtacgagctgaaccccctggaccacagaggcagaaccctggagatccccggcaacagcgaccccaacatgatccccgacggcgacttcaacagctacgtgagagtgaccgccagcgaccccctggacaccctgggcagcgagggcgccctgagccccggcggcgtggccagcctgctgagactgcccagaggctgcggcgagcagaccatgatctacctggcccccaccctggccgccagcagatacctggacaagaccgagcagtggagcaccctgccccccgagaccaaggaccacgccgtggacctgatccagaagggctacatgagaatccagcagttcagaaaggccgacggcagctacgccgcctggctgagcagagacagcagcacctggctgaccgccttcgtgctgaaggtgctgagcctggcccaggagcaggtgggcggcagccccgagaagctgcaggagaccagcaactggctgctgagccagcagcaggccgacggcagcttccaggacccctgccccgtgctggacagaagcatgcagggcggcctggtgggcaacgacgagaccgtggccctgaccgccttcgtgaccatcgccctgcaccacggcctggccgtgttccaggacgagggcgccgagcccctgaagcagagagtggaggccagcatcagcaaggccaacagcttcctgggcgagaaggccagcgccggcctgctgggcgcccacgccgccgccatcaccgcctacgccctgaccctgaccaaggcccccgtggacctgctgggcgtggcccacaacaacctgatggccatggcccaggagaccggcgacaacctgtactggggcagcgtgaccggcagccagagcaacgccgtgagccccacccccgcccccagaaaccccagcgaccccatgccccaggcccccgccctgtggatcgagaccaccgcctacgccctgctgcacctgctgctgcacgagggcaaggccgagatggccgaccaggccgccgcctggctgaccagacagggcagcttccagggcggcttcagaagcacccaggacaccgtgatcgccctggacgccctgagcgcctactggatcgccagccacaccaccgaggagagaggcctgaacgtgaccctgagcagcaccggcagaaacggcttcaagagccacgccctgcagctgaacaacagacagatcagaggcctggaggaggagctgcagttcagcctgggcagcaagatcaacgtgaaggtgggcggcaacagcaagggcaccctgaaggtgctgagaacctacaacgtgctggacatgaagaacaccacctgccaggacctgcagatcgaggtgaccgtgaagggccacgtggagtacaccatggaggccaacgaggactacgaggactacgagtacgacgagctgcccgccaaggacgaccccgacgcccccctgcagcccgtgacccccctgcagctgttcgagggcagaagaaacagaagaagaagagaggcccccaaggtggtggaggagcaggagagcagagtgcactacaccgtgtgcatctggagaaacggcaaggtgggcctgagcggcatggccatcgccgacgtgaccctgctgagcggcttccacgccctgagagccgacctggagaagctgaccagcctgagcgacagatacgtgagccacttcgagaccgagggcccccacgtgctgctgtacttcgacagcgtgcccaccagcagagagtgcgtgggcttcgaggccgtgcaggaggtgcccgtgggcctggtgcagcccgccagcgccaccctgtacgactactacaaccccgagagaagatgcagcgtgttctacggcgcccccagcaagagcagactgctggccaccctgtgcagcgccgaggtgtgccagtgcgccgagggcaagtgccccagacagagaagagccctggagagaggcctgcaggacgaggacggctacagaatgaagttcgcctgctactaccccagagtggagtacggcttccaggtgaaggtgctgagagaggacagcagagccgccttcagactgttcgagaccaagatcacccaggtgctgcacttcaccaaggacgtgaaggccgccgccaaccagatgagaaacttcctggtgagagccagctgcagactgagactggagcccggcaaggagtacctgatcatgggcctggacggcgccacctacgacctggagggccacccccagtacctgctggacagcaacagctggatcgaggagatgcccagcgagagactgtgcagaagcaccagacagagagccgcctgcgcccagctgaacgacttcctgcaggagtacggcacccagggctgccaggtgtag

SEQ ID NO: 171606 - DNA, 5235 bp, Artificial Sequence
  derived and/or modified sequence
atgagactgctgtggggcctgatctgggccagcagcttcttcaccctgagcctgcagaagcccagactgctgctgttcagccccagcgtggtgcacctgggcgtgcccctgagcgtgggcgtgcagctgcaggacgtgcccagaggccaggtggtgaagggcagcgtgttcctgagaaaccccagcagaaacaacgtgccctgcagccccaaggtggacttcaccctgagcagcgagagagacttcgccctgctgagcctgcaggtgcccctgaaggacgccaagagctgcggcctgcaccagctgctgagaggccccgaggtgcagctggtggcccacagcccctggctgaaggacagcctgagcagaaccaccaacatccagggcatcaacctgctgttcagcagcagaagaggccacctgttcctgcagaccgaccagcccatctacaaccccggccagagagtgagatacagagtgttcgccctggaccagaagatgagacccagcaccgacaccatcaccgtgatggtggagaacagccacggcctgagagtgagaaagaaggaggtgtacatgcccagcagcatcttccaggacgacttcgtgatccccgacatcagcgagcccggcacctggaagatcagcgccagattcagcgacggcctggagagcaacagcagcacccagttcgaggtgaagaagtacgtgctgcccaacttcgaggtgaagatcacccccggcaagccctacatcctgaccgtgcccggccacctggacgagatgcagctggacatccaggccagatacatctacggcaagcccgtgcagggcgtggcctacgtgagattcggcctgctggacgaggacggcaagaagaccttcttcagaggcctggagagccagaccaagctggtgaacggccagagccacatcagcctgagcaaggccgagttccaggacgccctggagaagctgaacatgggcatcaccgacctgcagggcctgagactgtacgtggccgccgccatcatcgagagccccggcggcgagatggaggaggccgagctgaccagctggtacttcgtgagcagccccttcagcctggacctgagcaagaccaagagacacctggtgcccggcgcccccttcctgctgcaggccctggtgagagagatgagcggcagccccgccagcggcatccccgtgaaggtgagcgccaccgtgagcagccccggcagcgtgcccgaggtgcaggacatccagcagaacaccgacggcagcggccaggtgagcatccccatcatcatcccccagaccatcagcgagctgcagctgagcgtgagcgccggcagcccccaccccgccatcgccagactgaccgtggccgccccccccagcggcggccccggcttcctgagcatcgagagacccgacagcagaccccccagagtgggcgacaccctgaacctgaacctgagagccgtgggcagcggcgccaccttcagccactactactacatgatcctgagcagaggccagatcgtgttcatgaacagagagcccaagagaaccctgaccagcgtgagcgtgttcgtggaccaccacctggcccccagcttctacttcgtggccttctactaccacggcgaccaccccgtggccaacagcctgagagtggacgtgcaggccggcgcctgcgagggcaagctggagctgagcgtggacggcgccaagcagtacagaaacggcgagagcgtgaagctgcacctggagaccgacagcctggccctggtggccctgggcgccctggacaccgccctgtacgccgccggcagcaagagccacaagcccctgaacatgggcaaggtgttcgaggccatgaacagctacgacctgggctgcggccccggcggcggcgacagcgccctgcaggtgttccaggccgccggcctggccttcagcgacggcgaccagtggaccctgagcagaaagagactgagctgccccaaggagaagaccaccagaaagaagagaaacgtgaacttccagaaggccatcaacgagaagctgggccagtacgccagccccaccgccaagagatgctgccaggacggcgtgaccagactgcccatgatgagaagctgcgagcagagagccgccagagtgcagcagcccgactgcagagagcccttcctgagctgctgccagttcgccgagagcctgagaaagaagagcagagacaagggccaggccggcctgcagagagccctggagatcctgcaggaggaggacctgatcgacgaggacgacatccccgtgagaagcttcttccccgagaactggctgtggagagtggagaccgtggacagattccagatcctgaccctgtggctgcccgacagcctgaccacctgggagatccacggcctgagcctgagcaagaccaagggcctgtgcgtggccacccccgtgcagctgagagtgttcagagagttccacctgcacctgagactgcccatgagcgtgagaagattcgagcagctggagctgagacccgtgctgtacaactacctggacaagaacctgaccgtgagcgtgcacgtgagccccgtggagggcctgtgcctggccggcggcggcggcctggcccagcaggtgctggtgcccgccggcagcgccagacccgtggccttcagcgtggtgcccaccgccgccgccgccgtgagcctgaaggtggtggccagaggcagcttcgagttccccgtgggcgacgccgtgagcaaggtgctgcagatcgagaaggagggcgccatccacagagaggagctggtgtacgagctgaaccccctggaccacagaggcagaaccctggagatccccggcaacagcgaccccaacatgatccccgacggcgacttcaacagctacgtgagagtgaccgccagcgaccccctggacaccctgggcagcgagggcgccctgagccccggcggcgtggccagcctgctgagactgcccagaggctgcggcgagcagaccatgatctacctggcccccaccctggccgccagcagatacctggacaagaccgagcagtggagcaccctgccccccgagaccaaggaccacgccgtggacctgatccagaagggctacatgagaatccagcagttcagaaaggccgacggcagctacgccgcctggctgagcagagacagcagcacctggctgaccgccttcgtgctgaaggtgctgagcctggcccaggagcaggtgggcggcagccccgagaagctgcaggagaccagcaactggctgctgagccagcagcaggccgacggcagcttccaggacccctgccccgtgctggacagaagcatgcagggcggcctggtgggcaacgacgagaccgtggccctgaccgccttcgtgaccatcgccctgcaccacggcctggccgtgttccaggacgagggcgccgagcccctgaagcagagagtggaggccagcatcagcaaggccaacagcttcctgggcgagaaggccagcgccggcctgctgggcgcccacgccgccgccatcaccgcctacgccctgaccctgaccaaggcccccgtggacctgctgggcgtggcccacaacaacctgatggccatggcccaggagaccggcgacaacctgtactggggcagcgtgaccggcagccagagcaacgccgtgagccccacccccgcccccagaaaccccagcgaccccatgccccaggcccccgccctgtggatcgagaccaccgcctacgccctgctgcacctgctgctgcacgagggcaaggccgagatggccgaccaggccagcgcctggctgaccagacagggcagcttccagggcggcttcagaagcacccaggacaccgtgatcgccctggacgccctgagcgcctactggatcgccagccacaccaccgaggagagaggcctgaacgtgaccctgagcagcaccggcagaaacggcttcaagagccacgccctgcagctgaacaacagacagatcagaggcctggaggaggagctgcagttcagcctgggcagcaagatcaacgtgaaggtgggcggcaacagcaagggcaccctgaaggtgctgagaacctacaacgtgctggacatgaagaacaccacctgccaggacctgcagatcgaggtgaccgtgaagggccacgtggagtacaccatggaggccaacgaggactacgaggactacgagtacgacgagctgcccgccaaggacgaccccgacgcccccctgcagcccgtgacccccctgcagctgttcgagggcagaagaaacagaagaagaagagaggcccccaaggtggtggaggagcaggagagcagagtgcactacaccgtgtgcatctggagaaacggcaaggtgggcctgagcggcatggccatcgccgacgtgaccctgctgagcggcttccacgccctgagagccgacctggagaagctgaccagcctgagcgacagatacgtgagccacttcgagaccgagggcccccacgtgctgctgtacttcgacagcgtgcccaccagcagagagtgcgtgggcttcgaggccgtgcaggaggtgcccgtgggcctggtgcagcccgccagcgccaccctgtacgactactacaaccccgagagaagatgcagcgtgttctacggcgcccccagcaagagcagactgctggccaccctgtgcagcgccgaggtgtgccagtgcgccgagggcaagtgccccagacagagaagagccctggagagaggcctgcaggacgaggacggctacagaatgaagttcgcctgctactaccccagagtggagtacggcttccaggtgaaggtgctgagagaggacagcagagccgccttcagactgttcgagaccaagatcacccaggtgctgcacttcaccaaggacgtgaaggccgccgccaaccagatgagaaacttcctggtgagagccagctgcagactgagactggagcccggcaaggagtacctgatcatgggcctggacggcgccacctacgacctggagggccacccccagtacctgctggacagcaacagctggatcgaggagatgcccagcgagagactgtgcagaagcaccagacagagagccgcctgcgcccagctgaacgacttcctgcaggagtacggcacccagggctgccaggtgtag

SEQ ID NO: 171607 - protein, 1598 aa, Artificial Sequence
  derived and/or modified sequence
MDLSALRVEEVQNVINAMQKILECPICLELIKEPVSTKCDHIFCKFCMLKLLNQKKGPSQCPLCKNDITKRSLQESTRFSQLVEELLKIICAFQLDTGLEYANSYNFAKKENNSPEHLKDEVSIIQSMGYRNRAKRLLQSEPENPSLQETSLSVQLSNLGTVRTLRTKQRIQPQKTSVYIELGSDSSEDTVNKATYCSVGDQELLQITPQGTRDEISLDSAKKAACEFSETDVTNTEHHQPSNNDLNTTEKRAAERHPEKYQGSSVSNLHVEPCGTNTHASSLQHENSSLLLTKDRMNVEKAEFCNKSKQPGLARSQHNRWAGSKETCNDRRTPSTEKKVDLNADPLCERKEWNKQKLPCSENPRDTEDVPWITLNSSIQKVNEWFSRSDELLGSDDSHDGESESNAKVADVLDVLNEVDEYSGSSEKIDLLASDPHEALICKSERVHSKSVESNIEDKIFGKTYRKKASLPNLSHVTENLIIGAFVTEPQIIQERPLTNKLKRKRRPTSGLHPEDFIKKADLAVQKTPEMINQGTNQTEQNGQVMNITNSGHENKTKGDSIQNEKNPNPIESLEKESAFKTKAEPISSSISNMELELNIHNSKAPKKNRLRRKSSTRHIHALELVVSRNLSPPNCTELQIDSCSSSEEIKKKKYNQMPVRHSRNLQLMEGKEPATGAKKSNKPNEQTSKRHDSDTFPELKLTNAPGSFTKCSNTSELKEFVNPSLPREEKEEKLETVKVSNNAEDPKDLMLSGERVLQTERSVESSSISLVPGTDYGTQESISLLEVSTLGKAKTEPNKCVSQCAAFENPKGLIHGCSKDNRNDTEGFKYPLGHEVNHSRETSIEMEESELDAQYLQNTFKVSKRQSFAPFSNPGNAEEECATFSAHSGSLKKQSPKVTFECEQKEENQGKNESNIKPVQTVNITAGFPVVGQKDKPVDNAKCSIKGGSRFCLSSQFRGNETGLITPNKHGLLQNPYRIPPLFPIKSFVKTKCKKNLLEENFEEHSMSPEREMGNENIPSTVSTISRNNIRENVFKEASSSNINEVGSSTNEVGSSINEIGSSDENIQAELGRNRGPKLNAMLRLGVLQPEVYKQSLPGSNCKHPEIKKQEYEEVVQTVNTDFSPYLISDNLEQPMGSSHASQVCSETPDDLLDDGEIKEDTSFAENDIKESSAVFSKSVQKGELSRSPSPFTHTHLAQGYRRGAKKLESSEENLSSEDEELPCFQHLLFGKVNNIPSQSTRHSTVATECLSKNTEENLLSLKNSLNDCSNQVILAKASQEHHLSEETKCSASLFSSQCSELEDLTANTNTQDPFLIGSSKQMRHQSESQGVGLSDKELVSDDEERGTGLEENNQEEQSMDSNLGEAASGCESETSVSEDCSGLSSQSDILTTQQRDTMQHNLIKLQQEMAELEAVLEQHGSQPSNSYPSIISDSSALEDLRNPEQSTSEKGVTQSIKERKMLNEHDFEVRGDVVNGRNHQGPKRARESQDRKIFRGLEICCYGPFTNMPTDQLEWMVQLCGASVVKELSSFTLGTGVHPIVVVQPDAWTEDNGFHAIGQMCEAPVVTREWVLDSVALYQCQELDTYLIPQIPHSHY

SEQ ID NO: 171608 - protein, 1863 aa, Artificial Sequence
  derived and/or modified sequence
MDLSALRVEEVQNVINAMQKILECPICLELIKEPVSTKCDHIFCKFCMLKLLNQKKGPSQCPLCKNDITKRSLQESTRFSQLVEELLKIICAFQLDTGLEYANSYNFAKKENNSPEHLKDEVSIIQSMGYRNRAKRLLQSEPENPSLQETSLSVQLSNLGTVRTLRTKQRIQPQKTSVYIELGSDSSEDTVNKATYCSVGDQELLQITPQGTRDEISLDSAKKAACEFSETDVTNTEHHQPSNNDLNTTEKRAAERHPEKYQGSSVSNLHVEPCGTNTHASSLQHENSSLLLTKDRMNVEKAEFCNKSKQPGLARSQHNRWAGSKETCNDRRTPSTEKKVDLNADPLCERKEWNKQKLPCSENPRDTEDVPWITLNSSIQKVNEWFSRSDELLGSDDSHDGESESNAKVADVLDVLNEVDEYSGSSEKIDLLASDPHEALICKSERVHSKSVESNIEDKIFGKTYRKKASLPNLSHVTENLIIGAFVTEPQIIQERPLTNKLKRKRRPTSGLHPEDFIKKADLAVQKTPEMINQGTNQTEQNGQVMNITNSGHENKTKGDSIQNEKNPNPIESLEKESAFKTKAEPISSSISNMELELNIHNSKAPKKNRLRRKSSTRHIHALELVVSRNLSPPNCTELQIDSCSSSEEIKKKKYNQMPVRHSRNLQLMEGKEPATGAKKSNKPNEQTSKRHDSDTFPELKLTNAPGSFTKCSNTSELKEFVNPSLPREEKEEKLETVKVSNNAEDPKDLMLSGERVLQTERSVESSSISLVPGTDYGTQESISLLEVSTLGKAKTEPNKCVSQCAAFENPKGLIHGCSKDNRNDTEGFKYPLGHEVNHSRETSIEMEESELDAQYLQNTFKVSKRQSFAPFSNPGNAEEECATFSAHSGSLKKQSPKVTFECEQKEENQGKNESNIKPVQTVNITAGFPVVGQKDKPVDNAKCSIKGGSRFCLSSQFRGNETGLITPNKHGLLQNPYRIPPLFPIKSFVKTKCKKNLLEENFEEHSMSPEREMGNENIPSTVSTISRNNIRENVFKEASSSNINEVGSSTNEVGSSINEIGSSDENIQAELGRNRGPKLNAMLRLGVLQPEVYKQSLPGSNCKHPEIKKQEYEEVVQTVNTDFSPYLISDNLEQPMGSSHASQVCSETPDDLLDDGEIKEDTSFAENDIKESSAVFSKSVQKGELSRSPSPFTHTHLAQGYRRGAKKLESSEENLSSEDEELPCFQHLLFGKVNNIPSQSTRHSTVATECLSKNTEENLLSLKNSLNDCSNQVILAKASQEHHLSEETKCSASLFSSQCSELEDLTANTNTQDPFLIGSSKQMRHQSESQGVGLSDKELVSDDEERGTGLEENNQEEQSMDSNLGEAASGCESETSVSEDCSGLSSQSDILTTQQRDTMQHNLIKLQQEMAELEAVLEQHGSQPSNSYPSIISDSSALEDLRNPEQSTSEKAVLTSQKSSEYPISQNPEGLSADKFEVSADSSTSKNKEPGVERSSPSKCPSLDDRWYMHSCSGSLQNRNYPSQEELIKVVDVEEQQLEESGPHDLTETSYLPRQDLEGTPYLESGISLFSDDPESDPSEDRAPESARVGNIPSSTSALKVPQLKVAESAQSPAAAHTTDTAGYNAMEESVSREKPELTASTERVNKRMSMVVSGLTPEEFMLVYKFARKHHITLTNLITEETTHVVMKTDAEFVCERTLKYFLGIAGGKWVVSYFWVTQSIKERKMLNEHDFEVRGDVVNGRNHQGPKRARESQDRKIFRGLEICCYGPFTNMPTDQLEWMVQLCGASVVKELSSFTLGTGVHPIVVVQPDAWTEDNGFHAIGQMCEAPVVTREWVLDSVALYQCQELDTYLIPQIPHSHY

SEQ ID NO: 171609 - protein, 222 aa, Artificial Sequence
  derived and/or modified sequence
MDLSALRVEEVQNVINAMQKILECPICLELIKEPVSTKCDHIFCKFCMLKLLNQKKGPSQCPLCKNDITKRSLQESTRFSQLVEELLKIICAFQLDTGLEYANSYNFAKKENNSPEHLKDEVSIIQSMGYRNRAKRLLQSEPENPSLETSLSVQLSNLGTVRTLRTKQRIQPQKTSVYIELGSDSSEDTVNKATYCSVGDQELLQITPQGTRDEISLDSAKK

SEQ ID NO: 171610 - protein, 622 aa, Artificial Sequence
  derived and/or modified sequence
MDLSALRVEEVQNVINAMQKILECPICLELIKEPVSTKCDHIFCKSLQESTRFSQLVEELLKIICAFQLDTGLEYANSYNFAKKENNSPEHLKDEVSIIQSMGYRNRAKRLLQSEPENPSLQETSLSVQLSNLGTVRTLRTKQRIQPQKTSVYIELGSDSSEDTVNKATYCSVGDQELLQITPQGTRDEISLDSAKKAACEFSETDVTNTEHHQPSNNDLNTTEKRAAERHPEKYQGSSVSNLHVEPCGTNTHASSLQHENSSLLLTKDRMNVEKAEFCNKSKQPGLARSQHNRWAGSKETCNDRRTPSTEKKVDLNADPLCERKEWNKQKLPCSENPRDTEDVPWITLNSSIQKVNEWFSRSDELLGSDDSHDGESESNAKVADVLDVLNEVDEYSGSSEKIDLLASDPHEALICKSERVHSKSVESNIEDKIFGKTYRKKASLPNLSHVTENLIIGAFVTEPQIIQERPLTNKLKRKRRPTSGLHPEDFIKKADLAVQKTPEMINQGTNQTEQNGQVMNITNSGHENKTKGDSIQNEKNPNPIESLEKESAFKTKAEPISSSISNMELELNIHNSKAPKKNRLRRKSSTRHIHALELVVSRNLSPPNCTELQIDSCSSSE

SEQ ID NO: 171611 - protein, 59 aa, Artificial Sequence
  derived and/or modified sequence
MDLSALRVEEVQNVINAMQKILECPICLELIKEPVSTKCDHIFCKVLLCCPSWSTVVRS

SEQ ID NO: 171612 - DNA, 4704 bp, Artificial Sequence
  derived and/or modified sequence
atgaatgtagagaaggctgaattttgcaataaatcgaagcagccaggtcttgctagaagccagcataatcgatgggccggtagtaaggagacctgtaacgaccgtcgcacaccgagcaccgaaaagaaagtggacctaaacgctgacccactgtgcgagcggaaggaatggaacaagcagaagctgccctgcagcgagaatcctagagatacagaggacgtgccctggatcaccttgaactcttccatccaaaaagtgaatgaatggttttctaggtccgatgagttgctgggctcagatgattcccacgacggcgagagcgaatctaatgctaaggtcgccgatgtcttggacgtcctgaatgaggtcgacgagtatagtggctcttcagagaaaatagacctcttggcctccgatcctcacgaagcactgatctgcaaaagtgagcgagtccactctaaaagtgtggaatctaacatcgaggacaagattttcgggaaaacctatcgaaagaaagcctccctgcctaacctgagccacgtgactgagaaccttattatcggggcattcgtaacagagccccagattattcaggagaggccgttaacaaacaaactgaagcgcaagaggaggcctactagcggtctgcaccctgaagattttattaagaaggctgatctggcagtgcagaaaacccccgagatgattaaccaaggcactaaccagactgagcagaacggacaggtaatgaatataactaactcagggcatgaaaataagaccaagggggattccatccagaatgagaagaaccctaatccaatcgaatcactagagaaagagtccgcctttaagaccaaagcggaaccaatctcttctagtataagcaacatggaactcgagctgaatatccacaattctaaggcccctaaaaagaatcgtctcagacgtaaatcttctacacggcacatccatgccctcgagctcgtggtttcaagaaacttgtcccctcccaattgcacagagctgcagatagactcatgtagctcttctgaagagataaaaaaaaaaaagtacaatcagatgccagtgagacacagccgtaatctccagttgatggagggcaaagagccagcgacgggcgcgaaaaagtccaataagccaaatgaacagaccagcaaacggcatgactccgacacattcccggagttgaagctcacgaacgctcccggatcctttaccaagtgttctaataccagtgagttaaaagaatttgtgaatcccagcttgcctagagaagaaaaggaagaaaagctagagacagttaaggtttccaacaatgcggaagaccccaaagatctgatgctgtcgggagagagagtgttacagacagaaagatcggtggaatcctctagtatctcactagtcccagggacggactatgggacacaagagagcatctccctgctggaggtctccaccttgggtaaggcaaagaccgagccaaataaatgcgtttctcaatgcgccgcatttgagaatcctaagggacttattcacggctgcagcaaggacaaccggaacgacaccgagggctttaagtacccactcggccacgaggtaaaccactcgagggagacaagcatcgagatggaagaaagcgaactggacgcccaatatttgcagaatacttttaaagtgtcaaaaagacaatcgtttgcccccttcagtaatcccgggaatgccgaagaagaatgcgctacatttagtgcccattcagggtccctgaagaagcaaagcccaaaggtgacttttgagtgtgagcagaaggaggagaaccagggtaagaacgaatctaatatcaaaccagtgcagactgttaacattacagcaggcttcccggtggtggggcagaaagataagccagtggataatgccaagtgttcaatcaaaggggggagccggttttgcctatcatctcagttcagaggaaatgaaactggcctgatcacaccaaacaaacatggcctgctgcagaatccatatagaatacctccgttatttccaattaagtcttttgtcaaaacgaagtgtaaaaagaatctccttgaggagaatttcgaggagcactctatgagccctgagagggaaatgggaaacgagaacatcccatcaaccgtcagcacgatctcaaggaacaacataagggaaaatgtctttaaggaggcatcttcctcgaacattaacgaagtcggctctagtaccaatgaggtgggtagctccataaatgagataggttcaagcgacgagaatatacaagcagagctgggccgaaatcgagggcctaagttgaacgcaatgctgaggcttggtgtgctacagcctgaggtgtataagcaatcgctccctggaagtaattgtaagcaccctgaaatcaagaagcaggagtacgaggaagtggtgcagacagtgaacaccgatttctcaccctacctgattagcgataacttggaacagccaatggggagctctcacgccagccaggtgtgcagcgaaaccccggacgacctgctggatgacggcgaaatcaaagaagacactagcttcgcagaaaatgatattaaagaatcgtcagcagtgtttagcaagagtgtgcaaaaaggagagctgtcccgcagcccctccccattcacccatacccacttggcccaagggtatcggagaggagccaagaaattggagtctagtgaagagaatttgtcatccgaagacgaagagctgccatgttttcaacacctgctctttggcaaggtcaacaatataccttcccagagcactcggcacagcactgtcgcaactgagtgcctgagcaaaaacaccgaggaaaacctgttgagcctgaaaaacagtctgaatgactgtagcaaccaggtcatcttagccaaagccagtcaggaacaccacctgagcgaagaaacgaagtgttcggcgtcccttttctctagccagtgttcggaactcgaagacctaaccgcaaataccaacactcaggatccattcctgataggctcaagcaagcagatgagacatcagtctgagagccaaggcgtgggactatccgataaagaactagtgtccgatgacgaggagcggggcactggactggaggagaataaccaagaggagcagtcaatggatagcaatttgggggaagcagcctcaggctgcgagagcgagactagtgtgagcgaggactgctctggattgagttcccagtcagacatccttactacacagcagcgggacactatgcagcacaatcttattaaactgcagcaggaaatggctgagctcgaggccgtgctagaacagcatggctcccagccctcaaacagctaccctagcataatctctgactcgtctgccctggaagacctgagaaaccccgagcagtctacttcggaaaaagcagtgctaactagccagaagtcttccgagtacccaattagccagaacccagagggcctgagcgccgacaaattcgaagttagcgccgactcctccaccagcaagaataaggagcctggcgtggagagaagcagccctagcaagtgcccgtcattagatgacaggtggtacatgcatagctgttccggaagtttgcagaataggaattaccccagccaggaagaactgatcaaggtcgtagacgttgaagaacagcagctggaggagagtgggccacacgatcttaccgagacgtcctatttacccaggcaagatctcgaagggaccccatacttggaaagcgggattagtctttttagcgacgaccccgagtctgatccctcagaggatcgtgctcctgaatccgcacgggtgggaaatatcccatcatccacaagcgccctgaaggtgcctcagttgaaggtcgccgagtcagcacaatcccctgccgccgcccacactactgatactgctggctacaacgccatggaggaatcagtctcccgcgaaaagccggaactcacagcatccactgagagggtgaataaaagaatgtcaatggtagtaagtggccttaccccagaggaatttatgttagtttataaattcgcccggaaacaccatatcaccctgaccaatcttatcaccgaagagactactcacgtcgtgatgaaaaccgatgccgagttcgtgtgcgagcggacgctcaaatatttcctgggaatcgccggcggtaagtgggtcgtgtcttacttttgggtgactcagtctattaaggagagaaagatgttgaatgaacacgactttgaggtccgaggggatgtcgttaatggtcgtaaccatcagggacctaaaagagccagagagtcccaggatcggaaaatctttcgcggattggaaatttgttgttatgggcccttcactaacatgcctactgatcaactggaatggatggttcagctgtgtggcgccagcgtggtgaaggagctgagttcatttaccctgggcacgggtgtacaccctatagttgtggtacagccggacgcatggactgaagataacggcttccatgcaattggtcagatgtgcgaggctcccgtggtgactagggaatgggtcctggacagcgtcgcactctaccaatgccaggagttagacacatatttgatcccgcaaattccccacagtcattactag

SEQ ID NO: 171613 - DNA, 4797 bp, Artificial Sequence
  derived and/or modified sequence
atggacctgtcggctttaagggtcgaggaagtgcaaaacgtgattaacgctatgcagaaaattcttgaatgtccaatttgtttagaactgatcaaggaacccgtctctaccaagtgcgatcacatcttctgcaagttctgtatgcttaagcttctaaaccagaagaaaggcccgagccaatgtccactttgcaaaaatgacatcaccaagcgttcgctgcaggagtcaacccggttttcccagctggtggaggaactgttgaagatcatttgtgcttttcagctggatacaggcttagaatacgccaactcttataactttgctaagaaagaaaacaactcccctgaacacctaaaagatgaggtgtccatcattcagtctatggggtatagaaacagggcaaagaggcttctgcagagcgagcctgaaaacccctcactgcaggaaacaagcttgtcagtgcagttaagcaatctgggtacggtgagaacactgagaacaaaacaacgaatccagccacagaaaacttccgtatacattgaactcggcagcgattcatcagaggatacagtcaacaaggctacctattgctctgtcggggaccaggagctcctgcagatcacacctcagggaacgcgagatgaaatcagcttggattctgccaaaaaagcagcttgcgagttctccgaaactgacgtgactaataccgagcaccatcagccaagcaataacgacctcaataccaccgaaaagagggccgccgaaaggcaccccgagaaatatcaaggaagctctgtgtcaaatctgcatgttgagccctgcgggaccaatacacacgcgagcagtctccagcatgagaatagctccctcctactcacaaaggatcgcatgaacgtcgagaaggctgagttttgcaacaaaagtaagcagccgggactcgcccgcagtcagcacaatcgatgggccgggtcaaaggaaacgtgcaacgacaggcgcaccccatcaacagagaaaaaggtggatctgaatgccgaccctctctgtgaaaggaaagagtggaacaaacagaaactcccttgctctgaaaacccccgggacactgaggacgtgccatggattacactgaactccagtattcagaaagtgaacgagtggttttccaggagtgacgagcttttgggtagtgatgacagccatgacggcgagagcgaatctaatgcaaaggtcgcagacgtcctggatgttctgaatgaagtggatgaatactccggcagctctgaaaagatcgatctcctagccagcgacccacacgaagccctaatttgcaaaagcgagcgggtgcactccaaaagtgtagagagcaacatagaagacaagatcttcgggaaaacgtacagaaaaaaggcaagcctacccaatttgtcccatgtaaccgagaacttaataatcggggcatttgtcaccgaacctcagattattcaagaacggcccttgaccaacaaactaaagaggaagcgccgccccacaagcgggctacaccctgaagacttcatcaagaaagcagatctggcggtgcagaagacaccggaaatgatcaaccaaggcacgaatcaaaccgaacagaatggacaagtgatgaacattacaaatagtggacatgaaaacaaaacaaaaggagatagcatccaaaacgagaaaaatccaaaccctatcgagtcactggaaaaggagtctgcattcaagaccaaggctgagcccatctccagtagtatctcaaatatggagctcgaactcaacattcacaattctaaagcgcccaagaaaaaccggctgaggcgcaagagttcgactaggcacatccacgctctcgaactggttgtgtctagaaatctgtcacccccgaattgcacagaacttcagatagacagttgcagttccagcgaggaaattaagaagaaaaaatacaatcagatgcctgttaggcactctcggaacctgcaactcatggaaggcaaggagcccgccaccggagccaagaaatctaataaaccgaacgagcaaacttccaagcgacatgattcagatacctttcctgaactgaaattgaccaatgcacccggctcgttcactaagtgttctaacacatccgagctcaaggagttcgtcaatccctcccttcctagggaggagaaagaagaaaagttggagacagtcaaagtgtcaaataacgcagaagatccgaaagatctcatgctgagcggcgaaagggtgcttcagaccgagcgtagcgtagagagctcttctatttccctggtgccaggaacagactacggcacccaggagtcgatttctctgctagaggtgtctaccttgggtaaagccaagaccgagcctaacaaatgcgtatctcagtgtgctgcttttgaaaatcccaagggactgatccacgggtgctctaaggataaccggaatgacacagaaggtttcaagtaccctctggggcatgaggtgaaccattctagggaaacgtccattgaaatggaagaaagcgagctggatgctcagtacctacagaatacttttaaggtgtctaagaggcagtccttcgctcctttctccaaccctggaaatgctgaagaagagtgtgccactttcagcgcacacagtgggtcactcaaaaagcaaagccccaaagtcacctttgaatgcgagcagaaagaggaaaatcagggaaaaaacgaatctaacattaagcctgtacagaccgtcaatatcaccgctggcttcccagtggttgggcagaaagacaagcctgtcgacaacgctaaatgcagcatcaaagggggttctaggttctgcttgagctcccagtttaggggtaacgagaccgggctcatcacaccgaacaagcatggattactccagaatccctacaggattcctccactgttccccatcaaaagctttgtgaagaccaagtgcaagaagaatctccttgaggagaacttcgaagagcactcaatgagtcctgagagagagatgggaaacgagaacatcccttctactgtaagtaccataagtcgcaataatattagggaaaatgtgttcaaagaggcttcttcaagcaatatcaatgaggtgggctcaagcacaaacgaggtggggtcatctatcaacgaaatcggcagctcggacgaaaacatacaggccgagctgggacggaaccgaggacccaaattgaacgctatgcttcgtttgggcgtcctccaacctgaagtgtataagcagagcctccccggctccaactgcaaacacccagagattaagaagcaagaatatgaagaagtggtgcagaccgtgaacacggacttctcaccatatctgattagtgataacctggaacagcccatggggtccagccacgcatctcaggtgtgcagcgagacgccagatgatctcttggacgacggtgagattaaagaagacacatcgttcgccgaaaacgacattaaggaatcttccgcagtgttttcaaaatctgtgcagaaaggtgaattgtcacgctccccatctcccttcacacatacccacctcgcccaggggtatcgaaggggagctaaaaagctagaaagttccgaagaaaatttatcctcggaagatgaggaactgccgtgtttccagcacttgctgttcggaaaggtcaacaatattccttcccagtccacgcggcacagcacagtagctacagagtgtctttctaagaatacagaagaaaacctgctgtcccttaaaaactcactgaatgattgtagtaatcaggttatcctcgccaaggctagtcaagagcatcacctatctgaggagacaaagtgctctgcttccctgtttagtagtcaatgtagtgaactggaagacctgaccgccaacacgaatacccaggaccccttcctgataggctctagcaagcaaatgaggcatcaatcggaatcacagggggtgggcctctctgacaaagagctggtctccgacgacgaggaacgggggaccggccttgaggagaacaaccaggaggaacagtccatggacagtaacctcggagaagctgcttctggatgcgagtccgaaacatcagtctccgaggattgctccggtttatcctcccagagtgatattctgacaacccagcagcgtgacaccatgcaacacaatctcataaagctccagcaggagatggccgagcttgaggctgtgttggaacaacacggtagccagcccagtaattcttatccaagtatcatttctgactcatcagcccttgaggatctgcgaaatcccgaacagagtaccagcgaaaagggagttacgcagtccatcaaagaacggaagatgctcaatgagcacgacttcgaggtccggggcgacgtcgtgaatggacggaaccaccagggtcctaaaagagcaagagagtcacaggatcgcaaaatcttccggggactcgagatctgttgttacgggcctttcaccaacatgccaactgatcagctggagtggatggtgcagttatgcggcgcatccgttgttaaagaactgagctcattcacactgggcaccggagtgcatccaatcgtggtggtgcagcccgacgcatggaccgaagataatggcttccatgctatcggtcagatgtgtgaggcaccagttgttacccgtgaatgggtgctagacagtgtagctctctaccagtgtcaggagctcgatacatatttgatcccccagatcccccactcacattactag

SEQ ID NO: 171614 - DNA, 5592 bp, Artificial Sequence
  derived and/or modified sequence
atggacttgtccgccttacgggtcgaagaggtgcagaacgtgattaatgcgatgcagaagatactggagtgtccgatttgccttgaactgattaaggaacccgtgtccactaagtgtgaccacatcttttgcaagttttgcatgttaaagctgttaaatcagaagaaggggccatctcaatgccctctatgcaaaaacgacattaccaagagaagtttacaggagagtacccgcttttcacagttggtggaggaactgctgaaaataatttgtgcgttccagctggacacaggcctcgagtacgctaatagctataactttgccaagaaggagaacaactcgcctgagcacctgaaggatgaggtgtccattatccagagtatgggctaccggaatcgggcaaagagactactccaatccgaacctgaaaaccccagcctgcaggaaacctctctgtcagtgcaactttctaacctaggcacagtccggaccctgcgcaccaagcagagaattcaacctcagaagacatctgtgtatatagagcttggctctgattcctctgaagacaccgttaacaaagcaacatattgctccgtgggggatcaggagctgctgcaaattaccccacagggaacccgagatgagattagtttggattcagcaaaaaaggcggcgtgcgaattctcagagacagacgtcaccaatacggaacatcatcaaccttccaacaacgacctgaacaccactgaaaaaagagcagctgagaggcaccccgagaaatatcaggggtcctcagtaagtaatcttcacgtcgaaccatgcggcacgaatacccatgcaagttccctccagcatgaaaacagttccctgctcctcactaaggacagaatgaatgttgaaaaagccgagttctgtaataaatcaaagcaaccaggcctggcacggagccagcacaaccggtgggcggggtctaaggagacttgtaacgaccgtagaacacccagcaccgaaaagaaagtcgatctgaacgctgatcctctgtgcgagcgcaaagagtggaataagcagaaactgccgtgctctgagaaccccagggatacagaagatgtcccctggattaccttgaactcgtccattcaaaaagtaaacgaatggtttagcagaagtgatgagctgcttgggtcagacgacagccatgatggggaatccgaaagtaacgccaaagttgccgatgttctggatgtacttaacgaggtggatgagtacagcggaagctccgagaaaatcgatctcttggcctctgacccacacgaagcacttatctgtaagtctgagcgggtccactctaagagcgtcgagtcaaacatcgaggataagatttttggtaagacttatcggaagaaagcctctctccccaacttatcccacgtcacggagaaccttatcataggcgcctttgtaactgagccacagatcattcaggagcgacccctgaccaataagctaaagaggaaaaggaggcccactagcggtcttcaccctgaggactttattaaaaaggcagaccttgccgttcaaaagacgccagaaatgattaatcaggggacaaatcaaacggaacagaacggacaggtgatgaacatcacaaattccgggcacgagaacaagactaaaggtgacagcattcagaacgaaaagaatcccaacccaattgagtctttggagaaagaaagtgctttcaagacaaaagcagagcctatcagtagctccataagtaatatggagctcgaacttaacatccacaactccaaagctcccaaaaagaataggctccggcgtaagtcaagcaccagacatattcacgccctcgagctggtggtatctcgcaacttgagcccacctaactgtacggaactgcagattgatagctgcagtagtagcgaggaaatcaaaaagaaaaagtataatcagatgcctgtgcgccattccagaaacttgcagctgatggaggggaaggagcctgcaaccggggcgaagaagagcaacaagccaaatgaacagacttcaaaacgtcatgactcagatacctttcctgagttaaagctcaccaacgctcccggaagcttcactaagtgcagcaacacctctgaacttaaagaattcgttaaccccagtcttcccagggaagaaaaggaggaaaaactcgagactgtgaaggtaagtaacaatgcagaggatccaaaagatctcatgctgtccggagaacgtgtccttcaaacagaacgatccgtggaaagtagctctatcagtttggtacctggtaccgattacggcactcaggagagcatatcattgctggaggtgagtaccctgggaaaagctaaaaccgagccaaataagtgcgtatcgcagtgtgcagctttcgaaaatcccaagggtctgattcatggctgctctaaggacaacagaaacgatacagagggttttaagtaccctttagggcatgaagtaaaccatagcagagaaacatctattgagatggaggagagcgagctagatgcccagtatctccagaacaccttcaaagtgtcaaagaggcaaagctttgcaccattctctaaccccggcaatgcggaggaggagtgtgccacgttcagtgcacatagcgggagtcttaagaagcagagcccaaaagtgacattcgaatgcgagcaaaaggaagaaaaccaggggaagaacgaatctaatatcaaacctgtccaaacagtgaacattactgcaggcttccccgtggtgggtcagaaagacaaaccggtcgacaacgcgaagtgtagcattaagggcggttcacgtttttgtcttagtagccagttcagaggcaatgaaactgggttaattaccccgaacaagcacgggctgcttcagaacccgtatcggataccgcctttgtttccgatcaaatcatttgtgaagacgaagtgcaagaaaaatctgctggaggaaaatttcgaagaacactccatgagtcccgagcgtgagatgggaaatgagaatatccctagcacagtttcaacgatctctaggaacaatatacgcgagaacgtattcaaagaggctagctcctccaacataaacgaggttgggtcttccaccaacgaagtaggtagttccataaatgaaatcggctcctccgacgaaaatattcaagctgagctggggcgtaatcgcggcccgaaactgaatgctatgctgcgtctgggggtcctgcagccagaggtgtataaacagtctttgcctggatcaaactgcaaacatccggaaatcaagaagcaggaatacgaggaagttgtgcagactgtcaacactgacttcagtccgtacctgatttccgataatctggagcagccaatgggttcttctcacgcctcacaagtgtgctccgaaacacctgatgacctgcttgatgacggagagatcaaggaggacacaagcttcgctgaaaacgacataaaggaatctagcgccgtcttcagtaagtccgtgcagaagggggaactgtcccgaagcccctctccgtttacccatacccacttagcacaaggatatcggagaggcgcaaagaagctggaatctagcgaggaaaacctctcctcagaagatgaagaactgccgtgttttcagcacctgctctttgggaaggtaaacaacataccatcacagagtactcgccactccacggtcgcaactgagtgtcttagcaagaacactgaagagaatttgctgtctttgaaaaacagcctgaacgactgctctaatcaagtgattctggctaaagcgtcgcaggagcaccacctgagtgaggaaactaagtgttccgcctcccttttcagctctcaatgttccgagctggaggaccttaccgctaacacgaacacacaagatccttttctgatcggctccagcaaacaaatgagacatcagtctgagagccagggggtaggcctgtccgataaggagctggtgagcgatgacgaagagaggggaactggcttggaagagaacaatcaggaagagcagagtatggactcaaacctgggcgaagccgcgagcggatgcgagagcgaaactagcgtgagtgaagattgcagcggtctgtcctcccagtcagacatcctgaccacccagcaaagagatacgatgcagcataacctgatcaagcttcagcaggagatggcagaactggaggccgttctcgagcagcatgggagtcagccttctaacagctacccttccatcattagtgatagctcggccctcgaggacctgaggaaccctgaacagtcaacgtccgagaaagctgtgctcacctcacagaagtccagtgagtatcccatttcccagaaccctgagggactgtctgccgataaattcgaggtctcagctgacagctcaacttcaaaaaacaaggaacccggcgtggagcggagttctccgagtaaatgcccttctttggatgaccgctggtacatgcacagctgttcgggttcgctgcagaatcgaaactacccctctcaggaggagctgataaaggtcgtggatgtggaagagcagcagctcgaagaaagcggcccccacgacttaacggaaacctcatacctgccccggcaagatctcgagggcacgccttatttggagtccggcatctccctgtttagcgatgatccagaatcagaccccagcgaagatagggctccggagagcgctagggttggtaacatccccagttccacttctgcgctgaaggtaccccagctgaaggttgcggaatctgctcagtcccctgctgctgctcacaccaccgatactgccggatataacgctatggaagaatctgtgtctagagaaaagcccgagctgacggcctcaacagagcgtgtgaacaaaaggatgtccatggtggtatctggccttacacctgaggaattcatgctcgtgtacaagtttgcaagaaaacaccacatcaccctgaccaacctgataaccgaggaaactacccacgttgtgatgaagaccgacgcagagttcgtttgtgagcgaaccttaaagtattttctgggcatcgccggaggtaaatgggtggtgtcctatttctgggtgacccagtccatcaaggagcgaaagatgttgaacgagcacgatttcgaggttagaggagatgttgtgaacggaagaaaccatcaaggcccgaagcgggccagagagtcccaagacagaaaaatattccgaggcctggaaatctgttgttacgggccttttacaaacatgccaacagatcaacttgaatggatggtgcaactttgcggagccagcgtcgtcaaagagctctccagctttaccttaggcactggagttcaccctatcgtggtcgtacagcctgacgcatggacagaggataacggctttcatgcaatagggcagatgtgcgaggctccagttgttacaagagagtgggtgctcgattccgtggctctgtatcaatgccaggagctggatacatatctgattcctcagattccccactcgcattactag

SEQ ID NO: 171615 - DNA, 1950 bp, Artificial Sequence
  derived and/or modified sequence
atggacctgtccgccttaagagtcgaagaagtacaaaacgtcatcaacgcgatgcagaagatcctggagtgccctatttgcctggagctgattaaggaacccgtgagtaccaaatgcgaccacattttttgtaaattttgcatgttgaaacttctgaaccagaaaaaaggacctagccaatgccctctctgcaagaacgacattactaaaaggtctcttcaggagtcaacacgcttttctcagttagtggaggagttactcaaaattatctgcgcctttcagctcgacaccggactggaatacgctaactcatataactttgccaagaaggagaacaatagccccgaacatctgaaggacgaagtcagcataatccagagcatggggtaccgaaaccgagcgaaaaggttgctccagtcggaacccgagaacccaagcctccaggagaccagtctcagtgtccaattgagtaatcttgggactgtgcggacacttcgaaccaaacaacgcatacagccccaaaaaaccagtgtatacatcgagctggggtcagattccagtgaagatactgtgaataaggcaacttactgcagtgtgggggaccaagaacttctgcagatcacgccgcagggcacccgggacgaaatttccttagatagtgcaaagaaagctgcttgtgaattctccgaaactgatgtgacaaacaccgagcaccaccagccctccaacaatgatttgaacactacagagaagcgtgccgcagagagacatccggaaaagtatcaggggtcttccgtgtctaatttacacgtggagccgtgcggaaccaatactcacgcctcttctcttcagcacgaaaacagcagtctgctccttacgaaagatagaatgaacgtggagaaagctgaattctgcaataagtctaaacagcctggacttgcaaggtcccagcataatcgctgggccggttctaaggaaacgtgtaatgaccgaagaaccccctccacggagaaaaaggtcgatttaaacgccgacccattgtgcgagcgcaaagagtggaataagcaaaagttaccctgctctgaaaatccccgggacactgaagatgtcccttggatcacccttaatagctccattcagaaggtgaacgagtggttttctagatccgatgagctgctgggcagcgacgactctcatgatggtgaaagtgagtccaacgcaaaagtggccgacgtgctggacgtgctcaacgaagttgacgaatacagtggatcttccgagaaaatagatctgctcgctagtgacccccacgaagcccttatttgcaagagcgaacgggttcactccaagtctgtagagtccaacatcgaggataagattttcggcaaaacctatagaaagaaggcctccttgccaaatctgtcccacgtgacggagaacctcatcattggggccttcgtgaccgagcctcagatcattcaggagcgtccactcacaaacaagctaaaaaggaaacggcggccaacaagcgggctacatcctgaggattttatcaaaaaagccgacctagctgtccaaaagactccagagatgattaatcagggaacgaaccagacagagcagaatgggcaggtgatgaacatcacgaattcaggccatgaaaacaagaccaagggcgatagcatccagaacgaaaagaaccccaacccaattgagagcctggagaaggagagcgcattcaaaaccaaggctgaacctattagcagcagcatctcaaatatggagctggaactcaacatacacaattccaaagcacccaaaaagaacagattgcggcgtaaaagctcaactaggcacatccatgctctggagttggtggtctccaggaacctttccccccccaactgcacagagctgcagattgacagctgttctagctcggaggaatag

SEQ ID NO: 171616 - DNA, 1869 bp, Artificial Sequence
  derived and/or modified sequence
atggacttgtccgccttacgggtagaggaagtgcagaatgtcatcaatgctatgcagaagatcttggaatgcccgatttgcctggagctgatcaaggaacccgtaagcacgaaatgtgatcatattttctgcaaatccttgcaagagtccacacggttctcgcaactggtggaggaactgctaaaaataatatgcgcttttcagcttgatacgggccttgaatacgccaattcctacaattttgcaaagaaggagaacaactctcccgaacacttaaaggacgaggtctctatcatccagtccatgggataccggaatcgcgcgaaacgcttgctccaatcagaaccagagaatccctctttgcaagaaacttcgctgtccgtccagctgtccaatctgggtacagtgcgcacactccggactaagcagaggatacaaccccaaaagacaagtgtatacattgagcttgggtccgactcgtccgaggacaccgtcaacaaggctacctattgctcagtgggcgaccaggagctcttgcaaatcacacctcagggaacacgggatgagatctcgttggatagtgctaaaaaggcggcttgcgaattctccgagactgatgttaccaacactgagcaccaccagccttccaacaacgatctgaacacaaccgaaaagcgcgcagctgaacgccaccccgagaagtaccagggttcctctgtctctaatctgcacgtcgaaccatgcggtacaaacactcacgcaagctccctgcagcacgagaatagtagtctcctgctgactaaggaccgtatgaatgtggagaaggctgaattctgcaacaagagcaagcaacctggcctggccagatcgcagcataaccgatgggcagggtccaaagagacctgtaacgaccgccgcactccttcgactgaaaaaaaagtcgatctgaatgccgacccgttgtgtgagcggaaagaatggaataagcagaagttaccctgctctgaaaatccccgtgacaccgaggatgttccctggatcactctcaattctagcatccagaaagttaacgagtggtttagtcgtagtgacgagctactggggtcagacgacagtcacgacggcgagagtgaatcaaatgccaaggtcgcggacgtgctcgacgtgctgaacgaggttgatgagtattcagggtcttccgagaaaatcgatttactagcatctgaccctcacgaggccctaatttgtaaatccgaaagggttcatagcaagtccgtggaatctaatatcgaggataagatcttcggtaaaacttatcgcaagaaggccagcttgccgaacctctcgcacgttacggagaatctcatcattggcgcattcgttaccgaaccacagattatccaggaacggccactgacaaacaagctgaaacgaaagcggagacccacaagcggtctccaccccgaggattttattaagaaagcggacctggcagtgcagaagactccagagatgattaatcaggggactaatcagaccgaacagaatgggcaggtgatgaatataacgaacagcgggcacgaaaacaagaccaagggtgatagcatacagaacgagaaaaaccccaacccaatcgagagcctggagaaggagtccgcctttaaaacaaaggcagagccaatctcttcctctatttcaaacatggagttggaactcaatatccacaatagtaaagcaccaaaaaaaaaccgacttcggcgaaaatcaagtactcgacacatccacgccctggagctggtcgtgagcaggaacctatctcctcccaattgcactgaactacagattgacagctgttcaagctcggagtag

SEQ ID NO: 171617 - DNA, 5451 bp, Artificial Sequence
  derived and/or modified sequence
atgctcaagcttttgaaccaaaaaaaggggccctcgcagtgtcccctttgcaaaaatgatattaccaagagaagtcttcaggagtccacccgcttcagccaactggtcgaagaactgcttaagattatctgtgcatttcagctggacaccggattggagtatgcaaattcctacaacttcgcaaaaaaggaaaataactcacccgaacatctgaaggacgaagttagcatcattcaatccatgggatatcggaatcgtgcgaaaagactgctgcaaagcgagccggagaacccatctcttcaagaaactagcctctctgttcagctgtcaaatctcggcaccgtccggactcttagaactaaacagagaattcagccccagaaaacctccgtctatatcgaactgggcagcgactcttctgaagacactgttaataaggccacttactgttccgtgggggaccaggaacttttgcagattaccccccagggtacgcgggacgaaatttctcttgatagcgctaagaaagccgcctgtgaattcagcgaaaccgatgtcacaaacactgagcaccatcagccatcaaacaatgatctgaatactactgaaaaaagggcagccgaacgccatccagaaaaatatcaaggaagctccgtatcaaatctgcatgtggagccttgtggcacgaacactcacgcttcctctctgcagcatgaaaactccagtcttttgctgaccaaggacaggatgaacgtagaaaaagccgaattctgtaacaaaagtaagcagccgggtcttgcacgctcccaacacaatcgctgggccggcagcaaggaaacctgtaacgatagaaggacaccatctacagaaaagaaagtcgatctgaacgcagaccctctttgtgagcggaaagagtggaacaagcagaaactcccctgctccgaaaatcccagggacaccgaagatgtaccttggattacgttaaattccagcattcaaaaggttaacgagtggttcagtcgaagcgacgagctcttgggcagcgatgactcccatgatggagagagcgaaagcaatgctaaggtcgctgatgttctcgatgtactcaatgaggtggacgagtattctggaagctcagagaaaatcgatttactggcctccgatccccacgaggccctgatttgtaagtcagagcgcgtgcactccaaatcggtcgaaagcaatatagaggacaagatatttgggaagacctaccgtaaaaaagcctctcttcccaacctctcccacgtgacagaaaaccttattatcggagccttcgtgacagaaccacaaataatccaggaacgccccctgaccaataagctgaaaagaaaacgcagaccgacatccggtttgcaccctgaggattttatcaaaaaggcagatttggctgtacaaaagactccagagatgattaatcaaggcaccaaccagaccgagcagaacggacaagtgatgaatatcacaaattctggccacgagaataaaaccaagggagacagcatccaaaatgaaaaaaacccaaaccccatagaaagcctagagaaggaaagcgcattcaagaccaaggccgagcccatttcctccagcatctctaacatggagcttgagctgaatattcataactcgaaggctcctaagaaaaacagattgagaagaaaaagctctactcggcatattcacgcactggaactggtggtttccagaaatctctctccgccaaactgtaccgaactgcagattgattcatgcagtagttctgaggagatcaaaaagaaaaaatataatcagatgcctgtgagacattcaaggaacttacagctgatggagggcaaagagccagccactggagcaaagaaatccaacaagcctaacgagcaaacaagcaagcgccatgactccgataccttccccgagctgaagctgaccaacgcacccggcagcttcactaaatgttcaaatacttcggagcttaaagagttcgtgaatccctcgcttcccagggaggagaaagaggagaagttggaaaccgtgaaagtgtccaataatgcagaggacccgaaagatctaatgctcagtggcgagagagtcctgcagaccgagcgtagtgtcgagtcatcatccatctccttggtgcccggtaccgattacgggacacaggaatcaatttctctgctggaggtgtctaccttgggaaaggccaagaccgagcccaataaatgcgttagtcagtgcgcagcatttgagaatccaaaggggctgattcacggatgcagtaaggataatcgcaacgacacggagggttttaagtatccgctcggtcatgaggtgaatcattcccgcgaaacaagcattgaaatggaagagagcgaactggacgcccagtatctgcagaatacctttaaagtgagtaagagacagtctttcgcccccttttctaatcctggcaatgccgaagaggaatgtgcaacctttagtgctcactcaggcagcctgaaaaagcagagccccaaggttacctttgagtgtgagcagaaggaggagaaccaggggaagaacgagtcaaacattaaaccagttcagacggttaacatcactgctggcttccctgttgtcggacaaaaagataaacccgtggacaacgccaaatgctcgattaaaggtggctcacggttctgcctttcaagtcagtttagaggcaacgagaccgggttgattactcctaataagcacggcttgcttcagaatccctacaggatccccccgctgtttccaatcaagagcttcgttaagactaaatgtaaaaaaaaccttctcgaagaaaatttcgaggaacactccatgtccccagagcgggagatggggaatgaaaatatccctagtaccgtgtccaccatttcacgcaacaatatcagggagaatgtttttaaggaggcctcctcaagtaacatcaatgaagtgggctcctccaccaacgaggtaggatccagcatcaatgaaatcggttcgtccgatgagaatattcaggccgagctgggaagaaatcgcggaccaaagctaaacgccatgcttagattgggtgtattacagccagaggtatataagcaaagtttacccggcagcaactgcaagcaccccgagataaaaaagcaggaatatgaagaagtggtccagactgtcaatacagatttcagcccgtatctcatatcagacaatctcgaacagcctatggggagcagccacgcctcccaggtttgtagtgaaacacctgacgaccttctcgacgacggagagatcaaggaagatacttcttttgcagagaatgacatcaaagagagttcggcagtgtttagtaaatcagtgcagaagggagaactgagtcggtcaccttctccatttactcatacacacctggctcagggatatcgtcgtggggccaaaaagctagagtcttccgaagaaaacctcagctcagaagatgaagagctgccgtgcttccagcacctgctgttcggaaaagtgaataatattcccagccaatctacacgtcattcaacagtcgcaactgagtgtctgtccaagaacacagaggaaaatcttctgtcccttaagaactccctgaacgattgcagtaatcaggtgatcctggccaaagctagtcaggagcatcacttatcggaggagaccaagtgctccgcctctctgttcagttcacagtgttccgaactggaagatctgactgccaacactaacacacaggaccccttcctgatcggtagcagtaagcagatgagacatcagagcgaaagtcagggggtgggcctgtctgataaagagctcgtcagtgatgatgaggaacgtggcaccggactcgaggaaaacaaccaggaagagcaaagtatggattcaaaccttggtgaagccgccagtgggtgcgagtctgagacgagcgttagcgaggattgctcgggactatcaagccagagcgacattctgaccacacaacagcgtgacacaatgcagcataacttgattaagctccagcaggagatggctgaactggaggcagtgctcgagcaacacggttcacagcccagcaacagctacccctccatcatctcagactcctccgccttggaggatctgaggaatcccgagcaatccacctcagagaaggctgtactgaccagtcagaaaagctcggagtacccgataagccagaacccggagggactttctgctgataagttcgaagtatccgctgactcgtctacgtcaaaaaacaaggaaccaggcgtggaaaggagctccccttccaagtgtccatccctggacgataggtggtatatgcattcctgtagcggtagcctccagaaccgcaattatccctcccaagaagagctgattaaggtggtagatgtcgaagaacagcaattggaggaaagcggcccgcatgatctcaccgagactagctacctgccaagacaggatcttgagggaaccccctatctcgagagcggaatcagcttgtttagcgacgaccccgagagcgaccccagcgaagacagagctcccgaaagcgctagagtgggaaacatacctagtagtaccagcgcattgaaagtcccccaactcaaagtggcagagtccgcgcaaagccccgcagctgctcatacaactgacaccgccggatataatgccatggaggaatccgtttccagggaaaagcccgagctgaccgcctctaccgagagagtgaacaagcgcatgtcaatggtggtgtctgggttaaccccagaggagtttatgttggtatacaagtttgcccgcaagcaccacatcacactgactaatttgattactgaggaaactacccacgtggtgatgaagacggacgcagagtttgtgtgtgagcgaacactaaaatacttcctggggattgccggcggaaagtgggtcgtgtcctatttctgggtgacccagtccatcaaagagcgtaaaatgttgaacgaacatgactttgaagtcagaggtgacgttgtgaacgggaggaatcaccagggaccaaaaagagcccgtgaaagccaagatcgtaaaatctttcgcggcctcgaaatctgttgttacggtccttttactaatatgcctacagaccagctagagtggatggtccagctgtgcggcgcaagtgtggtgaaggagctgagctccttcactcttggaaccggagttcatccgattgtagttgttcaaccagatgcctggactgaggataacggatttcacgccatcggacaaatgtgcgaagccccggtagtgaccagggagtgggtgttggactccgtcgctctttaccagtgtcaggaactggatacatacctgatcccgcagattccacactctcactattag

SEQ ID NO: 171618 - DNA, 1422 bp, Artificial Sequence
  derived and/or modified sequence
atggacctcagcgcactcagggtagaggaagtgcagaatgttattaatgcaatgcagaaaatcctggagtgccccatatgcctcgaactgattaaggagcccgtgtcgactaagtgcgaccatatcttttgtaaattttgtatgctcaaactgcttaaccagaaaaaaggtccttcacaatgtcctctttgcaagaatgatattactaagcgaagtcttcaggaaagcactagatttagtcagttagtagaagagcttctcaaaatcatttgcgccttccagctggacaccggcctggaatatgccaacagctacaatttcgccaagaaagaaaacaactctcccgaacatcttaaagatgaggtaagcatcatacagtctatggggtatcgcaatagggctaaaaggttgcttcagtccgaacctgagaaccccagccttcaggagacctcactctccgtacagctctccaatttgggaaccgtgcgtacattacggactaagcagcggattcagccccaaaagacttccgtgtacatcgagctgggatccgattcctctgaagacactgttaacaaagccacttactgctcagtgggagaccaggagctgctccagattacaccgcaaggaactcgggatgaaatttccctggattccgctaaaaaggccgcctgcgaattcagtgagactgacgtgaccaatactgagcatcaccagccaagcaataacgatctgaatacaacggaaaaacgagctgcagagagacaccctgaaaagtatcaggggtcaagcgttagcaacctgcacgtggagccgtgtggtaccaacacccatgcgtcctcacttcaacacgagaacagttcattgctgctgaccaaggataggatgaatgtcgagaaggctgaattctgcaataaatcaaagcagcctggcctggccaggtcccagcacaaccgctgggccggctctaaggaaacgtgcaatgatcgccgcactccctccaccgagaagaaggtggatttaaatgccgaccccctttgtgagcggaaagagtggaacaagcagaagctcccgtgttccgaaaatccacgcgataccgaagacgtgccatggatcactctgaactcgagtatacagaaagttaacgaatggttcagccggagcgatgagctgcttggaagtgatgattctcatgacggcgagtcggaaagcaatgccaaggtagcagacgtactggacgtgttgaacgaggtggacgagtactccgggagcagcgaaaaaattgacctactggcctcagatccacatgaggcactgatctgcaaatccgaaagggtgcactctaaatccgtggagagcaacatagaggacaagatatttgggaaaacgtatcgaaaaaaagccagcctcccgaactag

SEQ ID NO: 171619 - DNA, 4704 bp, Artificial Sequence
  derived and/or modified sequence
atgaatgtggagaaggccgagttctgcaacaagagcaagcagcccggcctggcccggagccagcacaaccgctgggccggcagcaaggagacctgcaatgacaggaggacccccagcacagagaagaaggtggacctgaatgctgaccccctgtgtgagaggaaggagtggaacaagcagaagctgccctgcagcgagaacccccgggacacagaagatgtgccctggatcaccctgaacagcagcatccagaaggtgaatgagtggttcagcagaagtgatgagctgctgggcagtgatgacagccatgatggagagagcgagagcaatgccaaggtggctgatgtgctggatgtgctgaatgaggtggatgagtacagcggcagcagcgagaagattgacctgctggccagtgacccccatgaggccctgatctgcaagtctgagcgggtgcacagcaagtctgtggagagcaacatcgaggacaagatctttgggaagacctacaggaagaaggccagcctgcccaacctgagccacgtgacagaaaatctcatcattggagcctttgtgacagagccccagatcatccaggagcggcccctgaccaacaagctgaagaggaagaggcggcccaccagcggcctgcaccctgaggacttcatcaagaaggctgacctggccgtgcagaagaccccagagatgatcaaccagggcaccaaccagacagagcagaatggccaggtgatgaacatcaccaacagcggccacgagaacaagaccaagggggacagcatccagaatgagaagaaccccaaccccatcgagagcctggagaaggagagcgccttcaagaccaaggccgagcccatcagcagcagcatcagcaacatggagctggagctgaacatccacaacagcaaggcccccaagaagaaccggctgcggaggaagagcagcaccaggcacatccacgccctggagctggtggtgtccaggaacctgagcccccccaactgcacagagctgcagattgacagctgcagcagcagcgaggagatcaagaagaagaagtacaaccagatgcctgtgcgccacagcaggaacctgcagctgatggagggcaaggagcccgccaccggggccaagaagagcaacaagcccaatgagcagaccagcaagagacatgacagcgacaccttccctgagctgaagctgaccaatgcccctggcagcttcaccaagtgcagcaacaccagcgagctgaaggagtttgtgaaccccagcctgccccgggaggagaaggaggagaagctggagaccgtgaaggtgagcaacaatgctgaggaccccaaggacctgatgctgtctggagagcgggtgctgcagacagagaggtctgtggagagcagcagcatcagcctggtgcctggaacagattatggcacccaggagagcatcagcctgctggaggtgtccaccctgggcaaggccaagacagagcccaacaagtgtgtgtcccagtgtgccgcctttgagaaccccaagggcctcatccacggctgcagcaaggacaacagaaatgacacagagggcttcaagtaccccctgggccacgaggtgaaccacagccgggagaccagcattgagatggaggagagcgagctggatgcccagtacctgcagaacaccttcaaggtgtccaagaggcagagctttgcccccttcagcaaccctggaaatgctgaggaggagtgtgccaccttcagcgcccacagcggcagcctgaagaagcagagccccaaggtgacctttgaatgtgagcagaaggaggagaaccagggcaagaatgaaagcaacatcaagcctgtgcagacagtgaacatcacagctggcttccctgtggtgggccagaaggacaagcctgtggacaatgccaagtgcagcatcaagggcggcagccgcttctgcctgagcagccagttcagaggaaatgaaacaggcctcatcacccccaacaagcacggcctgctgcagaacccctaccgcatccccccactcttccccatcaagagctttgtgaagaccaagtgcaagaagaacctgctggaggagaactttgaggagcacagcatgagccctgagcgggagatgggaaatgaaaacatccccagcacagtgtccaccatcagcaggaacaacatcagagaaaatgtgttcaaggaggccagcagcagcaacatcaatgaggtgggcagcagcaccaatgaggtgggcagcagcatcaatgaaattggcagcagtgatgagaacatccaggccgagctgggcaggaacagaggccccaagctgaatgccatgctgcggctgggcgtgctgcagcctgaggtgtacaagcagagcctgcccggcagcaactgcaagcaccctgagatcaagaagcaggagtatgaggaggtggtgcagacagtgaacacagacttcagcccctacctgatcagtgacaacctggagcagcccatgggcagcagccacgccagccaggtgtgcagcgagaccccagatgacctgctggatgatggagagatcaaggaggacaccagctttgctgaaaatgacatcaaggagagcagcgctgtgttcagcaagtctgtgcagaagggggagctgagccgcagccccagccccttcacccacacccacctggcccagggctacagaagaggagccaagaagctggagagcagcgaggagaacctgagcagtgaagatgaggagctgccctgcttccagcacctgctgtttgggaaggtgaacaacatccccagccagagcaccaggcacagcacagtggccacagagtgcctgagcaagaacacagaggagaacctgctgagcctgaagaacagcctgaatgactgcagcaaccaggtgatcctggccaaggccagccaggagcaccacctgtctgaggagaccaagtgcagcgccagcctcttcagcagccagtgcagcgagctggaggacctgacagccaacaccaacacccaggaccccttcctgattggcagcagcaagcagatgaggcaccagagcgagagccagggcgtgggcctgagtgacaaggagctggtgtctgatgatgaggagcggggcaccggcctggaggagaacaaccaggaggagcagagcatggacagcaacctgggggaggccgccagcggctgtgagagcgagacctctgtgtctgaggactgcagcggcctgagcagccagagcgacatcctgaccacccagcagagggacaccatgcagcacaacctgatcaagctgcagcaggagatggccgagctggaggccgtgctggagcagcacggcagccagcccagcaacagctaccccagcatcatcagtgacagcagcgccctggaggacctgagaaatcctgagcagagcaccagcgagaaggctgtgctgaccagccagaagagcagcgagtaccccatcagccagaaccctgagggcctgtctgctgacaagtttgaggtgtctgctgacagcagcaccagcaagaacaaggagcccggggtggagaggagcagccccagcaagtgccccagcctggatgaccgctggtacatgcacagctgcagcggcagcctgcagaacagaaactaccccagccaggaggagctgatcaaggtggtggatgtggaggagcagcagctggaggagagcggcccccatgacctgacagagaccagctacctgccccggcaggacctggagggcaccccctacctggagagcggcatcagcctcttcagtgatgatcctgagagtgaccccagtgaagatcgggcccctgagagcgcccgggtgggcaacatccccagcagcaccagcgccctgaaggtgccccagctgaaggtggccgagagcgcccagagccctgctgctgcccacaccacagacacagctggctacaatgccatggaggagagcgtgtcccgggagaagccagagctgacagccagcacagagcgggtgaacaagaggatgtccatggtggtgtctggcctgaccccagaggagttcatgctggtgtacaagtttgccaggaagcaccacatcaccctgaccaacctgatcacagaggagaccacccacgtggtgatgaagacagatgctgagtttgtgtgtgagaggaccctgaagtacttcctgggcattgctgggggcaagtgggtggtgtcctacttctgggtgacccagagcatcaaggagaggaagatgctgaatgaacatgactttgaggtgagaggagatgtggtgaatggaagaaaccaccagggccccaagagggcccgggagagccaggacaggaagatcttccggggcctggagatctgctgctacggccccttcaccaacatgcccacagaccagctggagtggatggtgcagctgtgtggggcctctgtggtgaaggagctgagcagcttcaccctgggcaccggggtgcaccccatcgtggtggtgcagccagatgcctggacagaagataatggcttccacgccatcggccagatgtgtgaggcccctgtggtgacccgggagtgggtgctggacagcgtggccctgtaccagtgccaggagctggacacctacctgatcccccagatcccccacagccactactag

SEQ ID NO: 171620 - DNA, 4797 bp, Artificial Sequence
  derived and/or modified sequence
atggacctgagcgccctgcgggtggaggaggtgcagaatgtcatcaatgccatgcagaagatcctggagtgccccatctgcctggagctgatcaaggagcctgtgtccaccaagtgtgaccacatcttctgcaagttctgcatgctgaagctgctgaaccagaagaagggccccagccagtgccccctgtgcaagaatgacatcaccaagaggagcctgcaggagagcacccgcttcagccagctggtggaggagctgctgaagatcatctgtgccttccagctggacaccggcctggagtatgccaacagctacaactttgccaagaaggagaacaacagccctgagcacctgaaggatgaggtgtccatcatccagagcatgggctacagaaacagagccaagaggctgctgcagagcgagcctgagaaccccagcctgcaggagaccagcctgtctgtgcagctgagcaacctgggcaccgtgaggaccctgcggaccaagcagaggatccagccccagaagacctctgtgtacatcgagctgggcagtgacagcagcgaggacacagtgaacaaggccacctactgcagcgtgggggaccaggagctgctgcagatcaccccccagggcaccagagatgagatcagcctggacagcgccaagaaggccgcctgtgagttcagcgagacagatgtgaccaacacagagcaccaccagcccagcaacaatgacctgaacaccacagagaagagagctgctgagcggcaccctgagaagtaccagggcagctctgtgagcaacctgcacgtggagccctgtggcaccaacacccacgccagcagcctgcagcacgagaacagcagcctgctgctgaccaaggacaggatgaatgtggagaaggccgagttctgcaacaagagcaagcagcccggcctggcccggagccagcacaaccgctgggccggcagcaaggagacctgcaatgacaggaggacccccagcacagagaagaaggtggacctgaatgctgaccccctgtgtgagaggaaggagtggaacaagcagaagctgccctgcagcgagaacccccgggacacagaagatgtgccctggatcaccctgaacagcagcatccagaaggtgaatgagtggttcagcagaagtgatgagctgctgggcagtgatgacagccatgatggagagagcgagagcaatgccaaggtggctgatgtgctggatgtgctgaatgaggtggatgagtacagcggcagcagcgagaagattgacctgctggccagtgacccccatgaggccctgatctgcaagtctgagcgggtgcacagcaagtctgtggagagcaacatcgaggacaagatctttgggaagacctacaggaagaaggccagcctgcccaacctgagccacgtgacagaaaatctcatcattggagcctttgtgacagagccccagatcatccaggagcggcccctgaccaacaagctgaagaggaagaggcggcccaccagcggcctgcaccctgaggacttcatcaagaaggctgacctggccgtgcagaagaccccagagatgatcaaccagggcaccaaccagacagagcagaatggccaggtgatgaacatcaccaacagcggccacgagaacaagaccaagggggacagcatccagaatgagaagaaccccaaccccatcgagagcctggagaaggagagcgccttcaagaccaaggccgagcccatcagcagcagcatcagcaacatggagctggagctgaacatccacaacagcaaggcccccaagaagaaccggctgcggaggaagagcagcaccaggcacatccacgccctggagctggtggtgtccaggaacctgagcccccccaactgcacagagctgcagattgacagctgcagcagcagcgaggagatcaagaagaagaagtacaaccagatgcctgtgcgccacagcaggaacctgcagctgatggagggcaaggagcccgccaccggggccaagaagagcaacaagcccaatgagcagaccagcaagagacatgacagcgacaccttccctgagctgaagctgaccaatgcccctggcagcttcaccaagtgcagcaacaccagcgagctgaaggagtttgtgaaccccagcctgccccgggaggagaaggaggagaagctggagaccgtgaaggtgagcaacaatgctgaggaccccaaggacctgatgctgtctggagagcgggtgctgcagacagagaggtctgtggagagcagcagcatcagcctggtgcctggaacagattatggcacccaggagagcatcagcctgctggaggtgtccaccctgggcaaggccaagacagagcccaacaagtgtgtgtcccagtgtgccgcctttgagaaccccaagggcctcatccacggctgcagcaaggacaacagaaatgacacagagggcttcaagtaccccctgggccacgaggtgaaccacagccgggagaccagcattgagatggaggagagcgagctggatgcccagtacctgcagaacaccttcaaggtgtccaagaggcagagctttgcccccttcagcaaccctggaaatgctgaggaggagtgtgccaccttcagcgcccacagcggcagcctgaagaagcagagccccaaggtgacctttgaatgtgagcagaaggaggagaaccagggcaagaatgaaagcaacatcaagcctgtgcagacagtgaacatcacagctggcttccctgtggtgggccagaaggacaagcctgtggacaatgccaagtgcagcatcaagggcggcagccgcttctgcctgagcagccagttcagaggaaatgaaacaggcctcatcacccccaacaagcacggcctgctgcagaacccctaccgcatccccccactcttccccatcaagagctttgtgaagaccaagtgcaagaagaacctgctggaggagaactttgaggagcacagcatgagccctgagcgggagatgggaaatgaaaacatccccagcacagtgtccaccatcagcaggaacaacatcagagaaaatgtgttcaaggaggccagcagcagcaacatcaatgaggtgggcagcagcaccaatgaggtgggcagcagcatcaatgaaattggcagcagtgatgagaacatccaggccgagctgggcaggaacagaggccccaagctgaatgccatgctgcggctgggcgtgctgcagcctgaggtgtacaagcagagcctgcccggcagcaactgcaagcaccctgagatcaagaagcaggagtatgaggaggtggtgcagacagtgaacacagacttcagcccctacctgatcagtgacaacctggagcagcccatgggcagcagccacgccagccaggtgtgcagcgagaccccagatgacctgctggatgatggagagatcaaggaggacaccagctttgctgaaaatgacatcaaggagagcagcgctgtgttcagcaagtctgtgcagaagggggagctgagccgcagccccagccccttcacccacacccacctggcccagggctacagaagaggagccaagaagctggagagcagcgaggagaacctgagcagtgaagatgaggagctgccctgcttccagcacctgctgtttgggaaggtgaacaacatccccagccagagcaccaggcacagcacagtggccacagagtgcctgagcaagaacacagaggagaacctgctgagcctgaagaacagcctgaatgactgcagcaaccaggtgatcctggccaaggccagccaggagcaccacctgtctgaggagaccaagtgcagcgccagcctcttcagcagccagtgcagcgagctggaggacctgacagccaacaccaacacccaggaccccttcctgattggcagcagcaagcagatgaggcaccagagcgagagccagggcgtgggcctgagtgacaaggagctggtgtctgatgatgaggagcggggcaccggcctggaggagaacaaccaggaggagcagagcatggacagcaacctgggggaggccgccagcggctgtgagagcgagacctctgtgtctgaggactgcagcggcctgagcagccagagcgacatcctgaccacccagcagagggacaccatgcagcacaacctgatcaagctgcagcaggagatggccgagctggaggccgtgctggagcagcacggcagccagcccagcaacagctaccccagcatcatcagtgacagcagcgccctggaggacctgagaaatcctgagcagagcaccagcgagaagggcgtgacccagagcatcaaggagaggaagatgctgaatgaacatgactttgaggtgagaggagatgtggtgaatggaagaaaccaccagggccccaagagggcccgggagagccaggacaggaagatcttccggggcctggagatctgctgctacggccccttcaccaacatgcccacagaccagctggagtggatggtgcagctgtgtggggcctctgtggtgaaggagctgagcagcttcaccctgggcactggagtgcaccccatcgtggtggtgcagccagatgcctggacagaggacaatggcttccacgccatcggccagatgtgtgaggcccctgtggtgacccgggagtgggtgctggacagcgtggccctgtaccagtgccaggagctggacacctacctgatcccccagatcccccacagccactactag

SEQ ID NO: 171621 - DNA, 5592 bp, Artificial Sequence
  derived and/or modified sequence
atggacctgagcgccctgcgggtggaggaggtgcagaatgtcatcaatgccatgcagaagatcctggagtgccccatctgcctggagctgatcaaggagcctgtgtccaccaagtgtgaccacatcttctgcaagttctgcatgctgaagctgctgaaccagaagaagggccccagccagtgccccctgtgcaagaatgacatcaccaagaggagcctgcaggagagcacccgcttcagccagctggtggaggagctgctgaagatcatctgtgccttccagctggacaccggcctggagtatgccaacagctacaactttgccaagaaggagaacaacagccctgagcacctgaaggatgaggtgtccatcatccagagcatgggctacagaaacagagccaagaggctgctgcagagcgagcctgagaaccccagcctgcaggagaccagcctgtctgtgcagctgagcaacctgggcaccgtgaggaccctgcggaccaagcagaggatccagccccagaagacctctgtgtacatcgagctgggcagtgacagcagcgaggacacagtgaacaaggccacctactgcagcgtgggggaccaggagctgctgcagatcaccccccagggcaccagagatgagatcagcctggacagcgccaagaaggccgcctgtgagttcagcgagacagatgtgaccaacacagagcaccaccagcccagcaacaatgacctgaacaccacagagaagagagctgctgagcggcaccctgagaagtaccagggcagctctgtgagcaacctgcacgtggagccctgtggcaccaacacccacgccagcagcctgcagcacgagaacagcagcctgctgctgaccaaggacaggatgaatgtggagaaggccgagttctgcaacaagagcaagcagcccggcctggcccggagccagcacaaccgctgggccggcagcaaggagacctgcaatgacaggaggacccccagcacagagaagaaggtggacctgaatgctgaccccctgtgtgagaggaaggagtggaacaagcagaagctgccctgcagcgagaacccccgggacacagaagatgtgccctggatcaccctgaacagcagcatccagaaggtgaatgagtggttcagcagaagtgatgagctgctgggcagtgatgacagccatgatggagagagcgagagcaatgccaaggtggctgatgtgctggatgtgctgaatgaggtggatgagtacagcggcagcagcgagaagattgacctgctggccagtgacccccatgaggccctgatctgcaagtctgagcgggtgcacagcaagtctgtggagagcaacatcgaggacaagatctttgggaagacctacaggaagaaggccagcctgcccaacctgagccacgtgacagaaaatctcatcattggagcctttgtgacagagccccagatcatccaggagcggcccctgaccaacaagctgaagaggaagaggcggcccaccagcggcctgcaccctgaggacttcatcaagaaggctgacctggccgtgcagaagaccccagagatgatcaaccagggcaccaaccagacagagcagaatggccaggtgatgaacatcaccaacagcggccacgagaacaagaccaagggggacagcatccagaatgagaagaaccccaaccccatcgagagcctggagaaggagagcgccttcaagaccaaggccgagcccatcagcagcagcatcagcaacatggagctggagctgaacatccacaacagcaaggcccccaagaagaaccggctgcggaggaagagcagcaccaggcacatccacgccctggagctggtggtgtccaggaacctgagcccccccaactgcacagagctgcagattgacagctgcagcagcagcgaggagatcaagaagaagaagtacaaccagatgcctgtgcgccacagcaggaacctgcagctgatggagggcaaggagcccgccaccggggccaagaagagcaacaagcccaatgagcagaccagcaagagacatgacagcgacaccttccctgagctgaagctgaccaatgcccctggcagcttcaccaagtgcagcaacaccagcgagctgaaggagtttgtgaaccccagcctgccccgggaggagaaggaggagaagctggagaccgtgaaggtgagcaacaatgctgaggaccccaaggacctgatgctgtctggagagcgggtgctgcagacagagaggtctgtggagagcagcagcatcagcctggtgcctggaacagattatggcacccaggagagcatcagcctgctggaggtgtccaccctgggcaaggccaagacagagcccaacaagtgtgtgtcccagtgtgccgcctttgagaaccccaagggcctcatccacggctgcagcaaggacaacagaaatgacacagagggcttcaagtaccccctgggccacgaggtgaaccacagccgggagaccagcattgagatggaggagagcgagctggatgcccagtacctgcagaacaccttcaaggtgtccaagaggcagagctttgcccccttcagcaaccctggaaatgctgaggaggagtgtgccaccttcagcgcccacagcggcagcctgaagaagcagagccccaaggtgacctttgaatgtgagcagaaggaggagaaccagggcaagaatgaaagcaacatcaagcctgtgcagacagtgaacatcacagctggcttccctgtggtgggccagaaggacaagcctgtggacaatgccaagtgcagcatcaagggcggcagccgcttctgcctgagcagccagttcagaggaaatgaaacaggcctcatcacccccaacaagcacggcctgctgcagaacccctaccgcatccccccactcttccccatcaagagctttgtgaagaccaagtgcaagaagaacctgctggaggagaactttgaggagcacagcatgagccctgagcgggagatgggaaatgaaaacatccccagcacagtgtccaccatcagcaggaacaacatcagagaaaatgtgttcaaggaggccagcagcagcaacatcaatgaggtgggcagcagcaccaatgaggtgggcagcagcatcaatgaaattggcagcagtgatgagaacatccaggccgagctgggcaggaacagaggccccaagctgaatgccatgctgcggctgggcgtgctgcagcctgaggtgtacaagcagagcctgcccggcagcaactgcaagcaccctgagatcaagaagcaggagtatgaggaggtggtgcagacagtgaacacagacttcagcccctacctgatcagtgacaacctggagcagcccatgggcagcagccacgccagccaggtgtgcagcgagaccccagatgacctgctggatgatggagagatcaaggaggacaccagctttgctgaaaatgacatcaaggagagcagcgctgtgttcagcaagtctgtgcagaagggggagctgagccgcagccccagccccttcacccacacccacctggcccagggctacagaagaggagccaagaagctggagagcagcgaggagaacctgagcagtgaagatgaggagctgccctgcttccagcacctgctgtttgggaaggtgaacaacatccccagccagagcaccaggcacagcacagtggccacagagtgcctgagcaagaacacagaggagaacctgctgagcctgaagaacagcctgaatgactgcagcaaccaggtgatcctggccaaggccagccaggagcaccacctgtctgaggagaccaagtgcagcgccagcctcttcagcagccagtgcagcgagctggaggacctgacagccaacaccaacacccaggaccccttcctgattggcagcagcaagcagatgaggcaccagagcgagagccagggcgtgggcctgagtgacaaggagctggtgtctgatgatgaggagcggggcaccggcctggaggagaacaaccaggaggagcagagcatggacagcaacctgggggaggccgccagcggctgtgagagcgagacctctgtgtctgaggactgcagcggcctgagcagccagagcgacatcctgaccacccagcagagggacaccatgcagcacaacctgatcaagctgcagcaggagatggccgagctggaggccgtgctggagcagcacggcagccagcccagcaacagctaccccagcatcatcagtgacagcagcgccctggaggacctgagaaatcctgagcagagcaccagcgagaaggctgtgctgaccagccagaagagcagcgagtaccccatcagccagaaccctgagggcctgtctgctgacaagtttgaggtgtctgctgacagcagcaccagcaagaacaaggagcccggggtggagaggagcagccccagcaagtgccccagcctggatgaccgctggtacatgcacagctgcagcggcagcctgcagaacagaaactaccccagccaggaggagctgatcaaggtggtggatgtggaggagcagcagctggaggagagcggcccccatgacctgacagagaccagctacctgccccggcaggacctggagggcaccccctacctggagagcggcatcagcctcttcagtgatgatcctgagagtgaccccagtgaagatcgggcccctgagagcgcccgggtgggcaacatccccagcagcaccagcgccctgaaggtgccccagctgaaggtggccgagagcgcccagagccctgctgctgcccacaccacagacacagctggctacaatgccatggaggagagcgtgtcccgggagaagccagagctgacagccagcacagagcgggtgaacaagaggatgtccatggtggtgtctggcctgaccccagaggagttcatgctggtgtacaagtttgccaggaagcaccacatcaccctgaccaacctgatcacagaggagaccacccacgtggtgatgaagacagatgctgagtttgtgtgtgagaggaccctgaagtacttcctgggcattgctgggggcaagtgggtggtgtcctacttctgggtgacccagagcatcaaggagaggaagatgctgaatgaacatgactttgaggtgagaggagatgtggtgaatggaagaaaccaccagggccccaagagggcccgggagagccaggacaggaagatcttccggggcctggagatctgctgctacggccccttcaccaacatgcccacagaccagctggagtggatggtgcagctgtgtggggcctctgtggtgaaggagctgagcagcttcaccctgggcaccggggtgcaccccatcgtggtggtgcagccagatgcctggacagaagataatggcttccacgccatcggccagatgtgtgaggcccctgtggtgacccgggagtgggtgctggacagcgtggccctgtaccagtgccaggagctggacacctacctgatcccccagatcccccacagccactactag

SEQ ID NO: 171622 - DNA, 1950 bp, Artificial Sequence
  derived and/or modified sequence
atggacctgagcgccctgcgggtggaggaggtgcagaatgtcatcaatgccatgcagaagatcctggagtgccccatctgcctggagctgatcaaggagcctgtgtccaccaagtgtgaccacatcttctgcaagttctgcatgctgaagctgctgaaccagaagaagggccccagccagtgccccctgtgcaagaatgacatcaccaagaggagcctgcaggagagcacccgcttcagccagctggtggaggagctgctgaagatcatctgtgccttccagctggacaccggcctggagtatgccaacagctacaactttgccaagaaggagaacaacagccctgagcacctgaaggatgaggtgtccatcatccagagcatgggctacagaaacagagccaagaggctgctgcagagcgagcctgagaaccccagcctgcaggagaccagcctgtctgtgcagctgagcaacctgggcaccgtgaggaccctgcggaccaagcagaggatccagccccagaagacctctgtgtacatcgagctgggcagtgacagcagcgaggacacagtgaacaaggccacctactgcagcgtgggggaccaggagctgctgcagatcaccccccagggcaccagagatgagatcagcctggacagcgccaagaaggccgcctgtgagttcagcgagacagatgtgaccaacacagagcaccaccagcccagcaacaatgacctgaacaccacagagaagagagctgctgagcggcaccctgagaagtaccagggcagctctgtgagcaacctgcacgtggagccctgtggcaccaacacccacgccagcagcctgcagcacgagaacagcagcctgctgctgaccaaggacaggatgaatgtggagaaggccgagttctgcaacaagagcaagcagcccggcctggcccggagccagcacaaccgctgggccggcagcaaggagacctgcaatgacaggaggacccccagcacagagaagaaggtggacctgaatgctgaccccctgtgtgagaggaaggagtggaacaagcagaagctgccctgcagcgagaacccccgggacacagaagatgtgccctggatcaccctgaacagcagcatccagaaggtgaatgagtggttcagcagaagtgatgagctgctgggcagtgatgacagccatgatggagagagcgagagcaatgccaaggtggctgatgtgctggatgtgctgaatgaggtggatgagtacagcggcagcagcgagaagattgacctgctggccagtgacccccatgaggccctgatctgcaagtctgagcgggtgcacagcaagtctgtggagagcaacatcgaggacaagatctttgggaagacctacaggaagaaggccagcctgcccaacctgagccacgtgacagaaaatctcatcattggagcctttgtgacagagccccagatcatccaggagcggcccctgaccaacaagctgaagaggaagaggcggcccaccagcggcctgcaccctgaggacttcatcaagaaggctgacctggccgtgcagaagaccccagagatgatcaaccagggcaccaaccagacagagcagaatggccaggtgatgaacatcaccaacagcggccacgagaacaagaccaagggggacagcatccagaatgagaagaaccccaaccccatcgagagcctggagaaggagagcgccttcaagaccaaggccgagcccatcagcagcagcatcagcaacatggagctggagctgaacatccacaacagcaaggcccccaagaagaaccggctgcggaggaagagcagcaccaggcacatccacgccctggagctggtggtgtccaggaacctgagcccccccaactgcacagagctgcagattgacagctgcagcagcagcgaggagtag

SEQ ID NO: 171623 - DNA, 1869 bp, Artificial Sequence
  derived and/or modified sequence
atggacctgagcgccctgcgggtggaggaggtgcagaatgtcatcaatgccatgcagaagatcctggagtgccccatctgcctggagctgatcaaggagcctgtgtccaccaagtgtgaccacatcttctgcaagagcctgcaggagagcacccgcttcagccagctggtggaggagctgctgaagatcatctgtgccttccagctggacaccggcctggagtatgccaacagctacaactttgccaagaaggagaacaacagccctgagcacctgaaggatgaggtgtccatcatccagagcatgggctacagaaacagagccaagaggctgctgcagagcgagcctgagaaccccagcctgcaggagaccagcctgtctgtgcagctgagcaacctgggcaccgtgaggaccctgcggaccaagcagaggatccagccccagaagacctctgtgtacatcgagctgggcagtgacagcagcgaggacacagtgaacaaggccacctactgcagcgtgggggaccaggagctgctgcagatcaccccccagggcaccagagatgagatcagcctggacagcgccaagaaggccgcctgtgagttcagcgagacagatgtgaccaacacagagcaccaccagcccagcaacaatgacctgaacaccacagagaagagagctgctgagcggcaccctgagaagtaccagggcagctctgtgagcaacctgcacgtggagccctgtggcaccaacacccacgccagcagcctgcagcacgagaacagcagcctgctgctgaccaaggacaggatgaatgtggagaaggccgagttctgcaacaagagcaagcagcccggcctggcccggagccagcacaaccgctgggccggcagcaaggagacctgcaatgacaggaggacccccagcacagagaagaaggtggacctgaatgctgaccccctgtgtgagaggaaggagtggaacaagcagaagctgccctgcagcgagaacccccgggacacagaagatgtgccctggatcaccctgaacagcagcatccagaaggtgaatgagtggttcagcagaagtgatgagctgctgggcagtgatgacagccatgatggagagagcgagagcaatgccaaggtggctgatgtgctggatgtgctgaatgaggtggatgagtacagcggcagcagcgagaagattgacctgctggccagtgacccccatgaggccctgatctgcaagtctgagcgggtgcacagcaagtctgtggagagcaacatcgaggacaagatctttgggaagacctacaggaagaaggccagcctgcccaacctgagccacgtgacagaaaatctcatcattggagcctttgtgacagagccccagatcatccaggagcggcccctgaccaacaagctgaagaggaagaggcggcccaccagcggcctgcaccctgaggacttcatcaagaaggctgacctggccgtgcagaagaccccagagatgatcaaccagggcaccaaccagacagagcagaatggccaggtgatgaacatcaccaacagcggccacgagaacaagaccaagggggacagcatccagaatgagaagaaccccaaccccatcgagagcctggagaaggagagcgccttcaagaccaaggccgagcccatcagcagcagcatcagcaacatggagctggagctgaacatccacaacagcaaggcccccaagaagaaccggctgcggaggaagagcagcaccaggcacatccacgccctggagctggtggtgtccaggaacctgagcccccccaactgcacagagctgcagattgacagctgcagcagcagcgagtag

SEQ ID NO: 171624 - DNA, 5451 bp, Artificial Sequence
  derived and/or modified sequence
atgctgaagctgctgaaccagaagaagggccccagccagtgccccctgtgcaagaatgacatcaccaagaggagcctgcaggagagcacccgcttcagccagctggtggaggagctgctgaagatcatctgtgccttccagctggacaccggcctggagtatgccaacagctacaactttgccaagaaggagaacaacagccctgagcacctgaaggatgaggtgtccatcatccagagcatgggctacagaaacagagccaagaggctgctgcagagcgagcctgagaaccccagcctgcaggagaccagcctgtctgtgcagctgagcaacctgggcaccgtgaggaccctgcggaccaagcagaggatccagccccagaagacctctgtgtacatcgagctgggcagtgacagcagtgaagatactgtgaacaaggccacctactgcagcgtgggggaccaggagctgctgcagatcaccccccagggcaccagagatgagatcagcctggacagcgccaagaaggccgcctgtgagttcagcgagacagatgtgaccaacacagagcaccaccagcccagcaacaatgacctgaacaccacagagaagagagctgctgagcggcaccctgagaagtaccagggcagctctgtgagcaacctgcacgtggagccctgtggcaccaacacccacgccagcagcctgcagcacgagaacagcagcctgctgctgaccaaggacaggatgaatgtggagaaggccgagttctgcaacaagagcaagcagcccggcctggcccggagccagcacaaccgctgggccggcagcaaggagacctgcaatgacaggaggacccccagcacagagaagaaggtggacctgaatgctgaccccctgtgtgagaggaaggagtggaacaagcagaagctgccctgcagcgagaacccccgggacacagaagatgtgccctggatcaccctgaacagcagcatccagaaggtgaatgagtggttcagcagaagtgatgagctgctgggcagtgatgacagccatgatggagagagcgagagcaatgccaaggtggctgatgtgctggatgtgctgaatgaggtggatgagtacagcggcagcagcgagaagattgacctgctggccagtgacccccatgaggccctgatctgcaagtctgagcgggtgcacagcaagtctgtggagagcaacatcgaggacaagatctttgggaagacctacaggaagaaggccagcctgcccaacctgagccacgtgacagagaacctgatcatcggggcctttgtgacagagccccagatcatccaggagcggcccctgaccaacaagctgaagaggaagagaagacccaccagcggcctgcaccctgaggacttcatcaagaaggctgacctggccgtgcagaagaccccagagatgatcaaccagggcaccaaccagacagagcagaatggccaggtgatgaacatcaccaacagcggccacgagaacaagaccaagggggacagcatccagaatgagaagaaccccaaccccatcgagagcctggagaaggagagcgccttcaagaccaaggccgagcccatcagcagcagcatcagcaacatggagctggagctgaacatccacaacagcaaggcccccaagaagaaccggctgcggaggaagagcagcaccaggcacatccacgccctggagctggtggtgtccaggaacctgagcccccccaactgcacagagctgcagattgacagctgcagcagcagcgaggagatcaagaagaagaagtacaaccagatgcctgtgcgccacagcaggaacctgcagctgatggagggcaaggagcccgccactggagccaagaagagcaacaagcccaatgagcagaccagcaagagacatgacagcgacaccttccctgagctgaagctgaccaatgcccctggcagcttcaccaagtgcagcaacaccagcgagctgaaggagtttgtgaaccccagcctgccccgggaggagaaggaggagaagctggagaccgtgaaggtgagcaacaatgctgaggaccccaaggacctgatgctgagcggggagcgggtgctgcagacagagaggtctgtggagagcagcagcatcagcctggtgcccggcacagattatggcacccaggagagcatcagcctgctggaggtgtccaccctgggcaaggccaagacagagcccaacaagtgtgtgtcccagtgtgccgcctttgagaaccccaagggcctcatccacggctgcagcaaggacaacagaaatgacacagagggcttcaagtaccccctgggccacgaggtgaaccacagccgggagaccagcattgagatggaggagagcgagctggatgcccagtacctgcagaacaccttcaaggtgtccaagaggcagagctttgcccccttcagcaaccctggaaatgctgaggaggagtgtgccaccttcagcgcccacagcggcagcctgaagaagcagagccccaaggtgacctttgaatgtgagcagaaggaggagaaccagggcaagaatgaaagcaacatcaagcctgtgcagacagtgaacatcacagctggcttccctgtggtgggccagaaggacaagcctgtggacaatgccaagtgcagcatcaagggcggcagccgcttctgcctgagcagccagttcagaggaaatgagaccggcctcatcacccccaacaagcacggcctgctgcagaacccctaccgcatccccccactcttccccatcaagagctttgtgaagaccaagtgcaagaagaacctgctggaggagaactttgaggagcacagcatgagccctgagcgggagatgggaaatgaaaacatccccagcacagtgtccaccatcagcaggaacaacatccgggagaatgtgttcaaggaggccagcagcagcaacatcaatgaggtgggcagcagcaccaatgaggtgggcagcagcatcaatgagatcggcagcagtgatgagaacatccaggccgagctgggcaggaacagaggccccaagctgaatgccatgctgcggctgggcgtgctgcagcctgaggtgtacaagcagagcctgcccggcagcaactgcaagcaccctgagatcaagaagcaggagtatgaggaggtggtgcagacagtgaacacagacttcagcccctacctgatcagtgacaacctggagcagcccatgggcagcagccacgccagccaggtgtgcagcgagaccccagatgacctgctggatgatggagagatcaaggaggacaccagctttgctgaaaatgacatcaaggagagcagcgctgtgttcagcaagtctgtgcagaagggggagctgagccgcagccccagccccttcacccacacccacctggcccagggctaccgccgcggggccaagaagctggagagcagcgaggagaacctgagcagtgaagatgaggagctgccctgcttccagcacctgctgtttgggaaggtgaacaacatccccagccagagcaccaggcacagcacagtggccacagaatgtctgagcaagaacacagaggagaacctgctgagcctgaagaacagcctgaatgactgcagcaaccaggtgatcctggccaaggccagccaggagcaccacctgtctgaggagaccaagtgcagcgccagcctcttcagcagccagtgcagcgagctggaggacctgacagccaacaccaacacccaggaccccttcctgattggcagcagcaagcagatgaggcaccagagcgagagccagggcgtgggcctgagtgacaaggagctggtgtctgatgatgaggagcggggcaccggcctggaggagaacaaccaggaggagcagagcatggacagcaacctgggggaggccgccagcggctgtgagagcgagacctctgtgtctgaggactgcagcggcctgagcagccagagcgacatcctgaccacccagcagagggacaccatgcagcacaacctgatcaagctgcagcaggagatggccgagctggaggccgtgctggagcagcacggcagccagcccagcaacagctaccccagcatcatcagtgacagcagcgccctggaggacctgaggaaccctgagcagagcaccagcgagaaggctgtgctgaccagccagaagagcagcgagtaccccatcagccagaaccctgagggcctgtctgctgacaagtttgaggtgtctgctgacagcagcaccagcaagaacaaggagcccggggtggagaggagcagccccagcaaatgtcccagcctggatgaccgctggtacatgcacagctgcagcggcagcctgcagaacagaaactaccccagccaggaggagctgatcaaggtggtggatgtggaggagcagcagctggaggagagcggcccccatgacctgacagagaccagctacctgccccggcaggacctggagggcaccccctacctggagagcggcatcagcctcttcagtgatgatcctgagagtgaccccagcgaggaccgggcccctgagagcgcccgggtgggcaacatccccagcagcaccagcgccctgaaggtgccccagctgaaggtggccgagagcgcccagagccctgctgctgcccacaccacagacacagctggctacaatgccatggaggagagcgtgtcccgggagaagccagagctgacagccagcacagagcgggtgaacaagaggatgtccatggtggtgtctggcctgaccccagaggagttcatgctggtgtacaagtttgccaggaagcaccacatcaccctgaccaacctgatcacagaggagaccacccacgtggtgatgaagacagatgctgagtttgtgtgtgagaggaccctgaagtacttcctgggcattgctgggggcaagtgggtggtgtcctacttctgggtgacccagagcatcaaggagaggaagatgctgaatgaacatgactttgaggtgagaggagatgtggtgaatggaagaaaccaccagggccccaagagggcccgggagagccaggacaggaagatcttccggggcctggagatctgctgctacggccccttcaccaacatgcccacagaccagctggagtggatggtgcagctgtgtggggcctctgtggtgaaggagctgagcagcttcaccctgggcactggagtgcaccccatcgtggtggtgcagccagatgcctggacagaggacaatggcttccacgccatcggccagatgtgtgaggcccctgtggtgacccgggagtgggtgctggacagcgtggccctgtaccagtgccaggagctggacacctacctgatcccccagatcccccacagccactactag

SEQ ID NO: 171625 - DNA, 1422 bp, Artificial Sequence
  derived and/or modified sequence
atggacctgagcgccctgcgggtggaggaggtgcagaatgtcatcaatgccatgcagaagatcctggagtgccccatctgcctggagctgatcaaggagcctgtgtccaccaagtgtgaccacatcttctgcaagttctgcatgctgaagctgctgaaccagaagaagggccccagccagtgccccctgtgcaagaatgacatcaccaagaggagcctgcaggagagcacccgcttcagccagctggtggaggagctgctgaagatcatctgtgccttccagctggacaccggcctggagtatgccaacagctacaactttgccaagaaggagaacaacagccctgagcacctgaaggatgaggtgtccatcatccagagcatgggctacagaaacagagccaagaggctgctgcagagcgagcctgagaaccccagcctgcaggagaccagcctgtctgtgcagctgagcaacctgggcaccgtgaggaccctgcggaccaagcagaggatccagccccagaagacctctgtgtacatcgagctgggcagtgacagcagcgaggacacagtgaacaaggccacctactgcagcgtgggggaccaggagctgctgcagatcaccccccagggcaccagagatgagatcagcctggacagcgccaagaaggccgcctgtgagttcagcgagacagatgtgaccaacacagagcaccaccagcccagcaacaatgacctgaacaccacagagaagagagctgctgagcggcaccctgagaagtaccagggcagctctgtgagcaacctgcacgtggagccctgtggcaccaacacccacgccagcagcctgcagcacgagaacagcagcctgctgctgaccaaggacaggatgaatgtggagaaggccgagttctgcaacaagagcaagcagcccggcctggcccggagccagcacaaccgctgggccggcagcaaggagacctgcaatgacaggaggacccccagcacagagaagaaggtggacctgaatgctgaccccctgtgtgagaggaaggagtggaacaagcagaagctgccctgcagcgagaacccccgggacacagaagatgtgccctggatcaccctgaacagcagcatccagaaggtgaatgagtggttcagcagaagtgatgagctgctgggcagtgatgacagccatgatggagagagcgagagcaatgccaaggtggctgatgtgctggatgtgctgaatgaggtggatgagtacagcggcagcagcgagaagattgacctgctggccagtgacccccatgaggccctgatctgcaagtctgagcgggtgcacagcaagtctgtggagagcaacatcgaggacaagatctttgggaagacctacaggaagaaggccagcctgcccaactag

SEQ ID NO: 171626 - DNA, 4704 bp, Artificial Sequence
  derived and/or modified sequence
atgaacgtggagaaggccgagttctgcaacaagagcaagcagcccggactggccagatcacagcataatcgatgggctggtagcaaagagacctgcaatgaccggcgcaccccttcaactgagaagaaagtagatctcaacgccgacccgctgtgcgagcgcaaggagtggaataagcaaaaactcccctgcagcgagaatcccagagatacagaagatgtcccttggattacactcaactcgtctatccagaaggtgaacgagtggttttctagatctgatgagctgctcggatctgatgattcacatgacggtgaaagcgaaagcaatgccaaagttgctgacgttctggacgtgctcaatgaagtggacgaatacagcggatctagcgagaagatagatttgttagcctctgaccctcatgaggccctgatatgtaagagcgaacgagtgcatagcaaaagcgtggaatctaatatcgaggacaagatcttcggtaaaacataccgcaaaaaagcatcactgccaaacctttcccacgtcacagaaaatcttataatcggtgcttttgtcacggagcctcaaataatccaagaacgaccactgaccaacaagcttaaacgtaagcgaagacccactagcggcctgcaccccgaagacttcattaaaaaagccgacctagctgtgcagaagacacctgaaatgatcaatcaaggcactaaccagaccgagcaaaatgggcaagtgatgaacatcacaaacagtgggcacgagaacaagacaaagggcgattcaatccagaatgaaaagaatcctaaccctatcgagagcttagaaaaggagtcggcctttaagacaaaagctgagcccattagcagtagtatttcgaatatggaattggaattaaacatccacaacagcaaagcacccaaaaaaaaccgtttgaggcgaaaaagttcgactcgccatatccacgctctggaattggtcgtgagccgcaacctgtccccacccaactgcaccgaactgcaaatcgacagctgttcaagtagcgaggagatcaaaaagaaaaagtataatcaaatgccagtgcggcacagccggaatttgcagctgatggaaggcaaagagccagctactggcgctaaaaaatccaacaagccaaacgagcagacgagcaagagacatgactccgacacattcccggagctaaaactgacaaatgcaccgggcagctttacgaagtgctccaatacaagcgaactcaaagagtttgttaatccttccttacctagggaagaaaaagaggagaaattagaaaccgtaaaagtgtcaaataatgctgaggatcccaaagacctgatgctatcaggggagagggtgcttcagaccgaacggtcggtagagtcttccagcatcagcctcgtccccgggactgactacggaacccaagagagtatctctctgcttgaagtcagcaccctcggcaaggcgaaaaccgaaccaaataaatgcgtttctcaatgtgccgccttcgaaaacccgaaaggtctgatacacggctgcagcaaggataaccgaaacgacactgaagggtttaagtacccactggggcatgaggttaatcactctagagaaacgtcaatcgagatggaagagtctgaactggacgcccagtatctgcagaacacgttcaaagtgtccaagcggcaaagctttgctccgttctcaaaccccgggaatgccgaggaagagtgtgccaccttcagcgctcattctggatcgctgaagaagcagagccccaaagtgaccttcgagtgtgagcagaaggaagaaaatcagggcaagaatgagagcaacatcaagcctgtgcagacggtcaacattacagctggcttcccagtggttggccagaaggacaagcccgtcgataacgccaaatgtagcatcaaaggcgggtcgcgattctgcttaagctctcagtttcgcggaaacgagactgggctcattacgccgaacaagcatgggcttctgcagaatccttacaggattcctccactgtttcccattaagagcttcgtgaagaccaaatgtaagaagaatctgttagaggaaaactttgaagagcacagtatgagcccagaacgtgagatgggcaatgagaacatcccttctaccgtgagtaccattagccggaataatataagagagaatgtattcaaggaggcttctagctccaatattaacgaggtaggttccagcactaacgaagtgggttcttctattaacgaaatcggctcctccgatgagaacatccaggcggagctgggacggaatcgaggtcctaagttgaacgctatgctgcggcttggtgtcctgcagcctgaggtctacaagcagtcactcccagggtccaattgtaagcaccccgagatcaaaaagcaagagtacgaggaggtcgtccagaccgtgaatacagactttagtccatatctgataagcgacaatttggagcaacctatgggctctagtcacgcaagtcaagtctgcagcgagaccccagacgaccttttggacgatggggagattaaagaggacaccagcttcgcggaaaacgatattaaagaatcaagcgctgtgttcagcaaaagcgtgcaaaagggggagctctctaggtctccgtcccctttcacccatacccacttagctcagggctaccgccgtggggcaaaaaaacttgagtcttcagaagagaacttaagtagtgaggacgaggagctcccctgcttccagcacttactgtttggcaaggtgaacaatattccatctcaatccaccaggcattctacggttgcaaccgaatgcctatcaaaaaatacagaggagaatttgcttagccttaaaaactcgctgaacgattgctccaatcaagtcattctcgcaaaggcctcccaggagcaccacctcagtgaggagactaagtgttcagcttccttgtttagtagccagtgtagtgagttagaagacctgactgctaacaccaatacccaggatcctttcctgatcggaagctctaagcaaatgcggcatcaaagtgaatcccaaggcgtggggctgtcggataaagagttagtgtcagatgacgaggaaagggggacaggactggaagagaacaatcaggaagagcagtctatggatagcaacctaggagaggccgcctcgggatgtgaaagcgagacctctgtcagtgaggactgctccggcctgagcagccagtccgacatacttactactcagcagcgagacactatgcagcacaacctgatcaagctccaacaggagatggctgagctggaagccgttctcgagcagcacgggagtcagccatctaactcttacccctctatcatctctgacagctccgctctggaagatctgcgaaatcccgaacagtctacatctgagaaggctgtcctcacttcacagaaaagctctgagtaccccatttcccagaatccagagggcctgtcagccgacaaattcgaggtaagtgcagactcttccacaagcaagaacaaggagcccggtgtggaacgaagtagcccttctaaatgtcctagccttgacgatcgctggtacatgcattcctgcagcggcagcctacaaaatcggaattacccctctcaggaagagctgatcaaggtggttgacgtggaagaacagcaactggaagagagcggtcctcacgatctcacagaaacctcctatttgcccaggcaggacttagaaggcacaccttatctggagtcaggaatctctctgttttctgatgaccccgagtcagacccaagtgaggatcgcgcccccgagtccgcaagagtgggcaatatcccaagttctacaagtgcactcaaggtgcctcagctgaaggtagcagagagcgctcaaagccctgctgctgcacacacaaccgataccgcaggttataacgccatggaggagagcgtgagtcgagaaaagccagaactcacggcctccaccgagagggtgaacaaacgtatgagcatggtggtctccggcctgactcccgaggagttcatgcttgtgtacaagtttgcaaggaaacatcacatcaccctgactaacctgattacagaagaaaccacccacgtcgtgatgaaaaccgacgcagagttcgtctgtgaacgaaccctcaaatatttcctaggcatcgcaggcgggaagtgggttgttagttatttttgggttacacagtctattaaggagcgcaagatgctgaacgaacacgacttcgaggttcggggcgatgtggtgaatgggaggaatcaccaggggcccaagagggcaagggagtcacaggacagaaagatcttccgaggtctggaaatctgttgttatggcccgtttactaatatgcccaccgatcaacttgagtggatggtacagttgtgcggggcttcagtggtaaaggagctgagcagcttcactctgggaactggcgtacatcctattgtggtggtgcagcccgacgcatggacggaagataacggctttcacgcaatcggtcagatgtgtgaggcgcccgttgtcacaagggagtgggtcctggactcagtggcgctttaccagtgccaagaactagacacctatttgatccctcagatcccccatagtcactattag

SEQ ID NO: 171627 - DNA, 4797 bp, Artificial Sequence
  derived and/or modified sequence
atggacctgagcgccctgcgggtggaggaggtgcagaacgtgatcaatgcaatgcaaaaaatactggaatgtcccatctgtctcgagttgatcaaagaaccagtcagcacaaaatgtgatcacatcttttgtaagttttgcatgttaaagctgcttaaccaaaaaaagggtccgtctcagtgtcctctgtgtaagaatgatatcacgaaacgctctctccaagagagcacacgcttcagtcagctggtggaagagttgctgaaaatcatatgcgccttccaattagataccgggctggagtatgccaactcctacaacttcgccaagaaagaaaacaacagtcctgaacacctgaaggatgaagtttccatcatacagagcatggggtacagaaaccgggcaaaacgattgttgcagtctgagcccgaaaatcctagcctgcaggagacttcactgtccgtgcaactgtctaacctcgggacggtacggacgctcagaacaaaacagaggatacaaccgcagaagacgagcgtttacatcgagctgggctcagactccagcgaagataccgtcaacaaagccacttactgcagcgtgggagatcaggagcttcttcagatcactccgcaaggcacacgggacgagatctctctcgacagtgcaaagaaggccgcatgcgaattttcagaaacagatgtgaccaacacggagcatcaccaaccctccaacaacgatctgaataccaccgagaagagagcagcagagagacatcccgagaagtaccaaggcagttctgtctctaatctacacgtggagccctgtggaacgaacacgcatgcatcctctctgcagcacgagaacagcagtctcctgctcactaaggataggatgaatgtggagaaagcagaattctgtaacaaaagtaagcagcctggcctagcccggagccagcacaacaggtgggccggcagtaaagagacgtgtaatgacaggcggaccccctccacagagaaaaaggtagatctgaatgcagacccgctgtgcgaaagaaaagagtggaataagcaaaagctgccttgctcggagaaccctagggacactgaggatgtgccgtggatcactctcaattcctccatccaaaaagtaaacgagtggttttctagaagcgatgaactcttgggatcagacgattcccacgatggtgaatccgaaagcaacgcaaaggtggccgacgtgctggacgtgttgaatgaggtcgacgagtatagcgggtcctcggaaaaaatcgatctcctggcaagcgacccccacgaagccctgatttgcaaatctgaacgcgtgcacagtaagtccgttgagagtaatattgaagataagattttcggcaagacatatagaaagaaagcaagtctgcctaacttgagtcatgttaccgaaaatctgatcatcggggcattcgttacggagccgcagatcattcaggagcgcccgctgaccaacaaactgaaacgaaagcggcgccccacgagcggtctccatccggaggatttcattaagaaagctgatttagctgtgcagaagacccctgaaatgatcaatcaagggaccaaccagactgagcagaatgggcaagtgatgaatattaccaactcaggccatgagaacaaaaccaagggggactccattcagaacgagaaaaaccccaaccctattgaaagcctcgagaaggaaagcgcatttaagacaaaggcagagcctataagttcttcaattagcaacatggagcttgaactcaacattcataatagtaaggcgccaaaaaagaacaggcttaggagaaaatcttcaacaagacatatccatgcgctcgagctcgtggttagtcggaatctctcaccacctaattgcactgaactgcaaatagattcttgctctagcagcgaagagataaaaaagaaaaagtacaaccagatgcccgtgcggcactcacggaacctgcagctcatggaaggcaaggagcctgctactggcgctaaaaagtccaataagcctaacgaacagactagtaaacggcacgacagcgacactttccccgaactcaagctcacgaatgcccctggcagcttcaccaagtgctcaaacacttctgaactcaaggagtttgtgaatccatccctgcccagggaagagaaagaagagaagttggaaactgtgaaggtttctaataacgccgaggacccgaaagatctgatgttgtctggggagcgcgtgctgcagactgagcgttcggttgaatcttcatcaataagcctagttcctggtactgactatggtacccaggagtctatctcactcctcgaggtctcgacgctcggcaaggctaagaccgagcccaacaaatgcgtttcacagtgtgctgcttttgaaaatcctaaagggctgattcatggatgtagtaaggataacaggaacgatactgaaggtttcaaataccctctgggccacgaagttaaccattctagagagacctccattgagatggaagaatccgaattggacgcacaatatctccagaacacgtttaaggtgagcaagcgccagtctttcgcccccttctctaatcccggcaatgcggaagaagagtgtgcaaccttctccgctcattctggatcgcttaaaaagcagtcccctaaagttaccttcgagtgtgagcagaaagaagagaatcagggcaagaacgagtccaacattaagcccgttcagacagtgaacatcacagcaggcttcccggtggtcggacagaaagacaagcccgtagacaacgccaaatgcagtattaaaggcgggtccagattctgtctctccagtcagttccgcgggaatgagaccggtttgatcacaccaaataagcacggattgctccagaatccgtatcggattccacccttgtttcctatcaagtctttcgtgaaaactaagtgcaaaaaaaaccttctggaggaaaattttgaggaacattcaatgagccccgagcgagaaatgggcaacgaaaatattcccagtaccgtgagcacgatttcccggaacaacatacgcgaaaacgtatttaaagaggcctcaagcagcaatatcaatgaagtgggcagctcgactaacgaggtcggatcatctataaacgaaatcggaagctcagacgagaatatccaagccgaactagggcgaaataggggtcctaaactaaacgctatgctccgattgggggtcttgcaacccgaggtttacaagcagtcgttaccaggatcgaattgtaagcatcctgaaatcaaaaaacaggaatatgaagaggtcgtccagacagtcaacaccgacttttccccttatcttatctctgataatctggagcagcctatgggctctagccacgcgtcacaggtttgttctgaaacacccgacgatctgctcgatgatggggaaattaaggaggatacatcattcgctgaaaacgacatcaaggagtctagtgcggtcttttctaaaagcgtgcagaagggagaactttctcgtagtccttcccctttcacccacacccacctggcccaggggtatcggcgcggcgccaaaaaactcgaaagtagtgaagagaacctgagctcagaggatgaggagctcccatgttttcagcatctgttgtttggaaaagtcaacaacatccccagtcagtccacccgacatagcacagtggctactgaatgtctgtcaaaaaatacggaggaaaatctcctcagtctcaagaattcgttgaatgactgctcgaaccaggtgatcctggctaaggcctctcaggagcatcatcttagcgaggagactaaatgtagcgcaagcctctttagcagccagtgtagtgagctcgaagacctcacagctaacactaatacacaggatcctttcctgatcggaagctctaaacagatgcgacaccagagtgagtcacagggagttgggctttcagacaaggagctggtgagcgacgacgaggaaagaggaaccggtcttgaagagaataatcaggaggagcagagcatggattccaatttgggcgaggcagcttccggatgtgaatctgaaaccagcgtgtccgaagactgctccgggctgtcttcccagagcgacatccttacaacccagcagcgtgacacaatgcagcataacctcataaaactacagcaagaaatggctgaactggaagccgtgctggagcagcacggatctcagcccagcaattcatatccctctataatatctgattcttcagctctggaggatttgaggaaccctgaacagagtacctccgaaaagggcgtgacgcagtctatcaaggagcgcaaaatgctcaacgagcatgatttcgaagtcagaggtgacgtggtgaatggtcgtaaccatcaaggtcccaaacgcgctagggaatctcaggatcgaaaaatcttccgcggccttgaaatttgttgctacggccctttcactaacatgcccacagaccagctagagtggatggtgcaactctgcggtgcaagcgtagtgaaggaactgagctctttcactctgggaacaggcgttcaccctattgtggtcgtgcagccagacgcctggacagaggataacggttttcatgctattggtcagatgtgcgaagccccggtagtgacaagagagtgggttctggacagtgtggccctctatcagtgccaggaacttgacacctacctgattccgcaaataccccactcgcactactag

SEQ ID NO: 171628 - DNA, 5592 bp, Artificial Sequence
  derived and/or modified sequence
atggacctgagcgccctgcgggtggaggaggtgcagaacgtgatcaacgcaatgcagaagattctggagtgtcctatttgcttagagctgattaaagagcctgtgtcaactaagtgtgaccatattttttgtaagttctgcatgttgaaattgctgaaccagaaaaagggacccagtcagtgcccgctctgcaagaatgatattaccaaacgtagcttgcaggagagtacgcggttctcacagctcgtggaggaattgctgaaaattatttgcgcattccagctggataccggtctggagtatgctaactcttacaactttgccaagaaagagaataactcgccagagcatttgaaagacgaagtgtcaatcattcagagtatgggctaccgaaaccgggccaagaggctcctccagagcgaacccgagaatccctcattacaagagacatctctgtcagtccaactgtccaacctgggaacagtgcgaaccctaaggacaaagcagcggatccagccccagaagaccagtgtgtatatcgagctggggtccgactccagcgaggacacagtgaacaaggcgacttactgttcagtgggcgatcaagagctcctgcagatcacaccccagggaacccgcgatgagatctcgctggattccgctaagaaagccgcgtgtgaattcagtgagactgatgtgactaacactgaacatcaccagccctcgaacaacgacctcaatactactgagaagagagccgcagagcgccatccagagaaataccaaggcagctctgtgtctaacttgcacgttgagccatgtggaacgaatacacatgcaagctccctgcagcacgaaaacagcagcctgttactcaccaaggaccggatgaatgtcgagaaggccgagttctgcaacaagtccaagcagcccggactggcacgatcacaacacaaccggtgggctggctcaaaggagacgtgtaatgatcgcaggacacctagcacagagaaaaaggtggatctcaacgctgaccctctgtgcgagagaaaggagtggaataaacaaaagcttccatgttctgaaaatcctcgtgatacggaggatgtcccttggattaccctgaactcttcaatacaaaaggtgaacgagtggttctcaaggagcgatgagctcctgggaagcgacgattcacacgacggggaaagtgagtcaaacgcaaaagtggctgatgtcctggacgtcctgaatgaagtcgatgagtatagcggttcatcagagaaaattgatttactggcctcagaccctcatgaagctttgatttgcaagagtgaaagagtacattctaaatctgtcgagagcaatatcgaggataaaatcttcggaaaaacgtatagaaagaaagcctcgctgccaaatctcagtcatgtgacagagaaccttattataggcgcatttgtgactgagcctcaaatcattcaggaacgacccctcacaaacaagttaaaaaggaagcgccggccaacaagtggcctgcaccccgaggactttattaagaaggctgacttggccgttcagaagacacctgagatgatcaatcagggtacaaatcagactgagcagaatggccaggttatgaacatcacaaattcaggccatgagaataagaccaagggcgacagcatccagaatgagaaaaatcccaatcccatagaatctctggaaaaggaaagcgcgtttaagactaaggcagagccaatttcgtcctccatctccaatatggagcttgagttgaatatccacaactcgaaggcccctaaaaagaacaggctccgcagaaagtctagcacccggcacattcatgctcttgaattggtggtctcacgcaatcttagtccccctaattgtacagaacttcagatcgactcgtgcagttcctctgaagaaattaagaagaagaagtacaaccaaatgccagtgcgccactcacggaaccttcagctgatggagggaaaagaacccgctaccggagcgaaaaagagcaataagccaaatgaacaaacttccaagcgtcacgacagtgataccttccctgagctgaaactgacaaatgcaccgggaagcttcaccaagtgtagtaacaccagtgaactgaaagagttcgtaaacccatctctccctagagaggagaaggaggaaaaactggagacagtcaaagtgtccaacaatgctgaggacccgaaggatctgatgctcagcggcgaaagagtgctacagactgagcggtctgtcgagtcttcctctatctctctggtgcccgggacagattacggaacgcaggaatccatttccctgttggaagtgtcaactctgggcaaagcgaagaccgagcccaacaaatgcgtatcccagtgtgccgcttttgagaaccccaaaggcctcattcatggctgttctaaggataatcgtaatgacacggaaggcttcaagtatccattggggcacgaggtaaatcactcccgagaaacgagtattgagatggaggaatcggaacttgatgcccagtacctccagaatacattcaaagtatcaaagcggcagtcgttcgcccccttctccaatccaggtaacgcggaagaggagtgcgctaccttctccgcgcacagcggctcattaaagaagcaatcgcccaaagttacctttgaatgtgagcaaaaagaagaaaatcagggtaagaacgagagcaatattaaaccagtgcagactgtgaatattaccgcggggttccccgttgtagggcagaaggacaagccagttgataacgccaaatgttcaattaagggaggcagcaggttttgcctgtcctcccagttcagagggaatgagacagggctgataacccccaacaagcatggtctcctgcaaaacccataccggatcccacccctgtttcctatcaagtcatttgtaaagacaaagtgcaagaaaaacctacttgaggagaactttgaagagcacagcatgtcaccagaaagggaaatggggaacgagaatatcccgtctactgtgagcaccatctctagaaataacatcagggagaacgtttttaaggaagcctccagttccaacatcaacgaggtcggaagtagcactaatgaggtgggaagctcaatcaatgagataggttcatctgacgaaaacatccaagcagagctcgggcggaaccggggccccaagcttaacgccatgttgaggctcggtgttctccagcccgaggtttacaaacaaagtcttccagggagcaattgtaagcaccctgagatcaaaaaacaggagtatgaggaggtcgtccagactgtgaataccgacttctctccatatctgatctccgataacctggagcagcctatgggctcatctcatgcaagccaggtttgctcggaaacccccgatgatctcctggacgacggtgagatcaaggaagatacgtcttttgcagagaacgatatcaaggaaagcagtgccgtctttagcaagtcagtacagaagggggaactgagtaggtcaccgagtcctttcacacacacccatcttgcacaagggtataggcggggagccaagaaactagaaagctcagaggagaaccttagttcagaagacgaagagctgccatgcttccagcatctgctgtttgggaaggtgaacaacattccatctcagtctactagacacagcacagtggccacggagtgtctttccaaaaacactgaagaaaatttgctgtcactgaaaaattcgctaaatgattgttcaaaccaggtcattctagccaaggcttcgcaggagcaccatctgagtgaggagaccaaatgttccgcctcactattctcctctcagtgtagcgaacttgaagacctgaccgccaacaccaacacgcaggatccgttcttgattggctcatctaagcagatgcggcatcagtccgaaagtcaaggagtcgggctctccgacaaagagctggttagcgatgatgaagagagggggactggcctcgaagaaaacaaccaggaggagcagtcaatggactccaacctgggcgaggccgcctccggatgtgagtcagagacatcggttagcgaagattgctccgggctgagctcccagagcgatatcctcacgactcaacaacgggataccatgcaacataatcttatcaaattacagcaggagatggcagaactggaagcagtgctcgagcagcacggtagccagccgtcaaactcctacccttctatcatatccgattcctccgcgctcgaggatctgcgcaaccccgagcaatccaccagcgaaaaggccgtccttacttctcaaaagtcatctgagtatccgatatctcagaatcccgagggcttgtctgctgataagttcgaagtatcggcggatagctctacttcgaaaaacaaggagccgggggtagaaaggtcatccccaagcaaatgtccctcattggacgatcgttggtacatgcattcttgctccgggtctcttcagaaccggaactatccttcccaggaagaattgattaaggtggtcgatgtcgaagagcagcaacttgaggaatcgggcccgcacgacctgacagagaccagctatctaccaagacaggacttggagggtaccccctacctagagtccggaattagcctattctctgacgatccggagagcgatccctctgaggaccgggcacctgagagcgctcgggtggggaatatcccctcatcaacctccgccctgaaagtgcctcagcttaaagttgctgagagtgctcaatctccggccgcagcacacactaccgatactgcaggttataacgcaatggaggagtcagtgtcccgggagaaacccgaactgacggccagcaccgagcgcgtcaacaagcgaatgtctatggtcgtgtctggactgactccagaagaatttatgcttgtatacaagttcgcccgaaagcatcatataactcttacaaatctcattacagaagagaccactcatgttgtgatgaaaactgatgcagaattcgtgtgcgaaagaacactcaaatactttttgggaattgcggggggaaagtgggtcgtgtcttatttttgggtaacacagagcattaaggaaaggaaaatgttaaacgagcatgattttgaggtgagaggagacgtcgtcaacggccggaaccaccagggccccaagcgcgcaagagagagccaggacagaaagatttttcgcgggctagaaatatgctgctacgggccatttaccaatatgccaactgaccagttggagtggatggtccagctctgtggggcctcagtagtgaaagaactgtcttcctttactctggggaccggtgtgcacccgatcgtcgttgtacagccagacgcttggactgaggacaacgggttccacgccatcggacaaatgtgcgaggcaccagtggtcactagggagtgggtgctcgactcggtggcgctgtatcaatgtcaagaattggatacgtacctaattccgcaaattccacactcccactactag

SEQ ID NO: 171629 - DNA, 1950 bp, Artificial Sequence
  derived and/or modified sequence
atggacctgagcgccctgcgggtggaggaggtgcagaacgtgatcaacgcaatgcagaagattctcgagtgcccaatttgcctcgagctgattaaggaacctgtgagcacgaagtgcgatcacatcttctgcaagttctgcatgctgaaactgctgaatcagaagaaagggccaagccaatgtcccctttgtaaaaacgatataactaagcggagtctccaggagagcacaaggtttagtcagctggttgaggagctgttgaagatcatttgtgccttccaattagacaccggtcttgagtacgccaacagctacaatttcgccaagaaggaaaacaattcacccgaacacctgaaagacgaggtttccatcatccagtccatgggataccgaaatcgcgcaaaacggctgttacaatcagaacccgagaatcctagcctgcaagagacatccttgagtgttcagctgtccaacctcggaaccgtgagaaccctacggaccaaacaacggatacagccacagaaaacgtccgtttacatcgaactcgggagcgacagctccgaggatacagtcaacaaagccacttactgtagcgtgggcgaccaggagttgctacagattactcctcagggaactagagatgaaatcagtctggattccgcaaagaaagccgcctgtgaattttcggagacagatgttaccaataccgagcatcaccagccctccaacaacgacctaaacactaccgaaaagagagctgccgagcgccaccccgagaaataccaaggctccagtgtttctaatttgcatgtagagccctgtggcacaaacacccatgcctccagtctccagcatgaaaattccagcttattgctcaccaaagatcgaatgaatgtggagaaagcggagttctgcaacaagtccaagcaacctggattggccagatctcagcacaaccgctgggctggatcaaaggaaacctgcaacgacagaaggacccctagcacggaaaaaaaagtggacctcaacgcggatcctctgtgcgaacggaaggagtggaacaaacagaaactcccttgtagcgaaaacccgcgggacaccgaggacgtcccatggataacccttaatagctcaattcagaaagtgaatgaatggttctctcgatcagacgaactcctgggttcagacgatagccacgacggcgaatccgagtcgaatgcgaaggtggccgacgtgctagacgttttaaatgaggtagatgagtacagcggtagctcagagaaaatagacctcctcgccagtgatcctcatgaagccctgatatgcaagagtgagcgagtgcatagtaaatctgtggagtctaatatagaggataaaatcttcggaaagacctaccgtaaaaaggctagtctccctaatctctctcatgttacggaaaatctcatcatcggtgcttttgtcacagagccacagattatacaggaacgaccgctgacgaacaagcttaagagaaagcgcaggcccacctccggcctgcaccctgaagattttatcaagaaggccgatcttgccgttcagaaaacacccgagatgatcaaccaaggaactaaccaaacggaacagaacggtcaagtcatgaatataactaactcaggtcacgaaaacaagaccaaaggcgattctatccaaaacgaaaagaaccccaatcccatcgagtccctcgaaaaagagtccgccttcaaaacaaaagccgagcctatctcaagcagcatatcaaatatggaactcgagctgaatatccacaattccaaagcacctaagaagaacagattgagacggaaatcctccacacggcacatccatgctctcgaacttgttgtgagccgtaatctctcaccaccgaactgcacagagttgcagatcgactcttgtagctcttccgaggagtag

SEQ ID NO: 171630 - DNA, 1869 bp, Artificial Sequence
  derived and/or modified sequence
atggacctgagcgccctgcgggtggaggaggtgcagaacgtgatcaacgctatgcaaaaaattctggaatgccccatttgtctggagctgatcaaagagccagtgagcaccaagtgtgaccacatcttctgcaaaagcctccaagaaagcaccagattcagccagctagtggaagaactgttgaaaatcatttgtgcctttcagctcgatactggtcttgagtacgctaactcatataatttcgctaagaaggaaaacaactcccccgaacacctgaaggacgaggtgtctatcatacaatcaatgggatacagaaaccgcgctaagcggttgctgcagtccgagcccgagaacccgagccttcaggagacctccctgagtgtgcagctgtccaatcttggcactgtacgtacgctgcggacaaagcagagaattcagccacaaaagacatctgtttacatcgaactgggttccgatagcagcgaggatacagttaataaagctacctattgcagcgtgggtgaccaggaattactccaaattaccccccaaggaactagagacgagatttcccttgactctgccaaaaaggccgcttgcgagttctccgagaccgacgtgacaaacactgagcaccaccagccttctaacaatgacctgaatacaaccgagaagagggcagccgaacgccacccggagaaataccaggggtcttccgtgagcaacctccatgtggaaccgtgtggaaccaacacgcatgctagctcgcttcagcatgagaatagctctctgctgttgacaaaggatcgtatgaatgttgaaaaggccgaattttgtaacaagagcaaacaaccaggcctggcacgttctcagcataaccgttgggcaggctcgaaagagacctgcaatgatcggcgcactccaagcactgaaaagaaagtggacctgaacgctgaccccttatgcgagcggaaggagtggaacaaacaaaaactaccatgttccgagaatcctagggacacggaagatgtgccatggataaccttgaattcttctatacagaaggtgaacgaatggttctctagatctgacgagctcttaggcagtgatgacagtcatgatggtgagagtgagagtaatgccaaggtcgccgacgtgcttgacgtgttgaatgaagtggatgagtacagcgggtcttccgagaaaattgacttactggcttcagatccgcacgaggcactcatctgcaagtccgagagggtgcactccaagagcgtagagagcaatatcgaagataagatttttggtaagacatacaggaaaaaagcctcgttgcccaatctatctcacgtgactgagaacctaattataggcgcctttgttacagagccacaaatcatacaagagcgtcccctgaccaataagctgaaacggaaacgccgacctaccagcgggctgcaccctgaggatttcattaagaaggccgacctggcagtgcagaaaacgcccgagatgattaaccagggaaccaatcagacagagcagaatggccaggtgatgaacatcacgaatagcggccacgagaataaaacgaagggtgactccatccagaacgaaaaaaaccccaacccaattgagtccctcgagaaggagtcagcattcaaaactaaggccgaacctatatcatcaagcatcagcaacatggagttagaattgaacattcataattccaaagcacccaaaaaaaaccgactcaggcgtaaatcatccacgagacacatccatgccctggaactcgttgtgtctcgtaacctgagtccgccaaactgcaccgaacttcagatagactcatgcagttcttcagaatag

SEQ ID NO: 171631 - DNA, 5451 bp, Artificial Sequence
  derived and/or modified sequence
atgctgaagctgctgaaccagaagaagggccccagccagtgccccctctgtaaaaatgatatcactaaaagatcactgcaagagtctacccggtttagccagctcgttgaggagttgctgaagattatctgtgcattccaactcgacaccgggctggaatatgcaaacagctacaatttcgcaaagaaggaaaacaatagccccgagcacctgaaagacgaagtctctattattcagtccatggggtaccgcaacagagctaaacggttgctgcagtcagagcccgaaaatccatctcttcaagagacttctctgagcgtccaactaagcaatctcggaacagtgaggaccttgcggacgaaacagcgtattcagcctcagaagacttccgtgtatatcgagcttggcagtgatagctctgaggacaccgttaataaggctacgtactgctctgtaggcgaccaggaactgctccagatcactccacaggggaccagagatgagatttccctcgatagtgccaaaaaggcagcatgcgagttctctgagaccgacgtaacgaacacagaacatcatcaacccagcaacaatgatctgaatacaaccgaaaaacgcgcagccgaaaggcacccagagaaatatcaggggtcatctgtgtcgaaccttcacgtagagccatgtgggacaaatactcatgcctcctccctgcaacacgaaaactcttctctgctattgacaaaagacaggatgaatgtagagaaggcagagttctgtaacaaatccaaacagccaggcctggctaggtcccagcataacagatgggccggatcaaaggaaacatgtaacgatagacgtaccccctctaccgaaaagaaggttgacctgaacgctgacccattatgtgaaagaaaggagtggaacaaacagaagctgccatgcagcgagaatccgcgggacacagaagatgtgccatggattacactcaactcatcgatacagaaggttaacgagtggttttctcgatctgatgaactcctgggaagtgatgactcccatgatggggaaagcgagagcaacgcgaaagtggcggacgttttagatgttctgaatgaggtggatgaatatagcggctcttctgagaaaatagacttacttgcctctgatcctcatgaagctttgatttgtaagtccgagcgggtgcactctaaatcagttgagtcaaatatcgaagacaaaatctttggaaaaacgtaccgtaaaaaggcttccctgcctaacctttcacatgtgactgaaaatttgatcatcggggctttcgtgacggagccccagattattcaagaacgccccctcacaaataaactcaaaaggaaaagaaggcctaccagtggtttgcatcccgaggactttatcaaaaaggcggatctggctgtccagaagactccagaaatgataaaccagggaaccaatcaaactgagcagaatggccaagtgatgaacatcacaaactctgggcatgaaaataagacaaagggggatagcatccagaatgaaaaaaatccaaaccctatcgaaagtcttgagaaggaaagcgcctttaaaactaaggcagaacctatctcatcatccatctccaatatggaacttgagctgaatatccacaatagcaaggcacctaaaaaaaaccgacttcgccgcaagtcgtctaccagacacatccacgccctggagctggtcgtgagtcgcaatctgagccccccaaattgcacagagttgcagatcgattcttgctctagctctgaagaaattaaaaaaaaaaaatataaccagatgccagtgcgacattcaagaaatctgcagcttatggaagggaaggaacctgcaactggcgcaaagaaatccaacaagccgaacgagcagactagtaagagacacgactcagacactttcccagagctgaagctgaccaatgctccaggctccttcactaagtgtagcaatacgtccgagctgaaggagtttgttaatcccagtctcccccgagaagagaaagaagaaaagctggagaccgtgaaagtaagtaataacgcagaagacccaaaagatctgatgcttagcggagagagggttttacagaccgagcgatccgtggaaagcagctctatatccctggtcccagggacagattacggaacgcaggagtccatttcattgttggaagttagtacacttggaaaagccaagaccgagcctaataagtgtgtgtctcagtgtgccgcttttgagaacccaaaaggtctcattcatggatgtagcaaagacaacagaaatgatacagagggatttaaataccctctcggccacgaggtaaaccactctcgagagaccagcatagagatggaagaaagcgagctggacgctcagtacctccagaacacctttaaggtcagcaagagacaaagcttcgccccgtttagcaaccctggcaacgcggaagaggaatgtgcaactttttcagcgcattcaggctcattgaagaagcagagcccaaaggtcactttcgagtgcgagcaaaaagaggagaatcagggaaaaaacgaatccaacatcaaacccgtgcagacggtgaatatcacagccggattcccagtcgtggggcagaaagacaagccggtagataatgccaagtgttcaattaagggtggatctcgcttttgtctgtcctctcagttcaggggcaatgagaccgggcttatcaccccaaataagcatggcttgctgcagaacccttatcgcatcccccccctgtttcctataaaatctttcgttaagactaaatgtaagaaaaacctgttggaagaaaactttgaggagcactctatgtcacctgaaagggagatgggaaacgaaaatatcccgtccaccgtctcaaccatttctcggaacaacattcgcgagaatgtgtttaaggaggccagcagtagcaacattaatgaggtgggctcttcgaccaacgaagtgggctcatctatcaacgaaatcgggtcatccgatgagaatatccaggctgagctgggacgtaatcgcgggcctaaactgaacgccatgctgaggcttggggtgctgcagccggaagtatataaacagtccctcccgggttcaaactgtaaacatcctgagatcaaaaaacaggagtacgaggaagtggtgcaaactgttaacacagatttcagcccctacctgatttccgacaacctggagcagcctatgggatccagccatgcttcccaggtatgttctgagactcctgatgacctgctcgatgacggagagattaaagaagatacatcttttgctgaaaacgacatcaaagagagttcagccgtgttttccaagagcgtgcagaaaggggaattgtcacgctccccttctccctttacccacacccatctcgctcaagggtatagacgcggggctaagaagctggaaagctctgaggaaaacctctcttcagaggacgaggaactaccatgttttcaacaccttctcttcggcaaggtgaacaacataccatcacagtccacaagacactctacagtggcaactgagtgcctgagcaaaaacaccgaagagaatctgttgtctcttaagaactcactgaatgactgttccaatcaggtcattcttgctaaggctagccaagagcaccacctgtccgaagaaactaaatgctcagcatccctgttctcctcccaatgtagtgagttagaggatcttaccgcaaatacaaacacccaggatcccttccttattggcagtagcaaacagatgcgacatcagtcggaatcacagggcgttggactgagtgacaaggagctggtctctgacgacgaggagagagggacagggctagaagagaacaaccaagaggagcagtcgatggactcgaacttgggcgaagccgcctcaggctgcgaatcagagacctctgttagcgaggactgtagcgggctgtcgagccagtctgatattttaactactcaacagagagatactatgcagcacaatttaattaaactccagcaggagatggcggagttagaagccgtgttagaacagcatgggtctcagccctcgaatagctacccgagtattatatcggacagcagtgcccttgaagacttgaggaaccctgagcagtctacctcagagaaggccgtcctgacttcacagaagtcttcagagtatcccataagccagaacccggaaggcctgagcgccgacaaattcgaggttagcgccgatagctccacaagtaaaaacaaagagcccggcgtggagcgctcttcgccatccaaatgcccaagtttggatgacagatggtacatgcacagttgcagtggttccctgcaaaatcgaaattatccaagtcaggaggagttgattaaggtggtggacgtggaggagcagcaattggaggagtctggtcctcacgatcttaccgagaccagttacctccctcgacaggatttggaggggacaccttatctggagtccggtatctcgctgttcagcgatgaccccgaaagtgatccatctgaagacagagctccggagtctgctcgcgtcggaaacatcccctcgagcaccagtgcactcaaagttccccagctaaaggtggccgaatcagcccagtctcccgccgcagcacacaccaccgatactgctggatataatgcaatggaagagtcggtgagtcgggagaaacccgaattgactgccagcactgaacgggtgaacaaacgcatgagcatggtggttagcgggttgactccagaagagttcatgcttgtttacaagttcgctcgaaaacaccacatcaccctgacaaacctcataaccgaggagacaacacacgtggttatgaagacagacgctgaattcgtctgcgagaggaccctcaagtatttcctcgggatagctggcgggaagtgggtcgtgtcctatttttgggtcacacagtctatcaaagagcgcaaaatgctgaatgagcatgatttcgaagtgcgcggcgacgtggttaacgggagaaatcaccagggcccaaagcgggcaagagagtcccaggataggaaaattttcagggggctcgaaatatgttgctatggcccttttaccaacatgcctaccgaccagttggaatggatggtgcaactatgcggagccagcgtcgtgaaagaattaagctcatttacactcggcacaggcgtgcacccgattgtcgtcgtccagcctgatgcctggacggaagataacggctttcatgctatcggccagatgtgcgaagcgcccgtcgtaacacgagagtgggttctcgacagtgtcgcattataccaatgtcaggagcttgacacttacctgatccctcagattccccactctcactactag

SEQ ID NO: 171632 - DNA, 1422 bp, Artificial Sequence
  derived and/or modified sequence
atggacctgagcgccctgcgggtggaggaggtgcagaacgtgatcaacgccatgcagaagatcctggaatgccctatctgtctagagctcataaaggagcccgtctcgaccaaatgtgaccatatattctgcaagttctgcatgctgaagcttctgaatcagaagaagggcccgtctcagtgcccactctgtaagaatgacataaccaagaggtccctgcaggaatcaaccagattttcccaactcgttgaggagttgctcaagattatatgcgcctttcagctcgacaccgggctggaatacgctaattcctataacttcgcaaagaaggaaaacaactcaccagagcatctgaaggacgaggttagcatcattcagtctatgggctatagaaatagagcaaaacgcctcctgcagagcgaaccagaaaacccttccctgcaagaaacttctctgagtgtgcagctgtcaaaccttggcaccgtgaggacattacgtactaagcaaagaattcagccacagaaaacatccgtgtatattgagcttggctccgactcttcagaagacaccgttaataaagcgacttattgcagcgtgggagatcaggagctccttcagattaccccccaggggactcgcgacgaaatttctctggacagtgcaaagaaagcagcgtgcgaatttagcgagactgacgttacaaacaccgaacaccatcagccttccaataacgacctgaatacgaccgaaaagcgggcagcagagcgacacccagagaagtaccagggctcatctgtatccaatctgcatgtcgagccttgcggcaccaatacacacgcatcatcactgcagcatgaaaattcatccctgctcctcactaaggataggatgaatgtggagaaggctgagttttgcaacaaaagcaaacaacccggcctggcccgatcccagcataatcgttgggccggctcgaaagagacctgcaacgaccgcaggacaccgagcactgaaaaaaaggtggatctgaacgccgacccactctgcgagcgcaaagagtggaataaacagaaactcccttgctccgaaaatccccgagacaccgaagacgtaccctggatcacgctaaatagtagcatacagaaagtaaatgagtggttttccaggtctgacgaattactcggctcagatgactcccacgatggagagtcggagagtaatgccaaagtcgctgatgtcctggatgttctgaatgaggtggacgagtacagcggaagcagcgagaagattgatctgttagcctcagatccccatgaagctctgatttgcaagtcggaaagggttcactccaagtctgtagagagcaatatcgaggacaaaatcttcggaaaaacttacaggaagaaagccagcctgccgaactag

SEQ ID NO: 171633 - DNA, 4704 bp, Artificial Sequence
  derived and/or modified sequence
atgaatgtggagaaagccgagttctgcaacaagtctaagcagccgggtttggccaggtctcagcataaccggtgggcgggttcgaaggagacatgcaatgaccggcgaacacctagcacagagaagaaagtggatctcaatgccgatcctttatgtgagcgaaaggagtggaacaagcaaaaattgccctgctcagaaaacccaagagacaccgaggacgttccctggatcaccctgaatagttcaatccaaaaggtgaatgagtggttttcgaggtccgatgaactcctgggctcagacgattcacatgacggcgagagtgagagcaatgcaaaggtcgctgacgtcctggacgtgctgaatgaagtcgacgaatattccgggtccagcgaaaagattgatctactggcaagtgatccacacgaggcactgatttgcaaatccgaacgtgtgcatagtaaaagcgtggaaagtaatattgaagacaagatcttcggtaagacttacaggaaaaaagcctcattgcctaacctgtcccacgtgacagagaaccttatcataggcgctttcgtgaccgagccacagattatacaggagcgaccactgactaacaagctcaagagaaaacgcaggcctacctcggggctccatccagaagactttattaagaaagccgatctggccgtccaaaaaaccccggagatgatcaatcaaggcaccaaccaaacagaacaaaacggacaggtgatgaatatcaccaattccggccatgaaaacaagactaagggggacagcattcagaatgagaaaaaccccaaccctattgagagtctggaaaaagagagtgccttcaaaaccaaggccgaaccgataagctctagcatatccaatatggagcttgagctgaatatccataactccaaggcccctaagaagaacagattgagacggaaatcatctacaaggcacattcatgcactcgaattggtggttagtagaaacctgtcaccacctaactgcacagagctccaaattgactcctgctcaagttccgaagaaattaagaagaagaaatataaccagatgcccgtcaggcatagccgcaatctgcagctcatggagggaaaggagccagccaccggtgcgaagaaaagcaataaacccaacgaacagaccagcaagcggcatgattcagatacattccccgagctgaagctcactaatgcgcctgggtcctttaccaagtgttcaaacacgtctgaacttaaagagttcgtaaatccaagcctacctagagaagagaaggaagagaagctggagaccgttaaggtatcaaacaacgctgaggatcccaaagatctgatgctgtcaggagagcgggtcctccagacggagcgaagcgtggagtcatccagcatttcactggtgccaggaaccgattacggaacacaggagagtataagcctcctggaggtgagtaccctcggtaaggccaaaacggagcctaataagtgtgtgtcgcagtgtgctgcatttgagaaccctaagggacttatccacggatgctctaaggacaataggaatgacactgagggtttcaaataccccctgggacacgaggtgaaccattcacgcgagacttcaatcgagatggaggaaagcgagctggacgcccagtacctccagaatacctttaaagtgtccaagagacagagtttcgcccctttctctaatccaggaaatgccgaagaggagtgtgccaccttctccgcgcatagcgggtccctgaagaagcagagcccaaaagtgactttcgagtgtgaacagaaggaagaaaaccagggaaagaatgaaagtaacataaaacccgtccaaacagtgaatatcacggctggctttcccgtagtgggacagaaagacaagccagtcgacaatgccaagtgtagcattaaagggggatcccgcttttgcctttcatctcagttcagaggcaatgaaactgggctgatcacccccaataagcacggcctgttgcaaaacccctaccggataccacccctgttccctattaagtcgttcgtgaagacaaaatgcaaaaaaaacttgttggaggagaactttgaggaacattccatgagcccagaaagagagatgggaaacgaaaatattccgtcgacagtaagcaccattagcaggaataacattcgcgaaaatgtctttaaggaggctagttcttctaacattaacgaggtgggcagttcaacaaatgaggtgggctcctccattaatgagatcggtagcagcgatgagaacattcaagcagagctgggacgtaatagagggccaaaactgaatgcaatgctcagactgggggtgctgcaacctgaagtctacaagcagtcactgcctgggtccaactgcaagcaccctgaaattaagaaacaggaatacgaagaggtcgtgcagactgtaaataccgattttagtccctatctgatctccgacaacctggaacaaccgatgggatctagccacgcgagtcaggtttgcagcgagaccccggatgacctcctggacgacggcgagattaaagaggatacttctttcgcagaaaatgacatcaaggaatcttccgctgtcttcagcaaatcggtccaaaagggagaattatcacgcagcccctccccatttactcatacccacttagctcagggctatcgtcggggagctaagaaactggagtccagtgaagaaaacttgtccagtgaagatgaagagttgccttgtttccagcatctgcttttcggcaaagttaataacatcccgagtcagtctactagacactccactgtggccacagaatgcctgagcaaaaatactgaagagaatttgctgtctctcaaaaatagcttgaatgactgctcgaaccaagtgatcctggcaaaggcatcccaagagcaccatctttccgaggagaccaaatgctctgcatcactgttcagttcccaatgtagcgagctagaggatctcacagctaacacaaatacccaggaccccttcctgattggcagctctaaacagatgaggcaccaatcagagagccagggcgtgggccttagcgacaaggaactggtttctgacgacgaagaacggggaaccggccttgaagagaataaccaagaagaacagagcatggattccaatttgggtgaagcggcatctggttgtgagtctgagacaagcgtttctgaggattgcagcggtctgagctcccagtcggacattttgaccacccaacagagagacaccatgcagcacaacctgataaaactccagcaggagatggctgagctcgaagccgtccttgagcagcacggctcccagccttcaaattcctacccctccattataagcgattcttccgcacttgaggacctcaggaacccagagcaaagtacttccgagaaggcagtcctgacaagtcagaagtcaagcgagtatcctatcagccagaacccagagggcctgtctgcggataagttcgaagtgtctgcggactcttctacctccaagaacaaggaacctggagtagagagatcaagccccagtaaatgtccgagtcttgacgacagatggtatatgcatagctgttcaggttccctgcagaatcggaattatccatcccaggaagaactcattaaggtagttgatgtggaggaacaacagcttgaagagtccggacctcacgacctgaccgaaacttcatacctgccacgccaagacctagaaggcactccctaccttgagtccggcatatcactgtttagcgacgaccctgagagtgatccatctgaagacagggctcccgaaagtgctcgcgttggtaacatcccgtctagcaccagtgctctcaaagttcctcagttgaaagtcgctgaatctgcacagtccccagccgcagcacatactacagacacagccggttataatgcaatggaggaaagcgtcagcagagagaagcccgaactcaccgcaagcacagagcgtgtgaacaagagaatgagtatggtggtgtcaggtctgacacccgaggagtttatgctggtgtataaattcgcccgtaaacatcacataaccctgactaatttaattacagaagaaacgacacacgtagtcatgaagactgatgccgagtttgtctgtgagcggaccctgaagtattttctgggcatcgcaggtggtaaatgggtggtatcctacttttgggttactcagagtatcaaagagcgcaagatgttgaacgaacacgattttgaagtgagaggtgatgtagttaacgggagaaaccaccaggggccaaagcgggcacgagagtcccaggaccgtaagatcttccgcggacttgaaatctgctgttatgggcctttcacaaacatgccaaccgaccagttggagtggatggtgcaactgtgcggagccagcgtggtgaaggaactcagtagctttacactgggcaccggagtccaccccatcgtcgtcgtgcagcctgatgcatggactgaagacaacggtttccatgctattggacagatgtgtgaagcgccagtagtgacacgcgagtgggtgctggattccgtagccctttaccagtgtcaggagctggacacatatctcatcccacagatcccgcacagccattactag

SEQ ID NO: 171634 - DNA, 4797 bp, Artificial Sequence
  derived and/or modified sequence
atggacttgtccgcacttagggtagaagaagtgcagaatgtcataaacgccatgcaaaagattttggagtgtccaatctgcttagaactcattaaagagcccgtgtcgacaaaatgcgatcacatcttttgcaagttttgtatgctgaagcttctgaatcagaagaaggggcctagtcagtgcccactgtgcaaaaacgacatcacaaaaagaagtctccaagagagcacccgcttttctcagttggtagaagagctcctgaagattatctgcgccttccagctggacacaggacttgaatacgctaacagttataatttcgcgaagaaggagaataactctcccgaacacctgaaagatgaagttagtattattcagtcaatgggctaccgtaaccgcgctaaacgtctcctccagagcgagcctgagaaccctagcctgcaggagacgagtctcagtgtgcagctgtctaatcttgggactgtgcggactcttcgcaccaaacagaggatccagccccagaagacctccgtgtacatcgagctgggatctgactcctccgaggacaccgtcaacaaggccacctactgtagcgtgggagatcaagagctcttgcagataactccacagggcacacgcgacgaaatttcactggactcagccaagaaggccgcttgtgagttttctgaaaccgatgtgaccaacaccgaacaccaccagccgtccaataatgatctcaacactacagagaaacgcgctgcagagcgacaccctgagaagtatcaggggtcttccgtttctaacctccacgtagagccttgtgggacaaacacgcatgccagctccctgcagcacgagaacagctcactgttgcttactaaagataggatgaacgtcgagaaagccgagttttgcaacaagagtaaacagcctggactggccagatcccagcacaatcgatgggccggaagcaaggagacctgcaatgatcggagaaccccttccactgaaaagaaagtggacctgaacgccgatcctctgtgtgagcgaaaagagtggaataagcagaaactcccctgcagcgaaaaccccagagacactgaggatgtgccttggataaccctgaacagttcaatccagaaagtaaacgagtggtttagcagatcagacgaacttctgggaagtgacgattctcacgatggggaatcagagagtaatgctaaagtggcagacgtgctggacgtcttgaatgaggttgacgagtacagcggctcatcagagaaaattgacctgcttgcatcagaccctcatgaagcactgatctgcaaatccgagagagttcatagcaaatctgtggaaagcaacatcgaggataaaatctttggaaaaacgtaccgcaagaaagccagccttccaaatctgagtcatgtgaccgagaacctaatcatcggggcatttgttactgaaccgcaaataatccaggaacggcctctgaccaataaactgaaacggaagcggagacctacaagcggcctgcaccctgaggattttattaagaaggctgatctggctgtgcagaaaacccccgagatgattaatcagggaactaatcagaccgagcaaaatggccaggtgatgaacataacaaacagcgggcatgagaataagacaaagggcgacagcattcaaaacgagaagaatcccaatccgattgagagtctagaaaaagagtccgccttcaaaaccaaagccgagcctatttcaagtagtatctccaatatggagctcgagctcaacatacacaactctaaggccccaaaaaaaaacagactgaggcgaaaatctagtactcggcacatccacgctctggaactggtcgtttcgcgcaatctatcaccccctaattgcaccgagctccaaattgatagctgcagttcttccgaagaaatcaagaagaagaagtataaccagatgccagtccggcactcacggaatctccagctgatggagggtaaggagcctgctactggcgctaagaagagcaataagcccaacgagcagacctccaagcgtcatgactctgataccttcccagaactgaaactaaccaatgcacctggttcttttacaaaatgttctaatacgtccgaactgaaagagtttgtcaatccttctctgccgagagaagaaaaggaagaaaaattggaaaccgtcaaagtgtcgaacaacgccgaggatcctaaggatctgatgctctccggagagcgggtactacagaccgaaaggtccgtggaatccagctctatctcactagtgccagggacagactatggaacacaagagtcaataagcctgctggaggtctctacactggggaaagccaagactgagccaaataagtgcgttagccagtgcgccgcattcgaaaacccaaagggactcatacacgggtgtagcaaagacaacagaaatgacacggagggatttaagtacccgcttggacacgaagtaaaccatagtcgagaaacgtctatagaaatggaagaaagcgagttggatgctcagtatcttcagaatacatttaaggtcagcaaaagacaatcttttgcacccttctcaaacccgggtaacgccgaggaagagtgtgcgactttttctgcccattctgggagcctaaagaaacagtcaccaaaggttaccttcgagtgcgagcagaaagaagagaaccaagggaaaaatgaaagcaatataaaacctgtgcagactgtgaatattaccgccggattccctgtggtggggcagaaggataagccagtcgacaatgcaaagtgctccatcaagggcggaagcaggttttgcctgtctagtcaatttcgagggaacgaaaccggactaatcacccccaacaaacatggactgttgcaaaatccctaccggatcccgccactttttcccatcaaatccttcgttaaaaccaagtgcaagaagaaccttctcgaagaaaatttcgaggagcatagcatgtcacccgaacgcgaaatgggaaatgaaaacatccctagtaccgtcagcactataagtagaaacaacattcgggaaaatgtcttcaaggaagcatccagcagcaacatcaacgaagtaggaagtagtactaatgaagtcggcagttctatcaatgaaataggctcatcagacgaaaacattcaggccgaattggggagaaacaggggtccaaagctgaatgcaatgctgagattgggcgttttacaacctgaggtctataagcagagcctgccagggtctaactgcaagcacccagagattaaaaaacaggagtacgaagaggtcgtgcaaactgtaaatactgacttctccccttatctgattagtgataacttagaacagcccatggggtcgtctcacgcttcccaggtctgttccgaaacacccgacgacctgttagatgatggagaaatcaaagaagacacttcctttgcagagaacgatataaaagagtcttctgccgtgttcagtaagtccgtccagaaaggggagctgagtaggagtccatctccattcacccacacgcatctggcacagggatatcggaggggggcaaaaaaacttgagagttctgaagaaaacctgtccagtgaagacgaggagctgccttgcttccagcacctgctgttcggcaaggtcaacaatattccctcacagtccactcgacattctacagttgccacagagtgtctatcaaagaataccgaagagaacctcctgtcactgaagaactcccttaatgattgttccaatcaagtcatcctcgctaaggccagtcaagagcaccatctgtcggaggaaacaaagtgttccgcctctctgttctcatcacaatgcagcgagctggaggacctgacagccaacactaatacccaggacccttttctgatcgggtccagcaagcagatgcgtcaccaatccgaatcccaaggggtcgggcttagcgacaaggagttggtgtccgatgatgaagagaggggaaccggcttggaagagaacaatcaagaagagcaatccatggatagcaatcttggtgaagctgctagtggatgtgagtcagaaaccagcgtatctgaggactgcagtgggttatcttcacagagtgacatcctcacgactcagcagagagataccatgcagcataatctgatcaagctgcagcaggaaatggcggagcttgaagcagtgctcgaacaacacggcagtcaacctagcaattcttacccatccatcataagcgactccagcgcgctagaggatctgagaaacccagagcagtccacttcagagaaaggcgtaacccagagtatcaaggagcggaaaatgctgaatgaacacgactttgaagtcagaggcgacgtcgtaaacgggaggaaccaccagggccctaaaagagctcgcgagagtcaagatcggaagatcttcagggggctggagatctgctgctacggtcccttcactaatatgcctactgaccagctggagtggatggtgcagctatgcggagccagcgtggttaaagagctctcaagctttacattgggtacgggagtccacccgatcgtggtcgtacaacccgatgcttggaccgaggacaatggattccatgccatcggccaaatgtgcgaggctcccgtcgtgactagggaatgggttctggactcagtggccttataccagtgccaggagctagatacttacttgattccacaaatcccacacagtcattactag

SEQ ID NO: 171635 - DNA, 5591 bp, Artificial Sequence
  derived and/or modified sequence
atggacctctccgcgctccgagtggaggaggtccagaacgttattaatgcaatgcagaagatcctggaatgtcccatatgcctggaactcattaaagagccagtgtctaccaaatgtgatcacatattctgcaagttctgcatgctgaagctgcttaaccagaagaagggaccctctcagtgcccactatgcaagaatgatattacaaaaaggtcattacaggaatccacacggttctcccagcttgttgaagagctgcttaagattatctgtgcgtttcaactagataccgggctggagtacgctaattcttataacttcgccaaaaaggagaataactccccagaacacctgaaagacgaggtgtccataatccaatcgatggggtacagaaaccgggcaaagcggctattgcagagtgagcctgaaaatccatccttgcaagagacatccctgtcggtgcaactcagtaatctggggaccgtaagaaccctgaggactaaacaacgcatccagccccagaagaccagtgtatatatagaactaggcagcgattctagtgaggacacggtgaacaaggccacatattgcagtgtcggtgatcaagagctcctgcaaatcacgccccagggcacgcgcgacgaaatttcattggattcagccaaaaaagctgcttgtgaattttctgaaacggacgtgacaaacaccgaacaccatcaaccctccaacaatgatctgaacactaccgaaaagagggccgctgagagacaccccgagaaatatcaaggatcctccgtgtctaaccttcacgtagagccgtgtgggactaacacccacgccagctcgctgcaacatgaaaacagctccctgcttctcaccaaggaccgaatgaacgtagaaaaagcagagttttgcaataagtccaaacagccgggactggccagatcacagcataatcgctgggccggaagtaaagagacgtgtaacgatagaaggacaccaagcaccgagaagaaggtggatttgaatgccgatcctctatgtgagcgcaaggagtggaacaagcagaagttgccttgtagcgaaaaccctcgagacaccgaggacgtcccttggattaccctgaacagctctatccagaaggtgaacgagtggttctcccgatcagatgagctgctggggtcggacgattcacatgacggggagtctgagtccaacgccaaagtcgcggatgtgctcgatgtgcttaacgaagtcgacgagtattccggctcttcagaaaaaattgacctcctggccagcgatccccacgaggcactgatatgcaaaagtgagcgggtgcacagtaaatcagtagagtccaatattgaggacaaaatttttggtaagacctacagaaaaaaggcgtcacttccaaacctgagtcacgtgacggaaaaccttatcattggggcattcgtaaccgaaccccagatcatccaggagaggcccttgactaataagttgaagagaaaacgaaggcccacctctggactgcacccagaggacttcatcaagaaagcggacctggcagttcagaagaccccagaaatgataaatcagggaactaaccagacggaacaaaacgggcaggttatgaatatcactaacagtggtcatgagaacaagaccaagggagactccattcagaacgagaaaaatcccaaccccatcgagtcacttgagaaggagagtgcctttaaaaccaaggccgagcccataagctcatcaattagtaatatggaactcgaactcaacattcacaattctaaagcgccaaagaaaaaccggctccgccgaaagtcttctacccgtcatatacatgcgttagagctcgttgtcagcagaaacctttccccgcctaattgcacagaactccaaatcgacagctgcagcagcagcgaggagatcaagaagaaaaagtataatcaaatgccagttcgccactccagaaatctgcaactcatggagggcaaagaacctgccaccggggctaaaaaaagcaataagcctaatgagcagactagcaagcgccacgattcagacactttccctgaactgaagctgaccaatgctcctgggagtttcactaagtgctctaacacctccgagctgaaagagttcgtgaatccttccctcccaagggaggagaaggaggaaaaattggagactgttaaagtgagcaataacgccgaggacccaaaggatctgatgctttcaggagagcgggtgcttcagacagagaggagtgtggaaagctccagcattagcttggtacccggtacagactatggcacccaggagtctattagcctgcttgaagtctccactttgggaaaagccaagaccgagccgaacaagtgcgtgagccagtgcgcagcatttgagaatcccaagggcctcatccacgggtgttcaaaggacaaccgaaatgacaccgaggggttcaagtatcctctgggacacgaggtgaaccactccagggagacaagcatcgaaatggaggagtctgaactggatgcccagtacctgcaaaacaccttcaaagttagcaagcgacaaagctttgcacccttcagcaatcctggaaacgccgaagaggagtgcgctaccttttcagcccattctggctctttgaaaaaacaatctccaaaggtgacatttgagtgcgaacagaaggaagagaaccaggggaagaacgaatccaacatcaagcccgtccagacggtaaacataactgcgggattccctgtggtggggcagaaggacaaacccgttgacaacgccaaatgtagtataaaaggagggagtagattttgcctctccagtcagttccggggaaacgaaactggactcatcactccaaataaacatgggctcttgcagaacccataccgtatccctccgctctttccaatcaagagtttcgtgaagaccaaatgcaaaaaaaaccttctagaagaaaacttcgaagagcactccatgtcaccagagcgcgaaatggggaacgagaacataccttccactgtgagtaccataagtagaaataatattagagagaacgtttttaaggaagcctcttcttctaacattaatgaggtggggagttctactaatgaggtggggagttccattaacgagattggttcctccgacgagaacattcaggcggaactgggtagaaacagaggccctaaacttaacgccatgctgaggttgggggtccttcaacccgaagtgtataaacagtctctgccaggatcaaactgtaagcatcctgagatcaaaaaacaagaatatgaggaagtagttcaaacagtcaacacggacttttccccctacctgatttccgacaacctggagcaaccaatgggtagttctcatgccagtcaggtctgttcagagacacctgacgacctcctcgacgacggggaaatcaaggaagacacttcttttgctgagaacgatatcaaggaatcatccgcggtattttccaaaagtgtacaaaagggggaactgagccgttctccatctcctttcactcacactcacctggcccaggggtatagacgaggggcaaaaaagctggagtcgtcagaggaaaacctctcctcggaagacgaggaactgccatgtttccaacacttactcttcggcaaagtgaacaatataccaagtcaaagtaccaggcacagcacggtggccactgaatgtctgagcaaaaatactgaggagaatctgctctctctgaagaacagtttaaacgattgttccaatcaggtcatcctagccaaggcttcgcaggagcaccacttgtcagaggagaccaaatgctccgcgtctctgttttctagccagtgctccgaactggaggatctgaccgctaataccaacacccaggaccctttcctcatcggtagctccaagcagatgagacaccaaagtgagagccaaggggttggactgtctgataaagagttggtgtccgatgacgaggaaaggggtacagggctggaggagaacaatcaggaagagcaatccatggacagcaatttaggggaggctgcgagcgggtgtgaaagcgagaccagcgtctctgaggattgtagcgggttgtcatcacaaagtgacattctgactactcagcagcgcgatacgatgcagcacaatctgatcaaactgcaacaggaaatggccgagctcgaagccgtgcttgagcaacacggaagccagccatctaatagctatcctagcattatctccgatagtagcgcactcgaagacctgcgaaatcctgaacagtcaacaagtgagaaggccgtccttacatcccagaagtcgagcgagtatcccatttcccagaaccctgaaggtctgtctgcagacaagttcgaggtctccgctgactcttcaactagcaagaacaaagaacccggagtcgagaggagttccccgagtaagtgcccctctctggacgaccgctggtacatgcacagttgttcgggaagcttgcagaaccgcaactacccttcccaggaggagctgatcaaagtcgtcgacgtggaagagcagcaactggaggagagcggtccacacgatctcactgaaacgagttatctacccagacaggatttagaaggaactccttatcttgaatcaggcataagcctcttctccgacgatccggaatccgatcccagtgaagatcgtgcacctgaatctgcacgggtaggaaacatccccagcagcacctcggcgctcaaggtgccccagcttaaggtcgcggagtctgctcagtctcccgctgcagcccacaccacggataccgccggatacaacgccatggaggaatctgtgtcaagggagaaaccagagctaaccgcttctaccgagagggtgaataaacgcatgtctatggtcgtaagcggactgacacccgaggagttcatgctcgtgtataaatttgcacggaaacaccacattaccctgactaatcttatcacggaggaaacaacccacgtggttatgaaaaccgatgccgaatttgtgtgcgaacggaccctaaagtatttcttggggattgctggagggaaatgggtcgtgagctatttttgggtcacacagtctatcaaggagcgcaaaatgctgaacgagcacgactttgaagtccgcggtgatgtggtcaatggcagaaatcaccagggcccaaaaagggcccgtgagtctcaggaccgcaagatcttcagaggcctcgaaatctgctgttacggaccttttacgaacatgcccaccgatcagctcgaatggatggtgcagctgtgcggcgctagcgtggtcaaggagctgtcctcctttacactcggcaccggtgtacatccaatcgtggtggtgcagcctgatgcctggacagaagacaatggtttccacgcaatcggccaaatgtgtgaggctccagtggtgaccagggaatgggtcttggatagtgttgctctctaccagtgtcaggagctagatacctacctgattccacagatccctcatagccactacta

SEQ ID NO: 171636 - DNA, 1950 bp, Artificial Sequence
  derived and/or modified sequence
atggatctcagcgccctgcgtgtggaggaggttcagaacgtcataaatgcgatgcagaaaatccttgaatgccccatttgtctggaactaattaaagaaccagtgagcacaaagtgcgatcacatcttttgtaaattttgcatgctgaagctgcttaatcagaaaaaaggcccatcacagtgcccgctctgcaaaaacgatattaccaagaggtcgctccaggagtcaacacgcttctctcagttggtggaggaactactgaagattatctgtgcatttcagcttgataccgggctggagtacgcaaactcttataactttgctaagaaggagaataactccccagagcatctgaaagacgaagtgagtatcattcagtccatgggataccgcaatagagcaaaacggctgctgcagtctgagcctgaaaacccaagtttacaggagacatccctcagtgtgcaactgagtaacttggggacagtacgcactcttcggactaagcagcgcatccaaccccagaaaaccagcgtctatatagagctcggatccgatagctcggaggataccgtgaacaaggccacatattgcagtgtaggcgatcaggaactcttgcagattacaccccagggtactagggacgaaatctctttggattctgctaaaaaggccgcttgcgagtttagcgagaccgatgtgaccaacacggaacaccatcagcctagcaataatgatttaaacaccacggagaagagagcggctgaacggcacccggaaaaataccaagggagctcagtatccaatttgcatgtcgagccttgtggaactaacacgcatgcgagttcactgcagcatgaaaacagtagtttgctgctgactaaagacagaatgaatgtagaaaaggccgagttttgtaacaagagcaaacagcctggtctggccagaagtcaacacaataggtgggctggatcaaaagagacgtgcaacgatagaaggacccccagtactgagaaaaaggtcgacctgaacgccgacccactttgcgagagaaaggaatggaacaagcaaaaactcccctgtagcgaaaacccgcgtgacactgaagatgtcccctggattaccctgaactcttcgatacagaaggtcaacgagtggttttccaggtccgacgaacttctcgggtccgatgattcccacgacggagagtcagaatccaatgcaaaggtggccgatgtcctggatgtacttaacgaagtggatgagtactcaggtagtagtgagaaaatcgatctattggccagtgacccccacgaagccctgatttgtaaatcagagcgggtacactccaagagcgtggaatcaaatatagaagacaagatttttgggaagacctatcggaagaaagcctctctacccaacctttcgcatgtaacagaaaatctgatcattggcgcattcgtgactgaaccccagattattcaggaacgacccttgactaacaagctaaagcggaaaaggcgacccacatccgggctgcacccagaagatttcataaagaaggccgacctcgcagtgcagaaaacgcccgagatgattaatcagggtaccaaccagacagaacagaacggccaagttatgaatatcactaactcaggtcacgaaaataagactaaaggcgatagcatccaaaatgaaaagaatccaaatcccattgagagcctggagaaggagagtgctttcaagactaaagcagagcctatctcatcatctattagtaacatggagctcgagctgaacatccacaattcaaaggctcctaagaagaaccgactgcggagaaaatcttctacgcgccacatccacgcccttgagcttgtggtaagcagaaacttgtccccaccaaattgtaccgaattgcagatcgactcctgttcttccagcgaagaatag

SEQ ID NO: 171637 - DNA, 1869 bp, Artificial Sequence
  derived and/or modified sequence
atggacctttccgctcttagagtcgaagaggtgcagaacgtaattaatgctatgcagaagattctcgaatgccctatatgccttgagctgatcaaggaaccggtttccaccaagtgtgatcacatcttttgtaaaagtttacaggaatccaccagattctcccagctggtggaggagctgctgaagatcatttgcgcatttcagctggatacggggctggagtacgctaattcctacaactttgccaaaaaagagaataattcacccgagcatctgaaagatgaggtgtccattattcagtcgatggggtacaggaaccgcgctaaacggttattacagagcgaacctgaaaaccccagtctgcaggagacctctctgagcgttcaactgagcaacctgggcaccgtccggacgctcagaactaaacagagaattcaaccccagaaaacatctgtgtacatcgaacttggaagtgatagctctgaggataccgtaaataaggctacttactgcagcgtgggcgaccaggagctgctgcagatcacccctcaggggacaagggatgagatatctctggactctgccaagaaggctgcatgcgagttttcagaaaccgacgtgacaaatactgaacatcatcagccctcaaacaacgacctgaatacgacagagaaacgcgcagcagaacgtcatcccgaaaaatatcaagggtctagcgtgtctaacctgcacgtggaaccctgcggcactaacacccacgcctccagtcttcagcacgaaaacagttcactgctgctcacaaaagatcgtatgaacgtggaaaaggcagaattctgcaacaagtccaaacagcccggtttggccaggagccagcataacaggtgggcgggtagcaaagagacttgtaatgacagaaggaccccatcaacggaaaaaaaggtggatctgaatgccgatcccctgtgcgagcgtaaagaatggaataaacagaagttgccttgctccgagaatccacgtgataccgaagatgtcccctggataacactgaatagcagcattcaaaaagtgaatgaatggttctctagaagcgacgagctgctcggctcagacgactcccacgatggagagtccgagtcaaacgctaaggtggcggacgttctagacgtgcttaacgaggtcgatgaatattcaggtagcagtgagaaaatcgacctcctggcatccgatcctcatgaagccctgatctgcaaaagtgagagggtccattcgaaatccgtggagtccaacatcgaggataagatttttggcaagacgtatcgtaaaaaagcatcccttccaaacctttcgcatgtcaccgagaatctgatcataggcgcattcgtgactgaacctcagatcattcaggaacggcctctcaccaacaagttgaagcggaagcgcaggccgacatctggattgcacccagaagatttcattaaaaaggccgatttggcggtgcagaagacccccgagatgatcaaccaaggtacaaaccagacagagcagaacggccaggtgatgaacatcactaacagcggccatgaaaataagacgaagggagatagtatccagaacgagaagaatccgaatcccatagagtccctcgaaaaggagtccgcctttaagacgaaggcagaaccaatctcgtcttctatcagtaatatggaactggagctgaacattcacaactctaaggccccaaagaagaaccggcttcgacgcaagtcctctacccggcatatacacgcgctggaactggtggtctcaaggaatcttagcccacccaactgcacggagctgcagattgacagttgttcatcctcagagtag

SEQ ID NO: 171638 - DNA, 5450 bp, Artificial Sequence
  derived and/or modified sequence
atgctgaagctgctgaaccagaagaagggaccatcacaatgcccgctctgtaaaaacgacatcaccaaacgttccctacaggaaagtacccggttctcgcaattggtcgaggagctgttgaagataatttgtgcatttcagctagacactggcctggaatatgcgaactcttacaatttcgcaaagaaggagaacaatagccccgaacacctgaaggacgaagtcagcatcatccagtccatggggtaccggaatagggcgaagcgcttgctccagtccgagcccgagaatccttcactgcaggagacaagcctgagtgtccagctgtcgaatcttggcacggtcagaacgctgcgtacaaaacagcgaatacagccccagaagacatctgtgtacattgaactgggctcagattcttctgaggatactgtgaacaaggctacgtactgttccgtgggagaccaggagttgctccagatcacgccacagggtacacgggacgaaatcagcctggattcagccaagaaggcggcatgtgagtttagtgagaccgatgtcacaaacactgagcatcatcagccctcaaataacgacctgaataccaccgagaaaagggctgccgaaaggcaccccgagaagtaccagggctctagcgtcagtaacctccacgtggagccatgtggcaccaatacccatgctagctctctccagcatgaaaacagcagcctgcttttaaccaaagatcgcatgaacgtggagaaggccgagttttgtaacaagagcaagcaaccgggacttgctcggtcccagcacaaccgttgggcgggatctaaggagacctgcaatgatcgcagaacccccagcacggaaaaaaaggtggacctcaatgctgatccactgtgcgagcgcaaagagtggaataagcaaaagctgccctgttcggagaatcccagggatacagaagatgtgccttggatcacgctgaattccagtatccaaaaggtcaatgagtggttttcccgctcagacgagctgctcgggagcgatgacagtcacgatggcgaaagcgagagcaacgccaaggtcgccgatgtactggacgttctgaatgaagtggacgagtatagcggaagctccgagaaaattgacctgttagcaagtgaccctcacgaagctctaatatgtaagagtgaacgcgtgcactctaaatctgtggagtccaatatcgaggataagatttttggaaaaacctaccgtaaaaaggccagtctgccaaatctctcccatgttactgagaatttgatcatcggtgccttcgtgacagagcctcagatcattcaggaacgaccccttaccaacaagcttaaacgcaagagaagaccgacaagtggactccaccctgaggatttcatcaagaaggccgatttagcagtgcagaagactcccgaaatgattaatcagggcacaaaccagactgagcagaacggacaggtgatgaacattaccaatagcggccacgagaataagaccaagggcgatagcatccaaaacgagaagaatccaaaccccattgagagtctagagaaagagagtgccttcaagaccaaggctgagccgataagttcatctatttctaatatggagcttgagctgaatatacataatagcaaagcaccaaaaaagaaccgcctcagacgcaaaagctctaccaggcacatccatgccctggagctggtcgtatcgcgcaacctgtcgccccctaattgtacggagctccaaattgatagctgtagcagctcagaggaaatcaaaaaaaaaaaatacaaccagatgccagtgaggcacagccgcaacttacagctgatggaggggaaggagcccgcaacaggcgctaagaagagcaacaagcctaatgaacagaccagcaagcggcacgatagtgacactttccctgagttgaagttgaccaacgccccaggcagctttaccaaatgttccaacacctcggagctgaaggagttcgtaaatccttccctgccaagagaagaaaaggaagaaaagcttgagaccgtgaaggtgtcgaacaacgctgaggaccccaaagatctgatgctgagcggcgaacgcgtgctccagaccgagcgctcagtggagagcagtagcatctctctcgtaccagggacagactatggaacccaggagtcaatttccctgctggaagtatctacattggggaaagcaaagacagagcccaataaatgcgtttcccagtgcgctgcatttgaaaatcccaagggccttatccatggctgttcaaaggataatcgtaatgacacagagggcttcaagtatcctctcggacacgaagtgaatcattcacgggagacgtcaatagaaatggaggagagcgagctcgatgcccagtatcttcaaaacactttcaaggtgtctaagaggcagtccttcgcgccattctctaatcctggtaacgcagaggaggagtgcgcaaccttttcagctcatagtggcagcctgaaaaagcagagtccaaaggtaacttttgaatgcgagcagaaagaggagaaccaaggcaagaacgagagtaatatcaagcccgttcagactgtgaatatcactgctggttttccagtggttgggcagaaagacaaaccagtggataacgcaaaatgtagcattaagggtgggtcccggttctgtttgtccagtcaatttcgcggaaatgagacgggcttgattacccctaataaacatggactgctgcagaatccgtatcgaatcccacccctttttcctattaagtcttttgtaaagacgaagtgcaagaaaaatcttctggaagaaaacttcgaggagcactctatgtcgcccgaacgcgaaatgggtaatgagaacattccgagcaccgttagcactatcagccgtaacaacattagagaaaacgtttttaaggaggcctcctcctccaacattaacgaagtagggtcaagcaccaacgaggtgggcagcagtatcaatgagattggctctagcgatgagaacatccaggccgagctggggagaaatcggggtcccaagctgaacgcgatgctgcggctcggggtgttacagccagaagtatataaacagtccttgccagggagtaattgtaaacatccggaaatcaaaaagcaggaatatgaagaggtggtgcagaccgtgaataccgactttagtccgtatctcataagcgataaccttgagcagcccatgggcagttctcacgcctcccaagtgtgctccgagacgcccgacgacctgctcgatgacggcgagattaaggaagatacttcttttgcagagaacgacattaaagaatctagcgctgttttctctaagtccgtgcaaaagggggagctctcccggtcaccttccccgttcactcatacccatctggcgcagggatacaggcggggtgccaagaagctggaaagtagtgaagaaaacctcagcagtgaagacgaagagctgccctgtttccagcacctgctcttcgggaaggttaataacattcccagtcagtccacaagacactccacggttgcaaccgagtgcttgtctaagaatacagaggagaacttgctgtcactgaagaattcgctaaatgattgtagtaaccaagtaatcttggcgaaggccagccaggaacaccatctttctgaagaaacaaagtgctctgctagcctgttttcgtcgcaatgttccgaactggaggacctgacagctaatacaaacacgcaggaccccttcctgattgggagcagtaagcaaatgcggcatcaaagcgagtcgcagggcgtggggctgtccgataaagagctcgtgtccgacgatgaggaacgcggaaccggcctggaggagaataaccaggaagaacagtctatggattcgaacttaggagaggccgcttctgggtgtgaatccgagacatctgtatccgaagactgtagcgggttgagctcccagagtgacattctcacaacccagcaacgcgacacaatgcagcacaatttgattaagctccaacaggagatggcagaactggaagctgtgttggaacaacacggatctcagccgtctaattcctacccttcgattatctccgattcaagtgctttggaagacctccggaatccagaacagagcacgagcgaaaaggcggtcctgacaagccagaagtcttcagagtatccaatttcgcagaatccagaagggctgtcggccgacaagtttgaggtgagcgccgattccagcacatccaagaacaaagagccaggggtggaacggtcgtcgccaagtaaatgtccaagtttggatgatcgatggtatatgcactcatgctctggaagtttgcagaataggaactatccatcacaagaggaacttattaaggttgtggacgtcgaagaacagcagctagaagagagcgggcctcacgacctgactgaaacttcctaccttcccaggcaggatctggaagggacaccgtatctagagtccgggatctccctgtttagcgacgacccagagtcagatccttccgaggaccgagccccagagagcgcacgtgtagggaacatcccaagcagcacctccgctctaaaggtacctcagctgaaggtagctgaatccgctcaatcccccgctgctgcgcataccactgataccgcaggttataacgctatggaggagagtgtgagtagagagaagcccgaactgaccgcgagcaccgagagggttaataaacgtatgtcaatggtggtaagtggtctgacgcctgaggaatttatgctggtgtacaagtttgcgagaaagcaccatatcaccctgaccaacctgattaccgaagaaaccacccatgtcgtcatgaagaccgacgctgagtttgtatgtgaaaggacccttaaatattttttgggtatagctggcggtaaatgggttgtgagctatttctgggtgacacagtctataaaggagcggaaaatgctgaacgaacacgatttcgaagtgaggggagatgtggtcaacggcaggaatcatcaaggccctaaacgggctagggaatcccaggatcggaagattttccgcggactggaaatttgttgctacggtcctttcacaaatatgcctacagatcaactggaatggatggttcagctgtgtggcgcttcagtcgtcaaggagctctcatctttcaccttggggactggcgttcatccaattgtggttgtccagcctgatgcatggaccgaggataatgggtttcacgccatcggtcaaatgtgtgaagcgccagtagtgacacgcgaatgggtgcttgactccgttgcactgtatcaatgtcaggagttggacacataccttattcctcagatcccccactcccactacta

SEQ ID NO: 171639 - DNA, 1422 bp, Artificial Sequence
  derived and/or modified sequence
atggacctgtctgccctgcgagtagaggaggtgcagaatgtgattaatgccatgcagaagatccttgagtgccccatttgcttagaactgataaaagaacccgtgagtactaaatgcgaccacatcttttgcaaattttgtatgctgaagctcctgaatcagaaaaagggaccatctcaatgccccctttgcaagaacgacatcactaaacgttccctgcaggagagtaccagattttcacagctggtagaggagctgctgaagataatatgtgcttttcagctcgatacaggtctggaatacgctaacagctataatttcgctaagaaagagaacaattctcccgagcacctgaaagatgaggtaagcattatccagagtatgggttatagaaatagagcaaagaggctactgcagagtgaaccggaaaaccctagcctgcaagagactagcttgtccgtccagctgtccaatctggggactgtgagaactctgcggacaaaacagcgaatccagcctcagaaaacgagtgtctatatcgagctgggtagcgatagtagcgaggatacagttaataaagctacatattgttccgtgggcgatcaggagctgcttcagataaccccccagggtacacgtgatgagatttccttggatagcgccaaaaaagctgcctgcgaattcagcgagactgatgtgacaaatacggaacaccaccaaccgagcaacaatgatctgaacactacagagaaacgggctgcggaaagacatccagagaagtaccagggcagttccgtgtccaacctccatgttgaaccttgcgggacgaatacccacgccagcagcctgcagcatgagaacagctccctactcctcactaaagatcggatgaacgttgagaaggccgagttctgtaataaaagcaagcaacccggattagcccgaagtcagcacaacaggtgggcgggaagcaaggaaacttgcaacgatcggaggacaccttcaactgagaaaaaagtcgatctgaatgccgaccccttgtgcgagcgcaaggagtggaacaagcagaaactgccttgctcagagaacccccgtgacacggaagatgtgccttggattaccctgaatagctcaatccagaaggtgaacgaatggttcagccgctctgacgaactgctggggagcgatgactcacacgatggggaaagtgaaagcaatgcaaaagtggctgatgtactggatgtattgaatgaagttgacgagtatagcgggagttctgaaaagattgaccttctggcatcagatcctcacgaagctctaatctgcaaatccgagcgagtacattccaaatccgttgagtctaacatcgaggacaagattttcgggaagacctaccgcaaaaaggcttcccttcccaattag

SEQ ID NO: 171640 - DNA, 7114 bp, Artificial Sequence
  derived and/or modified sequence
cttagcggtagccccttggtttccgtggcaacggaaaagcgcgggaattacagataaattaaaactgcgactgcgcggcgtgagctcgctgagacttcctggacgggggacaggctgtggggtttctcagataactgggcccctgcgctcaggaggccttcaccctctgctctggttcattggaacagaaagaaatggatttatctgctcttcgcgttgaagaagtacaaaatgtcattaatgctatgcagaaaatcttagagtgtcccatctgattttgcatgctgaaacttctcaaccagaagaaagggccttcacagtgtcctttatgtaagaatgatataaccaaaaggagcctacaagaaagtacgagatttagtcaacttgttgaagagctattgaaaatcatttgtgcttttcagcttgacacaggtttggagtatgcaaacagctataattttgcaaaaaaggaaaataactctcctgaacatctaaaagatgaagtttctatcatccaaagtatgggctacagaaaccgtgccaaaagacttctacagagtgaacccgaaaatccttccttgcaggaaaccagtctcagtgtccaactctctaaccttggaactgtgagaactctgaggacaaagcagcggatacaacctcaaaagacgtctgtctacattgaattgggatctgattcttctgaagataccgttaataaggcaacttattgcagtgtgggagatcaagaattgttacaaatcacccctcaaggaaccagggatgaaatcagtttggattctgcaaaaaaggctgcttgtgaattttctgagacggatgtaacaaatactgaacatcatcaacccagtaataatgatttgaacaccactgagaagcgtgcagctgagaggcatccagaaaagtatcagggtagttctgtttcaaacttgcatgtggagccatgtggcacaaatactcatgccagctcattacagcatgagaacagcagtttattactcactaaagacagaatgaatgtagaaaaggctgaattctgtaataaaagcaaacagcctggcttagcaaggagccaacataacagatgggctggaagtaaggaaacatgtaatgataggcggactcccagcacagaaaaaaaggtagatctgaatgctgatcccctgtgtgagagaaaagaatggaataagcagaaactgccatgctcagagaatcctagagatactgaagatgttccttggataacactaaatagcagcattcagaaagttaatgagtggttttccagaagtgatgaactgttaggttctgatgactcacatgatggggagtctgaatcaaatgccaaagtagctgatgtattggacgttctaaatgaggtagatgaatattctggttcttcagagaaaatagacttactggccagtgatcctcatgaggctttaatatgtaaaagtgaaagagttcactccaaatcagtagagagtaatattgaagacaaaatatttgggaaaacctatcggaagaaggcaagcctccccaacttaagccatgtaactgaaaatctaattataggagcatttgttactgagccacagataatacaagagcgtcccctcacaaataaattaaagcgtaaaaggagacctacatcaggccttcatcctgaggattttatcaagaaagcagatttggcagttcaaaagactcctgaaatgataaatcagggaactaaccaaacggagcagaatggtcaagtgatgaatattactaatagtggtcatgagaataaaacaaaaggtgattctattcagaatgagaaaaatcctaacccaatagaatcactcgaaaaagaatctgctttcaaaacgaaagctgaacctataagcagcagtataagcaatatggaactcgaattaaatatccacaattcaaaagcacctaaaaagaataggctgaggaggaagtcttctaccaggcatattcatgcgcttgaactagtagtcagtagaaatctaagcccacctaattgtactgaattgcaaattgatagttgttctagcagtgaagagataaagaaaaaaaagtacaaccaaatgccagtcaggcacagcagaaacctacaactcatggaaggtaaagaacctgcaactggagccaagaagagtaacaagccaaatgaacagacaagtaaaagacatgacagcgatactttcccagagctgaagttaacaaatgcacctggttcttttactaagtgttcaaataccagtgaacttaaagaatttgtcaatcctagccttccaagagaagaaaaagaagagaaactagaaacagttaaagtgtctaataatgctgaagaccccaaagatctcatgttaagtggagaaagggttttgcaaactgaaagatctgtagagagtagcagtatttcattggtacctggtactgattatggcactcaggaaagtatctcgttactggaagttagcactctagggaaggcaaaaacagaaccaaataaatgtgtgagtcagtgtgcagcatttgaaaaccccaagggactaattcatggttgttccaaagataatagaaatgacacagaaggctttaagtatccattgggacatgaagttaaccacagtcgggaaacaagcatagaaatggaagaaagtgaacttgatgctcagtatttgcagaatacattcaaggtttcaaagcgccagtcatttgctccgttttcaaatccaggaaatgcagaagaggaatgtgcaacattctctgcccactctgggtccttaaagaaacaaagtccaaaagtcacttttgaatgtgaacaaaaggaagaaaatcaaggaaagaatgagtctaatatcaagcctgtacagacagttaatatcactgcaggctttcctgtggttggtcagaaagataagccagttgataatgccaaatgtagtatcaaaggaggctctaggttttgtctatcatctcagttcagaggcaacgaaactggactcattactccaaataaacatggacttttacaaaacccatatcgtataccaccactttttcccatcaagtcatttgttaaaactaaatgtaagaaaaatctgctagaggaaaactttgaggaacattcaatgtcacctgaaagagaaatgggaaatgagaacattccaagtacagtgagcacaattagccgtaataacattagagaaaatgtttttaaagaagccagctcaagcaatattaatgaagtaggttccagtactaatgaagtgggctccagtattaatgaaataggttccagtgatgaaaacattcaagcagaactaggtagaaacagagggccaaaattgaatgctatgcttagattaggggttttgcaacctgaggtctataaacaaagtcttcctggaagtaattgtaagcatcctgaaataaaaaagcaagaatatgaagaagtagttcagactgttaatacagatttctctccatatctgatttcagataacttagaacagcctatgggaagtagtcatgcatctcaggtttgttctgagacacctgatgacctgttagatgatggtgaaataaaggaagatactagttttgctgaaaatgacattaaggaaagttctgctgtttttagcaaaagcgtccagaaaggagagcttagcaggagtcctagccctttcacccatacacatttggctcagggttaccgaagaggggccaagaaattagagtcctcagaagagaacttatctagtgaggatgaagagcttccctgcttccaacacttgttatttggtaaagtaaacaatataccttctcagtctactaggcatagcaccgttgctaccgagtgtctgtctaagaacacagaggagaatttattatcattgaagaatagcttaaatgactgcagtaaccaggtaatattggcaaaggcatctcaggaacatcaccttagtgaggaaacaaaatgttctgctagcttgttttcttcacagtgcagtgaattggaagacttgactgcaaatacaaacacccaggatcctttcttgattggttcttccaaacaaatgaggcatcagtctgaaagccagggagttggtctgagtgacaaggaattggtttcagatgatgaagaaagaggaacgggcttggaagaaaataatcaagaagagcaaagcatggattcaaacttaggtgaagcagcatctgggtgtgagagtgaaacaagcgtctctgaagactgctcagggctatcctctcagagtgacattttaaccactcagcagagggataccatgcaacataacctgataaagctccagcaggaaatggctgaactagaagctgtgttagaacagcatgggagccagccttctaacagctacccttccatcataagtgactcttctgcccttgaggacctgcgaaatccagaacaaagcacatcagaaaaagcagtattaacttcacagaaaagtagtgaataccctataagccagaatccagaaggcctttctgctgacaagtttgaggtgtctgcagatagttctaccagtaaaaataaagaaccaggagtggaaaggtcatccccttctaaatgcccatcattagatgataggtggtacatgcacagttgctctgggagtcttcagaatagaaactacccatctcaagaggagctcattaaggttgttgatgtggaggagcaacagctggaagagtctgggccacacgatttgacggaaacatcttacttgccaaggcaagatctagagggaaccccttacctggaatctggaatcagcctcttctctgatgaccctgaatctgatccttctgaagacagagccccagagtcagctcgtgttggcaacataccatcttcaacctctgcattgaaagttccccaattgaaagttgcagaatctgcccagagtccagctgctgctcatactactgatactgctgggtataatgcaatggaagaaagtgtgagcagggagaagccagaattgacagcttcaacagaaagggtcaacaaaagaatgtccatggtggtgtctggcctgaccccagaagaatttatgctcgtgtacaagtttgccagaaaacaccacatcactttaactaatctaattactgaagagactactcatgttgttatgaaaacagatgctgagtttgtgtgtgaacggacactgaaatattttctaggaattgcgggaggaaaatgggtagttagctatttctgggtgacccagtctattaaagaaagaaaaatgctgaatgagcatgattttgaagtcagaggagatgtggtcaatggaagaaaccaccaaggtccaaagcgagcaagagaatcccaggacagaaagatcttcagggggctagaaatctgttgctatgggcccttcaccaacatgcccacagatcaactggaatggatggtacagctgtgtggtgcttctgtggtgaaggagctttcatcattcacccttggcacaggtgtccacccaattgtggttgtgcagccagatgcctggacagaggacaatggcttccatgcaattgggcagatgtgtgaggcacctgtggtgacccgagagtgggtgttggacagtgtagcactctaccagtgccaggagctggacacctacctgataccccagatcccccacagccactactgactgcagccagccacaggtacagagccacaggaccccaagaatgagcttacaaagtggcctttccaggccctgggagctcctctcactcttcagtccttctactgtcctggctactaaatattttatgtacatcagcctgaaaaggacttctggctatgcaagggtcccttaaagattttctgcttgaagtctcccttggaaatctgccatgagcacaaaattatggtaatttttcacctgagaagattttaaaaccatttaaacgccaccaattgagcaagatgctgattcattatttatcagccctattctttctattcaggctgttgttggcttagggctggaagcacagagtggcttggcctcaagagaatagctggtttccctaagtttacttctctaaaaccctgtgttcacaaaggcagagagtcagacccttcaatggaaggagagtgcttgggatcgattatgtgacttaaagtcagaatagtccttgggcagttctcaaatgttggagtggaacattggggaggaaattctgaggcaggtattagaaatgaaaaggaaacttgaaacctgggcatggtggctcacgcctgtaatcccagcactttgggaggccaaggtgggcagatcactggaggtcaggagttcgaaaccagcctggccaacatggtgaaaccccatctctactaaaaatacagaaattagccggtcatggtggtggacacctgtaatcccagctactcaggtggctaaggcaggagaatcacttcagcccgggaggtggaggttgcagtgagccaagatcataccacggcactccagcctgggtgacagtgagactgtggctcaaaaaaaaaaaaaaaaaaaggaaaatgaaactagaagagatttctaaaagtctgagatatatttgctagatttctaaagaatgtgttctaaaacagcagaagattttcaagaaccggtttccaaagacagtcttctaattcctcattagtaataagtaaaatgtttattgttgtagctctggtatataatccattcctcttaaaatataagacctctggcatgaatatttcatatctataaaatgacagatcccaccaggaaggaagctgttgctttctttgaggtgatttttttcctttgctccctgttgctgaaaccatacagcttcataaataattttgcttgctgaaggaagaaaaagtgtttttcataaacccattatccaggactgtttatagctgttggaaggactaggtcttccctagcccccccagtgtgcaagggcagtgaagacttgattgtacaaaatacgttttgtaaatgttgtgctgttaacactgcaaataaacttggtagcaaacacttcc

SEQ ID NO: 171641 - DNA, 6411 bp, Artificial Sequence
  derived and/or modified sequence
gtaccttgatttcgtattctgagaggctgctgcttagcggtagccccttggtttccgtggcaacggaaaagcgcgggaattacagataaattaaaactgcgactgcgcggcgtgagctcgctgagacttcctggacgggggacaggctgtggggtttctcagataactgggcccctgcgctcaggaggccttcaccctctgctctgggtaaagttcattggaacagaaagaaatggatttatctgctcttcgcgttgaagaagtacaaaatgtcattaatgctatgcagaaaatcttagagtgtcccatctgtctggagttgatcaaggaacctgtctccacaaagtgtgaccacatattttgcaaattttgcatgctgaaacttctcaaccagaagaaagggccttcacagtgtcctttatgtaagaatgatataaccaaaaggagcctacaagaaagtacgagatttagtcaacttgttgaagagctattgaaaatcatttgtgcttttcagcttgacacaggtttggagtatgcaaacagctataattttgcaaaaaaggaaaataactctcctgaacatctaaaagatgaagtttctatcatccaaagtatgggctacagaaaccgtgccaaaagacttctacagagtgaacccgaaaatccttccttgcaggaaaccagtctcagtgtccaactctctaaccttggaactgtgagaactctgaggacaaagcagcggatacaacctcaaaagacgtctgtctacattgaattgggatctgattcttctgaagataccgttaataaggcaacttattgcagtgtgggagatcaagaattgttacaaatcacccctcaaggaaccagggatgaaatcagtttggattctgcaaaaaaggctgcttgtgaattttctgagacggatgtaacaaatactgaacatcatcaacccagtaataatgatttgaacaccactgagaagcgtgcagctgagaggcatccagaaaagtatcagggtagttctgtttcaaacttgcatgtggagccatgtggcacaaatactcatgccagctcattacagcatgagaacagcagtttattactcactaaagacagaatgaatgtagaaaaggctgaattctgtaataaaagcaaacagcctggcttagcaaggagccaacataacagatgggctggaagtaaggaaacatgtaatgataggcggactcccagcacagaaaaaaaggtagatctgaatgctgatcccctgtgtgagagaaaagaatggaataagcagaaactgccatgctcagagaatcctagagatactgaagatgttccttggataacactaaatagcagcattcagaaagttaatgagtggttttccagaagtgatgaactgttaggttctgatgactcacatgatggggagtctgaatcaaatgccaaagtagctgatgtattggacgttctaaatgaggtagatgaatattctggttcttcagagaaaatagacttactggccagtgatcctcatgaggctttaatatgtaaaagtgaaagagttcactccaaatcagtagagagtaatattgaagacaaaatatttgggaaaacctatcggaagaaggcaagcctccccaacttaagccatgtaactgaaaatctaattataggagcatttgttactgagccacagataatacaagagcgtcccctcacaaataaattaaagcgtaaaaggagacctacatcaggccttcatcctgaggattttatcaagaaagcagatttggcagttcaaaagactcctgaaatgataaatcagggaactaaccaaacggagcagaatggtcaagtgatgaatattactaatagtggtcatgagaataaaacaaaaggtgattctattcagaatgagaaaaatcctaacccaatagaatcactcgaaaaagaatctgctttcaaaacgaaagctgaacctataagcagcagtataagcaatatggaactcgaattaaatatccacaattcaaaagcacctaaaaagaataggctgaggaggaagtcttctaccaggcatattcatgcgcttgaactagtagtcagtagaaatctaagcccacctaattgtactgaattgcaaattgatagttgttctagcagtgaagagataaagaaaaaaaagtacaaccaaatgccagtcaggcacagcagaaacctacaactcatggaaggtaaagaacctgcaactggagccaagaagagtaacaagccaaatgaacagacaagtaaaagacatgacagcgatactttcccagagctgaagttaacaaatgcacctggttcttttactaagtgttcaaataccagtgaacttaaagaatttgtcaatcctagccttccaagagaagaaaaagaagagaaactagaaacagttaaagtgtctaataatgctgaagaccccaaagatctcatgttaagtggagaaagggttttgcaaactgaaagatctgtagagagtagcagtatttcattggtacctggtactgattatggcactcaggaaagtatctcgttactggaagttagcactctagggaaggcaaaaacagaaccaaataaatgtgtgagtcagtgtgcagcatttgaaaaccccaagggactaattcatggttgttccaaagataatagaaatgacacagaaggctttaagtatccattgggacatgaagttaaccacagtcgggaaacaagcatagaaatggaagaaagtgaacttgatgctcagtatttgcagaatacattcaaggtttcaaagcgccagtcatttgctccgttttcaaatccaggaaatgcagaagaggaatgtgcaacattctctgcccactctgggtccttaaagaaacaaagtccaaaagtcacttttgaatgtgaacaaaaggaagaaaatcaaggaaagaatgagtctaatatcaagcctgtacagacagttaatatcactgcaggctttcctgtggttggtcagaaagataagccagttgataatgccaaatgtagtatcaaaggaggctctaggttttgtctatcatctcagttcagaggcaacgaaactggactcattactccaaataaacatggacttttacaaaacccatatcgtataccaccactttttcccatcaagtcatttgttaaaactaaatgtaagaaaaatctgctagaggaaaactttgaggaacattcaatgtcacctgaaagagaaatgggaaatgagaacattccaagtacagtgagcacaattagccgtaataacattagagaaaatgtttttaaagaagccagctcaagcaatattaatgaagtaggttccagtactaatgaagtgggctccagtattaatgaaataggttccagtgatgaaaacattcaagcagaactaggtagaaacagagggccaaaattgaatgctatgcttagattaggggttttgcaacctgaggtctataaacaaagtcttcctggaagtaattgtaagcatcctgaaataaaaaagcaagaatatgaagaagtagttcagactgttaatacagatttctctccatatctgatttcagataacttagaacagcctatgggaagtagtcatgcatctcaggtttgttctgagacacctgatgacctgttagatgatggtgaaataaaggaagatactagttttgctgaaaatgacattaaggaaagttctgctgtttttagcaaaagcgtccagaaaggagagcttagcaggagtcctagccctttcacccatacacatttggctcagggttaccgaagaggggccaagaaattagagtcctcagaagagaacttatctagtgaggatgaagagcttccctgcttccaacacttgttatttggtaaagtaaacaatataccttctcagtctactaggcatagcaccgttgctaccgagtgtctgtctaagaacacagaggagaatttattatcattgaagaatagcttaaatgactgcagtaaccaggtaatattggcaaaggcatctcaggaacatcaccttagtgaggaaacaaaatgttctgctagcttgttttcttcacagtgcagtgaattggaagacttgactgcaaatacaaacacccaggatcctttcttgattggttcttccaaacaaatgaggcatcagtctgaaagccagggagttggtctgagtgacaaggaattggtttcagatgatgaagaaagaggaacgggcttggaagaaaataatcaagaagagcaaagcatggattcaaacttaggtgaagcagcatctgggtgtgagagtgaaacaagcgtctctgaagactgctcagggctatcctctcagagtgacattttaaccactcagcagagggataccatgcaacataacctgataaagctccagcaggaaatggctgaactagaagctgtgttagaacagcatgggagccagccttctaacagctacccttccatcataagtgactcttctgcccttgaggacctgcgaaatccagaacaaagcacatcagaaaaaggggtgacccagtctattaaagaaagaaaaatgctgaatgagcatgattttgaagtcagaggagatgtggtcaatggaagaaaccaccaaggtccaaagcgagcaagagaatcccaggacagaaagatcttcagggggctagaaatctgttgctatgggcccttcaccaacatgcccacagatcaactggaatggatggtacagctgtgtggtgcttctgtggtgaaggagctttcatcattcacccttggcacaggtgtccacccaattgtggttgtgcagccagatgcctggacagaggacaatggcttccatgcaattgggcagatgtgtgaggcacctgtggtgacccgagagtgggtgttggacagtgtagcactctaccagtgccaggagctggacacctacctgataccccagatcccccacagccactactgactgcagccagccacaggtacagagccacaggaccccaagaatgagcttacaaagtggcctttccaggccctgggagctcctctcactcttcagtccttctactgtcctggctactaaatattttatgtacatcagcctgaaaaggacttctggctatgcaagggtcccttaaagattttctgcttgaagtctcccttggaaatctgccatgagcacaaaattatggtaatttttcacctgagaagattttaaaaccatttaaacgccaccaattgagcaagatgctgattcattatttatcagccctattctttctattcaggctgttgttggcttagggctggaagcacagagtggcttggcctcaagagaatagctggtttccctaagtttacttctctaaaaccctgtgttcacaaaggcagagagtcagacccttcaatggaaggagagtgcttgggatcgattatgtgacttaaagtcagaatagtccttgggcagttctcaaatgttggagtggaacattggggaggaaattctgaggcaggtattagaaatgaaaaggaaacttgaaacctgggcatggtggctcacgcctgtaatcccagcactttgggaggccaaggtgggcagatcactggaggtcaggagttcgaaaccagcctggccaacatggtgaaaccccatctctactaaaaatacagaaattagccggtcatggtggtggacacctgtaatcccagctactcaggtggctaaggcaggagaatcacttcagcccgggaggtggaggttgcagtgagccaagatcataccacggcactccagcctgggtgacagtgagactgtggctcaaaaaaaaaaaaaaaaaaaggaaaatgaaactagaagagatttctaaaagtctgagatatatttgctagatttctaaagaatgtgttctaaaacagcagaagattttcaagaaccggtttccaaagacagtcttctaattcctcattagtaataagtaaaatgtttattgttgtagctctggtatataatccattcctcttaaaatataagacctctggcatgaatatttcatatctataaaatgacagatcccaccaggaaggaagctgttgctttctttgaggtgatttttttcctttgctccctgttgctgaaaccatacagcttcataaataattttgcttgctgaaggaagaaaaagtgtttttcataaacccattatccaggactgtttatagctgttggaaggactaggtcttccctagcccccccagtgtgcaagggcagtgaagacttgattgtacaaaatacgttttgtaaatgttgtgctgttaacactgcaaataaacttggtagcaaacacttcc

SEQ ID NO: 171642 - DNA, 7094 bp, Artificial Sequence
  derived and/or modified sequence
gagctcgctgagacttcctggacgggggacaggctgtggggtttctcagataactgggcccctgcgctcaggaggccttcaccctctgctctgggtaaagttcattggaacagaaagaaatggatttatctgctcttcgcgttgaagaagtacaaaatgtcattaatgctatgcagaaaatcttagagtgtcccatctgtctggagttgatcaaggaacctgtctccacaaagtgtgaccacatattttgcaaattttgcatgctgaaacttctcaaccagaagaaagggccttcacagtgtcctttatgtaagaatgatataaccaaaaggagcctacaagaaagtacgagatttagtcaacttgttgaagagctattgaaaatcatttgtgcttttcagcttgacacaggtttggagtatgcaaacagctataattttgcaaaaaaggaaaataactctcctgaacatctaaaagatgaagtttctatcatccaaagtatgggctacagaaaccgtgccaaaagacttctacagagtgaacccgaaaatccttccttgcaggaaaccagtctcagtgtccaactctctaaccttggaactgtgagaactctgaggacaaagcagcggatacaacctcaaaagacgtctgtctacattgaattgggatctgattcttctgaagataccgttaataaggcaacttattgcagtgtgggagatcaagaattgttacaaatcacccctcaaggaaccagggatgaaatcagtttggattctgcaaaaaaggctgcttgtgaattttctgagacggatgtaacaaatactgaacatcatcaacccagtaataatgatttgaacaccactgagaagcgtgcagctgagaggcatccagaaaagtatcagggtagttctgtttcaaacttgcatgtggagccatgtggcacaaatactcatgccagctcattacagcatgagaacagcagtttattactcactaaagacagaatgaatgtagaaaaggctgaattctgtaataaaagcaaacagcctggcttagcaaggagccaacataacagatgggctggaagtaaggaaacatgtaatgataggcggactcccagcacagaaaaaaaggtagatctgaatgctgatcccctgtgtgagagaaaagaatggaataagcagaaactgccatgctcagagaatcctagagatactgaagatgttccttggataacactaaatagcagcattcagaaagttaatgagtggttttccagaagtgatgaactgttaggttctgatgactcacatgatggggagtctgaatcaaatgccaaagtagctgatgtattggacgttctaaatgaggtagatgaatattctggttcttcagagaaaatagacttactggccagtgatcctcatgaggctttaatatgtaaaagtgaaagagttcactccaaatcagtagagagtaatattgaagacaaaatatttgggaaaacctatcggaagaaggcaagcctccccaacttaagccatgtaactgaaaatctaattataggagcatttgttactgagccacagataatacaagagcgtcccctcacaaataaattaaagcgtaaaaggagacctacatcaggccttcatcctgaggattttatcaagaaagcagatttggcagttcaaaagactcctgaaatgataaatcagggaactaaccaaacggagcagaatggtcaagtgatgaatattactaatagtggtcatgagaataaaacaaaaggtgattctattcagaatgagaaaaatcctaacccaatagaatcactcgaaaaagaatctgctttcaaaacgaaagctgaacctataagcagcagtataagcaatatggaactcgaattaaatatccacaattcaaaagcacctaaaaagaataggctgaggaggaagtcttctaccaggcatattcatgcgcttgaactagtagtcagtagaaatctaagcccacctaattgtactgaattgcaaattgatagttgttctagcagtgaagagataaagaaaaaaaagtacaaccaaatgccagtcaggcacagcagaaacctacaactcatggaaggtaaagaacctgcaactggagccaagaagagtaacaagccaaatgaacagacaagtaaaagacatgacagcgatactttcccagagctgaagttaacaaatgcacctggttcttttactaagtgttcaaataccagtgaacttaaagaatttgtcaatcctagccttccaagagaagaaaaagaagagaaactagaaacagttaaagtgtctaataatgctgaagaccccaaagatctcatgttaagtggagaaagggttttgcaaactgaaagatctgtagagagtagcagtatttcattggtacctggtactgattatggcactcaggaaagtatctcgttactggaagttagcactctagggaaggcaaaaacagaaccaaataaatgtgtgagtcagtgtgcagcatttgaaaaccccaagggactaattcatggttgttccaaagataatagaaatgacacagaaggctttaagtatccattgggacatgaagttaaccacagtcgggaaacaagcatagaaatggaagaaagtgaacttgatgctcagtatttgcagaatacattcaaggtttcaaagcgccagtcatttgctccgttttcaaatccaggaaatgcagaagaggaatgtgcaacattctctgcccactctgggtccttaaagaaacaaagtccaaaagtcacttttgaatgtgaacaaaaggaagaaaatcaaggaaagaatgagtctaatatcaagcctgtacagacagttaatatcactgcaggctttcctgtggttggtcagaaagataagccagttgataatgccaaatgtagtatcaaaggaggctctaggttttgtctatcatctcagttcagaggcaacgaaactggactcattactccaaataaacatggacttttacaaaacccatatcgtataccaccactttttcccatcaagtcatttgttaaaactaaatgtaagaaaaatctgctagaggaaaactttgaggaacattcaatgtcacctgaaagagaaatgggaaatgagaacattccaagtacagtgagcacaattagccgtaataacattagagaaaatgtttttaaagaagccagctcaagcaatattaatgaagtaggttccagtactaatgaagtgggctccagtattaatgaaataggttccagtgatgaaaacattcaagcagaactaggtagaaacagagggccaaaattgaatgctatgcttagattaggggttttgcaacctgaggtctataaacaaagtcttcctggaagtaattgtaagcatcctgaaataaaaaagcaagaatatgaagaagtagttcagactgttaatacagatttctctccatatctgatttcagataacttagaacagcctatgggaagtagtcatgcatctcaggtttgttctgagacacctgatgacctgttagatgatggtgaaataaaggaagatactagttttgctgaaaatgacattaaggaaagttctgctgtttttagcaaaagcgtccagaaaggagagcttagcaggagtcctagccctttcacccatacacatttggctcagggttaccgaagaggggccaagaaattagagtcctcagaagagaacttatctagtgaggatgaagagcttccctgcttccaacacttgttatttggtaaagtaaacaatataccttctcagtctactaggcatagcaccgttgctaccgagtgtctgtctaagaacacagaggagaatttattatcattgaagaatagcttaaatgactgcagtaaccaggtaatattggcaaaggcatctcaggaacatcaccttagtgaggaaacaaaatgttctgctagcttgttttcttcacagtgcagtgaattggaagacttgactgcaaatacaaacacccaggatcctttcttgattggttcttccaaacaaatgaggcatcagtctgaaagccagggagttggtctgagtgacaaggaattggtttcagatgatgaagaaagaggaacgggcttggaagaaaataatcaagaagagcaaagcatggattcaaacttaggtgaagcagcatctgggtgtgagagtgaaacaagcgtctctgaagactgctcagggctatcctctcagagtgacattttaaccactcagcagagggataccatgcaacataacctgataaagctccagcaggaaatggctgaactagaagctgtgttagaacagcatgggagccagccttctaacagctacccttccatcataagtgactcttctgcccttgaggacctgcgaaatccagaacaaagcacatcagaaaaagcagtattaacttcacagaaaagtagtgaataccctataagccagaatccagaaggcctttctgctgacaagtttgaggtgtctgcagatagttctaccagtaaaaataaagaaccaggagtggaaaggtcatccccttctaaatgcccatcattagatgataggtggtacatgcacagttgctctgggagtcttcagaatagaaactacccatctcaagaggagctcattaaggttgttgatgtggaggagcaacagctggaagagtctgggccacacgatttgacggaaacatcttacttgccaaggcaagatctagagggaaccccttacctggaatctggaatcagcctcttctctgatgaccctgaatctgatccttctgaagacagagccccagagtcagctcgtgttggcaacataccatcttcaacctctgcattgaaagttccccaattgaaagttgcagaatctgcccagagtccagctgctgctcatactactgatactgctgggtataatgcaatggaagaaagtgtgagcagggagaagccagaattgacagcttcaacagaaagggtcaacaaaagaatgtccatggtggtgtctggcctgaccccagaagaatttatgctcgtgtacaagtttgccagaaaacaccacatcactttaactaatctaattactgaagagactactcatgttgttatgaaaacagatgctgagtttgtgtgtgaacggacactgaaatattttctaggaattgcgggaggaaaatgggtagttagctatttctgggtgacccagtctattaaagaaagaaaaatgctgaatgagcatgattttgaagtcagaggagatgtggtcaatggaagaaaccaccaaggtccaaagcgagcaagagaatcccaggacagaaagatcttcagggggctagaaatctgttgctatgggcccttcaccaacatgcccacagatcaactggaatggatggtacagctgtgtggtgcttctgtggtgaaggagctttcatcattcacccttggcacaggtgtccacccaattgtggttgtgcagccagatgcctggacagaggacaatggcttccatgcaattgggcagatgtgtgaggcacctgtggtgacccgagagtgggtgttggacagtgtagcactctaccagtgccaggagctggacacctacctgataccccagatcccccacagccactactgactgcagccagccacaggtacagagccacaggaccccaagaatgagcttacaaagtggcctttccaggccctgggagctcctctcactcttcagtccttctactgtcctggctactaaatattttatgtacatcagcctgaaaaggacttctggctatgcaagggtcccttaaagattttctgcttgaagtctcccttggaaatctgccatgagcacaaaattatggtaatttttcacctgagaagattttaaaaccatttaaacgccaccaattgagcaagatgctgattcattatttatcagccctattctttctattcaggctgttgttggcttagggctggaagcacagagtggcttggcctcaagagaatagctggtttccctaagtttacttctctaaaaccctgtgttcacaaaggcagagagtcagacccttcaatggaaggagagtgcttgggatcgattatgtgacttaaagtcagaatagtccttgggcagttctcaaatgttggagtggaacattggggaggaaattctgaggcaggtattagaaatgaaaaggaaacttgaaacctgggcatggtggctcacgcctgtaatcccagcactttgggaggccaaggtgggcagatcactggaggtcaggagttcgaaaccagcctggccaacatggtgaaaccccatctctactaaaaatacagaaattagccggtcatggtggtggacacctgtaatcccagctactcaggtggctaaggcaggagaatcacttcagcccgggaggtggaggttgcagtgagccaagatcataccacggcactccagcctgggtgacagtgagactgtggctcaaaaaaaaaaaaaaaaaaaggaaaatgaaactagaagagatttctaaaagtctgagatatatttgctagatttctaaagaatgtgttctaaaacagcagaagattttcaagaaccggtttccaaagacagtcttctaattcctcattagtaataagtaaaatgtttattgttgtagctctggtatataatccattcctcttaaaatataagacctctggcatgaatatttcatatctataaaatgacagatcccaccaggaaggaagctgttgctttctttgaggtgatttttttcctttgctccctgttgctgaaaccatacagcttcataaataattttgcttgctgaaggaagaaaaagtgtttttcataaacccattatccaggactgtttatagctgttggaaggactaggtcttccctagcccccccagtgtgcaagggcagtgaagacttgattgtacaaaatacgttttgtaaatgttgtgctgttaacactgcaaataaacttggtagcaaacacttcca

SEQ ID NO: 171643 - DNA, 5693 bp, Artificial Sequence
  derived and/or modified sequence
cctctgctctgggtaaaggtagtagagtcccgggaaagggacagggggcccaagtgatgctctggggtactggcgtgggagagtggatttccgaagctgacagatggttcattggaacagaaagaaatggatttatctgctcttcgcgttgaagaagtacaaaatgtcattaatgctatgcagaaaatcttagagtgtcccatctgtctggagttgatcaaggaacctgtctccacaaagtgtgaccacatattttgcaaattttgcatgctgaaacttctcaaccagaagaaagggccttcacagtgtcctttatgagcctacaagaaagtacgagatttagtcaacttgttgaagagctattgaaaatcatttgtgcttttcagcttgacacaggtttggagtatgcaaacagctataattttgcaaaaaaggaaaataactctcctgaacatctaaaagatgaagtttctatcatccaaagtatgggctacagaaaccgtgccaaaagacttctacagagtgaacccgaaaatccttccttggaaaccagtctcagtgtccaactctctaaccttggaactgtgagaactctgaggacaaagcagcggatacaacctcaaaagacgtctgtctacattgaattgggatctgattcttctgaagataccgttaataaggcaacttattgcagtgtgggagatcaagaattgttacaaatcacccctcaaggaaccagggatgaaatcagtttggattctgcaaaaaaggctgcttgtgaattttctgagacggatgtaacaaatactgaacatcatcaacccagtaataatgatttgaacaccactgagaagcgtgcagctgagaggcatccagaaaagtatcagggtagttctgtttcaaacttgcatgtggagccatgtggcacaaatactcatgccagctcattacagcatgagaacagcagtttattactcactaaagacagaatgaatgtagaaaaggctgaattctgtaataaaagcaaacagcctggcttagcaaggagccaacataacagatgggctggaagtaaggaaacatgtaatgataggcggactcccagcacagaaaaaaaggtagatctgaatgctgatcccctgtgtgagagaaaagaatggaataagcagaaactgccatgctcagagaatcctagagatactgaagatgttccttggataacactaaatagcagcattcagaaagttaatgagtggttttccagaagtgatgaactgttaggttctgatgactcacatgatggggagtctgaatcaaatgccaaagtagctgatgtattggacgttctaaatgaggtagatgaatattctggttcttcagagaaaatagacttactggccagtgatcctcatgaggctttaatatgtaaaagtgaaagagttcactccaaatcagtagagagtaatattgaagacaaaatatttgggaaaacctatcggaagaaggcaagcctccccaacttaagccatgtaactgaaaatctaattataggagcatttgttactgagccacagataatacaagagcgtcccctcacaaataaattaaagcgtaaaaggagacctacatcaggccttcatcctgaggattttatcaagaaagcagatttggcagttcaaaagactcctgaaatgataaatcagggaactaaccaaacggagcagaatggtcaagtgatgaatattactaatagtggtcatgagaataaaacaaaaggtgattctattcagaatgagaaaaatcctaacccaatagaatcactcgaaaaagaatctgctttcaaaacgaaagctgaacctataagcagcagtataagcaatatggaactcgaattaaatatccacaattcaaaagcacctaaaaagaataggctgaggaggaagtcttctaccaggcatattcatgcgcttgaactagtagtcagtagaaatctaagcccacctaattgtactgaattgcaaattgatagttgttctagcagtgaagagataaagaaaaaaaagtacaaccaaatgccagtcaggcacagcagaaacctacaactcatggaaggtaaagaacctgcaactggagccaagaagagtaacaagccaaatgaacagacaagtaaaagacatgacagcgatactttcccagagctgaagttaacaaatgcacctggttcttttactaagtgttcaaataccagtgaacttaaagaatttgtcaatcctagccttccaagagaagaaaaagaagagaaactagaaacagttaaagtgtctaataatgctgaagaccccaaagatctcatgttaagtggagaaagggttttgcaaactgaaagatctgtagagagtagcagtatttcattggtacctggtactgattatggcactcaggaaagtatctcgttactggaagttagcactctagggaaggcaaaaacagaaccaaataaatgtgtgagtcagtgtgcagcatttgaaaaccccaagggactaattcatggttgttccaaagataatagaaatgacacagaaggctttaagtatccattgggacatgaagttaaccacagtcgggaaacaagcatagaaatggaagaaagtgaacttgatgctcagtatttgcagaatacattcaaggtttcaaagcgccagtcatttgctccgttttcaaatccaggaaatgcagaagaggaatgtgcaacattctctgcccactctgggtccttaaagaaacaaagtccaaaagtcacttttgaatgtgaacaaaaggaagaaaatcaaggaaagaatgagtctaatatcaagcctgtacagacagttaatatcactgcaggctttcctgtggttggtcagaaagataagccagttgataatgccaaatgtagtatcaaaggaggctctaggttttgtctatcatctcagttcagaggcaacgaaactggactcattactccaaataaacatggacttttacaaaacccatatcgtataccaccactttttcccatcaagtcatttgttaaaactaaatgtaagaaaaatctgctagaggaaaactttgaggaacattcaatgtcacctgaaagagaaatgggaaatgagaacattccaagtacagtgagcacaattagccgtaataacattagagaaaatgtttttaaagaagccagctcaagcaatattaatgaagtaggttccagtactaatgaagtgggctccagtattaatgaaataggttccagtgatgaaaacattcaagcagaactaggtagaaacagagggccaaaattgaatgctatgcttagattaggggttttgcaacctgaggtctataaacaaagtcttcctggaagtaattgtaagcatcctgaaataaaaaagcaagaatatgaagaagtagttcagactgttaatacagatttctctccatatctgatttcagataacttagaacagcctatgggaagtagtcatgcatctcaggtttgttctgagacacctgatgacctgttagatgatggtgaaataaaggaagatactagttttgctgaaaatgacattaaggaaagttctgctgtttttagcaaaagcgtccagaaaggagagcttagcaggagtcctagccctttcacccatacacatttggctcagggttaccgaagaggggccaagaaattagagtcctcagaagagaacttatctagtgaggatgaagagcttccctgcttccaacacttgttatttggtaaagtaaacaatataccttctcagtctactaggcatagcaccgttgctaccgagtgtctgtctaagaacacagaggagaatttattatcattgaagaatagcttaaatgactgcagtaaccaggtaatattggcaaaggcatctcaggaacatcaccttagtgaggaaacaaaatgttctgctagcttgttttcttcacagtgcagtgaattggaagacttgactgcaaatacaaacacccaggatcctttcttgattggttcttccaaacaaatgaggcatcagtctgaaagccagggagttggtctgagtgacaaggaattggtttcagatgatgaagaaagaggaacgggcttggaagaaaataatcaagaagagcaaagcatggattcaaacttaggtgaagcagcatctgggtgtgagagtgaaacaagcgtctctgaagactgctcagggctatcctctcagagtgacattttaaccactcagcagagggataccatgcaacataacctgataaagctccagcaggaaatggctgaactagaagctgtgttagaacagcatgggagccagccttctaacagctacccttccatcataagtgactcttctgcccttgaggacctgcgaaatccagaacaaagcacatcagaaaaagcagtattaacttcacagaaaagtagtgaataccctataagccagaatccagaaggcctttctgctgacaagtttgaggtgtctgcagatagttctaccagtaaaaataaagaaccaggagtggaaaggtcatccccttctaaatgcccatcattagatgataggtggtacatgcacagttgctctgggagtcttcagaatagaaactacccatctcaagaggagctcattaaggttgttgatgtggaggagcaacagctggaagagtctgggccacacgatttgacggaaacatcttacttgccaaggcaagatctagagggaaccccttacctggaatctggaatcagcctcttctctgatgaccctgaatctgatccttctgaagacagagccccagagtcagctcgtgttggcaacataccatcttcaacctctgcattgaaagttccccaattgaaagttgcagaatctgcccagagtccagctgctgctcatactactgatactgctgggtataatgcaatggaagaaagtgtgagcagggagaagccagaattgacagcttcaacagaaagggtcaacaaaagaatgtccatggtggtgtctggcctgaccccagaagaatttatgctcgtgtacaagtttgccagaaaacaccacatcactttaactaatctaattactgaagagactactcatgttgttatgaaaacagatgctgagtttgtgtgtgaacggacactgaaatattttctaggaattgcgggaggaaaatgggtagttagctatttctgggtgacccagtctattaaagaaagaaaaatgctgaatgagcatgattttgaagtcagaggagatgtggtcaatggaagaaaccaccaaggtccaaagcgagcaagagaatcccaggacagaaagatcttcagggggctagaaatctgttgctatgggcccttcaccaacatgcccacagatcaactggaatggatggtacagctgtgtggtgcttctgtggtgaaggagctttcatcattcacccttggcacaggtgtccacccaattgtggttgtgcagccagatgcctggacagaggacaatggcttccatgcaattgggcagatgtgtgaggcacctgtggtgacccgagagtgggtgttggacagtgtagcactctaccagtgccaggagctggacacctacctgataccccagatcccccacagccactactga

SEQ ID NO: 171644 - DNA, 2108 bp, Artificial Sequence
  derived and/or modified sequence
agataactgggcccctgcgctcaggaggccttcaccctctgctctgggtaaaggtagtagagtcccgggaaagggacagggggcccaagtgatgctctggggtactggcgtgggagagtggatttccgaagctgacagatggttcattggaacagaaagaaatggatttatctgctcttcgcgttgaagaagtacaaaatgtcattaatgctatgcagaaaatcttagagtgtcccatctgtctggagttgatcaaggaacctgtctccacaaagtgtgaccacatattttgcaaattttgcatgctgaaacttctcaaccagaagaaagggccttcacagtgtcctttatgtaagaatgatataaccaaaaggagcctacaagaaagtacgagatttagtcaacttgttgaagagctattgaaaatcatttgtgcttttcagcttgacacaggtttggagtatgcaaacagctataattttgcaaaaaaggaaaataactctcctgaacatctaaaagatgaagtttctatcatccaaagtatgggctacagaaaccgtgccaaaagacttctacagagtgaacccgaaaatccttccttgcaggaaaccagtctcagtgtccaactctctaaccttggaactgtgagaactctgaggacaaagcagcggatacaacctcaaaagacgtctgtctacattgaattgggatctgattcttctgaagataccgttaataaggcaacttattgcagtgtgggagatcaagaattgttacaaatcacccctcaaggaaccagggatgaaatcagtttggattctgcaaaaaaggctgcttgtgaattttctgagacggatgtaacaaatactgaacatcatcaacccagtaataatgatttgaacaccactgagaagcgtgcagctgagaggcatccagaaaagtatcagggtagttctgtttcaaacttgcatgtggagccatgtggcacaaatactcatgccagctcattacagcatgagaacagcagtttattactcactaaagacagaatgaatgtagaaaaggctgaattctgtaataaaagcaaacagcctggcttagcaaggagccaacataacagatgggctggaagtaaggaaacatgtaatgataggcggactcccagcacagaaaaaaaggtagatctgaatgctgatcccctgtgtgagagaaaagaatggaataagcagaaactgccatgctcagagaatcctagagatactgaagatgttccttggataacactaaatagcagcattcagaaagttaatgagtggttttccagaagtgatgaactgttaggttctgatgactcacatgatggggagtctgaatcaaatgccaaagtagctgatgtattggacgttctaaatgaggtagatgaatattctggttcttcagagaaaatagacttactggccagtgatcctcatgaggctttaatatgtaaaagtgaaagagttcactccaaatcagtagagagtaatattgaagacaaaatatttgggaaaacctatcggaagaaggcaagcctccccaacttaagccatgtaactgaaaatctaattataggagcatttgttactgagccacagataatacaagagcgtcccctcacaaataaattaaagcgtaaaaggagacctacatcaggccttcatcctgaggattttatcaagaaagcagatttggcagttcaaaagactcctgaaatgataaatcagggaactaaccaaacggagcagaatggtcaagtgatgaatattactaatagtggtcatgagaataaaacaaaaggtgattctattcagaatgagaaaaatcctaacccaatagaatcactcgaaaaagaatctgctttcaaaacgaaagctgaacctataagcagcagtataagcaatatggaactcgaattaaatatccacaattcaaaagcacctaaaaagaataggctgaggaggaagtcttctaccaggcatattcatgcgcttgaactagtagtcagtagaaatctaagcccacctaattgtactgaattgcaaattgatagttgttctagcagtgaagag

SEQ ID NO: 171645 - DNA, 1980 bp, Artificial Sequence
  derived and/or modified sequence
gctgagacttcctggacgggggacaggctgtggggtttctcagataactgggcccctgcgctcaggaggccttcaccctctgctctgggtaaagttcattggaacagaaagaaatggatttatctgctcttcgcgttgaagaagtacaaaatgtcattaatgctatgcagaaaatcttagagtgtcccatctgtctggagttgatcaaggaacctgtctccacaaagtgtgaccacatattttgcaagagcctacaagaaagtacgagatttagtcaacttgttgaagagctattgaaaatcatttgtgcttttcagcttgacacaggtttggagtatgcaaacagctataattttgcaaaaaaggaaaataactctcctgaacatctaaaagatgaagtttctatcatccaaagtatgggctacagaaaccgtgccaaaagacttctacagagtgaacccgaaaatccttccttgcaggaaaccagtctcagtgtccaactctctaaccttggaactgtgagaactctgaggacaaagcagcggatacaacctcaaaagacgtctgtctacattgaattgggatctgattcttctgaagataccgttaataaggcaacttattgcagtgtgggagatcaagaattgttacaaatcacccctcaaggaaccagggatgaaatcagtttggattctgcaaaaaaggctgcttgtgaattttctgagacggatgtaacaaatactgaacatcatcaacccagtaataatgatttgaacaccactgagaagcgtgcagctgagaggcatccagaaaagtatcagggtagttctgtttcaaacttgcatgtggagccatgtggcacaaatactcatgccagctcattacagcatgagaacagcagtttattactcactaaagacagaatgaatgtagaaaaggctgaattctgtaataaaagcaaacagcctggcttagcaaggagccaacataacagatgggctggaagtaaggaaacatgtaatgataggcggactcccagcacagaaaaaaaggtagatctgaatgctgatcccctgtgtgagagaaaagaatggaataagcagaaactgccatgctcagagaatcctagagatactgaagatgttccttggataacactaaatagcagcattcagaaagttaatgagtggttttccagaagtgatgaactgttaggttctgatgactcacatgatggggagtctgaatcaaatgccaaagtagctgatgtattggacgttctaaatgaggtagatgaatattctggttcttcagagaaaatagacttactggccagtgatcctcatgaggctttaatatgtaaaagtgaaagagttcactccaaatcagtagagagtaatattgaagacaaaatatttgggaaaacctatcggaagaaggcaagcctccccaacttaagccatgtaactgaaaatctaattataggagcatttgttactgagccacagataatacaagagcgtcccctcacaaataaattaaagcgtaaaaggagacctacatcaggccttcatcctgaggattttatcaagaaagcagatttggcagttcaaaagactcctgaaatgataaatcagggaactaaccaaacggagcagaatggtcaagtgatgaatattactaatagtggtcatgagaataaaacaaaaggtgattctattcagaatgagaaaaatcctaacccaatagaatcactcgaaaaagaatctgctttcaaaacgaaagctgaacctataagcagcagtataagcaatatggaactcgaattaaatatccacaattcaaaagcacctaaaaagaataggctgaggaggaagtcttctaccaggcatattcatgcgcttgaactagtagtcagtagaaatctaagcccacctaattgtactgaattgcaaattgatagttgttctagcagtgaag

SEQ ID NO: 171646 - DNA, 1584 bp, Artificial Sequence
  derived and/or modified sequence
ggaggccttcaccctctgctctgggtaaagttcattggaacagaaagaaatggatttatctgctcttcgcgttgaagaagtacaaaatgtcattaatgctatgcagaaaatcttagagtgtcccatctgtctggagttgatcaaggaacctgtctccacaaagtgtgaccacatattttgcaaggtcttactctgttgtcccagctggagtacagtggtgcgatcatgaggcttactgttgccttgacctcctaggctcaagcgatcctatcacctcagtctcccaagtagctgggactattttgcatgctgaaacttctcaaccagaagaaagggccttcacagtgtcctttatgtaagaatgatataaccaaaaggagcctacaagaaagtacgagatttagtcaacttgttgaagagctattgaaaatcatttgtgcttttcagcttgacacaggtttggagtatgcaaacagctataattttgcaaaaaaggaaaataactctcctgaacatctaaaagatgaagtttctatcatccaaagtatgggctacagaaaccgtgccaaaagacttctacagagtgaacccgaaaatccttccttgcaggaaaccagtctcagtgtccaactctctaaccttggaactgtgagaactctgaggacaaagcagcggatacaacctcaaaagacgtctgtctacattgaattgggatctgattcttctgaagataccgttaataaggcaacttattgcagtgtgggagatcaagaattgttacaaatcacccctcaaggaaccagggatgaaatcagtttggattctgcaaaaaaggctgcttgtgaattttctgagacggatgtaacaaatactgaacatcatcaacccagtaataatgatttgaacaccactgagaagcgtgcagctgagaggcatccagaaaagtatcagggtagttctgtttcaaacttgcatgtggagccatgtggcacaaatactcatgccagctcattacagcatgagaacagcagtttattactcactaaagacagaatgaatgtagaaaaggctgaattctgtaataaaagcaaacagcctggcttagcaaggagccaacataacagatgggctggaagtaaggaaacatgtaatgataggcggactcccagcacagaaaaaaaggtagatctgaatgctgatcccctgtgtgagagaaaagaatggaataagcagaaactgccatgctcagagaatcctagagatactgaagatgttccttggataacactaaatagcagcattcagaaagttaatgagtggttttccagaagtgatgaactgttaggttctgatgactcacatgatggggagtctgaatcaaatgccaaagtagctgatgtattggacgttctaaatgaggtagatgaatattctggttcttcagagaaaatagacttactggccagtgatcctcatgaggctttaatatgtaaaagtgaaagagttcactccaaatcagtagagagtaatattgaagacaaaatatttgggaaaacctatcggaagaaggcaagcctccccaac

SEQ ID NO: 171647 - DNA, 5732 bp, Artificial Sequence
  derived and/or modified sequence
acagataaattaaaactgcgactgcgcggcgtgagctcgctgagacttcctggacgggggacaggctgtggggtttctcagataactgggcccctgcgctcaggaggccttcaccctctgctctggttcattggaacagaaagaaatggatttatctgctcttcgcgttgaagaagtacaaaatgtcattaatgctatgcagaaaatcttagagtgtcccatctgattttgcatgctgaaacttctcaaccagaagaaagggccttcacagtgtcctttatgtaagaatgatataaccaaaaggagcctacaagaaagtacgagatttagtcaacttgttgaagagctattgaaaatcatttgtgcttttcagcttgacacaggtttggagtatgcaaacagctataattttgcaaaaaaggaaaataactctcctgaacatctaaaagatgaagtttctatcatccaaagtatgggctacagaaaccgtgccaaaagacttctacagagtgaacccgaaaatccttccttgcaggaaaccagtctcagtgtccaactctctaaccttggaactgtgagaactctgaggacaaagcagcggatacaacctcaaaagacgtctgtctacattgaattgggatctgattcttctgaagataccgttaataaggcaacttattgcagtgtgggagatcaagaattgttacaaatcacccctcaaggaaccagggatgaaatcagtttggattctgcaaaaaaggctgcttgtgaattttctgagacggatgtaacaaatactgaacatcatcaacccagtaataatgatttgaacaccactgagaagcgtgcagctgagaggcatccagaaaagtatcagggtagttctgtttcaaacttgcatgtggagccatgtggcacaaatactcatgccagctcattacagcatgagaacagcagtttattactcactaaagacagaatgaatgtagaaaaggctgaattctgtaataaaagcaaacagcctggcttagcaaggagccaacataacagatgggctggaagtaaggaaacatgtaatgataggcggactcccagcacagaaaaaaaggtagatctgaatgctgatcccctgtgtgagagaaaagaatggaataagcagaaactgccatgctcagagaatcctagagatactgaagatgttccttggataacactaaatagcagcattcagaaagttaatgagtggttttccagaagtgatgaactgttaggttctgatgactcacatgatggggagtctgaatcaaatgccaaagtagctgatgtattggacgttctaaatgaggtagatgaatattctggttcttcagagaaaatagacttactggccagtgatcctcatgaggctttaatatgtaaaagtgaaagagttcactccaaatcagtagagagtaatattgaagacaaaatatttgggaaaacctatcggaagaaggcaagcctccccaacttaagccatgtaactgaaaatctaattataggagcatttgttactgagccacagataatacaagagcgtcccctcacaaataaattaaagcgtaaaaggagacctacatcaggccttcatcctgaggattttatcaagaaagcagatttggcagttcaaaagactcctgaaatgataaatcagggaactaaccaaacggagcagaatggtcaagtgatgaatattactaatagtggtcatgagaataaaacaaaaggtgattctattcagaatgagaaaaatcctaacccaatagaatcactcgaaaaagaatctgctttcaaaacgaaagctgaacctataagcagcagtataagcaatatggaactcgaattaaatatccacaattcaaaagcacctaaaaagaataggctgaggaggaagtcttctaccaggcatattcatgcgcttgaactagtagtcagtagaaatctaagcccacctaattgtactgaattgcaaattgatagttgttctagcagtgaagagataaagaaaaaaaagtacaaccaaatgccagtcaggcacagcagaaacctacaactcatggaaggtaaagaacctgcaactggagccaagaagagtaacaagccaaatgaacagacaagtaaaagacatgacagcgatactttcccagagctgaagttaacaaatgcacctggttcttttactaagtgttcaaataccagtgaacttaaagaatttgtcaatcctagccttccaagagaagaaaaagaagagaaactagaaacagttaaagtgtctaataatgctgaagaccccaaagatctcatgttaagtggagaaagggttttgcaaactgaaagatctgtagagagtagcagtatttcattggtacctggtactgattatggcactcaggaaagtatctcgttactggaagttagcactctagggaaggcaaaaacagaaccaaataaatgtgtgagtcagtgtgcagcatttgaaaaccccaagggactaattcatggttgttccaaagataatagaaatgacacagaaggctttaagtatccattgggacatgaagttaaccacagtcgggaaacaagcatagaaatggaagaaagtgaacttgatgctcagtatttgcagaatacattcaaggtttcaaagcgccagtcatttgctccgttttcaaatccaggaaatgcagaagaggaatgtgcaacattctctgcccactctgggtccttaaagaaacaaagtccaaaagtcacttttgaatgtgaacaaaaggaagaaaatcaaggaaagaatgagtctaatatcaagcctgtacagacagttaatatcactgcaggctttcctgtggttggtcagaaagataagccagttgataatgccaaatgtagtatcaaaggaggctctaggttttgtctatcatctcagttcagaggcaacgaaactggactcattactccaaataaacatggacttttacaaaacccatatcgtataccaccactttttcccatcaagtcatttgttaaaactaaatgtaagaaaaatctgctagaggaaaactttgaggaacattcaatgtcacctgaaagagaaatgggaaatgagaacattccaagtacagtgagcacaattagccgtaataacattagagaaaatgtttttaaagaagccagctcaagcaatattaatgaagtaggttccagtactaatgaagtgggctccagtattaatgaaataggttccagtgatgaaaacattcaagcagaactaggtagaaacagagggccaaaattgaatgctatgcttagattaggggttttgcaacctgaggtctataaacaaagtcttcctggaagtaattgtaagcatcctgaaataaaaaagcaagaatatgaagaagtagttcagactgttaatacagatttctctccatatctgatttcagataacttagaacagcctatgggaagtagtcatgcatctcaggtttgttctgagacacctgatgacctgttagatgatggtgaaataaaggaagatactagttttgctgaaaatgacattaaggaaagttctgctgtttttagcaaaagcgtccagaaaggagagcttagcaggagtcctagccctttcacccatacacatttggctcagggttaccgaagaggggccaagaaattagagtcctcagaagagaacttatctagtgaggatgaagagcttccctgcttccaacacttgttatttggtaaagtaaacaatataccttctcagtctactaggcatagcaccgttgctaccgagtgtctgtctaagaacacagaggagaatttattatcattgaagaatagcttaaatgactgcagtaaccaggtaatattggcaaaggcatctcaggaacatcaccttagtgaggaaacaaaatgttctgctagcttgttttcttcacagtgcagtgaattggaagacttgactgcaaatacaaacacccaggatcctttcttgattggttcttccaaacaaatgaggcatcagtctgaaagccagggagttggtctgagtgacaaggaattggtttcagatgatgaagaaagaggaacgggcttggaagaaaataatcaagaagagcaaagcatggattcaaacttaggtgaagcagcatctgggtgtgagagtgaaacaagcgtctctgaagactgctcagggctatcctctcagagtgacattttaaccactcagcagagggataccatgcaacataacctgataaagctccagcaggaaatggctgaactagaagctgtgttagaacagcatgggagccagccttctaacagctacccttccatcataagtgactcttctgcccttgaggacctgcgaaatccagaacaaagcacatcagaaaaagcagtattaacttcacagaaaagtagtgaataccctataagccagaatccagaaggcctttctgctgacaagtttgaggtgtctgcagatagttctaccagtaaaaataaagaaccaggagtggaaaggtcatccccttctaaatgcccatcattagatgataggtggtacatgcacagttgctctgggagtcttcagaatagaaactacccatctcaagaggagctcattaaggttgttgatgtggaggagcaacagctggaagagtctgggccacacgatttgacggaaacatcttacttgccaaggcaagatctagagggaaccccttacctggaatctggaatcagcctcttctctgatgaccctgaatctgatccttctgaagacagagccccagagtcagctcgtgttggcaacataccatcttcaacctctgcattgaaagttccccaattgaaagttgcagaatctgcccagagtccagctgctgctcatactactgatactgctgggtataatgcaatggaagaaagtgtgagcagggagaagccagaattgacagcttcaacagaaagggtcaacaaaagaatgtccatggtggtgtctggcctgaccccagaagaatttatgctcgtgtacaagtttgccagaaaacaccacatcactttaactaatctaattactgaagagactactcatgttgttatgaaaacagatgctgagtttgtgtgtgaacggacactgaaatattttctaggaattgcgggaggaaaatgggtagttagctatttctgggtgacccagtctattaaagaaagaaaaatgctgaatgagcatgattttgaagtcagaggagatgtggtcaatggaagaaaccaccaaggtccaaagcgagcaagagaatcccaggacagaaagatcttcagggggctagaaatctgttgctatgggcccttcaccaacatgcccacagatcaactggaatggatggtacagctgtgtggtgcttctgtggtgaaggagctttcatcattcacccttggcacaggtgtccacccaattgtggttgtgcagccagatgcctggacagaggacaatggcttccatgcaattgggcagatgtgtgaggcacctgtggtgacccgagagtgggtgttggacagtgtagcactctaccagtgccaggagctggacacctacctgataccccagatcccccacagccactactgactgcagccagccacaggtacagagccacaggaccccaagaatgagctta

SEQ ID NO: 171648 - DNA, 1612 bp, Artificial Sequence
  derived and/or modified sequence
ttagcggtagccccttggtttccgtggcaacggaaaagcgcgggaattacagataaattaaaactgcgactgcgcggcgtgagctcgctgagacttcctggacgggggacaggctgtggggtttctcagataactgggcccctgcgctcaggaggccttcaccctctgctctggttcattggaacagaaagaaatggatttatctgctcttcgcgttgaagaagtacaaaatgtcattaatgctatgcagaaaatcttagagtgtcccatctgtctggagttgatcaaggaacctgtctccacaaagtgtgaccacatattttgcaaattttgcatgctgaaacttctcaaccagaagaaagggccttcacagtgtcctttatgtaagaatgatataaccaaaaggagcctacaagaaagtacgagatttagtcaacttgttgaagagctattgaaaatcatttgtgcttttcagcttgacacaggtttggagtatgcaaacagctataattttgcaaaaaaggaaaataactctcctgaacatctaaaagatgaagtttctatcatccaaagtatgggctacagaaaccgtgccaaaagacttctacagagtgaacccgaaaatccttccttgcaggaaaccagtctcagtgtccaactctctaaccttggaactgtgagaactctgaggacaaagcagcggatacaacctcaaaagacgtctgtctacattgaattgggatctgattcttctgaagataccgttaataaggcaacttattgcagtgtgggagatcaagaattgttacaaatcacccctcaaggaaccagggatgaaatcagtttggattctgcaaaaaaggctgcttgtgaattttctgagacggatgtaacaaatactgaacatcatcaacccagtaataatgatttgaacaccactgagaagcgtgcagctgagaggcatccagaaaagtatcagggtagttctgtttcaaacttgcatgtggagccatgtggcacaaatactcatgccagctcattacagcatgagaacagcagtttattactcactaaagacagaatgaatgtagaaaaggctgaattctgtaataaaagcaaacagcctggcttagcaaggagccaacataacagatgggctggaagtaaggaaacatgtaatgataggcggactcccagcacagaaaaaaaggtagatctgaatgctgatcccctgtgtgagagaaaagaatggaataagcagaaactgccatgctcagagaatcctagagatactgaagatgttccttggataacactaaatagcagcattcagaaagttaatgagtggttttccagaagtgatgaactgttaggttctgatgactcacatgatggggagtctgaatcaaatgccaaagtagctgatgtattggacgttctaaatgaggtagatgaatattctggttcttcagagaaaatagacttactggccagtgatcctcatgaggctttaatatgtaaaagtgaaagagttcactccaaatcagtagagagtaatattgaagacaaaatatttgggaaaacctatcggaagaaggcaagcctccccaac

SEQ ID NO: 171649 - DNA, 4704 bp, Artificial Sequence
  derived and/or modified sequence
atgaacgtggagaaggccgagttctgcaacaagagcaagcagcccggcctggccagaagccagcacaacagatgggccggcagcaaggagacctgcaacgacagaagaacccccagcaccgagaagaaggtggacctgaacgccgaccccctgtgcgagagaaaggagtggaacaagcagaagctgccctgcagcgagaaccccagagacaccgaggacgtgccctggatcaccctgaacagcagcatccagaaggtgaacgagtggttcagcagaagcgacgagctgctgggcagcgacgacagccacgacggcgagagcgagagcaacgccaaggtggccgacgtgctggacgtgctgaacgaggtggacgagtacagcggcagcagcgagaagatcgacctgctggccagcgacccccacgaggccctgatctgcaagagcgagagagtgcacagcaagagcgtggagagcaacatcgaggacaagatcttcggcaagacctacagaaagaaggccagcctgcccaacctgagccacgtgaccgagaacctgatcatcggcgccttcgtgaccgagccccagatcatccaggagagacccctgaccaacaagctgaagagaaagagaagacccaccagcggcctgcaccccgaggacttcatcaagaaggccgacctggccgtgcagaagacccccgagatgatcaaccagggcaccaaccagaccgagcagaacggccaggtgatgaacatcaccaacagcggccacgagaacaagaccaagggcgacagcatccagaacgagaagaaccccaaccccatcgagagcctggagaaggagagcgccttcaagaccaaggccgagcccatcagcagcagcatcagcaacatggagctggagctgaacatccacaacagcaaggcccccaagaagaacagactgagaagaaagagcagcaccagacacatccacgccctggagctggtggtgagcagaaacctgagcccccccaactgcaccgagctgcagatcgacagctgcagcagcagcgaggagatcaagaagaagaagtacaaccagatgcccgtgagacacagcagaaacctgcagctgatggagggcaaggagcccgccaccggcgccaagaagagcaacaagcccaacgagcagaccagcaagagacacgacagcgacaccttccccgagctgaagctgaccaacgcccccggcagcttcaccaagtgcagcaacaccagcgagctgaaggagttcgtgaaccccagcctgcccagagaggagaaggaggagaagctggagaccgtgaaggtgagcaacaacgccgaggaccccaaggacctgatgctgagcggcgagagagtgctgcagaccgagagaagcgtggagagcagcagcatcagcctggtgcccggcaccgactacggcacccaggagagcatcagcctgctggaggtgagcaccctgggcaaggccaagaccgagcccaacaagtgcgtgagccagtgcgccgccttcgagaaccccaagggcctgatccacggctgcagcaaggacaacagaaacgacaccgagggcttcaagtaccccctgggccacgaggtgaaccacagcagagagaccagcatcgagatggaggagagcgagctggacgcccagtacctgcagaacaccttcaaggtgagcaagagacagagcttcgcccccttcagcaaccccggcaacgccgaggaggagtgcgccaccttcagcgcccacagcggcagcctgaagaagcagagccccaaggtgaccttcgagtgcgagcagaaggaggagaaccagggcaagaacgagagcaacatcaagcccgtgcagaccgtgaacatcaccgccggcttccccgtggtgggccagaaggacaagcccgtggacaacgccaagtgcagcatcaagggcggcagcagattctgcctgagcagccagttcagaggcaacgagaccggcctgatcacccccaacaagcacggcctgctgcagaacccctacagaatcccccccctgttccccatcaagagcttcgtgaagaccaagtgcaagaagaacctgctggaggagaacttcgaggagcacagcatgagccccgagagagagatgggcaacgagaacatccccagcaccgtgagcaccatcagcagaaacaacatcagagagaacgtgttcaaggaggccagcagcagcaacatcaacgaggtgggcagcagcaccaacgaggtgggcagcagcatcaacgagatcggcagcagcgacgagaacatccaggccgagctgggcagaaacagaggccccaagctgaacgccatgctgagactgggcgtgctgcagcccgaggtgtacaagcagagcctgcccggcagcaactgcaagcaccccgagatcaagaagcaggagtacgaggaggtggtgcagaccgtgaacaccgacttcagcccctacctgatcagcgacaacctggagcagcccatgggcagcagccacgccagccaggtgtgcagcgagacccccgacgacctgctggacgacggcgagatcaaggaggacaccagcttcgccgagaacgacatcaaggagagcagcgccgtgttcagcaagagcgtgcagaagggcgagctgagcagaagccccagccccttcacccacacccacctggcccagggctacagaagaggcgccaagaagctggagagcagcgaggagaacctgagcagcgaggacgaggagctgccctgcttccagcacctgctgttcggcaaggtgaacaacatccccagccagagcaccagacacagcaccgtggccaccgagtgcctgagcaagaacaccgaggagaacctgctgagcctgaagaacagcctgaacgactgcagcaaccaggtgatcctggccaaggccagccaggagcaccacctgagcgaggagaccaagtgcagcgccagcctgttcagcagccagtgcagcgagctggaggacctgaccgccaacaccaacacccaggaccccttcctgatcggcagcagcaagcagatgagacaccagagcgagagccagggcgtgggcctgagcgacaaggagctggtgagcgacgacgaggagagaggcaccggcctggaggagaacaaccaggaggagcagagcatggacagcaacctgggcgaggccgccagcggctgcgagagcgagaccagcgtgagcgaggactgcagcggcctgagcagccagagcgacatcctgaccacccagcagagagacaccatgcagcacaacctgatcaagctgcagcaggagatggccgagctggaggccgtgctggagcagcacggcagccagcccagcaacagctaccccagcatcatcagcgacagcagcgccctggaggacctgagaaaccccgagcagagcaccagcgagaaggccgtgctgaccagccagaagagcagcgagtaccccatcagccagaaccccgagggcctgagcgccgacaagttcgaggtgagcgccgacagcagcaccagcaagaacaaggagcccggcgtggagagaagcagccccagcaagtgccccagcctggacgacagatggtacatgcacagctgcagcggcagcctgcagaacagaaactaccccagccaggaggagctgatcaaggtggtggacgtggaggagcagcagctggaggagagcggcccccacgacctgaccgagaccagctacctgcccagacaggacctggagggcaccccctacctggagagcggcatcagcctgttcagcgacgaccccgagagcgaccccagcgaggacagagcccccgagagcgccagagtgggcaacatccccagcagcaccagcgccctgaaggtgccccagctgaaggtggccgagagcgcccagagccccgccgccgcccacaccaccgacaccgccggctacaacgccatggaggagagcgtgagcagagagaagcccgagctgaccgccagcaccgagagagtgaacaagagaatgagcatggtggtgagcggcctgacccccgaggagttcatgctggtgtacaagttcgccagaaagcaccacatcaccctgaccaacctgatcaccgaggagaccacccacgtggtgatgaagaccgacgccgagttcgtgtgcgagagaaccctgaagtacttcctgggcatcgccggcggcaagtgggtggtgagctacttctgggtgacccagagcatcaaggagagaaagatgctgaacgagcacgacttcgaggtgagaggcgacgtggtgaacggcagaaaccaccagggccccaagagagccagagagagccaggacagaaagatcttcagaggcctggagatctgctgctacggccccttcaccaacatgcccaccgaccagctggagtggatggtgcagctgtgcggcgccagcgtggtgaaggagctgagcagcttcaccctgggcaccggcgtgcaccccatcgtggtggtgcagcccgacgcctggaccgaggacaacggcttccacgccatcggccagatgtgcgaggcccccgtggtgaccagagagtgggtgctggacagcgtggccctgtaccagtgccaggagctggacacctacctgatcccccagatcccccacagccactactag

SEQ ID NO: 171650 - DNA, 4797 bp, Artificial Sequence
  derived and/or modified sequence
atggacctgagcgccctgagagtggaggaggtgcagaacgtgatcaacgccatgcagaagatcctggagtgccccatctgcctggagctgatcaaggagcccgtgagcaccaagtgcgaccacatcttctgcaagttctgcatgctgaagctgctgaaccagaagaagggccccagccagtgccccctgtgcaagaacgacatcaccaagagaagcctgcaggagagcaccagattcagccagctggtggaggagctgctgaagatcatctgcgccttccagctggacaccggcctggagtacgccaacagctacaacttcgccaagaaggagaacaacagccccgagcacctgaaggacgaggtgagcatcatccagagcatgggctacagaaacagagccaagagactgctgcagagcgagcccgagaaccccagcctgcaggagaccagcctgagcgtgcagctgagcaacctgggcaccgtgagaaccctgagaaccaagcagagaatccagccccagaagaccagcgtgtacatcgagctgggcagcgacagcagcgaggacaccgtgaacaaggccacctactgcagcgtgggcgaccaggagctgctgcagatcaccccccagggcaccagagacgagatcagcctggacagcgccaagaaggccgcctgcgagttcagcgagaccgacgtgaccaacaccgagcaccaccagcccagcaacaacgacctgaacaccaccgagaagagagccgccgagagacaccccgagaagtaccagggcagcagcgtgagcaacctgcacgtggagccctgcggcaccaacacccacgccagcagcctgcagcacgagaacagcagcctgctgctgaccaaggacagaatgaacgtggagaaggccgagttctgcaacaagagcaagcagcccggcctggccagaagccagcacaacagatgggccggcagcaaggagacctgcaacgacagaagaacccccagcaccgagaagaaggtggacctgaacgccgaccccctgtgcgagagaaaggagtggaacaagcagaagctgccctgcagcgagaaccccagagacaccgaggacgtgccctggatcaccctgaacagcagcatccagaaggtgaacgagtggttcagcagaagcgacgagctgctgggcagcgacgacagccacgacggcgagagcgagagcaacgccaaggtggccgacgtgctggacgtgctgaacgaggtggacgagtacagcggcagcagcgagaagatcgacctgctggccagcgacccccacgaggccctgatctgcaagagcgagagagtgcacagcaagagcgtggagagcaacatcgaggacaagatcttcggcaagacctacagaaagaaggccagcctgcccaacctgagccacgtgaccgagaacctgatcatcggcgccttcgtgaccgagccccagatcatccaggagagacccctgaccaacaagctgaagagaaagagaagacccaccagcggcctgcaccccgaggacttcatcaagaaggccgacctggccgtgcagaagacccccgagatgatcaaccagggcaccaaccagaccgagcagaacggccaggtgatgaacatcaccaacagcggccacgagaacaagaccaagggcgacagcatccagaacgagaagaaccccaaccccatcgagagcctggagaaggagagcgccttcaagaccaaggccgagcccatcagcagcagcatcagcaacatggagctggagctgaacatccacaacagcaaggcccccaagaagaacagactgagaagaaagagcagcaccagacacatccacgccctggagctggtggtgagcagaaacctgagcccccccaactgcaccgagctgcagatcgacagctgcagcagcagcgaggagatcaagaagaagaagtacaaccagatgcccgtgagacacagcagaaacctgcagctgatggagggcaaggagcccgccaccggcgccaagaagagcaacaagcccaacgagcagaccagcaagagacacgacagcgacaccttccccgagctgaagctgaccaacgcccccggcagcttcaccaagtgcagcaacaccagcgagctgaaggagttcgtgaaccccagcctgcccagagaggagaaggaggagaagctggagaccgtgaaggtgagcaacaacgccgaggaccccaaggacctgatgctgagcggcgagagagtgctgcagaccgagagaagcgtggagagcagcagcatcagcctggtgcccggcaccgactacggcacccaggagagcatcagcctgctggaggtgagcaccctgggcaaggccaagaccgagcccaacaagtgcgtgagccagtgcgccgccttcgagaaccccaagggcctgatccacggctgcagcaaggacaacagaaacgacaccgagggcttcaagtaccccctgggccacgaggtgaaccacagcagagagaccagcatcgagatggaggagagcgagctggacgcccagtacctgcagaacaccttcaaggtgagcaagagacagagcttcgcccccttcagcaaccccggcaacgccgaggaggagtgcgccaccttcagcgcccacagcggcagcctgaagaagcagagccccaaggtgaccttcgagtgcgagcagaaggaggagaaccagggcaagaacgagagcaacatcaagcccgtgcagaccgtgaacatcaccgccggcttccccgtggtgggccagaaggacaagcccgtggacaacgccaagtgcagcatcaagggcggcagcagattctgcctgagcagccagttcagaggcaacgagaccggcctgatcacccccaacaagcacggcctgctgcagaacccctacagaatcccccccctgttccccatcaagagcttcgtgaagaccaagtgcaagaagaacctgctggaggagaacttcgaggagcacagcatgagccccgagagagagatgggcaacgagaacatccccagcaccgtgagcaccatcagcagaaacaacatcagagagaacgtgttcaaggaggccagcagcagcaacatcaacgaggtgggcagcagcaccaacgaggtgggcagcagcatcaacgagatcggcagcagcgacgagaacatccaggccgagctgggcagaaacagaggccccaagctgaacgccatgctgagactgggcgtgctgcagcccgaggtgtacaagcagagcctgcccggcagcaactgcaagcaccccgagatcaagaagcaggagtacgaggaggtggtgcagaccgtgaacaccgacttcagcccctacctgatcagcgacaacctggagcagcccatgggcagcagccacgccagccaggtgtgcagcgagacccccgacgacctgctggacgacggcgagatcaaggaggacaccagcttcgccgagaacgacatcaaggagagcagcgccgtgttcagcaagagcgtgcagaagggcgagctgagcagaagccccagccccttcacccacacccacctggcccagggctacagaagaggcgccaagaagctggagagcagcgaggagaacctgagcagcgaggacgaggagctgccctgcttccagcacctgctgttcggcaaggtgaacaacatccccagccagagcaccagacacagcaccgtggccaccgagtgcctgagcaagaacaccgaggagaacctgctgagcctgaagaacagcctgaacgactgcagcaaccaggtgatcctggccaaggccagccaggagcaccacctgagcgaggagaccaagtgcagcgccagcctgttcagcagccagtgcagcgagctggaggacctgaccgccaacaccaacacccaggaccccttcctgatcggcagcagcaagcagatgagacaccagagcgagagccagggcgtgggcctgagcgacaaggagctggtgagcgacgacgaggagagaggcaccggcctggaggagaacaaccaggaggagcagagcatggacagcaacctgggcgaggccgccagcggctgcgagagcgagaccagcgtgagcgaggactgcagcggcctgagcagccagagcgacatcctgaccacccagcagagagacaccatgcagcacaacctgatcaagctgcagcaggagatggccgagctggaggccgtgctggagcagcacggcagccagcccagcaacagctaccccagcatcatcagcgacagcagcgccctggaggacctgagaaaccccgagcagagcaccagcgagaagggcgtgacccagagcatcaaggagagaaagatgctgaacgagcacgacttcgaggtgagaggcgacgtggtgaacggcagaaaccaccagggccccaagagagccagagagagccaggacagaaagatcttcagaggcctggagatctgctgctacggccccttcaccaacatgcccaccgaccagctggagtggatggtgcagctgtgcggcgccagcgtggtgaaggagctgagcagcttcaccctgggcaccggcgtgcaccccatcgtggtggtgcagcccgacgcctggaccgaggacaacggcttccacgccatcggccagatgtgcgaggcccccgtggtgaccagagagtgggtgctggacagcgtggccctgtaccagtgccaggagctggacacctacctgatcccccagatcccccacagccactactag

SEQ ID NO: 171651 - DNA, 5592 bp, Artificial Sequence
  derived and/or modified sequence
atggacctgagcgccctgagagtggaggaggtgcagaacgtgatcaacgccatgcagaagatcctggagtgccccatctgcctggagctgatcaaggagcccgtgagcaccaagtgcgaccacatcttctgcaagttctgcatgctgaagctgctgaaccagaagaagggccccagccagtgccccctgtgcaagaacgacatcaccaagagaagcctgcaggagagcaccagattcagccagctggtggaggagctgctgaagatcatctgcgccttccagctggacaccggcctggagtacgccaacagctacaacttcgccaagaaggagaacaacagccccgagcacctgaaggacgaggtgagcatcatccagagcatgggctacagaaacagagccaagagactgctgcagagcgagcccgagaaccccagcctgcaggagaccagcctgagcgtgcagctgagcaacctgggcaccgtgagaaccctgagaaccaagcagagaatccagccccagaagaccagcgtgtacatcgagctgggcagcgacagcagcgaggacaccgtgaacaaggccacctactgcagcgtgggcgaccaggagctgctgcagatcaccccccagggcaccagagacgagatcagcctggacagcgccaagaaggccgcctgcgagttcagcgagaccgacgtgaccaacaccgagcaccaccagcccagcaacaacgacctgaacaccaccgagaagagagccgccgagagacaccccgagaagtaccagggcagcagcgtgagcaacctgcacgtggagccctgcggcaccaacacccacgccagcagcctgcagcacgagaacagcagcctgctgctgaccaaggacagaatgaacgtggagaaggccgagttctgcaacaagagcaagcagcccggcctggccagaagccagcacaacagatgggccggcagcaaggagacctgcaacgacagaagaacccccagcaccgagaagaaggtggacctgaacgccgaccccctgtgcgagagaaaggagtggaacaagcagaagctgccctgcagcgagaaccccagagacaccgaggacgtgccctggatcaccctgaacagcagcatccagaaggtgaacgagtggttcagcagaagcgacgagctgctgggcagcgacgacagccacgacggcgagagcgagagcaacgccaaggtggccgacgtgctggacgtgctgaacgaggtggacgagtacagcggcagcagcgagaagatcgacctgctggccagcgacccccacgaggccctgatctgcaagagcgagagagtgcacagcaagagcgtggagagcaacatcgaggacaagatcttcggcaagacctacagaaagaaggccagcctgcccaacctgagccacgtgaccgagaacctgatcatcggcgccttcgtgaccgagccccagatcatccaggagagacccctgaccaacaagctgaagagaaagagaagacccaccagcggcctgcaccccgaggacttcatcaagaaggccgacctggccgtgcagaagacccccgagatgatcaaccagggcaccaaccagaccgagcagaacggccaggtgatgaacatcaccaacagcggccacgagaacaagaccaagggcgacagcatccagaacgagaagaaccccaaccccatcgagagcctggagaaggagagcgccttcaagaccaaggccgagcccatcagcagcagcatcagcaacatggagctggagctgaacatccacaacagcaaggcccccaagaagaacagactgagaagaaagagcagcaccagacacatccacgccctggagctggtggtgagcagaaacctgagcccccccaactgcaccgagctgcagatcgacagctgcagcagcagcgaggagatcaagaagaagaagtacaaccagatgcccgtgagacacagcagaaacctgcagctgatggagggcaaggagcccgccaccggcgccaagaagagcaacaagcccaacgagcagaccagcaagagacacgacagcgacaccttccccgagctgaagctgaccaacgcccccggcagcttcaccaagtgcagcaacaccagcgagctgaaggagttcgtgaaccccagcctgcccagagaggagaaggaggagaagctggagaccgtgaaggtgagcaacaacgccgaggaccccaaggacctgatgctgagcggcgagagagtgctgcagaccgagagaagcgtggagagcagcagcatcagcctggtgcccggcaccgactacggcacccaggagagcatcagcctgctggaggtgagcaccctgggcaaggccaagaccgagcccaacaagtgcgtgagccagtgcgccgccttcgagaaccccaagggcctgatccacggctgcagcaaggacaacagaaacgacaccgagggcttcaagtaccccctgggccacgaggtgaaccacagcagagagaccagcatcgagatggaggagagcgagctggacgcccagtacctgcagaacaccttcaaggtgagcaagagacagagcttcgcccccttcagcaaccccggcaacgccgaggaggagtgcgccaccttcagcgcccacagcggcagcctgaagaagcagagccccaaggtgaccttcgagtgcgagcagaaggaggagaaccagggcaagaacgagagcaacatcaagcccgtgcagaccgtgaacatcaccgccggcttccccgtggtgggccagaaggacaagcccgtggacaacgccaagtgcagcatcaagggcggcagcagattctgcctgagcagccagttcagaggcaacgagaccggcctgatcacccccaacaagcacggcctgctgcagaacccctacagaatcccccccctgttccccatcaagagcttcgtgaagaccaagtgcaagaagaacctgctggaggagaacttcgaggagcacagcatgagccccgagagagagatgggcaacgagaacatccccagcaccgtgagcaccatcagcagaaacaacatcagagagaacgtgttcaaggaggccagcagcagcaacatcaacgaggtgggcagcagcaccaacgaggtgggcagcagcatcaacgagatcggcagcagcgacgagaacatccaggccgagctgggcagaaacagaggccccaagctgaacgccatgctgagactgggcgtgctgcagcccgaggtgtacaagcagagcctgcccggcagcaactgcaagcaccccgagatcaagaagcaggagtacgaggaggtggtgcagaccgtgaacaccgacttcagcccctacctgatcagcgacaacctggagcagcccatgggcagcagccacgccagccaggtgtgcagcgagacccccgacgacctgctggacgacggcgagatcaaggaggacaccagcttcgccgagaacgacatcaaggagagcagcgccgtgttcagcaagagcgtgcagaagggcgagctgagcagaagccccagccccttcacccacacccacctggcccagggctacagaagaggcgccaagaagctggagagcagcgaggagaacctgagcagcgaggacgaggagctgccctgcttccagcacctgctgttcggcaaggtgaacaacatccccagccagagcaccagacacagcaccgtggccaccgagtgcctgagcaagaacaccgaggagaacctgctgagcctgaagaacagcctgaacgactgcagcaaccaggtgatcctggccaaggccagccaggagcaccacctgagcgaggagaccaagtgcagcgccagcctgttcagcagccagtgcagcgagctggaggacctgaccgccaacaccaacacccaggaccccttcctgatcggcagcagcaagcagatgagacaccagagcgagagccagggcgtgggcctgagcgacaaggagctggtgagcgacgacgaggagagaggcaccggcctggaggagaacaaccaggaggagcagagcatggacagcaacctgggcgaggccgccagcggctgcgagagcgagaccagcgtgagcgaggactgcagcggcctgagcagccagagcgacatcctgaccacccagcagagagacaccatgcagcacaacctgatcaagctgcagcaggagatggccgagctggaggccgtgctggagcagcacggcagccagcccagcaacagctaccccagcatcatcagcgacagcagcgccctggaggacctgagaaaccccgagcagagcaccagcgagaaggccgtgctgaccagccagaagagcagcgagtaccccatcagccagaaccccgagggcctgagcgccgacaagttcgaggtgagcgccgacagcagcaccagcaagaacaaggagcccggcgtggagagaagcagccccagcaagtgccccagcctggacgacagatggtacatgcacagctgcagcggcagcctgcagaacagaaactaccccagccaggaggagctgatcaaggtggtggacgtggaggagcagcagctggaggagagcggcccccacgacctgaccgagaccagctacctgcccagacaggacctggagggcaccccctacctggagagcggcatcagcctgttcagcgacgaccccgagagcgaccccagcgaggacagagcccccgagagcgccagagtgggcaacatccccagcagcaccagcgccctgaaggtgccccagctgaaggtggccgagagcgcccagagccccgccgccgcccacaccaccgacaccgccggctacaacgccatggaggagagcgtgagcagagagaagcccgagctgaccgccagcaccgagagagtgaacaagagaatgagcatggtggtgagcggcctgacccccgaggagttcatgctggtgtacaagttcgccagaaagcaccacatcaccctgaccaacctgatcaccgaggagaccacccacgtggtgatgaagaccgacgccgagttcgtgtgcgagagaaccctgaagtacttcctgggcatcgccggcggcaagtgggtggtgagctacttctgggtgacccagagcatcaaggagagaaagatgctgaacgagcacgacttcgaggtgagaggcgacgtggtgaacggcagaaaccaccagggccccaagagagccagagagagccaggacagaaagatcttcagaggcctggagatctgctgctacggccccttcaccaacatgcccaccgaccagctggagtggatggtgcagctgtgcggcgccagcgtggtgaaggagctgagcagcttcaccctgggcaccggcgtgcaccccatcgtggtggtgcagcccgacgcctggaccgaggacaacggcttccacgccatcggccagatgtgcgaggcccccgtggtgaccagagagtgggtgctggacagcgtggccctgtaccagtgccaggagctggacacctacctgatcccccagatcccccacagccactactag

SEQ ID NO: 171652 - DNA, 1950 bp, Artificial Sequence
  derived and/or modified sequence
atggacctgagcgccctgagagtggaggaggtgcagaacgtgatcaacgccatgcagaagatcctggagtgccccatctgcctggagctgatcaaggagcccgtgagcaccaagtgcgaccacatcttctgcaagttctgcatgctgaagctgctgaaccagaagaagggccccagccagtgccccctgtgcaagaacgacatcaccaagagaagcctgcaggagagcaccagattcagccagctggtggaggagctgctgaagatcatctgcgccttccagctggacaccggcctggagtacgccaacagctacaacttcgccaagaaggagaacaacagccccgagcacctgaaggacgaggtgagcatcatccagagcatgggctacagaaacagagccaagagactgctgcagagcgagcccgagaaccccagcctgcaggagaccagcctgagcgtgcagctgagcaacctgggcaccgtgagaaccctgagaaccaagcagagaatccagccccagaagaccagcgtgtacatcgagctgggcagcgacagcagcgaggacaccgtgaacaaggccacctactgcagcgtgggcgaccaggagctgctgcagatcaccccccagggcaccagagacgagatcagcctggacagcgccaagaaggccgcctgcgagttcagcgagaccgacgtgaccaacaccgagcaccaccagcccagcaacaacgacctgaacaccaccgagaagagagccgccgagagacaccccgagaagtaccagggcagcagcgtgagcaacctgcacgtggagccctgcggcaccaacacccacgccagcagcctgcagcacgagaacagcagcctgctgctgaccaaggacagaatgaacgtggagaaggccgagttctgcaacaagagcaagcagcccggcctggccagaagccagcacaacagatgggccggcagcaaggagacctgcaacgacagaagaacccccagcaccgagaagaaggtggacctgaacgccgaccccctgtgcgagagaaaggagtggaacaagcagaagctgccctgcagcgagaaccccagagacaccgaggacgtgccctggatcaccctgaacagcagcatccagaaggtgaacgagtggttcagcagaagcgacgagctgctgggcagcgacgacagccacgacggcgagagcgagagcaacgccaaggtggccgacgtgctggacgtgctgaacgaggtggacgagtacagcggcagcagcgagaagatcgacctgctggccagcgacccccacgaggccctgatctgcaagagcgagagagtgcacagcaagagcgtggagagcaacatcgaggacaagatcttcggcaagacctacagaaagaaggccagcctgcccaacctgagccacgtgaccgagaacctgatcatcggcgccttcgtgaccgagccccagatcatccaggagagacccctgaccaacaagctgaagagaaagagaagacccaccagcggcctgcaccccgaggacttcatcaagaaggccgacctggccgtgcagaagacccccgagatgatcaaccagggcaccaaccagaccgagcagaacggccaggtgatgaacatcaccaacagcggccacgagaacaagaccaagggcgacagcatccagaacgagaagaaccccaaccccatcgagagcctggagaaggagagcgccttcaagaccaaggccgagcccatcagcagcagcatcagcaacatggagctggagctgaacatccacaacagcaaggcccccaagaagaacagactgagaagaaagagcagcaccagacacatccacgccctggagctggtggtgagcagaaacctgagcccccccaactgcaccgagctgcagatcgacagctgcagcagcagcgaggagtag

SEQ ID NO: 171653 - DNA, 1869 bp, Artificial Sequence
  derived and/or modified sequence
atggacctgagcgccctgagagtggaggaggtgcagaacgtgatcaacgccatgcagaagatcctggagtgccccatctgcctggagctgatcaaggagcccgtgagcaccaagtgcgaccacatcttctgcaagagcctgcaggagagcaccagattcagccagctggtggaggagctgctgaagatcatctgcgccttccagctggacaccggcctggagtacgccaacagctacaacttcgccaagaaggagaacaacagccccgagcacctgaaggacgaggtgagcatcatccagagcatgggctacagaaacagagccaagagactgctgcagagcgagcccgagaaccccagcctgcaggagaccagcctgagcgtgcagctgagcaacctgggcaccgtgagaaccctgagaaccaagcagagaatccagccccagaagaccagcgtgtacatcgagctgggcagcgacagcagcgaggacaccgtgaacaaggccacctactgcagcgtgggcgaccaggagctgctgcagatcaccccccagggcaccagagacgagatcagcctggacagcgccaagaaggccgcctgcgagttcagcgagaccgacgtgaccaacaccgagcaccaccagcccagcaacaacgacctgaacaccaccgagaagagagccgccgagagacaccccgagaagtaccagggcagcagcgtgagcaacctgcacgtggagccctgcggcaccaacacccacgccagcagcctgcagcacgagaacagcagcctgctgctgaccaaggacagaatgaacgtggagaaggccgagttctgcaacaagagcaagcagcccggcctggccagaagccagcacaacagatgggccggcagcaaggagacctgcaacgacagaagaacccccagcaccgagaagaaggtggacctgaacgccgaccccctgtgcgagagaaaggagtggaacaagcagaagctgccctgcagcgagaaccccagagacaccgaggacgtgccctggatcaccctgaacagcagcatccagaaggtgaacgagtggttcagcagaagcgacgagctgctgggcagcgacgacagccacgacggcgagagcgagagcaacgccaaggtggccgacgtgctggacgtgctgaacgaggtggacgagtacagcggcagcagcgagaagatcgacctgctggccagcgacccccacgaggccctgatctgcaagagcgagagagtgcacagcaagagcgtggagagcaacatcgaggacaagatcttcggcaagacctacagaaagaaggccagcctgcccaacctgagccacgtgaccgagaacctgatcatcggcgccttcgtgaccgagccccagatcatccaggagagacccctgaccaacaagctgaagagaaagagaagacccaccagcggcctgcaccccgaggacttcatcaagaaggccgacctggccgtgcagaagacccccgagatgatcaaccagggcaccaaccagaccgagcagaacggccaggtgatgaacatcaccaacagcggccacgagaacaagaccaagggcgacagcatccagaacgagaagaaccccaaccccatcgagagcctggagaaggagagcgccttcaagaccaaggccgagcccatcagcagcagcatcagcaacatggagctggagctgaacatccacaacagcaaggcccccaagaagaacagactgagaagaaagagcagcaccagacacatccacgccctggagctggtggtgagcagaaacctgagcccccccaactgcaccgagctgcagatcgacagctgcagcagcagcgagtag

SEQ ID NO: 171654 - DNA, 5451 bp, Artificial Sequence
  derived and/or modified sequence
atgctgaagctgctgaaccagaagaagggccccagccagtgccccctgtgcaagaacgacatcaccaagagaagcctgcaggagagcaccagattcagccagctggtggaggagctgctgaagatcatctgcgccttccagctggacaccggcctggagtacgccaacagctacaacttcgccaagaaggagaacaacagccccgagcacctgaaggacgaggtgagcatcatccagagcatgggctacagaaacagagccaagagactgctgcagagcgagcccgagaaccccagcctgcaggagaccagcctgagcgtgcagctgagcaacctgggcaccgtgagaaccctgagaaccaagcagagaatccagccccagaagaccagcgtgtacatcgagctgggcagcgacagcagcgaggacaccgtgaacaaggccacctactgcagcgtgggcgaccaggagctgctgcagatcaccccccagggcaccagagacgagatcagcctggacagcgccaagaaggccgcctgcgagttcagcgagaccgacgtgaccaacaccgagcaccaccagcccagcaacaacgacctgaacaccaccgagaagagagccgccgagagacaccccgagaagtaccagggcagcagcgtgagcaacctgcacgtggagccctgcggcaccaacacccacgccagcagcctgcagcacgagaacagcagcctgctgctgaccaaggacagaatgaacgtggagaaggccgagttctgcaacaagagcaagcagcccggcctggccagaagccagcacaacagatgggccggcagcaaggagacctgcaacgacagaagaacccccagcaccgagaagaaggtggacctgaacgccgaccccctgtgcgagagaaaggagtggaacaagcagaagctgccctgcagcgagaaccccagagacaccgaggacgtgccctggatcaccctgaacagcagcatccagaaggtgaacgagtggttcagcagaagcgacgagctgctgggcagcgacgacagccacgacggcgagagcgagagcaacgccaaggtggccgacgtgctggacgtgctgaacgaggtggacgagtacagcggcagcagcgagaagatcgacctgctggccagcgacccccacgaggccctgatctgcaagagcgagagagtgcacagcaagagcgtggagagcaacatcgaggacaagatcttcggcaagacctacagaaagaaggccagcctgcccaacctgagccacgtgaccgagaacctgatcatcggcgccttcgtgaccgagccccagatcatccaggagagacccctgaccaacaagctgaagagaaagagaagacccaccagcggcctgcaccccgaggacttcatcaagaaggccgacctggccgtgcagaagacccccgagatgatcaaccagggcaccaaccagaccgagcagaacggccaggtgatgaacatcaccaacagcggccacgagaacaagaccaagggcgacagcatccagaacgagaagaaccccaaccccatcgagagcctggagaaggagagcgccttcaagaccaaggccgagcccatcagcagcagcatcagcaacatggagctggagctgaacatccacaacagcaaggcccccaagaagaacagactgagaagaaagagcagcaccagacacatccacgccctggagctggtggtgagcagaaacctgagcccccccaactgcaccgagctgcagatcgacagctgcagcagcagcgaggagatcaagaagaagaagtacaaccagatgcccgtgagacacagcagaaacctgcagctgatggagggcaaggagcccgccaccggcgccaagaagagcaacaagcccaacgagcagaccagcaagagacacgacagcgacaccttccccgagctgaagctgaccaacgcccccggcagcttcaccaagtgcagcaacaccagcgagctgaaggagttcgtgaaccccagcctgcccagagaggagaaggaggagaagctggagaccgtgaaggtgagcaacaacgccgaggaccccaaggacctgatgctgagcggcgagagagtgctgcagaccgagagaagcgtggagagcagcagcatcagcctggtgcccggcaccgactacggcacccaggagagcatcagcctgctggaggtgagcaccctgggcaaggccaagaccgagcccaacaagtgcgtgagccagtgcgccgccttcgagaaccccaagggcctgatccacggctgcagcaaggacaacagaaacgacaccgagggcttcaagtaccccctgggccacgaggtgaaccacagcagagagaccagcatcgagatggaggagagcgagctggacgcccagtacctgcagaacaccttcaaggtgagcaagagacagagcttcgcccccttcagcaaccccggcaacgccgaggaggagtgcgccaccttcagcgcccacagcggcagcctgaagaagcagagccccaaggtgaccttcgagtgcgagcagaaggaggagaaccagggcaagaacgagagcaacatcaagcccgtgcagaccgtgaacatcaccgccggcttccccgtggtgggccagaaggacaagcccgtggacaacgccaagtgcagcatcaagggcggcagcagattctgcctgagcagccagttcagaggcaacgagaccggcctgatcacccccaacaagcacggcctgctgcagaacccctacagaatcccccccctgttccccatcaagagcttcgtgaagaccaagtgcaagaagaacctgctggaggagaacttcgaggagcacagcatgagccccgagagagagatgggcaacgagaacatccccagcaccgtgagcaccatcagcagaaacaacatcagagagaacgtgttcaaggaggccagcagcagcaacatcaacgaggtgggcagcagcaccaacgaggtgggcagcagcatcaacgagatcggcagcagcgacgagaacatccaggccgagctgggcagaaacagaggccccaagctgaacgccatgctgagactgggcgtgctgcagcccgaggtgtacaagcagagcctgcccggcagcaactgcaagcaccccgagatcaagaagcaggagtacgaggaggtggtgcagaccgtgaacaccgacttcagcccctacctgatcagcgacaacctggagcagcccatgggcagcagccacgccagccaggtgtgcagcgagacccccgacgacctgctggacgacggcgagatcaaggaggacaccagcttcgccgagaacgacatcaaggagagcagcgccgtgttcagcaagagcgtgcagaagggcgagctgagcagaagccccagccccttcacccacacccacctggcccagggctacagaagaggcgccaagaagctggagagcagcgaggagaacctgagcagcgaggacgaggagctgccctgcttccagcacctgctgttcggcaaggtgaacaacatccccagccagagcaccagacacagcaccgtggccaccgagtgcctgagcaagaacaccgaggagaacctgctgagcctgaagaacagcctgaacgactgcagcaaccaggtgatcctggccaaggccagccaggagcaccacctgagcgaggagaccaagtgcagcgccagcctgttcagcagccagtgcagcgagctggaggacctgaccgccaacaccaacacccaggaccccttcctgatcggcagcagcaagcagatgagacaccagagcgagagccagggcgtgggcctgagcgacaaggagctggtgagcgacgacgaggagagaggcaccggcctggaggagaacaaccaggaggagcagagcatggacagcaacctgggcgaggccgccagcggctgcgagagcgagaccagcgtgagcgaggactgcagcggcctgagcagccagagcgacatcctgaccacccagcagagagacaccatgcagcacaacctgatcaagctgcagcaggagatggccgagctggaggccgtgctggagcagcacggcagccagcccagcaacagctaccccagcatcatcagcgacagcagcgccctggaggacctgagaaaccccgagcagagcaccagcgagaaggccgtgctgaccagccagaagagcagcgagtaccccatcagccagaaccccgagggcctgagcgccgacaagttcgaggtgagcgccgacagcagcaccagcaagaacaaggagcccggcgtggagagaagcagccccagcaagtgccccagcctggacgacagatggtacatgcacagctgcagcggcagcctgcagaacagaaactaccccagccaggaggagctgatcaaggtggtggacgtggaggagcagcagctggaggagagcggcccccacgacctgaccgagaccagctacctgcccagacaggacctggagggcaccccctacctggagagcggcatcagcctgttcagcgacgaccccgagagcgaccccagcgaggacagagcccccgagagcgccagagtgggcaacatccccagcagcaccagcgccctgaaggtgccccagctgaaggtggccgagagcgcccagagccccgccgccgcccacaccaccgacaccgccggctacaacgccatggaggagagcgtgagcagagagaagcccgagctgaccgccagcaccgagagagtgaacaagagaatgagcatggtggtgagcggcctgacccccgaggagttcatgctggtgtacaagttcgccagaaagcaccacatcaccctgaccaacctgatcaccgaggagaccacccacgtggtgatgaagaccgacgccgagttcgtgtgcgagagaaccctgaagtacttcctgggcatcgccggcggcaagtgggtggtgagctacttctgggtgacccagagcatcaaggagagaaagatgctgaacgagcacgacttcgaggtgagaggcgacgtggtgaacggcagaaaccaccagggccccaagagagccagagagagccaggacagaaagatcttcagaggcctggagatctgctgctacggccccttcaccaacatgcccaccgaccagctggagtggatggtgcagctgtgcggcgccagcgtggtgaaggagctgagcagcttcaccctgggcaccggcgtgcaccccatcgtggtggtgcagcccgacgcctggaccgaggacaacggcttccacgccatcggccagatgtgcgaggcccccgtggtgaccagagagtgggtgctggacagcgtggccctgtaccagtgccaggagctggacacctacctgatcccccagatcccccacagccactactag

SEQ ID NO: 171655 - DNA, 1422 bp, Artificial Sequence
  derived and/or modified sequence
atggacctgagcgccctgagagtggaggaggtgcagaacgtgatcaacgccatgcagaagatcctggagtgccccatctgcctggagctgatcaaggagcccgtgagcaccaagtgcgaccacatcttctgcaagttctgcatgctgaagctgctgaaccagaagaagggccccagccagtgccccctgtgcaagaacgacatcaccaagagaagcctgcaggagagcaccagattcagccagctggtggaggagctgctgaagatcatctgcgccttccagctggacaccggcctggagtacgccaacagctacaacttcgccaagaaggagaacaacagccccgagcacctgaaggacgaggtgagcatcatccagagcatgggctacagaaacagagccaagagactgctgcagagcgagcccgagaaccccagcctgcaggagaccagcctgagcgtgcagctgagcaacctgggcaccgtgagaaccctgagaaccaagcagagaatccagccccagaagaccagcgtgtacatcgagctgggcagcgacagcagcgaggacaccgtgaacaaggccacctactgcagcgtgggcgaccaggagctgctgcagatcaccccccagggcaccagagacgagatcagcctggacagcgccaagaaggccgcctgcgagttcagcgagaccgacgtgaccaacaccgagcaccaccagcccagcaacaacgacctgaacaccaccgagaagagagccgccgagagacaccccgagaagtaccagggcagcagcgtgagcaacctgcacgtggagccctgcggcaccaacacccacgccagcagcctgcagcacgagaacagcagcctgctgctgaccaaggacagaatgaacgtggagaaggccgagttctgcaacaagagcaagcagcccggcctggccagaagccagcacaacagatgggccggcagcaaggagacctgcaacgacagaagaacccccagcaccgagaagaaggtggacctgaacgccgaccccctgtgcgagagaaaggagtggaacaagcagaagctgccctgcagcgagaaccccagagacaccgaggacgtgccctggatcaccctgaacagcagcatccagaaggtgaacgagtggttcagcagaagcgacgagctgctgggcagcgacgacagccacgacggcgagagcgagagcaacgccaaggtggccgacgtgctggacgtgctgaacgaggtggacgagtacagcggcagcagcgagaagatcgacctgctggccagcgacccccacgaggccctgatctgcaagagcgagagagtgcacagcaagagcgtggagagcaacatcgaggacaagatcttcggcaagacctacagaaagaaggccagcctgcccaactag

SEQ ID NO: 171656 - protein, 1567 aa, Artificial Sequence
  derived and/or modified sequence
MNVEKAEFCNKSKQPGLARSQHNRWAGSKETCNDRRTPSTEKKVDLNADPLCERKEWNKQKLPCSENPRDTEDVPWITLNSSIQKVNEWFSRSDELLGSDDSHDGESESNAKVADVLDVLNEVDEYSGSSEKIDLLASDPHEALICKSERVHSKSVESNIEDKIFGKTYRKKASLPNLSHVTENLIIGAFVTEPQIIQERPLTNKLKRKRRPTSGLHPEDFIKKADLAVQKTPEMINQGTNQTEQNGQVMNITNSGHENKTKGDSIQNEKNPNPIESLEKESAFKTKAEPISSSISNMELELNIHNSKAPKKNRLRRKSSTRHIHALELVVSRNLSPPNCTELQIDSCSSSEEIKKKKYNQMPVRHSRNLQLMEGKEPATGAKKSNKPNEQTSKRHDSDTFPELKLTNAPGSFTKCSNTSELKEFVNPSLPREEKEEKLETVKVSNNAEDPKDLMLSGERVLQTERSVESSSISLVPGTDYGTQESISLLEVSTLGKAKTEPNKCVSQCAAFENPKGLIHGCSKDNRNDTEGFKYPLGHEVNHSRETSIEMEESELDAQYLQNTFKVSKRQSFAPFSNPGNAEEECATFSAHSGSLKKQSPKVTFECEQKEENQGKNESNIKPVQTVNITAGFPVVGQKDKPVDNAKCSIKGGSRFCLSSQFRGNETGLITPNKHGLLQNPYRIPPLFPIKSFVKTKCKKNLLEENFEEHSMSPEREMGNENIPSTVSTISRNNIRENVFKEASSSNINEVGSSTNEVGSSINEIGSSDENIQAELGRNRGPKLNAMLRLGVLQPEVYKQSLPGSNCKHPEIKKQEYEEVVQTVNTDFSPYLISDNLEQPMGSSHASQVCSETPDDLLDDGEIKEDTSFAENDIKESSAVFSKSVQKGELSRSPSPFTHTHLAQGYRRGAKKLESSEENLSSEDEELPCFQHLLFGKVNNIPSQSTRHSTVATECLSKNTEENLLSLKNSLNDCSNQVILAKASQEHHLSEETKCSASLFSSQCSELEDLTANTNTQDPFLIGSSKQMRHQSESQGVGLSDKELVSDDEERGTGLEENNQEEQSMDSNLGEAASGCESETSVSEDCSGLSSQSDILTTQQRDTMQHNLIKLQQEMAELEAVLEQHGSQPSNSYPSIISDSSALEDLRNPEQSTSEKAVLTSQKSSEYPISQNPEGLSADKFEVSADSSTSKNKEPGVERSSPSKCPSLDDRWYMHSCSGSLQNRNYPSQEELIKVVDVEEQQLEESGPHDLTETSYLPRQDLEGTPYLESGISLFSDDPESDPSEDRAPESARVGNIPSSTSALKVPQLKVAESAQSPAAAHTTDTAGYNAMEESVSREKPELTASTERVNKRMSMVVSGLTPEEFMLVYKFARKHHITLTNLITEETTHVVMKTDAEFVCERTLKYFLGIAGGKWVVSYFWVTQSIKERKMLNEHDFEVRGDVVNGRNHQGPKRARESQDRKIFRGLEICCYGPFTNMPTDQLEWMVQLCGASVVKELSSFTLGTGVHPIVVVQPDAWTEDNGFHAIGQMCEAPVVTREWVLDSVALYQCQELDTYLIPQIPHSHY

SEQ ID NO: 171657 - protein, 1816 aa, Artificial Sequence
  derived and/or modified sequence
MLKLLNQKKGPSQCPLCKNDITKRSLQESTRFSQLVEELLKIICAFQLDTGLEYANSYNFAKKENNSPEHLKDEVSIIQSMGYRNRAKRLLQSEPENPSLQETSLSVQLSNLGTVRTLRTKQRIQPQKTSVYIELGSDSSEDTVNKATYCSVGDQELLQITPQGTRDEISLDSAKKAACEFSETDVTNTEHHQPSNNDLNTTEKRAAERHPEKYQGSSVSNLHVEPCGTNTHASSLQHENSSLLLTKDRMNVEKAEFCNKSKQPGLARSQHNRWAGSKETCNDRRTPSTEKKVDLNADPLCERKEWNKQKLPCSENPRDTEDVPWITLNSSIQKVNEWFSRSDELLGSDDSHDGESESNAKVADVLDVLNEVDEYSGSSEKIDLLASDPHEALICKSERVHSKSVESNIEDKIFGKTYRKKASLPNLSHVTENLIIGAFVTEPQIIQERPLTNKLKRKRRPTSGLHPEDFIKKADLAVQKTPEMINQGTNQTEQNGQVMNITNSGHENKTKGDSIQNEKNPNPIESLEKESAFKTKAEPISSSISNMELELNIHNSKAPKKNRLRRKSSTRHIHALELVVSRNLSPPNCTELQIDSCSSSEEIKKKKYNQMPVRHSRNLQLMEGKEPATGAKKSNKPNEQTSKRHDSDTFPELKLTNAPGSFTKCSNTSELKEFVNPSLPREEKEEKLETVKVSNNAEDPKDLMLSGERVLQTERSVESSSISLVPGTDYGTQESISLLEVSTLGKAKTEPNKCVSQCAAFENPKGLIHGCSKDNRNDTEGFKYPLGHEVNHSRETSIEMEESELDAQYLQNTFKVSKRQSFAPFSNPGNAEEECATFSAHSGSLKKQSPKVTFECEQKEENQGKNESNIKPVQTVNITAGFPVVGQKDKPVDNAKCSIKGGSRFCLSSQFRGNETGLITPNKHGLLQNPYRIPPLFPIKSFVKTKCKKNLLEENFEEHSMSPEREMGNENIPSTVSTISRNNIRENVFKEASSSNINEVGSSTNEVGSSINEIGSSDENIQAELGRNRGPKLNAMLRLGVLQPEVYKQSLPGSNCKHPEIKKQEYEEVVQTVNTDFSPYLISDNLEQPMGSSHASQVCSETPDDLLDDGEIKEDTSFAENDIKESSAVFSKSVQKGELSRSPSPFTHTHLAQGYRRGAKKLESSEENLSSEDEELPCFQHLLFGKVNNIPSQSTRHSTVATECLSKNTEENLLSLKNSLNDCSNQVILAKASQEHHLSEETKCSASLFSSQCSELEDLTANTNTQDPFLIGSSKQMRHQSESQGVGLSDKELVSDDEERGTGLEENNQEEQSMDSNLGEAASGCESETSVSEDCSGLSSQSDILTTQQRDTMQHNLIKLQQEMAELEAVLEQHGSQPSNSYPSIISDSSALEDLRNPEQSTSEKAVLTSQKSSEYPISQNPEGLSADKFEVSADSSTSKNKEPGVERSSPSKCPSLDDRWYMHSCSGSLQNRNYPSQEELIKVVDVEEQQLEESGPHDLTETSYLPRQDLEGTPYLESGISLFSDDPESDPSEDRAPESARVGNIPSSTSALKVPQLKVAESAQSPAAAHTTDTAGYNAMEESVSREKPELTASTERVNKRMSMVVSGLTPEEFMLVYKFARKHHITLTNLITEETTHVVMKTDAEFVCERTLKYFLGIAGGKWVVSYFWVTQSIKERKMLNEHDFEVRGDVVNGRNHQGPKRARESQDRKIFRGLEICCYGPFTNMPTDQLEWMVQLCGASVVKELSSFTLGTGVHPIVVVQPDAWTEDNGFHAIGQMCEAPVVTREWVLDSVALYQCQELDTYLIPQIPHSHY

SEQ ID NO: 171658 - protein, 177 aa, Artificial Sequence
  derived and/or modified sequence
MNVEKAEFCNKSKQPGLARSQHNRWAGSKETCNDRRTPSTEKKVDLNADPLCERKEWNKQKLPCSENPRDTEDVPWITLNSSIQKVNEWFSRSDELLGSDDSHDGESESNAKVADVLDVLNEVDEYSGSSEKIDLLASDPHEALICKSERVHSKSVESNIEDKIFGKTYRKKASLPN

SEQ ID NO: 171659 - DNA, 534 bp, Artificial Sequence
  derived and/or modified sequence
atgaacgtcgagaaagccgaattctgtaataaaagtaaacagcccgggctagcccgctcacagcacaatagatgggctggctccaaagagacctgcaatgataggagaacgccctccacagagaagaaggtcgacctaaatgccgaccccctttgtgaaaggaaggagtggaataagcagaaacttccatgctctgagaaccctcgggacaccgaagatgtgccatggatcaccctgaactcgtcgatacagaaggtgaatgagtggttcagccggtctgacgagctgctgggaagtgacgattctcacgacggggagagcgaatcaaatgccaaggtggctgacgtgctcgatgtgcttaacgaagtagacgagtattctggatcttctgagaaaattgacctcctggcctccgacccccatgaagccctgatctgcaaatctgaacgggtgcacagcaaaagcgtggaaagcaacatcgaggataagatcttcggtaagacatacaggaaaaaggccagcctccctaactag

SEQ ID NO: 171660 - DNA, 534 bp, Artificial Sequence
  derived and/or modified sequence
atgaatgtggagaaggccgagttctgcaacaagagcaagcagcccggcctggcccggagccagcacaaccgctgggccggcagcaaggagacctgcaatgacaggaggacccccagcacagagaagaaggtggacctgaatgctgaccccctgtgtgagaggaaggagtggaacaagcagaagctgccctgcagcgagaacccccgggacacagaagatgtgccctggatcaccctgaacagcagcatccagaaggtgaatgagtggttcagcagaagtgatgagctgctgggcagtgatgacagccatgatggagagagcgagagcaatgccaaggtggctgatgtgctggatgtgctgaatgaggtggatgagtacagcggcagcagcgagaagattgacctgctggccagtgacccccatgaggccctgatctgcaagtctgagcgggtgcacagcaagtctgtggagagcaacatcgaggacaagatctttgggaagacctacaggaagaaggccagcctgcccaactag

SEQ ID NO: 171661 - DNA, 534 bp, Artificial Sequence
  derived and/or modified sequence
atgaacgtggagaaggccgagttctgcaacaagagcaagcagcccggccttgcccgatcacagcacaatcggtgggccggaagcaaagaaacgtgtaacgatcgccggaccccatctacagaaaagaaagtggacctgaacgctgatcccctgtgcgaacgaaaggagtggaacaagcagaaactcccctgctccgaaaatcccagagataccgaggatgtgccatggataacgttgaattcctctatccagaaggtgaatgaatggtttagtagatcagacgagctgctaggttccgatgattcgcatgacggggaaagtgagtcaaatgccaaagttgccgacgtcctggacgtgttaaatgaagtggacgagtactctggcagctctgaaaagatcgatttactggcgagcgatccacacgaagcccttatttgcaaatccgagagggtgcattccaaatccgtggagtctaacatcgaagataaaatttttggaaagacctaccgaaaaaaggcttctctgcctaattag

SEQ ID NO: 171662 - DNA, 534 bp, Artificial Sequence
  derived and/or modified sequence
atgaacgtggagaaagcagagttttgcaataaatcaaaacagccgggactggctagatctcaacacaatcgctgggccggaagtaaggagacttgcaacgaccgtcggaccccatcgactgagaaaaaagttgacctgaatgccgaccctctctgtgaacggaaagagtggaacaaacagaagttaccatgcagcgagaatccgcgagatacagaagatgtaccctggatcacgttaaacagctctatccagaaggtgaatgaatggttttcccgaagcgacgagctgctgggttcagacgattcacatgacggagagtccgagagtaatgccaaagtcgcagacgtcctcgatgtgctaaacgaggtagacgagtattctgggagcagcgagaaaatcgacttgctcgcttcggacccccacgaggcacttatctgtaagtctgagagggtacatagcaaaagtgttgaatcgaatattgaagataaaatcttcgggaagacttacagaaagaaggcctccctgcccaattag

SEQ ID NO: 171663 - DNA, 779 bp, Artificial Sequence
  derived and/or modified sequence
ggaggccttcaccctctgctctgggtaaagctgcttgtgaattttctgagacggatgtaacaaatactgaacatcatcaacccagtaataatgatttgaacaccactgagaagcgtgcagctgagaggcatccagaaaagtatcagggtagttctgtttcaaacttgcatgtggagccatgtggcacaaatactcatgccagctcattacagcatgagaacagcagtttattactcactaaagacagaatgaatgtagaaaaggctgaattctgtaataaaagcaaacagcctggcttagcaaggagccaacataacagatgggctggaagtaaggaaacatgtaatgataggcggactcccagcacagaaaaaaaggtagatctgaatgctgatcccctgtgtgagagaaaagaatggaataagcagaaactgccatgctcagagaatcctagagatactgaagatgttccttggataacactaaatagcagcattcagaaagttaatgagtggttttccagaagtgatgaactgttaggttctgatgactcacatgatggggagtctgaatcaaatgccaaagtagctgatgtattggacgttctaaatgaggtagatgaatattctggttcttcagagaaaatagacttactggccagtgatcctcatgaggctttaatatgtaaaagtgaaagagttcactccaaatcagtagagagtaatattgaagacaaaatatttgggaaaacctatcggaagaaggcaagcctccccaac

SEQ ID NO: 171664 - DNA, 534 bp, Artificial Sequence
  derived and/or modified sequence
atgaacgtggagaaggccgagttctgcaacaagagcaagcagcccggcctggccagaagccagcacaacagatgggccggcagcaaggagacctgcaacgacagaagaacccccagcaccgagaagaaggtggacctgaacgccgaccccctgtgcgagagaaaggagtggaacaagcagaagctgccctgcagcgagaaccccagagacaccgaggacgtgccctggatcaccctgaacagcagcatccagaaggtgaacgagtggttcagcagaagcgacgagctgctgggcagcgacgacagccacgacggcgagagcgagagcaacgccaaggtggccgacgtgctggacgtgctgaacgaggtggacgagtacagcggcagcagcgagaagatcgacctgctggccagcgacccccacgaggccctgatctgcaagagcgagagagtgcacagcaagagcgtggagagcaacatcgaggacaagatcttcggcaagacctacagaaagaaggccagcctgcccaactag

SEQ ID NO: 171665 - protein, 680 aa, Artificial Sequence
  derived and/or modified sequence
MDLSALRVEEVQNVINAMQKILECPICLELIKEPVSTKCDHIFCKFCMLKLLNQKKGPSQCPLCKNDITKRSLQESTRFSQLVEELLKIICAFQLDTGLEYANSYNFAKKENNSPEHLKDEVSIIQSMGYRNRAKRLLQSEPENPSLQETSLSVQLSNLGTVRTLRTKQRIQPQKTSVYIELGEAASGCESETSVSEDCSGLSSQSDILTTQQRDTMQHNLIKLQQEMAELEAVLEQHGSQPSNSYPSIISDSSALEDLRNPEQSTSEKAVLTSQKSSEYPISQNPEGLSADKFEVSADSSTSKNKEPGVERSSPSKCPSLDDRWYMHSCSGSLQNRNYPSQEELIKVVDVEEQQLEESGPHDLTETSYLPRQDLEGTPYLESGISLFSDDPESDPSEDRAPESARVGNIPSSTSALKVPQLKVAESAQSPAAAHTTDTAGYNAMEESVSREKPELTASTERVNKRMSMVVSGLTPEEFMLVYKFARKHHITLTNLITEETTHVVMKTDAEFVCERTLKYFLGIAGGKWVVSYFWVTQSIKERKMLNEHDFEVRGDVVNGRNHQGPKRARESQDRKIFRGLEICCYGPFTNMPTDQLEWMVQLCGASVVKELSSFTLGTGVHPIVVVQPDAWTEDNGFHAIGQMCEAPVVTREWVLDSVALYQCQELDTYLIPQIPHSHY

SEQ ID NO: 171666 - protein, 721 aa, Artificial Sequence
  derived and/or modified sequence
MDLSALRVEEVQNVINAMQKILECPICLELIKEPVSTKCDHIFCKFCMLKLLNQKKGPSQCPLCKNDITKRSLQESTRFSQLVEELLKIICAFQLDTGLEYANSYNFAKKENNSPEHLKDEVSIIQSMGYRNRAKRLLQSEPENPSLQETSLSVQLSNLGTVRTLRTKQRIQPQKTSVYIELGSDSSEDTVNKATYCSVGDQELLQITPQGTRDEISLDSAKKGEAASGCESETSVSEDCSGLSSQSDILTTQQRDTMQHNLIKLQQEMAELEAVLEQHGSQPSNSYPSIISDSSALEDLRNPEQSTSEKAVLTSQKSSEYPISQNPEGLSADKFEVSADSSTSKNKEPGVERSSPSKCPSLDDRWYMHSCSGSLQNRNYPSQEELIKVVDVEEQQLEESGPHDLTETSYLPRQDLEGTPYLESGISLFSDDPESDPSEDRAPESARVGNIPSSTSALKVPQLKVAESAQSPAAAHTTDTAGYNAMEESVSREKPELTASTERVNKRMSMVVSGLTPEEFMLVYKFARKHHITLTNLITEETTHVVMKTDAEFVCERTLKYFLGIAGGKWVVSYFWVTQSIKERKMLNEHDFEVRGDVVNGRNHQGPKRARESQDRKIFRGLEICCYGPFTNMPTDQLEWMVQLCGASVVKELSSFTLGTGVHPIVVVQPDAWTEDNGFHAIGQMCEAPVVTREWVLDSVALYQCQELDTYLIPQIPHSHY

SEQ ID NO: 171667 - protein, 712 aa, Artificial Sequence
  derived and/or modified sequence
MLKLLNQKKGPSQCPLCKNDITKRSLQESTRFSQLVEELLKIICAFQLDTGLEYANSYNFAKKENNSPEHLKDEVSIIQSMGYRNRAKRLLQSEPENPSLQETSLSVQLSNLGTVRTLRTKQRIQPQKTSVYIELGSDSSEDTVNKATYCSVGDQELLQITPQGTRDEISLDSAKKAACEFSETDVTNTEHHQPSNNDLNTTEKRAAERHPEKYQGEAASGCESETSVSEDCSGLSSQSDILTTQQRDTMQHNLIKLQQEMAELEAVLEQHGSQPSNSYPSIISDSSALEDLRNPEQSTSEKVLTSQKSSEYPISQNPEGLSADKFEVSADSSTSKNKEPGVERSSPSKCPSLDDRWYMHSCSGSLQNRNYPSQEELIKVVDVEEQQLEESGPHDLTETSYLPRQDLEGTPYLESGISLFSDDPESDPSEDRAPESARVGNIPSSTSALKVPQLKVAESAQSPAAAHTTDTAGYNAMEESVSREKPELTASTERVNKRMSMVVSGLTPEEFMLVYKFARKHHITLTNLITEETTHVVMKTDAEFVCERTLKYFLGIAGGKWVVSYFWVTQSIKERKMLNEHDFEVRGDVVNGRNHQGPKRARESQDRKIFRGLEICCYGPFTNMPTDQLEWMVQLCGASVVKELSSFTLGTGVHPIVVVQPDAWTEDNGFHAIGQMCEAPVVTREWVLDSVALYQCQELDTYLIPQIPHSHY

SEQ ID NO: 171668 - protein, 623 aa, Artificial Sequence
  derived and/or modified sequence
MDLSALRVEEVQNVINAMQKILECPICLELIKEPVSTKCDHIFCKFCMLKLLNQKKGPSQCPLCKNDITKRSLQESTRFSQLVEELLKIICAFQLDTGLEYANSYNFAKKENNSPEHLKDEVSIIQSMGYRNRAKRLLQSEPENPSLETSLSVQLSNLGTVRTLRTKQRIQPQKTSVYIELGSDSSEDTVNKATYCSVGDQELLQITPQGTRDEISLDSAKKAACEFSETDVTNTEHHQPSNNDLNTTEKRAAERHPEKYQGEAASGCESETSVSEDCSGLSSQSDILTTQQRDTMQHNLIKLQQEMAELEAVLEQHGSQPSNSYPSIISDSSALEDLRNPEQSTSEKAVLTSQKSSEYPISQNPEGLSADKFEVSADSSTSKNKEPGVERSSPSKCPSLDDRWYMHSCSGSLQNRNYPSQEELIKVVDVEEQQLEESGPHDLTETSYLPRQDLEGTPYLESGISLFSDDPESDPSEDRAPESARVGNIPSSTSALKVPQLKVAESAQSPAAAHTTDTAGYNAMEESVSREKPELTASTERVNKRMSMVVSGLTPEEFMLVYKFARKHHITLTNLITEETTHVVMKTDAEFVCERTLKYFLGIAGGKWVVSYFWVTQSIKERK

SEQ ID NO: 171669 - protein, 498 aa, Artificial Sequence
  derived and/or modified sequence
ELLKIICAFQLDTGLEYANSYNFAKKENNSPEHLKDEVSIIQSMGYRNRAKRLLQSEPENPSLETSLSVQLSNLGTVRTLRTKQRIQPQKTSVYIELAACEFSETDVTNTEHHQPSNNDLNTTEKRAAERHPEKYQGEAASGCESETSVSEDCSGLSSQSDILTTQQRDTMQHNLIKLQQEMAELEAVLEQHGSQPSNSYPSIISDSSALEDLRNPEQSTSEKAVLTSQKSSEYPISQNPEGLSADKFEVSADSSTSKNKEPGVERSSPSKCPSLDDRWYMHSCSGSLQNRNYPSQEELIKVVDVEEQQLEESGPHDLTETSYLPRQDLEGTPYLESGISLFSDDPESDPSEDRAPESARVGNIPSSTSALKVPQLKVAESAQSPAAAHTTDTAGYNAMEESVSREKPELTASTERVNKRMSMVVSGLTPEEFMLVYKFARKHHITLTNLITEETTHVVMKTDAEFVCERTLKYFLGIAGGKWVVSYFWVTQSIKERK

SEQ ID NO: 171670 - protein, 759 aa, Artificial Sequence
  derived and/or modified sequence
MDLSALRVEEVQNVINAMQKILECPICLELIKEPVSTKCDHIFCKFCMLKLLNQKKGPSQCPLCKNDITKRSLQESTRFSQLVEELLKIICAFQLDTGLEYANSYNFAKKENNSPEHLKDEVSIIQSMGYRNRAKRLLQSEPENPSLQETSLSVQLSNLGTVRTLRTKQRIQPQKTSVYIELGSDSSEDTVNKATYCSVGDQELLQITPQGTRDEISLDSAKKAACEFSETDVTNTEHHQPSNNDLNTTEKRAAERHPEKYQGEAASGCESETSVSEDCSGLSSQSDILTTQQRDTMQHNLIKLQQEMAELEAVLEQHGSQPSNSYPSIISDSSALEDLRNPEQSTSEKVLTSQKSSEYPISQNPEGLSADKFEVSADSSTSKNKEPGVERSSPSKCPSLDDRWYMHSCSGSLQNRNYPSQEELIKVVDVEEQQLEESGPHDLTETSYLPRQDLEGTPYLESGISLFSDDPESDPSEDRAPESARVGNIPSSTSALKVPQLKVAESAQSPAAAHTTDTAGYNAMEESVSREKPELTASTERVNKRMSMVVSGLTPEEFMLVYKFARKHHITLTNLITEETTHVVMKTDAEFVCERTLKYFLGIAGGKWVVSYFWVTQSIKERKMLNEHDFEVRGDVVNGRNHQGPKRARESQDRKIFRGLEICCYGPFTNMPTDQLEWMVQLCGASVVKELSSFTLGTGVHPIVVVQPDAWTEDNGFHAIGQMCEAPVVTREWVLDSVALYQCQELDTYLIPQIPHSHY

SEQ ID NO: 171671 - protein, 572 aa, Artificial Sequence
  derived and/or modified sequence
MLKLLNQKKGPSQCPLCKNDITKRSLQESTRFSQLVEELLKIICAFQLDTGLEYANSYNFAKKENNSPEHLKDEVSIIQSMGYRNRAKRLLQSEPENPSLQETSLSVQLSNLGTVRTLRTKQRIQPQKTSVYIELGSDSSEDTVNKATYCSVGDQELLQITPQGTRDEISLDSAKKAACEFSETDVTNTEHHQPSNNDLNTTEKRAAERHPEKYQGEAASGCESETSVSEDCSGLSSQSDILTTQQRDTMQHNLIKLQQEMAELEAVLEQHGSQPSNSYPSIISDSSALEDLRNPEQSTSEKAVLTSQKSSEYPISQNPEGLSADKFEVSADSSTSKNKEPGVERSSPSKCPSLDDRWYMHSCSGSLQNRNYPSQEELIKVVDVEEQQLEESGPHDLTETSYLPRQDLEGTPYLESGISLFSDDPESDPSEDRAPESARVGNIPSSTSALKVPQLKVAESAQSPAAAHTTDTAGYNAMEESVSREKPELTASTERVNKRMSMVVSGLTPEEFMLVYKFARKHHITLTNLITEETTHVVMKTDAEFVCERTLKYFLGIAGGKWVVSYFWVTQS

SEQ ID NO: 171672 - DNA, 2043 bp, Artificial Sequence
  derived and/or modified sequence
atggatctctcggcgctgagagtggaagaggtgcagaacgtaatcaacgcaatgcagaaaattctggagtgtccaatttgcttagagctgattaaggaacctgtcagcactaagtgtgatcacattttttgcaaattttgtatgttgaaactcctcaatcagaagaaggggccctcccagtgcccactgtgtaaaaacgatattactaaacggtctttacaagagtccacaagatttagtcaactagtggaagagcttctgaagattatttgcgcatttcagttggacacaggattggagtatgccaatagctataattttgccaaaaaagagaacaactctcccgagcatctgaaggatgaggttagcatcatacagagcatgggatatcgcaaccgtgctaagcgcctcctgcagagtgagccagagaacccttccttgcaagagacatccctcagcgttcaactcagtaaccttggcacagtgaggacactgcgcactaagcagcgcatccagccgcagaagacatccgtctatatcgagcttggcgaagctgctagcgggtgcgaatcagagacgtccgtcagcgaagactgtagtggtctctcttcacaaagcgatatcctgactactcagcagagggacaccatgcaacacaatctgatcaagctgcagcaggaaatggctgagctcgaggccgtgctcgagcaacacggttcccagcccagtaactcatacccgtccatcatcagcgactcatcagcattggaagacctgcggaacccagaacagtccaccagcgaaaaggctgtcctcacctcacagaagtctagcgaataccccatcagtcagaaccccgaagggttgagcgccgataaatttgaggtctccgcagacagttcaacttccaaaaacaaagaacccggagtagaacggtcctccccatcgaaatgcccgagtctggacgataggtggtatatgcacagttgctctggatccctgcagaacagaaattacccctcacaggaagagctgatcaaggtcgtcgacgttgaagagcagcaactagaggagtcaggtccgcacgacctgacagaaactagctacctgccacgacaggatctggaaggaacgccttacttggagagtgggatcagcctgttcagcgacgatcccgagtccgatccatccgaagatagggcccccgaatcggccagggttggaaatattccttctagtaccagcgccctgaaagtgccacagctgaaggttgctgagtcagcccaatcccctgcagccgcccacaccacagacactgcaggatacaacgccatggaagaatccgtttctcgggaaaaaccagaattgaccgcctctacggagcgggtgaataagagaatgtccatggtggtgtccggactcaccccagaggagtttatgttagtctataaatttgcaagaaagcaccacatcaccctcactaatttaattacagaggagactactcacgtcgtaatgaaaactgacgctgagttcgtatgcgaacggacccttaagtactttctgggaatcgctgggggaaagtgggtggtgtcctacttttgggttactcagtctataaaagagcgcaagatgttgaacgaacacgattttgaagttcgcggagatgtagttaatggaagaaatcaccagggccccaagcgtgccagagaaagtcaggaccggaaaatctttcgcgggttggaaatctgctgttacggacctttcaccaatatgcccacagatcagttagaatggatggtccaactgtgcggcgcctctgtcgtcaaggagctttcttcttttaccctgggaactggagtacacccaattgtcgtggtccagcccgatgcatggaccgaggataacggcttccatgcaattggccaaatgtgcgaagcccctgtagtcacacgggagtgggttctagacagtgtcgccctctatcagtgtcaagagcttgatacataccttatcccccagatcccgcactctcactactag

SEQ ID NO: 171673 - DNA, 2166 bp, Artificial Sequence
  derived and/or modified sequence
atggacctttctgcgttgcgagtcgaagaggtgcagaatgtgataaacgccatgcaaaagattttggaatgccctatctgtctggagctgattaaggaacctgtcagtacaaagtgcgaccacatcttttgtaaattctgcatgctgaaacttttgaatcagaaaaaggggccgtctcagtgccctttgtgcaagaacgatattaccaagcggagcctccaggagagtactcggttttcccagctcgtggaggaactcctgaagattatctgcgcattccagctggatacaggattggagtacgcgaattcctacaattttgccaagaaggaaaacaactcgccagagcatcttaaggacgaggtctctattatccagtccatgggttaccgtaatcgtgccaaacggttactacagtctgagccggagaaccctagcttgcaggaaacctctctctccgtccaactgagcaatctggggacagttcggaccttgcggactaagcaaaggatacagccccagaaaaccagtgtctatatcgaactggggtccgactcatccgaagacacagttaacaaggcaacgtattgcagtgtgggggatcaggaactcctccagatcactcctcaggggactcgcgatgagattagtctagactccgctaagaagggagaggcagctagtggatgcgagagtgaaactagcgtgagtgaggattgtagtggcctcagtagccagagtgacattctcacaacacagcagagggacactatgcagcataatctgattaagcttcaacaggaaatggcagaacttgaagctgtgctggagcagcacggatctcagccatcaaacagctacccctccattatcagtgactcctctgcattggaggacctcagaaaccctgaacagtccacatcggaaaaggctgtattgacttcccagaaaagcagcgagtatccaatcagccaaaaccccgagggactttcagctgacaaattcgaggtttccgcagatagcagtacctcaaagaataaagaacccggcgtcgagcgatcgtctccatctaagtgtccttctctcgatgaccggtggtacatgcactcttgctcagggtccctacagaacaggaactatccaagccaggaagagctgatcaaagtagtggacgtggaggagcagcagctcgaggagtccgggccccacgatctgacagaaacttcttacttgccccggcaagatctggaaggcacaccctacctggaaagcggtattagcttgtttagcgatgatcccgagagtgacccttcagaagacagggctccagagtcagccagagtcgggaatatcccatcctccacaagcgcccttaaagtaccccagctgaaagtagccgagagcgctcagtctccagcagctgctcacacaaccgacaccgcgggctacaatgccatggaagaaagtgtttctcgcgagaagccggaactaaccgccagtactgagcgggtcaacaaacgtatgtctatggtggtttccgggttgacacccgaggagtttatgcttgtgtataagtttgcacggaaacatcatatcacacttacaaacctgattacagaggagacgactcatgtcgtcatgaaaaccgacgccgaattcgtgtgcgaaaggacactaaaatatttcctgggcatcgccggcggaaagtgggtggtgagctatttctgggtgactcagagcataaaagaacgtaaaatgttaaacgagcacgattttgaggtgagaggggacgtggtgaacggcagaaatcaccaggggcccaaacgagcacgcgagagccaagaccgtaaaatctttcgagggctggaaatctgttgttatggtccattcacgaacatgccaaccgatcaattagagtggatggtccagttgtgcggagcctctgtcgtcaaggagttgtcgtcgttcactttggggaccggtgtgcacccaatcgttgttgtgcagcccgacgcatggaccgaagataatggattccatgccattggccaaatgtgtgaggccccagtcgttacaagggaatgggttctggactcagtagccttatatcaatgtcaggaactggacacgtacctgatcccacagatccctcactctcattattag

SEQ ID NO: 171674 - DNA, 2139 bp, Artificial Sequence
  derived and/or modified sequence
atgctgaagcttctcaatcagaagaaaggaccttctcagtgtcccctgtgcaagaacgatattacaaagcgctcgctccaggaaagtacacgcttcagccagctcgtggaggagttacttaagatcatctgcgcttttcagcttgataccgggctggaatatgctaactcgtataatttcgccaagaaggaaaataactcccctgaacatctaaaagatgaagtatcaataattcagagtatggggtatcggaatagagccaagcggctcctccagtcagaaccagagaatccttccctccaggagacttccctttctgtccaactcagcaatctgggcacggtccggactctgcgcaccaagcaaaggatacagcctcagaaaacgagtgtctacatcgaactgggaagcgacagcagcgaggatacggtcaataaagccacttactgctcagtgggagaccaagagctcctgcaaattacaccgcagggaacccgtgacgaaataagtctggattccgccaagaaggctgcgtgtgagttctcggaaacggacgtgactaatacagaacatcaccaaccatccaataatgatctgaacacaaccgagaaacgggccgccgaacggcatcctgagaagtaccagggtgaggccgcaagtggctgcgaatcagagacaagcgtgagcgaggattgtagcggcctgagcagtcagtcagatatcctcacaacacagcagcgggataccatgcagcataatcttattaagttgcagcaagagatggcagaattggaagctgtcctagaacagcacgggtctcagcccagcaatagttacccctcaataatttcggatagctccgcccttgaagatctccgcaatcctgagcaaagcaccagcgagaaagtgctgaccagccagaagtcatccgaatatcctatctctcagaatcccgagggcctgagcgccgataagtttgaagtgagtgccgacagctcaacgtccaagaacaaggaaccaggagtggaacgcagctctccctctaagtgcccttcattggacgatcgttggtacatgcatagctgctccgggtcactacagaaccgcaactatccaagtcaggaggaactgattaaggtggtcgacgtagaagaacagcaacttgaggagtctggaccccacgatttgacagaaactagctatcttccacgccaagatctggaggggacgccctatctagagtccgggattagcttgttctcggatgatccagagtctgatccgagtgaagacagggcaccagaatccgctcgggtcggcaatatcccctcttccacctcagcgctcaaggtgcctcagcttaaagtggccgagagcgcccagtccccagccgctgcccacactaccgacacagcaggttacaatgcaatggaggaaagcgtctctagggaaaagcccgagctcacggcatccactgaacgagtgaacaagcggatgagtatggtagtctctggtcttacgcctgaagaattcatgcttgtgtataaattcgctagaaagcaccatataacactgaccaaccttatcacggaggaaaccacacacgtggtgatgaagactgacgctgaattcgtgtgtgagcggactcttaagtatttcttgggaatagctggagggaaatgggtggtgagttatttctgggttacccaatccattaaggagaggaagatgctgaacgagcatgacttcgaggtgaggggggacgttgtcaacggccggaaccatcagggccccaagcgtgctcgggagtcacaggatcgcaaaatctttcgcggtcttgaaatttgttgttacggtccattcactaacatgcctactgatcagctcgagtggatggtgcaactgtgtggagcgtcagtggtgaaagagctgtcaagtttcaccctggggactggggtgcacccaatcgtggtggtccagcccgacgcttggacagaggataacggtttccacgccatagggcagatgtgcgaggcccccgtcgtgacccgcgagtgggttttggactcagtggctttgtatcaatgccaggagctggatacttatctgataccccagattccccacagccactattag

SEQ ID NO: 171675 - DNA, 2280 bp, Artificial Sequence
  derived and/or modified sequence
atggatctgtcagcactgcgggtcgaggaagtacagaacgttattaatgccatgcagaaaatcttggagtgcccaatctgtttagagctgataaaggagcctgtgagcaccaaatgcgaccatatcttttgtaagttctgtatgctgaaactgctgaatcagaaaaagggtcctagccagtgtcctctatgcaagaatgacatcaccaagaggagtctgcaagaatccacccggtttagtcagctggttgaggagctcctgaaaatcatatgtgcatttcagttggacactgggctggaatatgctaactcctacaattttgcaaaaaaagaaaataattcccccgaacatttgaaagatgaggtttctatcatacagagcatgggatatcggaatagggctaaaagactgttgcagagcgaacccgaaaacccttccctacaagagacctccttgagcgtgcaattgtccaacttgggaactgtgcggacccttagaacaaaacagcgcattcagccgcagaagacatcagtgtatatcgagttagggagcgattcatccgaagacactgtgaataaggcaacctactgctcagtaggtgatcaggagttactgcaaatcactcctcaaggtactcgggatgaaatctccttggacagcgccaaaaaagccgcatgcgaattcagcgagacagatgtcaccaataccgaacaccatcagccgagcaacaatgatctgaatactaccgagaagcgggcggctgaacggcatcccgaaaaataccagggggaggctgcaagcgggtgcgagagcgagactagcgtatccgaagattgcagcggccttagtagtcaatctgacatcttgaccactcagcagagagacaccatgcagcacaatttgatcaaacttcagcaagagatggccgaactggaggccgttctggagcagcacggatctcaaccgtcaaactcttaccctagcataatttccgatagctcggcactggaggatctgcgtaatccagagcagtctacctccgagaaggtactgacgagtcaaaagtcttcagaatatccaatcagccagaaccctgaaggattatccgctgataagttcgaagtctccgcggattccagcacatccaagaataaggagcctggggttgaaaggagctcacccagcaaatgtccttcattagatgacagatggtatatgcactcctgtagcgggagtcttcagaataggaactaccccagccaagaagagctgatcaaagttgtggacgtagaggagcagcaactggaagagtcaggacctcacgatctcactgagacatcctacctccccaggcaggacctagaaggtacgccatatttggaatctgggatttcgctcttctctgacgatcctgagtctgatcccagcgaagatcgggctcctgaatctgccagagtaggcaatataccatcctctacatcagccttaaaagtgccacagttaaaggtagccgagtctgcgcagagccctgctgcagcacacacgaccgataccgcaggatataatgcgatggaagagtccgtcagtcgcgaaaagccagagctgaccgccagcacggagcgcgtgaacaagaggatgagcatggtggtctccggcctgacgccagaggaattcatgctcgtttacaaattcgccagaaaacatcatatcaccttgacaaacctgattacggaagagaccacacacgtcgtgatgaagacggacgcagagttcgtatgcgagcgaacacttaagtattttctgggcattgcgggagggaaatgggtggtttcctacttttgggtaactcaatccattaaagagcggaagatgttgaacgaacatgattttgaagtaaggggagacgttgtgaatggacgcaaccaccaggggcccaaacgcgctagggaaagccaggatcggaaaatttttaggggccttgagatttgctgctacggaccgtttactaacatgccaaccgaccaactcgagtggatggtgcaactgtgtggggcgtctgtggtaaaggagctttcatcatttacactcggcacgggcgtgcaccctattgttgtggtgcagccagatgcatggaccgaggacaacgggtttcacgccatcggacagatgtgtgaagcacctgtggtaacaagggagtgggttctggactctgtggctctgtatcagtgtcaggagctggacacgtatctcataccccagattccacacagccactactag

SEQ ID NO: 171676 - DNA, 2043 bp, Artificial Sequence
  derived and/or modified sequence
atggacctgagcgccctgcgggtggaggaggtgcagaatgtcatcaatgccatgcagaagatcctggagtgccccatctgcctggagctgatcaaggagcctgtgtccaccaagtgtgaccacatcttctgcaagttctgcatgctgaagctgctgaaccagaagaagggccccagccagtgccccctgtgcaagaatgacatcaccaagaggagcctgcaggagagcacccgcttcagccagctggtggaggagctgctgaagatcatctgtgccttccagctggacaccggcctggagtatgccaacagctacaactttgccaagaaggagaacaacagccctgagcacctgaaggatgaggtgtccatcatccagagcatgggctacagaaacagagccaagaggctgctgcagagcgagcctgagaaccccagcctgcaggagaccagcctgtctgtgcagctgagcaacctgggcaccgtgaggaccctgcggaccaagcagaggatccagccccagaagacctctgtgtacatcgagctgggggaggccgccagcggctgtgagagcgagacctctgtgtctgaggactgcagcggcctgagcagccagagcgacatcctgaccacccagcagagggacaccatgcagcacaacctgatcaagctgcagcaggagatggccgagctggaggccgtgctggagcagcacggcagccagcccagcaacagctaccccagcatcatcagtgacagcagcgccctggaggacctgaggaaccctgagcagagcaccagcgagaaggctgtgctgaccagccagaagagcagcgagtaccccatcagccagaaccctgagggcctgtctgctgacaagtttgaggtgtctgctgacagcagcaccagcaagaacaaggagcccggggtggagaggagcagccccagcaaatgtcccagcctggatgaccgctggtacatgcacagctgcagcggcagcctgcagaacagaaactaccccagccaggaggagctgatcaaggtggtggatgtggaggagcagcagctggaggagagcggcccccatgacctgacagagaccagctacctgccccggcaggacctggagggcaccccctacctggagagcggcatcagcctcttcagtgatgatcctgagagtgaccccagcgaggaccgggcccctgagagcgcccgggtgggcaacatccccagcagcaccagcgccctgaaggtgccccagctgaaggtggccgagagcgcccagagccctgctgctgcccacaccacagacacagctggctacaatgccatggaggagagcgtgtcccgggagaagccagagctgacagccagcacagagcgggtgaacaagaggatgtccatggtggtgtctggcctgaccccagaggagttcatgctggtgtacaagtttgccaggaagcaccacatcaccctgaccaacctgatcacagaggagaccacccacgtggtgatgaagacagatgctgagtttgtgtgtgagaggaccctgaagtacttcctgggcattgctgggggcaagtgggtggtgtcctacttctgggtgacccagagcatcaaggagaggaagatgctgaatgaacatgactttgaggtgagaggagatgtggtgaatggaagaaaccaccagggccccaagagggcccgggagagccaggacaggaagatcttccggggcctggagatctgctgctacggccccttcaccaacatgcccacagaccagctggagtggatggtgcagctgtgtggggcctctgtggtgaaggagctgagcagcttcaccctgggcactggagtgcaccccatcgtggtggtgcagccagatgcctggacagaggacaatggcttccacgccatcggccagatgtgtgaggcccctgtggtgacccgggagtgggtgctggacagcgtggccctgtaccagtgccaggagctggacacctacctgatcccccagatcccccacagccactactag

SEQ ID NO: 171677 - DNA, 2166 bp, Artificial Sequence
  derived and/or modified sequence
atggacctgagcgccctgcgggtggaggaggtgcagaatgtcatcaatgccatgcagaagatcctggagtgccccatctgcctggagctgatcaaggagcctgtgtccaccaagtgtgaccacatcttctgcaagttctgcatgctgaagctgctgaaccagaagaagggccccagccagtgccccctgtgcaagaatgacatcaccaagaggagcctgcaggagagcacccgcttcagccagctggtggaggagctgctgaagatcatctgtgccttccagctggacaccggcctggagtatgccaacagctacaactttgccaagaaggagaacaacagccctgagcacctgaaggatgaggtgtccatcatccagagcatgggctacagaaacagagccaagaggctgctgcagagcgagcctgagaaccccagcctgcaggagaccagcctgtctgtgcagctgagcaacctgggcaccgtgaggaccctgcggaccaagcagaggatccagccccagaagacctctgtgtacatcgagctgggcagtgacagcagcgaggacacagtgaacaaggccacctactgcagcgtgggggaccaggagctgctgcagatcaccccccagggcaccagagatgagatcagcctggacagcgccaagaagggggaggccgccagcggctgtgagagcgagacctctgtgtctgaggactgcagcggcctgagcagccagagcgacatcctgaccacccagcagagggacaccatgcagcacaacctgatcaagctgcagcaggagatggccgagctggaggccgtgctggagcagcacggcagccagcccagcaacagctaccccagcatcatcagtgacagcagcgccctggaggacctgagaaatcctgagcagagcaccagcgagaaggctgtgctgaccagccagaagagcagcgagtaccccatcagccagaaccctgagggcctgtctgctgacaagtttgaggtgtctgctgacagcagcaccagcaagaacaaggagcccggggtggagaggagcagccccagcaagtgccccagcctggatgaccgctggtacatgcacagctgcagcggcagcctgcagaacagaaactaccccagccaggaggagctgatcaaggtggtggatgtggaggagcagcagctggaggagagcggcccccatgacctgacagagaccagctacctgccccggcaggacctggagggcaccccctacctggagagcggcatcagcctcttcagtgatgatcctgagagtgaccccagtgaagatcgggcccctgagagcgcccgggtgggcaacatccccagcagcaccagcgccctgaaggtgccccagctgaaggtggccgagagcgcccagagccctgctgctgcccacaccacagacacagctggctacaatgccatggaggagagcgtgtcccgggagaagccagagctgacagccagcacagagcgggtgaacaagaggatgtccatggtggtgtctggcctgaccccagaggagttcatgctggtgtacaagtttgccaggaagcaccacatcaccctgaccaacctgatcacagaggagaccacccacgtggtgatgaagacagatgctgagtttgtgtgtgagaggaccctgaagtacttcctgggcattgctgggggcaagtgggtggtgtcctacttctgggtgacccagagcatcaaggagaggaagatgctgaatgaacatgactttgaggtgagaggagatgtggtgaatggaagaaaccaccagggccccaagagggcccgggagagccaggacaggaagatcttccggggcctggagatctgctgctacggccccttcaccaacatgcccacagaccagctggagtggatggtgcagctgtgtggggcctctgtggtgaaggagctgagcagcttcaccctgggcaccggggtgcaccccatcgtggtggtgcagccagatgcctggacagaagataatggcttccacgccatcggccagatgtgtgaggcccctgtggtgacccgggagtgggtgctggacagcgtggccctgtaccagtgccaggagctggacacctacctgatcccccagatcccccacagccactactag

SEQ ID NO: 171678 - DNA, 2139 bp, Artificial Sequence
  derived and/or modified sequence
atgctgaagctgctgaaccagaagaagggccccagccagtgccccctgtgcaagaatgacatcaccaagaggagcctgcaggagagcacccgcttcagccagctggtggaggagctgctgaagatcatctgtgccttccagctggacaccggcctggagtatgccaacagctacaactttgccaagaaggagaacaacagccctgagcacctgaaggatgaggtgtccatcatccagagcatgggctacagaaacagagccaagaggctgctgcagagcgagcctgagaaccccagcctgcaggagaccagcctgtctgtgcagctgagcaacctgggcaccgtgaggaccctgcggaccaagcagaggatccagccccagaagacctctgtgtacatcgagctgggcagtgacagcagtgaagatactgtgaacaaggccacctactgcagcgtgggggaccaggagctgctgcagatcaccccccagggcaccagagatgagatcagcctggacagcgccaagaaggccgcctgtgagttcagcgagacagatgtgaccaacacagagcaccaccagcccagcaacaatgacctgaacaccacagagaagagagctgctgagcggcaccctgagaagtaccagggcgaggccgccagcggctgtgagagcgagacctctgtgtctgaggactgcagcggcctgagcagccagagcgacatcctgaccacccagcagagggacaccatgcagcacaacctgatcaagctgcagcaggagatggccgagctggaggccgtgctggagcagcacggcagccagcccagcaacagctaccccagcatcatcagtgacagcagcgccctggaggacctgagaaatcctgagcagagcaccagcgagaaggtgctgaccagccagaagagcagcgagtaccccatcagccagaaccctgagggcctgtctgctgacaagtttgaggtgtctgctgacagcagcaccagcaagaacaaggagcccggggtggagaggagcagccccagcaaatgtcccagcctggatgaccgctggtacatgcacagctgcagcggcagcctgcagaacagaaactaccccagccaggaggagctgatcaaggtggtggatgtggaggagcagcagctggaggagagcggcccccatgacctgacagagaccagctacctgccccggcaggacctggagggcaccccctacctggagagcggcatcagcctcttcagtgatgatcctgagagtgaccccagcgaggaccgggcccctgagagcgcccgggtgggcaacatccccagcagcaccagcgccctgaaggtgccccagctgaaggtggccgagagcgcccagagccctgctgctgcccacaccacagacacagctggctacaatgccatggaggagagcgtgtcccgggagaagccagagctgacagccagcacagagcgggtgaacaagaggatgtccatggtggtgtctggcctgaccccagaggagttcatgctggtgtacaagtttgccaggaagcaccacatcaccctgaccaacctgatcacagaggagaccacccacgtggtgatgaagacagatgctgagtttgtgtgtgagaggaccctgaagtacttcctgggcattgctgggggcaagtgggtggtgtcctacttctgggtgacccagagcatcaaggagaggaagatgctgaatgaacatgactttgaggtgagaggagatgtggtgaatggaagaaaccaccagggccccaagagggcccgggagagccaggacaggaagatcttccggggcctggagatctgctgctacggccccttcaccaacatgcccacagaccagctggagtggatggtgcagctgtgtggggcctctgtggtgaaggagctgagcagcttcaccctgggcactggagtgcaccccatcgtggtggtgcagccagatgcctggacagaggacaatggcttccacgccatcggccagatgtgtgaggcccctgtggtgacccgggagtgggtgctggacagcgtggccctgtaccagtgccaggagctggacacctacctgatcccccagatcccccacagccactactag

SEQ ID NO: 171679 - DNA, 2280 bp, Artificial Sequence
  derived and/or modified sequence
atggacctgagcgccctgcgggtggaggaggtgcagaatgtcatcaatgccatgcagaagatcctggagtgccccatctgcctggagctgatcaaggagcctgtgtccaccaagtgtgaccacatcttctgcaagttctgcatgctgaagctgctgaaccagaagaagggccccagccagtgccccctgtgcaagaatgacatcaccaagaggagcctgcaggagagcacccgcttcagccagctggtggaggagctgctgaagatcatctgtgccttccagctggacaccggcctggagtatgccaacagctacaactttgccaagaaggagaacaacagccctgagcacctgaaggatgaggtgtccatcatccagagcatgggctacagaaacagagccaagaggctgctgcagagcgagcctgagaaccccagcctgcaggagaccagcctgtctgtgcagctgagcaacctgggcaccgtgaggaccctgcggaccaagcagaggatccagccccagaagacctctgtgtacatcgagctgggcagtgacagcagcgaggacacagtgaacaaggccacctactgcagcgtgggggaccaggagctgctgcagatcaccccccagggcaccagagatgagatcagcctggacagcgccaagaaggccgcctgtgagttcagcgagacagatgtgaccaacacagagcaccaccagcccagcaacaatgacctgaacaccacagagaagagagctgctgagcggcaccctgagaagtaccagggcgaggccgccagcggctgtgagagcgagacctctgtgtctgaggactgcagcggcctgagcagccagagcgacatcctgaccacccagcagagggacaccatgcagcacaacctgatcaagctgcagcaggagatggccgagctggaggccgtgctggagcagcacggcagccagcccagcaacagctaccccagcatcatcagtgacagcagcgccctggaggacctgaggaaccctgagcagagcaccagcgagaaggtgctgaccagccagaagagcagcgagtaccccatcagccagaaccctgagggcctgtctgctgacaagtttgaggtgtctgctgacagcagcaccagcaagaacaaggagcccggggtggagaggagcagccccagcaagtgccccagcctggatgaccgctggtacatgcacagctgcagcggcagcctgcagaacagaaactaccccagccaggaggagctgatcaaggtggtggatgtggaggagcagcagctggaggagagcggcccccatgacctgacagagaccagctacctgccccggcaggacctggagggcaccccctacctggagagcggcatcagcctcttcagtgatgatcctgagagtgaccccagtgaagatcgggcccctgagagcgcccgggtgggcaacatccccagcagcaccagcgccctgaaggtgccccagctgaaggtggccgagagcgcccagagccctgctgctgcccacaccacagacacagctggctacaatgccatggaggagagcgtgtcccgggagaagccagagctgacagccagcacagagcgggtgaacaagaggatgtccatggtggtgtctggcctgaccccagaggagttcatgctggtgtacaagtttgccaggaagcaccacatcaccctgaccaacctgatcacagaggagaccacccacgtggtgatgaagacagatgctgagtttgtgtgtgagaggaccctgaagtacttcctgggcattgctgggggcaagtgggtggtgtcctacttctgggtgacccagagcatcaaggagaggaagatgctgaatgaacatgactttgaggtgagaggagatgtggtgaatggaagaaaccaccagggccccaagagggcccgggagagccaggacaggaagatcttccggggcctggagatctgctgctacggccccttcaccaacatgcccacagaccagctggagtggatggtgcagctgtgtggggcctctgtggtgaaggagctgagcagcttcaccctgggcaccggggtgcaccccatcgtggtggtgcagccagatgcctggacagaagataatggcttccacgccatcggccagatgtgtgaggcccctgtggtgacccgggagtgggtgctggacagcgtggccctgtaccagtgccaggagctggacacctacctgatcccccagatcccccacagccactactag

SEQ ID NO: 171680 - DNA, 2043 bp, Artificial Sequence
  derived and/or modified sequence
atggacctgagcgccctgcgggtggaggaggtgcagaacgtgatcaatgccatgcagaaaattttggaatgccctatttgcttagaactcataaaagaacccgtgtcaacaaaatgcgatcatatattttgtaagttctgtatgcttaagctgctgaatcaaaaaaagggccccagtcagtgtccactgtgtaagaacgacataaccaagcggtcccttcaggagagcacacggttctcgcaacttgtcgaggagttgttgaagatcatctgtgcctttcagcttgatacaggccttgaatacgctaattcgtataactttgctaagaaggaaaacaactcccccgaacatctcaaggacgaagtctcaatcatacagtcaatgggctaccgcaatagggccaaacgactccttcaatcggagccagagaacccttccctgcaggagacttctttgtccgtgcagctcagcaatctgggaactgtccgcacgctgcgtaccaagcaaaggatccagccacagaaaacctccgtttacattgagctgggagaggcagcttccggatgcgaaagtgaaaccagcgtgtctgaagactgtagcggcctgtcaagtcagtcagacattctcacgacccagcagagggacacaatgcagcataacctcattaaactacagcaggagatggccgagctggaagcagttctcgaacaacacggttcacagccaagtaattcctacccatccatcataagtgatagtagtgctttagaggacctgagaaaccccgagcaatcaacttcagagaaggccgtgctcaccagtcaaaaaagcagtgagtacccgatctcacagaatcctgagggcctgtccgctgacaaatttgaggtatcggccgacagctcaaccagcaagaataaagagccgggtgtcgagagaagctccccttcaaagtgtcctagtctagacgacaggtggtacatgcactcctgttctggcagtcttcagaacagaaattatccaagccaggaagagctcattaaggtcgtggatgtggaagagcagcagctggaagagtctgggccacacgatctcaccgagacatcttaccttccaaggcaggatctggaaggcacaccatacctggaatcagggatctcccttttttccgatgaccctgagtcggacccttccgaggatcgcgccccagaatcagctagagtcggcaatattccaagctcgacaagcgcccttaaggtgcctcagttgaaagtggcggaaagcgcccaatctcctgcagcggctcacaccactgacaccgctggctacaacgcgatggaggaatccgtgtcacgcgaaaagcctgagctcaccgcctcaactgagagggtaaacaagaggatgtctatggtcgtgagtggacttactccagaagaattcatgcttgtgtacaagttcgccaggaaacaccacatcaccctcacaaatcttatcaccgaggagacaacccacgtggtgatgaagaccgacgccgaattcgtttgcgaaagaaccctgaagtacttcctaggcatcgccggcggtaaatgggtggtttcttacttctgggtgacacagtccattaaagaacgaaaaatgttgaacgagcacgatttcgaagttagaggggatgttgtcaacggtcgaaaccatcagggcccgaagcgcgcccgcgaatcacaagaccggaaaatctttcgtgggctcgagatttgttgctacgggccttttacgaatatgcccactgaccaactggagtggatggttcagttgtgtggcgcttcagttgtgaaagagctcagctcatttacactgggaaccggagttcatccaatagtcgttgtgcagccagacgcatggacagaagataacgggtttcacgccatcggccagatgtgtgaggcccctgtcgttaccagagagtgggtactggattccgtggcgctgtatcaatgccaggaacttgatacatacctgattcctcaaatccctcactcgcactactag

SEQ ID NO: 171681 - DNA, 2166 bp, Artificial Sequence
  derived and/or modified sequence
atggacctgagcgccctgcgggtggaggaggtgcagaacgtgatcaacgccatgcagaagattctagagtgtccaatttgtcttgaattgataaaagagcctgtatccactaaatgcgaccatatcttttgtaaattctgtatgctgaagttgctcaaccagaagaaaggcccatctcagtgtcccctgtgtaaaaacgatattacgaaaaggagcttgcaggagtctactagattttcacagttggtagaagagctgctgaaaattatctgtgcctttcagctcgataccggcctcgagtatgcgaactcatataatttcgccaagaaagagaataattctcccgaacatctgaaggatgaggtatccatcatccagagcatggggtatcgcaatcgcgcaaaaaggctcctgcagtctgagcccgaaaatccctccctacaggagacatcactgagtgtgcagctgagcaatttaggcactgtccggaccttgcgaacaaagcagagaatccagccccagaaaactagcgtgtacattgaactgggcagcgactcttcggaagatacagtcaataaggcaacctactgctccgtgggggatcaggagctcctacagattacaccacaggggacacgcgatgaaatctccttggattcagcgaagaaaggtgaagctgccagtgggtgcgaatcagaaacatccgtgtcagaggattgttcgggcctctcttctcagagcgacattttgaccactcagcagcgagatactatgcagcacaacctcattaagcttcagcaagaaatggcagaacttgaggctgttctggagcagcacggtagtcagcccagcaacagctatccctcaatcatcagcgatagtagcgccctagaggacctcaggaatcccgagcagagtacgtcagagaaggccgtgctgacatctcagaagtcaagcgagtaccctattagccagaacccagaaggactctcggccgataaattcgaagtgagcgcggacagcagcacctccaagaacaaagaaccaggcgtggagcggtcttcgccgagcaaatgccctagcctcgatgacagatggtatatgcattcttgcagtggttctctccaaaaccggaactacccgtcacaggaagagctgattaaggtggtggacgtcgaggagcagcaactggaggaaagtgggccacatgatttgactgaaacatcctacctgccaagacaagatctggaggggaccccatatttggagtccggcataagtctgttctctgatgatcccgaatctgatccctcggaggaccgggctcccgaatccgctagggttggcaatatcccctcttccacatccgccctcaaggtgccccagctgaaggtcgctgagtctgcccagtctcccgccgccgctcataccactgacaccgccggatataacgccatggaggagtccgtatctcgcgagaagcctgaactgacagcctccaccgaaagagttaacaagcggatgtctatggtggtcagcggcctgacaccggaagaattcatgctggtgtataagttcgctcgaaagcatcatatcacccttaccaacttgatcaccgaagaaacgacgcacgtcgtgatgaaaactgacgctgagttcgtctgcgagcggaccctgaagtactttctgggaatcgccggcggcaagtgggtcgtttcatatttttgggtgacccagtcgattaaggaaaggaagatgttgaacgaacatgattttgaggtcaggggcgatgtggtcaatggcaggaatcaccagggtccaaagagggctcgtgaatcacaggacaggaagatatttagaggcctcgaaatatgttgttatggtccttttacaaatatgcccacagaccagttagaatggatggtgcaactgtgcggcgcaagcgtcgtcaaggaactaagctccttcaccctcggcaccggcgtacaccccatcgtcgtggtacagccagacgcctggacagaagataatggcttccacgcaatcgggcagatgtgtgaagcccccgtggtcacccgggaatgggtgttggacagtgtggcgttgtaccagtgccaagaactggatacatatctgatccctcaaatccctcactcccattactag

SEQ ID NO: 171682 - DNA, 2139 bp, Artificial Sequence
  derived and/or modified sequence
atgctgaagctgctgaaccagaagaagggccccagccagtgccccctatgcaagaatgatataacgaagcgctccctgcaggaatccacgcgatttagccaactcgtggaggagctcctaaagatcatttgtgccttccaactcgacacaggcctggagtatgctaattcctataactttgctaaaaaggaaaacaattctccagaacatctcaaggacgaggtctccataatacagagtatgggttataggaatagagcaaagaggctactccagtccgaaccagagaatccatctctccaagagaccagtctgagtgtgcaattaagcaatttgggcactgtgaggacactcaggaccaagcagaggatccagccccagaagacatctgtttacatagagcttggatcagattccagcgaggacaccgttaataaagctacttactgtagtgtcggggatcaagaactgcttcagattaccccacagggaacaagagatgagatctccctggatagcgccaaaaaagccgcatgtgaattctccgaaaccgatgtaacgaacactgaacaccaccaaccatccaataacgacctgaacacaactgagaagcgggctgctgagaggcacccggaaaagtatcagggcgaagctgcgtctggatgcgagtctgagacctctgtgagcgaagattgcagcggtcttagctctcagagcgacatactcactacacagcagcgggacacaatgcaacataacctaatcaagctccaacaggagatggccgagcttgaagctgtgctcgaacagcacggatctcagccttccaactcataccctagcatcattagcgattcatccgctcttgaggatctccgaaatccagagcagtcaacttcagagaaggttttgacatctcaaaagagtagcgagtaccctatttcgcaaaatccagagggcctgtccgccgacaagtttgaggtgagcgctgactcaagtacgtcgaaaaacaaggagcccggagttgaacggagctcgccatctaagtgcccctcgctggacgatcgctggtacatgcacagctgttctggaagcctgcagaacagaaactatccttctcaggaggagttaatcaaggtggtggacgtagaggagcagcagctggaagagtccgggccacatgatctgaccgaaacctcctatttgccacgtcaagatctggagggcacgccgtaccttgaaagtggtatcagcctcttcagtgatgatccagaatctgacccttcagaggaccgagctcccgaaagcgctcgtgtgggtaacatccctagctcaacctctgcactcaaggtgccacagctgaaagtggctgaatcagcacagtccccagccgcagcccacacaaccgacacagccggttacaatgcaatggaggaaagcgttagcagagaaaagcccgagctgaccgccagcaccgagagagtgaataagcggatgtcaatggttgtgagtggtttgacaccagaggagtttatgctggtctacaagttcgcgaggaagcatcacatcactctcacaaatctgattaccgaggagaccacccacgtggtcatgaagactgacgccgaattcgtgtgtgagaggaccctgaagtactttctgggaatcgcaggcggtaagtgggtcgtttcctacttctgggtgactcaatctatcaaagaaagaaagatgctcaacgagcacgatttcgaggtccgcggcgacgtggtgaatggtcggaaccatcagggcccgaaacgggccagggagtctcaagatagaaagatcttccggggcctggagatctgttgttacggaccctttacaaacatgcccactgatcaactcgagtggatggtgcagctttgcggcgctagcgtcgtgaaggagctgtcatctttcaccttaggcacaggcgtgcatcccattgttgtcgttcagcccgacgcatggacagaagacaacggcttccatgcgataggacaaatgtgcgaggcaccggtggtgacccgtgaatgggtcttggattctgtggctctctaccagtgtcaggaattggatacatatctgatccctcagattcctcattctcattattag

SEQ ID NO: 171683 - DNA, 2280 bp, Artificial Sequence
  derived and/or modified sequence
atggacctgagcgccctgcgggtggaggaggtgcagaacgtgatcaatgccatgcagaaaatattagagtgtcccatatgtctagaattgataaaagaaccagtctctactaaatgcgaccacatcttttgcaagttctgcatgctgaagctccttaatcaaaaaaaagggcctagtcaatgcccgctgtgtaagaatgacattactaagaggagccttcaggagagtacgcggttcagccagctggttgaggagctgcttaagatcatctgtgctttccagctggatactggactagagtacgccaattcctacaactttgcgaaaaaggagaataacagtcctgagcacctaaaggatgaagtttctatcatccagtccatgggctaccggaatcgagcgaagcgcctgctgcaaagtgagcccgaaaatccctccctccaggagactagccttagcgtccagctgagcaatctggggactgtgcggacactccgcactaaacagagaatccagccacagaagacctctgtctatatcgaactcggatcagatagtagcgaagataccgtgaataaagctacatactgctcagtcggagaccaggaattactgcagataacaccccaaggaacccgtgacgaaatttccctggactctgccaaaaaagccgcatgtgagttcagcgagacagacgtcactaatacagaacatcaccagccgtctaataacgacttgaataccacagaaaagagagcggcagaacgacaccccgagaaataccagggggaagcggccagcgggtgcgaatcggagaccagtgtctccgaagactgtagcgggctgtccagccagtcggacatcctcacaacacaacagagagatactatgcagcacaacctcattaagttgcaacaggaaatggccgagctggaagccgtgcttgagcagcacgggagccagccttctaacagttatccatccataatcagcgactcctctgcactcgaggatttgcggaatccagagcaaagcacttcagaaaaggtgttgacttctcagaaaagctctgaatacccaatctcccagaaccccgagggcctgtcagccgacaagtttgaagtttctgctgactcttcaaccagcaaaaacaaggagccaggagtggaacgctcctctccaagcaagtgcccctcgctggacgatcggtggtatatgcactcatgttccggtagcttacagaacagaaactaccccagccaggaggagttaatcaaagtagtagacgttgaagagcagcagctggaagagtctgggccacatgaccttaccgagacatcatatctgcccaggcaggatctggagggtactccttatctggagtctggaatttccctgttctccgacgaccctgaaagtgaccctagtgaagaccgcgctcctgagtccgcccgcgtggggaatataccaagctcaacaagtgcgctaaaagtccctcaattaaaggtggctgaaagcgcacagtctcccgccgcagcccatacaacagacactgccggctacaacgcaatggaggaaagcgtgtctcgagaaaaaccagagctaaccgcctccacagagcgcgttaataagagaatgtccatggttgtcagcggcctgaccccggaggaatttatgcttgtgtataaattcgctcgaaagcatcacatcacgcttacaaacctgataacagaagaaaccacccatgtggttatgaaaactgatgcggagtttgtgtgtgagcgtacgctaaagtacttcctggggatcgcgggaggcaaatgggtggtgtcatacttttgggttacacagagtattaaggagcgtaaaatgctgaatgagcacgattttgaggtgaggggcgatgtggtgaacggccgtaaccaccaagggcctaagagggcaagggagtcacaggaccgaaaaatatttagaggattagaaatttgctgttacggcccatttacgaatatgccaaccgatcaactggaatggatggttcaactctgtggagcttccgttgtaaaggagctcagcagtttcacattgggaacaggagtacatcctatcgttgttgtccaaccggatgcgtggactgaagacaatggattccatgcaattgggcagatgtgcgaggcaccggtggttaccagggaatgggttcttgattcggtggccctataccagtgtcaagagctggacacttatctgatcccccagatccctcattcccattactag

SEQ ID NO: 171684 - DNA, 2043 bp, Artificial Sequence
  derived and/or modified sequence
atggacctctctgccctgcgggtggaagaagtgcaaaacgttattaacgctatgcaaaaaattctggagtgtcctatttgcctggagctgatcaaggagcccgtttcaacaaaatgcgatcatatcttttgcaaattctgtatgctcaagcttttgaaccagaagaaaggaccgtcccaatgccccctctgtaaaaacgatatcaccaaacggagcctgcaggaaagcacgcggttctctcagttagtggaggagttgctgaaaataatttgcgcattccagctggacaccggacttgagtacgctaatagctacaatttcgcgaagaaagaaaacaatagccccgagcacctgaaggatgaagtttctatcatccagtcaatggggtataggaatcgggcaaaacggcttctgcagtccgagccagaaaacccctctctgcaagagacatccctgtctgtgcagcttagcaatctgggcaccgttcgcaccctgagaacaaagcagaggatccagccccagaaaacatcagtgtacatcgaactgggtgaggctgctagcggttgcgaatccgagactagtgtctctgaagattgctctggcttaagcagtcagtctgatatacttacaactcaacagcgggacaccatgcaacataacttgattaagttacaacaggagatggcagagctggaggctgtgttggagcagcacggctcccagccttcaaattcatatccctccattatctccgactccagcgccctagaggacttaaggaacccagaacagtcaacctcagaaaaggctgtcctgacatcccagaaatcttctgaataccccattagtcagaatcccgaagggcttagcgcggacaaattcgaggtgtccgccgatagctccacatccaagaataaagagcccggagtggagcgatcctccccctccaagtgcccttcgttagacgaccggtggtacatgcattcgtgctctggcagtctgcagaatcggaactaccccagtcaagaggagttaatcaaagtggtagacgtggaggagcagcagctggaagaatcgggtccacatgatctgacagagacaagctatctgccaagacaggacctagagggcacgccatatctggagtctggcatcagcttgttctctgatgatcctgagagtgatccttctgaagatcgggcaccagaatctgccagagtgggcaacattcctagctctacttccgctcttaaggtgcctcaactcaaagttgcggagagcgcacaatcacccgcagccgcacacacaacagacacggctggctataacgctatggaagagtctgtcagcagggagaaacccgaactcacagccagcactgagcgggtgaataagcgcatgagcatggtggtgtccggtctgacaccagaagaatttatgttggtgtataagtttgcacggaagcaccatatcactctcaccaatctgattactgaggagactacgcatgtcgttatgaaaactgatgccgaattcgtgtgtgagagaactctgaagtactttctcggaatcgctggtggcaagtgggtggtgtcttatttctgggtgacccagtcaattaaggagaggaaaatgctgaatgaacacgacttcgaagtgcgtggggatgtggtgaacggtcgcaatcaccaaggacccaaaagagctcgggaatctcaggatcggaagatctttagaggactggagatctgttgttatggcccatttacaaacatgcctactgatcagctggagtggatggtgcagctgtgcggcgcttccgttgtgaaagagctgtctagttttacgctggggaccggtgtgcaccctattgtggtcgtccaaccggacgcttggaccgaagataatgggttccacgctatcggccaaatgtgtgaggccccagtggtgactcgtgagtgggtgctggactccgttgcattataccagtgtcaggaactggacacctaccttattccccaaataccccattctcattattag

SEQ ID NO: 171685 - DNA, 2166 bp, Artificial Sequence
  derived and/or modified sequence
atggatttgtctgccttacgggtagaagaggtgcagaatgtgatcaacgccatgcagaagattttagaatgtcccatatgcctggagctcattaaggaacccgtctccacaaaatgcgatcacatcttctgcaaattctgtatgctgaagctgctgaaccaaaagaagggacccagccagtgtccactctgtaagaatgatattacaaagcgatccctgcaggaaagcacgaggttctcccaactggtcgaagagctgcttaagatcatctgtgctttccagctcgatactggacttgaatatgcgaacagctacaatttcgctaagaaagaaaacaattcccccgagcatttaaaggacgaggtatctataatacagagcatgggctatcggaaccgggcaaagcggctgctccagtcagaaccggagaacccaagcttgcaagagaccagcttgtccgtgcaattgtcaaatctggggacagtgagaacgttgcgtacaaaacagcggatacagccccaaaaaacttcagtctacattgaactcggctccgactcttctgaggacacggtgaacaaggcaacatattgttctgtgggcgaccaggagctgctacaaataacaccccagggcaccagagatgaaatctccctggatagtgccaaaaaaggggaagccgcatccggatgtgaatctgaaacctccgtctctgaggattgtagcggcctttcatcccagtccgacatactcacaactcagcagagggacactatgcagcacaacctcatcaaactccagcaggagatggccgagttagaggctgtgcttgaacagcacggaagccagccctctaactcatatcctagtataatcagtgactctagtgctttggaggacttgaggaacccagagcagagcacatcggagaaggccgttctgaccagtcagaagtcttctgagtatcccattagccagaatcctgaagggttaagcgccgataaattcgaagtgagcgccgacagctctactagtaagaataaggagcccggagtggagcgcagtagcccttcgaaatgcccaagtctcgacgaccggtggtatatgcacagttgtagcggttcactgcagaatcgaaattatccatcccaggaggagcttattaaggttgtggatgtggaggagcagcagcttgaggagagcggaccacatgacctgaccgaaaccagttacctccctaggcaggacttggaaggcaccccctacttagaatctggcatctcactgttttccgatgatccagagtccgacccatcagaggatagggccccagagagtgctagggtaggcaacatcccctccagcacctccgccctcaaggttcctcagctaaaggtggccgagagcgcgcaatccccagctgcagcccatacaaccgacacagccggttataatgctatggaagagtcagtgtccagggagaaacctgagctcaccgcatcgaccgagagggtgaataagcggatgagcatggttgtctcgggccttacgccagaggaatttatgttggtctataaattcgctagaaagcatcacattaccctgacaaacctcataaccgaagaaactacccatgtggttatgaagacagatgcagaatttgtgtgcgagcgtaccctgaagtatttcctcgggattgcaggcggtaaatgggtggtctcttacttctgggtcacccagtccatcaaggagagaaaaatgctgaacgaacacgacttcgaagtacggggtgacgtggtgaacggacgcaatcaccagggcccaaaacgcgctcgcgagagtcaagacagaaagatcttcaggggcctggagatttgctgttacgggcctttcacaaatatgccaacggaccagctcgaatggatggtccagttatgcggtgcttccgtcgtaaaggagctgagttccttcactctaggaacgggagtccatccaatcgtggtggtccagcctgacgcttggactgaggacaacgggtttcacgctattgggcaaatgtgcgaagcacccgtggttacacgggaatgggtcctcgacagtgtagccttataccagtgtcaggagctggacacgtacctgatcccacagatcccccatagtcattactag

SEQ ID NO: 171686 - DNA, 2139 bp, Artificial Sequence
  derived and/or modified sequence
atgttaaaacttctgaaccagaaaaagggcccttcacagtgtccactgtgcaagaacgatataacaaagagatcattgcaggaatctactaggttttctcaactcgttgaagagctcctcaagatcatctgcgcgttccaattggatacgggcctggaatacgccaactcatacaatttcgcaaagaaggagaataacagtcccgagcatctcaaagatgaggtgtcaataatccagtccatgggatacaggaacagagccaagcgcctgctgcagagcgagccagagaatccgtcactgcaagagacgagcctgagcgttcagctttccaacttgggcactgtgcggaccctgaggacaaaacagagaatccaaccccaaaagaccagcgtgtacattgagcttggcagcgattcctctgaagatactgttaataaggctacgtattgctctgtaggcgaccaggaactcctgcagatcacaccacagggcacacgtgacgagatatccctggactcggctaagaaagccgcatgcgagttttcggagacggatgtcactaatacagagcatcatcagccatctaataatgatctgaataccacagaaaaaagagctgccgagcgccacccagagaaatatcaaggggaggctgccagtggatgcgagagcgagactagtgtctctgaggactgctccggtctcagctcacagtcagatatcctaacgactcagcagcgggatactatgcagcataatttaatcaagctccagcaagagatggctgagttggaggcggtattagagcagcatggatcccaacccagtaatagctatccatcaatcatttcagatagcagtgctttggaggatctcagaaaccccgaacagtccaccagtgaaaaagtcctgacctcacagaaatccagcgagtaccccatcagtcagaacccagaaggattgtccgcagataagttcgaggtttcagccgatagcagtactagtaagaataaagagccgggtgtcgaacggtcatctccgtctaaatgcccatcattggatgaccggtggtacatgcactcgtgctcaggcagcctgcagaacagaaattacccgtcccaggaggaattgatcaaagtggtcgatgtggaagagcagcagctggaggagagtgggcctcacgatttaacggagacaagttatttacccaggcaagacctagaaggcacaccatatctggaaagcgggatctcgctgttcagcgacgacccagaaagcgacccaagtgaggaccgggctcccgaatccgctagagtgggaaacataccaagctccaccagcgctctgaaagtgccccaactgaaagtcgccgaatccgcgcagtcccctgctgccgctcacactaccgatacggccggatacaacgctatggaggagtctgtgagcagagagaagccagagctgaccgctagtacagaaagagtgaataaacgcatgtcaatggtggtatcaggcctcacccccgaggaatttatgttagtttacaaatttgctagaaaacatcacattacactcactaacctaataaccgaggagacaacccacgtggtcatgaaaacagacgccgaattcgtctgcgagcgcaccttgaagtactttctgggcatcgcgggaggcaaatgggtcgtgtcttacttttgggtgacacagtctattaaggaaagaaagatgctgaatgagcatgattttgaggtgaggggggacgtcgtaaatggcaggaaccaccagggacccaagagagcacgcgaaagccaggatcgaaagatattcaggggcctcgagatatgttgctatggccctttcacaaacatgcctaccgaccagctggagtggatggtgcaactgtgtggcgcttctgttgtcaaggagctgtcctcctttacgctgggcaccggcgtgcacccaatagtggtcgtgcagcccgacgcatggaccgaagacaacggcttccacgcgatcggtcaaatgtgcgaggcaccagtcgtaacacgagaatgggtgttagacagtgtggctctctatcaatgtcaggagttggatacatacttaataccacagattccacatagtcactactag

SEQ ID NO: 171687 - DNA, 2280 bp, Artificial Sequence
  derived and/or modified sequence
atggacctcagtgccctgagggtggaggaggtacaaaatgttataaatgcaatgcagaagatcctggaatgtccaatctgtctggaattgatcaaagagcccgtttcgactaaatgcgaccatattttttgcaagttttgcatgcttaaactactgaaccagaaaaaagggccatctcagtgccccctgtgtaagaatgatatcaccaaacgttctctacaggaatccacccgcttcagtcagttagtggaggagttgttaaaaataatctgcgcatttcagctggatacaggccttgagtatgccaatagttataacttcgccaagaaggaaaacaactctccggaacatctgaaagacgaagtgtcaattatacaatctatgggctatagaaatcgggctaaacgtttgctgcaatcggagcctgagaatccctccctccaggagacttccctgagcgtgcagctgagcaatctaggcactgtcagaaccctgcggacaaaacagcgaattcaacctcaaaaaacctcagtgtatattgaactggggagtgatagctctgaagataccgtcaataaggctacctactgttcggtaggtgatcaagaactgttacagattactcctcagggaacccgtgacgagatcagccttgactcagccaaaaaggccgcatgtgaattctccgaaaccgacgtgaccaacaccgaacatcatcagccgtcgaacaacgacctgaacacgactgaaaagagagccgcagagcgccaccctgagaagtaccagggcgaggccgcttccggctgtgagtctgaaacttctgttagtgaagattgctccgggctgtcctctcaatccgatatcctgaccacccaacaacgggacaccatgcagcataatctgattaaactgcaacaagaaatggcagaactggaagccgtgctagagcagcacggctcccagcccagcaactcttacccgtctatcatatctgattccagcgcactggaggatctaaggaaccccgagcaatccacctctgagaaggtgctaacgtcccagaagagctccgagtacccaatctcccagaaccctgagggtctgagtgcagataagtttgaggtcagcgcagactccagcacatctaagaataaagaacctggcgtggagcggagctcccccagtaagtgcccctctctggatgacagatggtatatgcattcgtgtagcgggtctttacagaaccgtaattacccatcacaggaggaactcataaaggttgttgacgtagaagaacagcagctggaagaatcaggaccccacgacctgaccgaaacatcatacctcccgcgacaagatttggagggcacaccctacctggagagcggcattagccttttcagcgacgaccctgagtctgacccttccgaagaccgggcacccgaatccgccagagtgggtaacataccatcttctacttctgccctgaaagtcccccagctgaaggtggccgaaagcgcccagtcccctgccgcagcacatacaaccgatactgctggatacaacgctatggaagaatctgtgagccgggagaaacccgaactgactgccagcaccgaacgagtcaacaaaaggatgagtatggtagtgagtggcctgacacctgaagagtttatgttggtgtacaaatttgccagaaaacaccacatcacgctgaccaatctaatcacagaggaaacgacacacgtagtcatgaaaacagatgcagaattcgtgtgtgaaaggaccttgaagtatttcctgggcatagcaggaggcaagtgggtggtgagttacttctgggttacccagtcaatcaaggaacgcaagatgttaaatgaacacgatttcgaggtgagaggagacgtagtcaacggacgtaatcatcagggcccaaagagagcccgagaaagccaggacaggaaaatcttccggggactggagatctgctgctatggcccatttaccaatatgcccacagaccagctcgagtggatggtgcagctctgtggagcgtcagtggttaaagagctttcctctttcactctgggcaccggcgtgcatcccattgtggtcgtacaacctgatgcatggacagaagataacggctttcacgcaataggacagatgtgcgaagcacccgtggtaactagagagtgggtcctggactcagtggccctataccagtgccaggagctggacacgtatctaattcctcagataccacattcacactactag

SEQ ID NO: 171688 - DNA, 3444 bp, Artificial Sequence
  derived and/or modified sequence
ttcattggaacagaaagaaatggatttatctgctcttcgcgttgaagaagtacaaaatgtcattaatgctatgcagaaaatcttagagtgtcccatctgtctggagttgatcaaggaacctgtctccacaaagtgtgaccacatattttgcaaattttgcatgctgaaacttctcaaccagaagaaagggccttcacagtgtcctttatgtaagaatgatataaccaaaaggagcctacaagaaagtacgagatttagtcaacttgttgaagagctattgaaaatcatttgtgcttttcagcttgacacaggtttggagtatgcaaacagctataattttgcaaaaaaggaaaataactctcctgaacatctaaaagatgaagtttctatcatccaaagtatgggctacagaaaccgtgccaaaagacttctacagagtgaacccgaaaatccttccttgcaggaaaccagtctcagtgtccaactctctaaccttggaactgtgagaactctgaggacaaagcagcggatacaacctcaaaagacgtctgtctacattgaattgggtgaagcagcatctgggtgtgagagtgaaacaagcgtctctgaagactgctcagggctatcctctcagagtgacattttaaccactcagcagagggataccatgcaacataacctgataaagctccagcaggaaatggctgaactagaagctgtgttagaacagcatgggagccagccttctaacagctacccttccatcataagtgactcttctgcccttgaggacctgcgaaatccagaacaaagcacatcagaaaaagcagtattaacttcacagaaaagtagtgaataccctataagccagaatccagaaggcctttctgctgacaagtttgaggtgtctgcagatagttctaccagtaaaaataaagaaccaggagtggaaaggtcatccccttctaaatgcccatcattagatgataggtggtacatgcacagttgctctgggagtcttcagaatagaaactacccatctcaagaggagctcattaaggttgttgatgtggaggagcaacagctggaagagtctgggccacacgatttgacggaaacatcttacttgccaaggcaagatctagagggaaccccttacctggaatctggaatcagcctcttctctgatgaccctgaatctgatccttctgaagacagagccccagagtcagctcgtgttggcaacataccatcttcaacctctgcattgaaagttccccaattgaaagttgcagaatctgcccagagtccagctgctgctcatactactgatactgctgggtataatgcaatggaagaaagtgtgagcagggagaagccagaattgacagcttcaacagaaagggtcaacaaaagaatgtccatggtggtgtctggcctgaccccagaagaatttatgctcgtgtacaagtttgccagaaaacaccacatcactttaactaatctaattactgaagagactactcatgttgttatgaaaacagatgctgagtttgtgtgtgaacggacactgaaatattttctaggaattgcgggaggaaaatgggtagttagctatttctgggtgacccagtctattaaagaaagaaaaatgctgaatgagcatgattttgaagtcagaggagatgtggtcaatggaagaaaccaccaaggtccaaagcgagcaagagaatcccaggacagaaagatcttcagggggctagaaatctgttgctatgggcccttcaccaacatgcccacagatcaactggaatggatggtacagctgtgtggtgcttctgtggtgaaggagctttcatcattcacccttggcacaggtgtccacccaattgtggttgtgcagccagatgcctggacagaggacaatggcttccatgcaattgggcagatgtgtgaggcacctgtggtgacccgagagtgggtgttggacagtgtagcactctaccagtgccaggagctggacacctacctgataccccagatcccccacagccactactgactgcagccagccacaggtacagagccacaggaccccaagaatgagcttacaaagtggcctttccaggccctgggagctcctctcactcttcagtccttctactgtcctggctactaaatattttatgtacatcagcctgaaaaggacttctggctatgcaagggtcccttaaagattttctgcttgaagtctcccttggaaatctgccatgagcacaaaattatggtaatttttcacctgagaagattttaaaaccatttaaacgccaccaattgagcaagatgctgattcattatttatcagccctattctttctattcaggctgttgttggcttagggctggaagcacagagtggcttggcctcaagagaatagctggtttccctaagtttacttctctaaaaccctgtgttcacaaaggcagagagtcagacccttcaatggaaggagagtgcttgggatcgattatgtgacttaaagtcagaatagtccttgggcagttctcaaatgttggagtggaacattggggaggaaattctgaggcaggtattagaaatgaaaaggaaacttgaaacctgggcatggtggctcacgcctgtaatcccagcactttgggaggccaaggtgggcagatcactggaggtcaggagttcgaaaccagcctggccaacatggtgaaaccccatctctactaaaaatacagaaattagccggtcatggtggtggacacctgtaatcccagctactcaggtggctaaggcaggagaatcacttcagcccgggaggtggaggttgcagtgagccaagatcataccacggcactccagcctgggtgacagtgagactgtggctcaaaaaaaaaaaaaaaaaaaggaaaatgaaactagaagagatttctaaaagtctgagatatatttgctagatttctaaagaatgtgttctaaaacagcagaagattttcaagaaccggtttccaaagacagtcttctaattcctcattagtaataagtaaaatgtttattgttgtagctctggtatataatccattcctcttaaaatataagacctctggcatgaatatttcatatctataaaatgacagatcccaccaggaaggaagctgttgctttctttgaggtgatttttttcctttgctccctgttgctgaaaccatacagcttcataaataattttgcttgctgaaggaagaaaaagtgtttttcataaacccattatccaggactgtttatagctgttggaaggactaggtcttccctagcccccccagtgtgcaagggcagtgaagacttgattgtacaaaatacgttttgtaaatgttgtgctgttaacactgcaaataaacttggtagcaaacacttcc

SEQ ID NO: 171689 - DNA, 3780 bp, Artificial Sequence
  derived and/or modified sequence
gtaccttgatttcgtattctgagaggctgctgcttagcggtagccccttggtttccgtggcaacggaaaagcgcgggaattacagataaattaaaactgcgactgcgcggcgtgagctcgctgagacttcctggacgggggacaggctgtggggtttctcagataactgggcccctgcgctcaggaggccttcaccctctgctctgggtaaagttcattggaacagaaagaaatggatttatctgctcttcgcgttgaagaagtacaaaatgtcattaatgctatgcagaaaatcttagagtgtcccatctgtctggagttgatcaaggaacctgtctccacaaagtgtgaccacatattttgcaaattttgcatgctgaaacttctcaaccagaagaaagggccttcacagtgtcctttatgtaagaatgatataaccaaaaggagcctacaagaaagtacgagatttagtcaacttgttgaagagctattgaaaatcatttgtgcttttcagcttgacacaggtttggagtatgcaaacagctataattttgcaaaaaaggaaaataactctcctgaacatctaaaagatgaagtttctatcatccaaagtatgggctacagaaaccgtgccaaaagacttctacagagtgaacccgaaaatccttccttgcaggaaaccagtctcagtgtccaactctctaaccttggaactgtgagaactctgaggacaaagcagcggatacaacctcaaaagacgtctgtctacattgaattgggatctgattcttctgaagataccgttaataaggcaacttattgcagtgtgggagatcaagaattgttacaaatcacccctcaaggaaccagggatgaaatcagtttggattctgcaaaaaagggtgaagcagcatctgggtgtgagagtgaaacaagcgtctctgaagactgctcagggctatcctctcagagtgacattttaaccactcagcagagggataccatgcaacataacctgataaagctccagcaggaaatggctgaactagaagctgtgttagaacagcatgggagccagccttctaacagctacccttccatcataagtgactcttctgcccttgaggacctgcgaaatccagaacaaagcacatcagaaaaagcagtattaacttcacagaaaagtagtgaataccctataagccagaatccagaaggcctttctgctgacaagtttgaggtgtctgcagatagttctaccagtaaaaataaagaaccaggagtggaaaggtcatccccttctaaatgcccatcattagatgataggtggtacatgcacagttgctctgggagtcttcagaatagaaactacccatctcaagaggagctcattaaggttgttgatgtggaggagcaacagctggaagagtctgggccacacgatttgacggaaacatcttacttgccaaggcaagatctagagggaaccccttacctggaatctggaatcagcctcttctctgatgaccctgaatctgatccttctgaagacagagccccagagtcagctcgtgttggcaacataccatcttcaacctctgcattgaaagttccccaattgaaagttgcagaatctgcccagagtccagctgctgctcatactactgatactgctgggtataatgcaatggaagaaagtgtgagcagggagaagccagaattgacagcttcaacagaaagggtcaacaaaagaatgtccatggtggtgtctggcctgaccccagaagaatttatgctcgtgtacaagtttgccagaaaacaccacatcactttaactaatctaattactgaagagactactcatgttgttatgaaaacagatgctgagtttgtgtgtgaacggacactgaaatattttctaggaattgcgggaggaaaatgggtagttagctatttctgggtgacccagtctattaaagaaagaaaaatgctgaatgagcatgattttgaagtcagaggagatgtggtcaatggaagaaaccaccaaggtccaaagcgagcaagagaatcccaggacagaaagatcttcagggggctagaaatctgttgctatgggcccttcaccaacatgcccacagatcaactggaatggatggtacagctgtgtggtgcttctgtggtgaaggagctttcatcattcacccttggcacaggtgtccacccaattgtggttgtgcagccagatgcctggacagaggacaatggcttccatgcaattgggcagatgtgtgaggcacctgtggtgacccgagagtgggtgttggacagtgtagcactctaccagtgccaggagctggacacctacctgataccccagatcccccacagccactactgactgcagccagccacaggtacagagccacaggaccccaagaatgagcttacaaagtggcctttccaggccctgggagctcctctcactcttcagtccttctactgtcctggctactaaatattttatgtacatcagcctgaaaaggacttctggctatgcaagggtcccttaaagattttctgcttgaagtctcccttggaaatctgccatgagcacaaaattatggtaatttttcacctgagaagattttaaaaccatttaaacgccaccaattgagcaagatgctgattcattatttatcagccctattctttctattcaggctgttgttggcttagggctggaagcacagagtggcttggcctcaagagaatagctggtttccctaagtttacttctctaaaaccctgtgttcacaaaggcagagagtcagacccttcaatggaaggagagtgcttgggatcgattatgtgacttaaagtcagaatagtccttgggcagttctcaaatgttggagtggaacattggggaggaaattctgaggcaggtattagaaatgaaaaggaaacttgaaacctgggcatggtggctcacgcctgtaatcccagcactttgggaggccaaggtgggcagatcactggaggtcaggagttcgaaaccagcctggccaacatggtgaaaccccatctctactaaaaatacagaaattagccggtcatggtggtggacacctgtaatcccagctactcaggtggctaaggcaggagaatcacttcagcccgggaggtggaggttgcagtgagccaagatcataccacggcactccagcctgggtgacagtgagactgtggctcaaaaaaaaaaaaaaaaaaaggaaaatgaaactagaagagatttctaaaagtctgagatatatttgctagatttctaaagaatgtgttctaaaacagcagaagattttcaagaaccggtttccaaagacagtcttctaattcctcattagtaataagtaaaatgtttattgttgtagctctggtatataatccattcctcttaaaatataagacctctggcatgaatatttcatatctataaaatgacagatcccaccaggaaggaagctgttgctttctttgaggtgatttttttcctttgctccctgttgctgaaaccatacagcttcataaataattttgcttgctgaaggaagaaaaagtgtttttcataaacccattatccaggactgtttatagctgttggaaggactaggtcttccctagcccccccagtgtgcaagggcagtgaagacttgattgtacaaaatacgttttgtaaatgttgtgctgttaacactgcaaataaacttggtagcaaacacttcc

SEQ ID NO: 171690 - DNA, 2420 bp, Artificial Sequence
  derived and/or modified sequence
attgctcagcggtttccgtggcaacagtaaagcgtgggaattacagataaattaaaactgtggaacccctttcctcggctgccgccaaggtgttcggtccttccgaggaagctaaggccgcgttggggtgagaccctcacttcatccgtctggagttgatcaaggaacctgtctccacaaagtgtgaccacatattttgcaaattttgcatgctgaaacttctcaaccagaagaaagggccttcacagtgtcctttatgtaagaatgatataaccaaaaggagcctacaagaaagtacgagatttagtcaacttgttgaagagctattgaaaatcatttgtgcttttcagcttgacacaggtttggagtatgcaaacagctataattttgcaaaaaaggaaaataactctcctgaacatctaaaagatgaagtttctatcatccaaagtatgggctacagaaaccgtgccaaaagacttctacagagtgaacccgaaaatccttccttgcaggaaaccagtctcagtgtccaactctctaaccttggaactgtgagaactctgaggacaaagcagcggatacaacctcaaaagacgtctgtctacattgaattgggatctgattcttctgaagataccgttaataaggcaacttattgcagtgtgggagatcaagaattgttacaaatcacccctcaaggaaccagggatgaaatcagtttggattctgcaaaaaaggctgcttgtgaattttctgagacggatgtaacaaatactgaacatcatcaacccagtaataatgatttgaacaccactgagaagcgtgcagctgagaggcatccagaaaagtatcagggtgaagcagcatctgggtgtgagagtgaaacaagcgtctctgaagactgctcagggctatcctctcagagtgacattttaaccactcagcagagggataccatgcaacataacctgataaagctccagcaggaaatggctgaactagaagctgtgttagaacagcatgggagccagccttctaacagctacccttccatcataagtgactcttctgcccttgaggacctgcgaaatccagaacaaagcacatcagaaaaagtattaacttcacagaaaagtagtgaataccctataagccagaatccagaaggcctttctgctgacaagtttgaggtgtctgcagatagttctaccagtaaaaataaagaaccaggagtggaaaggtcatccccttctaaatgcccatcattagatgataggtggtacatgcacagttgctctgggagtcttcagaatagaaactacccatctcaagaggagctcattaaggttgttgatgtggaggagcaacagctggaagagtctgggccacacgatttgacggaaacatcttacttgccaaggcaagatctagagggaaccccttacctggaatctggaatcagcctcttctctgatgaccctgaatctgatccttctgaagacagagccccagagtcagctcgtgttggcaacataccatcttcaacctctgcattgaaagttccccaattgaaagttgcagaatctgcccagagtccagctgctgctcatactactgatactgctgggtataatgcaatggaagaaagtgtgagcagggagaagccagaattgacagcttcaacagaaagggtcaacaaaagaatgtccatggtggtgtctggcctgaccccagaagaatttatgctcgtgtacaagtttgccagaaaacaccacatcactttaactaatctaattactgaagagactactcatgttgttatgaaaacagatgctgagtttgtgtgtgaacggacactgaaatattttctaggaattgcgggaggaaaatgggtagttagctatttctgggtgacccagtctattaaagaaagaaaaatgctgaatgagcatgattttgaagtcagaggagatgtggtcaatggaagaaaccaccaaggtccaaagcgagcaagagaatcccaggacagaaagatcttcagggggctagaaatctgttgctatgggcccttcaccaacatgcccacagatcaactggaatggatggtacagctgtgtggtgcttctgtggtgaaggagctttcatcattcacccttggcacaggtgtccacccaattgtggttgtgcagccagatgcctggacagaggacaatggcttccatgcaattgggcagatgtgtgaggcacctgtggtgacccgagagtgggtgttggacagtgtagcactctaccagtgccaggagctggacacctacctgataccccagatcccccacagccactactgactgcagccagccacaggtacagagccacaggaccccaagaatgagcttacaaagtggcctttccaggccctg

SEQ ID NO: 171691 - DNA, 2379 bp, Artificial Sequence
  derived and/or modified sequence
ttcctggacgggggacaggctgtggggtttctcagataactgggcccctgcgctcaggaggccttcaccctctgctctggttcattggaacagaaagaaatggatttatctgctcttcgcgttgaagaagtacaaaatgtcattaatgctatgcagaaaatcttagagtgtcccatctgtctggagttgatcaaggaacctgtctccacaaagtgtgaccacatattttgcaaattttgcatgctgaaacttctcaaccagaagaaagggccttcacagtgtcctttatgtaagaatgatataaccaaaaggagcctacaagaaagtacgagatttagtcaacttgttgaagagctattgaaaatcatttgtgcttttcagcttgacacaggtttggagtatgcaaacagctataattttgcaaaaaaggaaaataactctcctgaacatctaaaagatgaagtttctatcatccaaagtatgggctacagaaaccgtgccaaaagacttctacagagtgaacccgaaaatccttccttgcaggaaaccagtctcagtgtccaactctctaaccttggaactgtgagaactctgaggacaaagcagcggatacaacctcaaaagacgtctgtctacattgaattgggatctgattcttctgaagataccgttaataaggcaacttattgcagtgtgggagatcaagaattgttacaaatcacccctcaaggaaccagggatgaaatcagtttggattctgcaaaaaaggctgcttgtgaattttctgagacggatgtaacaaatactgaacatcatcaacccagtaataatgatttgaacaccactgagaagcgtgcagctgagaggcatccagaaaagtatcagggtgaagcagcatctgggtgtgagagtgaaacaagcgtctctgaagactgctcagggctatcctctcagagtgacattttaaccactcagcagagggataccatgcaacataacctgataaagctccagcaggaaatggctgaactagaagctgtgttagaacagcatgggagccagccttctaacagctacccttccatcataagtgactcttctgcccttgaggacctgcgaaatccagaacaaagcacatcagaaaaagtattaacttcacagaaaagtagtgaataccctataagccagaatccagaaggcctttctgctgacaagtttgaggtgtctgcagatagttctaccagtaaaaataaagaaccaggagtggaaaggtcatccccttctaaatgcccatcattagatgataggtggtacatgcacagttgctctgggagtcttcagaatagaaactacccatctcaagaggagctcattaaggttgttgatgtggaggagcaacagctggaagagtctgggccacacgatttgacggaaacatcttacttgccaaggcaagatctagagggaaccccttacctggaatctggaatcagcctcttctctgatgaccctgaatctgatccttctgaagacagagccccagagtcagctcgtgttggcaacataccatcttcaacctctgcattgaaagttccccaattgaaagttgcagaatctgcccagagtccagctgctgctcatactactgatactgctgggtataatgcaatggaagaaagtgtgagcagggagaagccagaattgacagcttcaacagaaagggtcaacaaaagaatgtccatggtggtgtctggcctgaccccagaagaatttatgctcgtgtacaagtttgccagaaaacaccacatcactttaactaatctaattactgaagagactactcatgttgttatgaaaacagatgctgagtttgtgtgtgaacggacactgaaatattttctaggaattgcgggaggaaaatgggtagttagctatttctgggtgacccagtctattaaagaaagaaaaatgctgaatgagcatgattttgaagtcagaggagatgtggtcaatggaagaaaccaccaaggtccaaagcgagcaagagaatcccaggacagaaagatcttcagggggctagaaatctgttgctatgggcccttcaccaacatgcccacagatcaactggaatggatggtacagctgtgtggtgcttctgtggtgaaggagctttcatcattcacccttggcacaggtgtccacccaattgtggttgtgcagccagatgcctggacagaggacaatggcttccatgcaattgggcagatgtgtgaggcacctgtggtgacccgagagtgggtgttggacagtgtagcactctaccagtgccaggagctggacacctacctgataccccagatcccccacagccactactga

SEQ ID NO: 171692 - DNA, 2043 bp, Artificial Sequence
  derived and/or modified sequence
atggacctgagcgccctgagagtggaggaggtgcagaacgtgatcaacgccatgcagaagatcctggagtgccccatctgcctggagctgatcaaggagcccgtgagcaccaagtgcgaccacatcttctgcaagttctgcatgctgaagctgctgaaccagaagaagggccccagccagtgccccctgtgcaagaacgacatcaccaagagaagcctgcaggagagcaccagattcagccagctggtggaggagctgctgaagatcatctgcgccttccagctggacaccggcctggagtacgccaacagctacaacttcgccaagaaggagaacaacagccccgagcacctgaaggacgaggtgagcatcatccagagcatgggctacagaaacagagccaagagactgctgcagagcgagcccgagaaccccagcctgcaggagaccagcctgagcgtgcagctgagcaacctgggcaccgtgagaaccctgagaaccaagcagagaatccagccccagaagaccagcgtgtacatcgagctgggcgaggccgccagcggctgcgagagcgagaccagcgtgagcgaggactgcagcggcctgagcagccagagcgacatcctgaccacccagcagagagacaccatgcagcacaacctgatcaagctgcagcaggagatggccgagctggaggccgtgctggagcagcacggcagccagcccagcaacagctaccccagcatcatcagcgacagcagcgccctggaggacctgagaaaccccgagcagagcaccagcgagaaggccgtgctgaccagccagaagagcagcgagtaccccatcagccagaaccccgagggcctgagcgccgacaagttcgaggtgagcgccgacagcagcaccagcaagaacaaggagcccggcgtggagagaagcagccccagcaagtgccccagcctggacgacagatggtacatgcacagctgcagcggcagcctgcagaacagaaactaccccagccaggaggagctgatcaaggtggtggacgtggaggagcagcagctggaggagagcggcccccacgacctgaccgagaccagctacctgcccagacaggacctggagggcaccccctacctggagagcggcatcagcctgttcagcgacgaccccgagagcgaccccagcgaggacagagcccccgagagcgccagagtgggcaacatccccagcagcaccagcgccctgaaggtgccccagctgaaggtggccgagagcgcccagagccccgccgccgcccacaccaccgacaccgccggctacaacgccatggaggagagcgtgagcagagagaagcccgagctgaccgccagcaccgagagagtgaacaagagaatgagcatggtggtgagcggcctgacccccgaggagttcatgctggtgtacaagttcgccagaaagcaccacatcaccctgaccaacctgatcaccgaggagaccacccacgtggtgatgaagaccgacgccgagttcgtgtgcgagagaaccctgaagtacttcctgggcatcgccggcggcaagtgggtggtgagctacttctgggtgacccagagcatcaaggagagaaagatgctgaacgagcacgacttcgaggtgagaggcgacgtggtgaacggcagaaaccaccagggccccaagagagccagagagagccaggacagaaagatcttcagaggcctggagatctgctgctacggccccttcaccaacatgcccaccgaccagctggagtggatggtgcagctgtgcggcgccagcgtggtgaaggagctgagcagcttcaccctgggcaccggcgtgcaccccatcgtggtggtgcagcccgacgcctggaccgaggacaacggcttccacgccatcggccagatgtgcgaggcccccgtggtgaccagagagtgggtgctggacagcgtggccctgtaccagtgccaggagctggacacctacctgatcccccagatcccccacagccactactag

SEQ ID NO: 171693 - DNA, 2166 bp, Artificial Sequence
  derived and/or modified sequence
atggacctgagcgccctgagagtggaggaggtgcagaacgtgatcaacgccatgcagaagatcctggagtgccccatctgcctggagctgatcaaggagcccgtgagcaccaagtgcgaccacatcttctgcaagttctgcatgctgaagctgctgaaccagaagaagggccccagccagtgccccctgtgcaagaacgacatcaccaagagaagcctgcaggagagcaccagattcagccagctggtggaggagctgctgaagatcatctgcgccttccagctggacaccggcctggagtacgccaacagctacaacttcgccaagaaggagaacaacagccccgagcacctgaaggacgaggtgagcatcatccagagcatgggctacagaaacagagccaagagactgctgcagagcgagcccgagaaccccagcctgcaggagaccagcctgagcgtgcagctgagcaacctgggcaccgtgagaaccctgagaaccaagcagagaatccagccccagaagaccagcgtgtacatcgagctgggcagcgacagcagcgaggacaccgtgaacaaggccacctactgcagcgtgggcgaccaggagctgctgcagatcaccccccagggcaccagagacgagatcagcctggacagcgccaagaagggcgaggccgccagcggctgcgagagcgagaccagcgtgagcgaggactgcagcggcctgagcagccagagcgacatcctgaccacccagcagagagacaccatgcagcacaacctgatcaagctgcagcaggagatggccgagctggaggccgtgctggagcagcacggcagccagcccagcaacagctaccccagcatcatcagcgacagcagcgccctggaggacctgagaaaccccgagcagagcaccagcgagaaggccgtgctgaccagccagaagagcagcgagtaccccatcagccagaaccccgagggcctgagcgccgacaagttcgaggtgagcgccgacagcagcaccagcaagaacaaggagcccggcgtggagagaagcagccccagcaagtgccccagcctggacgacagatggtacatgcacagctgcagcggcagcctgcagaacagaaactaccccagccaggaggagctgatcaaggtggtggacgtggaggagcagcagctggaggagagcggcccccacgacctgaccgagaccagctacctgcccagacaggacctggagggcaccccctacctggagagcggcatcagcctgttcagcgacgaccccgagagcgaccccagcgaggacagagcccccgagagcgccagagtgggcaacatccccagcagcaccagcgccctgaaggtgccccagctgaaggtggccgagagcgcccagagccccgccgccgcccacaccaccgacaccgccggctacaacgccatggaggagagcgtgagcagagagaagcccgagctgaccgccagcaccgagagagtgaacaagagaatgagcatggtggtgagcggcctgacccccgaggagttcatgctggtgtacaagttcgccagaaagcaccacatcaccctgaccaacctgatcaccgaggagaccacccacgtggtgatgaagaccgacgccgagttcgtgtgcgagagaaccctgaagtacttcctgggcatcgccggcggcaagtgggtggtgagctacttctgggtgacccagagcatcaaggagagaaagatgctgaacgagcacgacttcgaggtgagaggcgacgtggtgaacggcagaaaccaccagggccccaagagagccagagagagccaggacagaaagatcttcagaggcctggagatctgctgctacggccccttcaccaacatgcccaccgaccagctggagtggatggtgcagctgtgcggcgccagcgtggtgaaggagctgagcagcttcaccctgggcaccggcgtgcaccccatcgtggtggtgcagcccgacgcctggaccgaggacaacggcttccacgccatcggccagatgtgcgaggcccccgtggtgaccagagagtgggtgctggacagcgtggccctgtaccagtgccaggagctggacacctacctgatcccccagatcccccacagccactactag

SEQ ID NO: 171694 - DNA, 2139 bp, Artificial Sequence
  derived and/or modified sequence
atgctgaagctgctgaaccagaagaagggccccagccagtgccccctgtgcaagaacgacatcaccaagagaagcctgcaggagagcaccagattcagccagctggtggaggagctgctgaagatcatctgcgccttccagctggacaccggcctggagtacgccaacagctacaacttcgccaagaaggagaacaacagccccgagcacctgaaggacgaggtgagcatcatccagagcatgggctacagaaacagagccaagagactgctgcagagcgagcccgagaaccccagcctgcaggagaccagcctgagcgtgcagctgagcaacctgggcaccgtgagaaccctgagaaccaagcagagaatccagccccagaagaccagcgtgtacatcgagctgggcagcgacagcagcgaggacaccgtgaacaaggccacctactgcagcgtgggcgaccaggagctgctgcagatcaccccccagggcaccagagacgagatcagcctggacagcgccaagaaggccgcctgcgagttcagcgagaccgacgtgaccaacaccgagcaccaccagcccagcaacaacgacctgaacaccaccgagaagagagccgccgagagacaccccgagaagtaccagggcgaggccgccagcggctgcgagagcgagaccagcgtgagcgaggactgcagcggcctgagcagccagagcgacatcctgaccacccagcagagagacaccatgcagcacaacctgatcaagctgcagcaggagatggccgagctggaggccgtgctggagcagcacggcagccagcccagcaacagctaccccagcatcatcagcgacagcagcgccctggaggacctgagaaaccccgagcagagcaccagcgagaaggtgctgaccagccagaagagcagcgagtaccccatcagccagaaccccgagggcctgagcgccgacaagttcgaggtgagcgccgacagcagcaccagcaagaacaaggagcccggcgtggagagaagcagccccagcaagtgccccagcctggacgacagatggtacatgcacagctgcagcggcagcctgcagaacagaaactaccccagccaggaggagctgatcaaggtggtggacgtggaggagcagcagctggaggagagcggcccccacgacctgaccgagaccagctacctgcccagacaggacctggagggcaccccctacctggagagcggcatcagcctgttcagcgacgaccccgagagcgaccccagcgaggacagagcccccgagagcgccagagtgggcaacatccccagcagcaccagcgccctgaaggtgccccagctgaaggtggccgagagcgcccagagccccgccgccgcccacaccaccgacaccgccggctacaacgccatggaggagagcgtgagcagagagaagcccgagctgaccgccagcaccgagagagtgaacaagagaatgagcatggtggtgagcggcctgacccccgaggagttcatgctggtgtacaagttcgccagaaagcaccacatcaccctgaccaacctgatcaccgaggagaccacccacgtggtgatgaagaccgacgccgagttcgtgtgcgagagaaccctgaagtacttcctgggcatcgccggcggcaagtgggtggtgagctacttctgggtgacccagagcatcaaggagagaaagatgctgaacgagcacgacttcgaggtgagaggcgacgtggtgaacggcagaaaccaccagggccccaagagagccagagagagccaggacagaaagatcttcagaggcctggagatctgctgctacggccccttcaccaacatgcccaccgaccagctggagtggatggtgcagctgtgcggcgccagcgtggtgaaggagctgagcagcttcaccctgggcaccggcgtgcaccccatcgtggtggtgcagcccgacgcctggaccgaggacaacggcttccacgccatcggccagatgtgcgaggcccccgtggtgaccagagagtgggtgctggacagcgtggccctgtaccagtgccaggagctggacacctacctgatcccccagatcccccacagccactactag

SEQ ID NO: 171695 - DNA, 2280 bp, Artificial Sequence
  derived and/or modified sequence
atggacctgagcgccctgagagtggaggaggtgcagaacgtgatcaacgccatgcagaagatcctggagtgccccatctgcctggagctgatcaaggagcccgtgagcaccaagtgcgaccacatcttctgcaagttctgcatgctgaagctgctgaaccagaagaagggccccagccagtgccccctgtgcaagaacgacatcaccaagagaagcctgcaggagagcaccagattcagccagctggtggaggagctgctgaagatcatctgcgccttccagctggacaccggcctggagtacgccaacagctacaacttcgccaagaaggagaacaacagccccgagcacctgaaggacgaggtgagcatcatccagagcatgggctacagaaacagagccaagagactgctgcagagcgagcccgagaaccccagcctgcaggagaccagcctgagcgtgcagctgagcaacctgggcaccgtgagaaccctgagaaccaagcagagaatccagccccagaagaccagcgtgtacatcgagctgggcagcgacagcagcgaggacaccgtgaacaaggccacctactgcagcgtgggcgaccaggagctgctgcagatcaccccccagggcaccagagacgagatcagcctggacagcgccaagaaggccgcctgcgagttcagcgagaccgacgtgaccaacaccgagcaccaccagcccagcaacaacgacctgaacaccaccgagaagagagccgccgagagacaccccgagaagtaccagggcgaggccgccagcggctgcgagagcgagaccagcgtgagcgaggactgcagcggcctgagcagccagagcgacatcctgaccacccagcagagagacaccatgcagcacaacctgatcaagctgcagcaggagatggccgagctggaggccgtgctggagcagcacggcagccagcccagcaacagctaccccagcatcatcagcgacagcagcgccctggaggacctgagaaaccccgagcagagcaccagcgagaaggtgctgaccagccagaagagcagcgagtaccccatcagccagaaccccgagggcctgagcgccgacaagttcgaggtgagcgccgacagcagcaccagcaagaacaaggagcccggcgtggagagaagcagccccagcaagtgccccagcctggacgacagatggtacatgcacagctgcagcggcagcctgcagaacagaaactaccccagccaggaggagctgatcaaggtggtggacgtggaggagcagcagctggaggagagcggcccccacgacctgaccgagaccagctacctgcccagacaggacctggagggcaccccctacctggagagcggcatcagcctgttcagcgacgaccccgagagcgaccccagcgaggacagagcccccgagagcgccagagtgggcaacatccccagcagcaccagcgccctgaaggtgccccagctgaaggtggccgagagcgcccagagccccgccgccgcccacaccaccgacaccgccggctacaacgccatggaggagagcgtgagcagagagaagcccgagctgaccgccagcaccgagagagtgaacaagagaatgagcatggtggtgagcggcctgacccccgaggagttcatgctggtgtacaagttcgccagaaagcaccacatcaccctgaccaacctgatcaccgaggagaccacccacgtggtgatgaagaccgacgccgagttcgtgtgcgagagaaccctgaagtacttcctgggcatcgccggcggcaagtgggtggtgagctacttctgggtgacccagagcatcaaggagagaaagatgctgaacgagcacgacttcgaggtgagaggcgacgtggtgaacggcagaaaccaccagggccccaagagagccagagagagccaggacagaaagatcttcagaggcctggagatctgctgctacggccccttcaccaacatgcccaccgaccagctggagtggatggtgcagctgtgcggcgccagcgtggtgaaggagctgagcagcttcaccctgggcaccggcgtgcaccccatcgtggtggtgcagcccgacgcctggaccgaggacaacggcttccacgccatcggccagatgtgcgaggcccccgtggtgaccagagagtgggtgctggacagcgtggccctgtaccagtgccaggagctggacacctacctgatcccccagatcccccacagccactactag

SEQ ID NO: 171696 - protein, 699 aa, Artificial Sequence
  derived and/or modified sequence
MDLSALRVEEVQNVINAMQKILECPICLELIKEPVSTKCDHIFCKFCMLKLLNQKKGPSQCPLCKNDITKRSLQESTRFSQLVEELLKIICAFQLDTGLEYANSYNFAKKENNSPEHLKDEVSIIQSMGYRNRAKRLLQSEPENPSLQETSLSVQLSNLGTVRTLRTKQRIQPQKTSVYIELGSDSSEDTVNKATYCSVGDQELLQITPQGTRDEISLDSAKKAACEFSETDVTNTEHHQPSNNDLNTTEKRAAERHPEKYQGEAASGCESETSVSEDCSGLSSQSDILTTQQRDTMQHNLIKLQQEMAELEAVLEQHGSQPSNSYPSIISDSSALEDLRNPEQSTSEKVLTSQKSSEYPISQNPEGLSADKFEVSADSSTSKNKEPGVERSSPSKCPSLDDRWYMHSCSGSLQNRNYPSQEELIKVVDVEEQQLEESGPHDLTETSYLPRQDLEGTPYLESGISLFSDDPESDPSEDRAPESARVGNIPSSTSALKVPQLKVAESAQSPAAAHTTDTAGYNAMEESVSREKPELTASTERVNKRMSMVVSGLTPEEFMLVYKFARKHHITLTNLITEETTHVVMKTDAEFVCERTLKYFLGIAGGKWVVSYFWVTQSIKERKMLNEHDFEVRGDVVNGRNHQGPKRARESQDRKIFRGLEICCYGPFTNMPTGCPPNCGCAARCLDRGQWLPCNWADV

SEQ ID NO: 171697 - DNA, 192 bp, Artificial Sequence
  derived and/or modified sequence
atggacctaagcgcccttcgcgtcgaggaagttcagaatgttattaacgccatgcaaaaaatcctcgagtgcccgatctgcttggagctgatcaaagagcctgtatctacaaagtgcgatcacatattctgcaaattttgcatgctgaagctgctcaaccagaagaagggcccatctcagtgtccgctgtag

SEQ ID NO: 171698 - DNA, 192 bp, Artificial Sequence
  derived and/or modified sequence
atggacctctcagctctaagggtagaagaggtgcaaaacgtgattaatgccatgcagaaaatccttgagtgcccaatctgcctggagcttatcaaagagcccgtgagtacaaaatgtgaccacatcttctgcaagttctgcatgctgaagttgcttaaccagaaaaagggcccctctcagtgccccttgtag

SEQ ID NO: 171699 - DNA, 2100 bp, Artificial Sequence
  derived and/or modified sequence
atggatctctccgctctccgtgtggaagaggtccaaaatgttatcaacgcaatgcagaagatactcgagtgcccaatttgccttgagctgattaaagagcccgtttcaacaaagtgtgatcacattttttgtaaattttgcatgctcaagctgctgaaccagaaaaagggccctagtcagtgccccctgtgcaaaaacgacattaccaaaaggagcctccaggagagcacaagattctcccaactggtggaggagttgctaaaaattatctgcgcattccagctcgatacgggcctggagtatgcaaacagctacaacttcgcaaagaaagagaataatagccccgaacacctgaaggacgaggtgagcattatccagagcatgggctaccgaaatcgcgccaagcgcctcctacagtcagagccggagaacccaagcttacaggaaacgagtctgtccgtgcaattgtccaatctcggcaccgtacggacgctgagaacgaaacagaggatccagccgcagaagaccagtgtgtacattgaactgggaagtgatagcagcgaggacactgttaacaaagcgacttactgctcagttggagatcaggaacttctacagatcaccccacagggtacaagggacgagatctccctggatagcgcgaagaaggccgcctgcgagttttcagagaccgatgtaaccaacacagaacatcaccagccaagcaacaacgatcttaacaccacagagaagagagcggccgaacggcaccccgaaaagtatcaaggagaggcggcttcgggctgcgaaagcgaaactagcgttagtgaagactgctcagggctctccagtcagtccgatatactaacaacacagcagagggacaccatgcagcacaatctgatcaaactgcagcaggaaatggcggagctggaagccgtcctggaacagcatggctcccaaccctcgaactcatatccttccatcatttccgattcctcagccctcgaggacctgaggaaccccgagcagagcacctcagagaaagtgctgacaagccaaaaatcaagcgagtatccaatctctcagaatcccgaaggcctctccgccgataaattcgaggtgagcgctgacagttccaccagtaagaacaaagagcccggggtggagagatccagcccttctaagtgtcctagcctggacgaccgctggtatatgcacagttgctcgggttccctgcagaacaggaactaccccagtcaggaggagctcatcaaagtcgttgatgtggaggagcagcagctcgaggaatccggtcctcacgatctgacagagactagctatctgccccgacaggacctggaggggaccccttacctggagtctggcatttccctgtttagcgacgaccccgaatctgacccatctgaggacagagctcctgaatcagccagggtggggaatattcccagttctactagtgcgctgaaagtgccgcagctgaaggtggcagagtccgctcagtcccccgccgccgctcacacaaccgatacggctgggtacaatgcaatggaggaatcagtgagccgggagaagccagaattgaccgcatccaccgagagagtaaataagcggatgtctatggtggtgtctgggttaacacctgaagaatttatgctcgtatataagttcgcacgtaaacaccacataactttgactaacctgattaccgaagaaaccacgcacgttgtgatgaaaaccgacgcggagttcgtgtgcgagcggaccttgaagtatttcttagggatagccggagggaaatgggtcgtctcctatttctgggtcacacagagtatcaaagagcggaagatgctgaacgagcacgattttgaagtccgtggagacgtggtgaacggcagaaaccatcaggggcctaagcgcgcacgagaatcacaggatagaaagatctttcgaggcctcgagatttgttgttacgggccattcaccaatatgcctacagggtgccctccgaactgcggatgcgcggcccgctgtctggacagaggtcagtggcttccatgcaactgggccgatgtgtag

SEQ ID NO: 171700 - DNA, 669 bp, Artificial Sequence
  derived and/or modified sequence
atggacctgtcggcactgcgggtggaagaggtgcagaatgttatcaatgccatgcagaaaattttggagtgccctatttgcttagagctgattaaagaaccagtatccacaaagtgcgaccacattttctgcaaattttgcatgcttaaactattgaatcagaagaagggtccttcacagtgtccattatgcaagaacgacatcaccaaacggtcgctccaggagtccactcgatttagccaattggttgaggagttactgaaaatcatttgtgcctttcaattggacactggattagaatatgcaaattcttacaattttgctaaaaaggagaataacagtccagaacacctgaaggacgaggtatctatcatccagtccatgggctatcggaaccgcgccaaacgactcctccagtctgagcccgagaatccatctctggagacttccctatccgtccagctgtcaaacctgggaaccgttcggactttacgcaccaaacaacggattcagccacaaaaaactagtgtgtatatcgagttaggctctgatagcagtgaagacacggttaacaaggctacctattgtagcgtcggagatcaagagctgcttcagattaccccacagggaacgcgggacgagatcagcctggacagcgcgaagaagtag

SEQ ID NO: 171701 - DNA, 1872 bp, Artificial Sequence
  derived and/or modified sequence
atggatctgtctgcattaagagtcgaggaagttcagaatgtgattaatgcaatgcaaaagattctagagtgtcccatctgcctagagttgatcaaagagcccgtgtccaccaagtgtgatcacattttctgtaaattttgtatgctgaagctgctaaaccagaaaaaaggaccgagccagtgccctctgtgtaagaatgatataactaagcggtcactgcaggagagcactagattcagtcaactggttgaggagctgctgaaaataatctgtgcctttcagctcgacacaggccttgaatatgcgaattcctacaactttgccaaaaaggagaataactcacccgagcacctgaaggatgaggtgtctattatccagagcatgggatatcgcaaccgagccaagcggcttctgcagtccgaaccagaaaatccctccttagagacatccttaagcgtgcagctctctaaccttggcaccgtcagaaccttacgcacaaagcaacggattcagccccaaaaaactagcgtctatatcgagctgggcagcgattctagcgaagacaccgtgaataaagccacctattgctctgtcggtgaccaggagttgctgcagattacaccccagggaacgagggacgagatctcattggactctgcaaaaaaggcagcttgtgagtttagcgaaactgatgtgacgaacaccgagcaccatcagccaagtaataatgacctgaatacaaccgaaaagcgggcggcagagcggcatcccgaaaagtaccagggggaagcagcttcaggctgcgaatccgagacaagcgtatcagaagactgctccggcttatcgagccaatctgacatcctcaccacacagcaacgtgacacaatgcagcacaacctcattaagctgcagcaggaaatggccgaactggaggcagttcttgaacagcatgggtcccagccaagcaacagttatccatctatcatcagcgatagcagcgctctcgaggaccttcgcaatcctgaacagtctacatccgagaaagcagttctaacctctcaaaagtcaagcgaatacccaattagccagaacccggagggcttatctgcggataaattcgaggtttcagctgactcctcgacttctaagaacaaggagccaggggttgagcggagttctcctagtaaatgcccgtctctagatgacagatggtacatgcatagctgtagcggcagcctgcagaatagaaattacccatcccaggaggaattgattaaagtggtcgacgtggaagaacagcagcttgaagagagtggcccacatgatctcacggagacaagctacctacctcgtcaggatctggagggcaccccgtacctggaaagcggtatcagcctgttctccgacgaccccgagtcagatccctccgaagacagggctcccgagtccgctagggtggggaacattccctcaagcacaagcgcattgaaggtcccacaacttaaggttgccgaaagcgcgcagtcccctgctgccgctcacaccactgacaccgctggttacaacgccatggaagagtcagtatcccgggaaaagccggagctgacagcctcaacagaacgggtcaacaagcggatgagtatggttgtatctggcctaactcctgaagagtttatgttggtatataagttcgcccgcaaacaccacataactttgactaatcttatcaccgaggaaacaacccacgtggttatgaagaccgatgctgaatttgtgtgtgagcgaacactgaaatatttcctcgggatcgctggtggcaaatgggtggtaagttacttctgggtgactcagagtataaaggaaaggaagtag

SEQ ID NO: 171702 - DNA, 1497 bp, Artificial Sequence
  derived and/or modified sequence
gaattactgaagataatttgtgcatttcagctcgatacgggcctggaatacgccaatagttacaactttgctaaaaaagagaataactcacccgagcatctgaaagacgaagtatcgatcatccagtcgatgggctacagaaacagggcaaagagactgcttcagagcgagcctgagaaccccagtctggagacctctctgagcgtccagctcagcaacttgggaacggtgagaaccctccgaactaaacagagaatacagccgcagaagacctctgtgtatatcgagctcgctgcttgtgagttttccgaaaccgacgttacaaataccgaacaccaccagccgtctaataacgacctgaataccactgagaagcgcgctgcggagagacaccctgaaaaataccagggcgaggcagcttccggctgcgagagtgagaccagtgtgtcggaggattgctccggtctcagttctcaaagtgacatcctgactactcagcagcgggacacaatgcagcacaatctcatcaaacttcaacaagagatggccgagctcgaggcagtgctggagcagcacggcagccaaccttctaactcctatccgtccatcatttctgatagcagcgctctcgaggacttgagaaatcccgagcagtctacgtcagagaaggcagtcctgacctcccagaagagcagcgagtatcctatctctcagaatcctgaaggactgtctgctgataaattcgaggtctctgcagacagctccaccagcaagaacaaggaaccgggggtggaaagaagttccccctccaaatgccccagtttagacgacagatggtatatgcacagctgcagcggaagtttgcagaatcggaactaccctagccaggaagagctcataaaggtggtcgacgtagaagaacagcagcttgaggaatctggacctcacgatttaacagaaacgagctatctcccccgccaagacctcgaaggtacaccttacctggaatccggtatcagtctattttcagacgaccctgagtctgacccgtctgaggaccgagccccagagtctgccagggtcggaaacatacccagttccacctccgctcttaaagttccccagctcaaggtggctgagtccgcccagtcaccagctgctgctcacactacagacactgccggttataatgcgatggaagagtccgtgagccgcgagaagcctgagttaactgcatccaccgagagagtgaacaagcggatgagtatggtggtctcaggactcacccccgaggagtttatgcttgtttataaatttgcgaggaaacatcacatcaccctcactaacctgattacggaagaaacaactcatgtagtcatgaagaccgatgcggagtttgtgtgcgagcggacgttaaagtatttcttgggtattgcgggaggcaaatgggttgtctcctatttctgggtgacacagtctatcaaagaaaggaaatag

SEQ ID NO: 171703 - DNA, 297 bp, Artificial Sequence
  derived and/or modified sequence
atggacctaagcgcgctgagagttgaagaagtccagaacgtcatcaacgcaatgcagaagattctcgagtgcccaatatgcctcgaactcattaaagagccagtatcaaccaagtgcgaccacatattttgcaaatcgttgcaggagagtacaaggttcagccagctggtggaagagctcctgaaaattatttgtgcattccaacttgataccggcttagagtatgcaaacagttataacttcgccaagaaagagaataactcaccagagcacctgaaggatgaggtctcaatatag

SEQ ID NO: 171704 - DNA, 180 bp, Artificial Sequence
  derived and/or modified sequence
atggatctgtccgcactcagagtggaggaagtgcagaacgttattaatgctatgcagaaaatcctcgaatgcccaatctgtctcgaactcatcaaagagcctgtcagcacaaagtgtgatcatatattctgcaaagtgctgttatgctgcccatcctggtcgaccgtggtcagatcctag

SEQ ID NO: 171705 - DNA, 1719 bp, Artificial Sequence
  derived and/or modified sequence
atgcttaagctgttaaatcagaaaaaagggccgagccagtgccctctgtgcaagaacgatataaccaagaggagcctgcaggagtctacacgattcagtcagcttgttgaggagttgctgaagatcatttgcgcatttcaactcgatacggggctggaatacgctaacagctacaattttgccaagaaggaaaacaacagccctgagcaccttaaggacgaggtttcgattatccagagtatgggatacagaaatcgcgcgaagaggctgctgcagtccgagccggagaacccatctctgcaggaaacgagcctgtctgtgcagctgtctaacttaggaaccgttcgcaccctgaggaccaaacagaggattcagccacaaaagacctcagtctatatcgagttaggtagtgatagcagtgaggacacagtaaacaaggctacttattgttctgtgggcgaccaagaactgttacagatcacccctcagggcaccagggatgagatttcactagattcagccaagaaagcagcctgcgagttttcagaaaccgatgtgactaacaccgagcaccaccagccatcaaataatgacctaaatacaacagaaaagcgtgctgccgagaggcatccagaaaaatatcagggagaagccgcgtctggctgtgaaagcgaaacatcagtgtcagaggactgcagtggcctatctagccagtccgacatccttaccacccagcaacgggatacaatgcaacacaatcttattaagctgcagcaagaaatggcagagcttgaagcagtactagagcagcacggctcgcagccgagcaattcatatcccagtattattagcgactctagtgctctggaagatctgcgcaaccctgagcagtcgacaagtgagaaagcagtcctgacatcacaaaagagctccgagtacccaatcagtcagaatccggagggtttgagcgctgacaagtttgaagtgagtgccgactcctctacatcaaaaaacaaggagcccggggtcgaaaggtcctcgcctagtaaatgcccttctttggatgatcggtggtacatgcatagttgcagtggaagcctgcagaatagaaattatccttcgcaggaagagttgatcaaggttgtcgacgtggaggagcagcaactcgaggaatccggcccccatgacctcaccgaaacctcatacttgccacggcaggatcttgaaggcacaccctacctggaatcaggaatctctctgttcagtgatgaccctgagagtgacccatctgaggatagagctcctgagagtgccagggtgggaaacatccctagttccacctctgcactgaaagtgccacagctgaaagtggccgagagcgcacagagcccggcagccgcccataccacggacaccgccggctacaacgccatggaggaatctgtgtcccgggagaaacctgagctcacagcgtcaactgagcgggtgaacaaacgcatgtctatggtggtgtccgggctcacccccgaggaattcatgctggtatacaagtttgccagaaagcaccatattacattgaccaacctgattacagaggaaacaacacacgtagtcatgaagaccgatgctgagtttgtctgcgagcggaccttgaagtattttcttgggatagccggtggaaagtgggtggtgtcctacttttgggtcacccagtcctag

SEQ ID NO: 171706 - DNA, 192 bp, Artificial Sequence
  derived and/or modified sequence
atggacctgagcgccctgcgggtggaggaggtgcagaatgtcatcaatgccatgcagaagatcctggagtgccccatctgcctggagctgatcaaggagcctgtgtccaccaagtgtgaccacatcttctgcaagttctgcatgctgaagctgctgaaccagaagaagggccccagccagtgccccctgtag

SEQ ID NO: 171707 - DNA, 2100 bp, Artificial Sequence
  derived and/or modified sequence
atggacctgagcgccctgcgggtggaggaggtgcagaatgtcatcaatgccatgcagaagatcctggagtgccccatctgcctggagctgatcaaggagcctgtgtccaccaagtgtgaccacatcttctgcaagttctgcatgctgaagctgctgaaccagaagaagggccccagccagtgccccctgtgcaagaatgacatcaccaagaggagcctgcaggagagcacccgcttcagccagctggtggaggagctgctgaagatcatctgtgccttccagctggacaccggcctggagtatgccaacagctacaactttgccaagaaggagaacaacagccctgagcacctgaaggatgaggtgtccatcatccagagcatgggctacagaaacagagccaagaggctgctgcagagcgagcctgagaaccccagcctgcaggagaccagcctgtctgtgcagctgagcaacctgggcaccgtgaggaccctgcggaccaagcagaggatccagccccagaagacctctgtgtacatcgagctgggcagtgacagcagcgaggacacagtgaacaaggccacctactgcagcgtgggggaccaggagctgctgcagatcaccccccagggcaccagagatgagatcagcctggacagcgccaagaaggccgcctgtgagttcagcgagacagatgtgaccaacacagagcaccaccagcccagcaacaatgacctgaacaccacagagaagagagctgctgagcggcaccctgagaagtaccagggcgaggccgccagcggctgtgagagcgagacctctgtgtctgaggactgcagcggcctgagcagccagagcgacatcctgaccacccagcagagggacaccatgcagcacaacctgatcaagctgcagcaggagatggccgagctggaggccgtgctggagcagcacggcagccagcccagcaacagctaccccagcatcatcagtgacagcagcgccctggaggacctgaggaaccctgagcagagcaccagcgagaaggtgctgaccagccagaagagcagcgagtaccccatcagccagaaccctgagggcctgtctgctgacaagtttgaggtgtctgctgacagcagcaccagcaagaacaaggagcccggggtggagaggagcagccccagcaagtgccccagcctggatgaccgctggtacatgcacagctgcagcggcagcctgcagaacagaaactaccccagccaggaggagctgatcaaggtggtggatgtggaggagcagcagctggaggagagcggcccccatgacctgacagagaccagctacctgccccggcaggacctggagggcaccccctacctggagagcggcatcagcctcttcagtgatgatcctgagagtgaccccagtgaagatcgggcccctgagagcgcccgggtgggcaacatccccagcagcaccagcgccctgaaggtgccccagctgaaggtggccgagagcgcccagagccctgctgctgcccacaccacagacacagctggctacaatgccatggaggagagcgtgtcccgggagaagccagagctgacagccagcacagagcgggtgaacaagaggatgtccatggtggtgtctggcctgaccccagaggagttcatgctggtgtacaagtttgccaggaagcaccacatcaccctgaccaacctgatcacagaggagaccacccacgtggtgatgaagacagatgctgagtttgtgtgtgagaggaccctgaagtacttcctgggcattgctgggggcaagtgggtggtgtcctacttctgggtgacccagagcatcaaggagaggaagatgctgaatgaacatgactttgaggtgagaggagatgtggtgaatggaagaaaccaccagggccccaagagggcccgggagagccaggacaggaagatcttccggggcctggagatctgctgctacggccccttcaccaacatgcccaccggctgcccccccaactgtggctgtgccgcccgctgcctggaccggggccagtggctgccctgcaactgggcagatgtgtag

SEQ ID NO: 171708 - DNA, 669 bp, Artificial Sequence
  derived and/or modified sequence
atggacctgagcgccctgcgggtggaggaggtgcagaatgtcatcaatgccatgcagaagatcctggagtgccccatctgcctggagctgatcaaggagcctgtgtccaccaagtgtgaccacatcttctgcaagttctgcatgctgaagctgctgaaccagaagaagggccccagccagtgccccctgtgcaagaatgacatcaccaagaggagcctgcaggagagcacccgcttcagccagctggtggaggagctgctgaagatcatctgtgccttccagctggacaccggcctggagtatgccaacagctacaactttgccaagaaggagaacaacagccctgagcacctgaaggatgaggtgtccatcatccagagcatgggctacagaaacagagccaagaggctgctgcagagcgagcctgagaaccccagcctggagaccagcctgtctgtgcagctgagcaacctgggcaccgtgaggaccctgcggaccaagcagaggatccagccccagaagacctctgtgtacatcgagctgggcagtgacagcagtgaagatactgtgaacaaggccacctactgcagcgtgggggaccaggagctgctgcagatcaccccccagggcaccagagatgagatcagcctggacagcgccaagaagtag

SEQ ID NO: 171709 - DNA, 1872 bp, Artificial Sequence
  derived and/or modified sequence
atggacctgagcgccctgcgggtggaggaggtgcagaatgtcatcaatgccatgcagaagatcctggagtgccccatctgcctggagctgatcaaggagcctgtgtccaccaagtgtgaccacatcttctgcaagttctgcatgctgaagctgctgaaccagaagaagggccccagccagtgccccctgtgcaagaatgacatcaccaagaggagcctgcaggagagcacccgcttcagccagctggtggaggagctgctgaagatcatctgtgccttccagctggacaccggcctggagtatgccaacagctacaactttgccaagaaggagaacaacagccctgagcacctgaaggatgaggtgtccatcatccagagcatgggctacagaaacagagccaagaggctgctgcagagcgagcctgagaaccccagcctggagaccagcctgtctgtgcagctgagcaacctgggcaccgtgaggaccctgcggaccaagcagaggatccagccccagaagacctctgtgtacatcgagctgggcagtgacagcagtgaagatactgtgaacaaggccacctactgcagcgtgggggaccaggagctgctgcagatcaccccccagggcaccagagatgagatcagcctggacagcgccaagaaggccgcctgtgagttcagcgagacagatgtgaccaacacagagcaccaccagcccagcaacaatgacctgaacaccacagagaagagagctgctgagcggcaccctgagaagtaccagggcgaggccgccagcggctgtgagagcgagacctctgtgtctgaggactgcagcggcctgagcagccagagcgacatcctgaccacccagcagagggacaccatgcagcacaacctgatcaagctgcagcaggagatggccgagctggaggccgtgctggagcagcacggcagccagcccagcaacagctaccccagcatcatcagtgacagcagcgccctggaggacctgagaaatcctgagcagagcaccagcgagaaggctgtgctgaccagccagaagagcagcgagtaccccatcagccagaaccctgagggcctgtctgctgacaagtttgaggtgtctgctgacagcagcaccagcaagaacaaggagcccggggtggagaggagcagccccagcaagtgccccagcctggatgaccgctggtacatgcacagctgcagcggcagcctgcagaacagaaactaccccagccaggaggagctgatcaaggtggtggatgtggaggagcagcagctggaggagagcggcccccatgacctgacagagaccagctacctgccccggcaggacctggagggcaccccctacctggagagcggcatcagcctcttcagtgatgatcctgagagtgaccccagtgaagatcgggcccctgagagcgcccgggtgggcaacatccccagcagcaccagcgccctgaaggtgccccagctgaaggtggccgagagcgcccagagccctgctgctgcccacaccacagacacagctggctacaatgccatggaggagagcgtgtcccgggagaagccagagctgacagccagcacagagcgggtgaacaagaggatgtccatggtggtgtctggcctgaccccagaggagttcatgctggtgtacaagtttgccaggaagcaccacatcaccctgaccaacctgatcacagaggagaccacccacgtggtgatgaagacagatgctgagtttgtgtgtgagaggaccctgaagtacttcctgggcattgctgggggcaagtgggtggtgtcctacttctgggtgacccagagcatcaaggagaggaagtag

SEQ ID NO: 171710 - DNA, 1497 bp, Artificial Sequence
  derived and/or modified sequence
gagctgctgaagatcatctgtgccttccagctggacaccggcctggagtatgccaacagctacaactttgccaagaaggagaacaacagccctgagcacctgaaggatgaggtgtccatcatccagagcatgggctacagaaacagagccaagaggctgctgcagagcgagcctgagaaccccagcctggagaccagcctgtctgtgcagctgagcaacctgggcaccgtgaggaccctgcggaccaagcagaggatccagccccagaagacctctgtgtacatcgagctggccgcctgtgagttcagcgagacagatgtgaccaacacagagcaccaccagcccagcaacaatgacctgaacaccacagagaagagagctgctgagcggcaccctgagaagtaccagggcgaggccgccagcggctgtgagagcgagacctctgtgtctgaggactgcagcggcctgagcagccagagcgacatcctgaccacccagcagagggacaccatgcagcacaacctgatcaagctgcagcaggagatggccgagctggaggccgtgctggagcagcacggcagccagcccagcaacagctaccccagcatcatcagtgacagcagcgccctggaggacctgaggaaccctgagcagagcaccagcgagaaggctgtgctgaccagccagaagagcagcgagtaccccatcagccagaaccctgagggcctgtctgctgacaagtttgaggtgtctgctgacagcagcaccagcaagaacaaggagcccggggtggagaggagcagccccagcaaatgtcccagcctggatgaccgctggtacatgcacagctgcagcggcagcctgcagaacagaaactaccccagccaggaggagctgatcaaggtggtggatgtggaggagcagcagctggaggagagcggcccccatgacctgacagagaccagctacctgccccggcaggacctggagggcaccccctacctggagagcggcatcagcctcttcagtgatgatcctgagagtgaccccagcgaggaccgggcccctgagagcgcccgggtgggcaacatccccagcagcaccagcgccctgaaggtgccccagctgaaggtggccgagagcgcccagagccctgctgctgcccacaccacagacacagctggctacaatgccatggaggagagcgtgtcccgggagaagccagagctgacagccagcacagagcgggtgaacaagaggatgtccatggtggtgtctggcctgaccccagaggagttcatgctggtgtacaagtttgccaggaagcaccacatcaccctgaccaacctgatcacagaggagaccacccacgtggtgatgaagacagatgctgagtttgtgtgtgagaggaccctgaagtacttcctgggcattgctgggggcaagtgggtggtgtcctacttctgggtgacccagagcatcaaggagaggaagtag

SEQ ID NO: 171711 - DNA, 297 bp, Artificial Sequence
  derived and/or modified sequence
atggacctgagcgccctgcgggtggaggaggtgcagaatgtcatcaatgccatgcagaagatcctggagtgccccatctgcctggagctgatcaaggagcctgtgtccaccaagtgtgaccacatcttctgcaagagcctgcaggagagcacccgcttcagccagctggtggaggagctgctgaagatcatctgtgccttccagctggacaccggcctggagtatgccaacagctacaactttgccaagaaggagaacaacagccctgagcacctgaaggatgaggtgtccatctag

SEQ ID NO: 171712 - DNA, 180 bp, Artificial Sequence
  derived and/or modified sequence
atggacctgagcgccctgcgggtggaggaggtgcagaatgtcatcaatgccatgcagaagatcctggagtgccccatctgcctggagctgatcaaggagcctgtgtccaccaagtgtgaccacatcttctgcaaggtgctgctgtgctgccccagctggagcacagtggtgcgctcctag

SEQ ID NO: 171713 - DNA, 1719 bp, Artificial Sequence
  derived and/or modified sequence
atgctgaagctgctgaaccagaagaagggccccagccagtgccccctgtgcaagaatgacatcaccaagaggagcctgcaggagagcacccgcttcagccagctggtggaggagctgctgaagatcatctgtgccttccagctggacaccggcctggagtatgccaacagctacaactttgccaagaaggagaacaacagccctgagcacctgaaggatgaggtgtccatcatccagagcatgggctacagaaacagagccaagaggctgctgcagagcgagcctgagaaccccagcctgcaggagaccagcctgtctgtgcagctgagcaacctgggcaccgtgaggaccctgcggaccaagcagaggatccagccccagaagacctctgtgtacatcgagctgggcagtgacagcagtgaagatactgtgaacaaggccacctactgcagcgtgggggaccaggagctgctgcagatcaccccccagggcaccagagatgagatcagcctggacagcgccaagaaggccgcctgtgagttcagcgagacagatgtgaccaacacagagcaccaccagcccagcaacaatgacctgaacaccacagagaagagagctgctgagcggcaccctgagaagtaccagggcgaggccgccagcggctgtgagagcgagacctctgtgtctgaggactgcagcggcctgagcagccagagcgacatcctgaccacccagcagagggacaccatgcagcacaacctgatcaagctgcagcaggagatggccgagctggaggccgtgctggagcagcacggcagccagcccagcaacagctaccccagcatcatcagtgacagcagcgccctggaggacctgagaaatcctgagcagagcaccagcgagaaggctgtgctgaccagccagaagagcagcgagtaccccatcagccagaaccctgagggcctgtctgctgacaagtttgaggtgtctgctgacagcagcaccagcaagaacaaggagcccggggtggagaggagcagccccagcaagtgccccagcctggatgaccgctggtacatgcacagctgcagcggcagcctgcagaacagaaactaccccagccaggaggagctgatcaaggtggtggatgtggaggagcagcagctggaggagagcggcccccatgacctgacagagaccagctacctgccccggcaggacctggagggcaccccctacctggagagcggcatcagcctcttcagtgatgatcctgagagtgaccccagtgaagatcgggcccctgagagcgcccgggtgggcaacatccccagcagcaccagcgccctgaaggtgccccagctgaaggtggccgagagcgcccagagccctgctgctgcccacaccacagacacagctggctacaatgccatggaggagagcgtgtcccgggagaagccagagctgacagccagcacagagcgggtgaacaagaggatgtccatggtggtgtctggcctgaccccagaggagttcatgctggtgtacaagtttgccaggaagcaccacatcaccctgaccaacctgatcacagaggagaccacccacgtggtgatgaagacagatgctgagtttgtgtgtgagaggaccctgaagtacttcctgggcattgctgggggcaagtgggtggtgtcctacttctgggtgacccagagctag

SEQ ID NO: 171714 - DNA, 192 bp, Artificial Sequence
  derived and/or modified sequence
atggacctgagcgccctgcgggtggaggaggtgcagaacgtgatcaacgctatgcagaaaatcttggaatgcccaatctgtctggaattaatcaaagaacctgtgagtacaaagtgcgaccacatcttttgtaagttctgcatgctgaagctacttaaccagaaaaaaggcccctctcagtgtccactctag

SEQ ID NO: 171715 - DNA, 192 bp, Artificial Sequence
  derived and/or modified sequence
atggacctgagcgccctgcgggtggaggaggtgcagaacgtgatcaatgccatgcaaaagattctcgagtgtccaatctgtctggaactgattaaggaaccagtaagcacaaagtgcgaccacatcttttgtaaattctgtatgctgaaactgttaaaccagaagaagggtccatcacagtgtcctctgtag

SEQ ID NO: 171716 - DNA, 2100 bp, Artificial Sequence
  derived and/or modified sequence
atggacctgagcgccctgcgggtggaggaggtgcagaacgtgatcaacgcaatgcagaaaatcctggaatgcccaatttgtctggagctcataaaggagccagtgtcgactaagtgcgatcatattttctgcaaattttgtatgctcaagctgctgaaccagaagaagggcccttcacaatgcccgctctgtaaaaatgatatcacaaaacgtagcctacaggagagtacacgcttttcacaattggtggaagaactcttgaaaatcatctgcgccttccagctcgatactggcttagaatatgctaactcctacaactttgctaagaaagagaataattccccagaacacctgaaagacgaggtcagcattatccaaagtatggggtatcgcaatagggctaaaagactgttacagtcagaacctgagaatccttcactacaggagacttcgctgtcagtgcagttgtcgaatttggggactgtgaggaccctccgaaccaaacaacgcatccagccacagaagacttcagtgtacattgagctggggtcagatagctccgaagacacagttaataaggccacctattgttcagttggggatcaggagctcctgcaaatcacccctcagggcacaagggacgagatatcactcgacagcgccaagaaggccgcttgcgagttttcagagacagacgttacaaataccgaacaccaccagcctagcaacaacgacctcaacacaactgagaaacgagctgccgaacgccacccagaaaagtatcagggtgaagccgccagcggctgtgagtcagagacaagcgtctcagaggattgctccggcctgtccagtcaaagtgacatactcaccacacagcaaagggacaccatgcaacataatctcatcaagttacagcaagagatggctgaactggaggcggtattggaacagcatggcagccagccttctaatagttatccatctattatttctgattcatctgcactggaagatctgaggaatccggagcaatcaacgagtgaaaaggttctgacctcacagaagagctccgagtacccgatctctcagaaccccgaaggcttatcggccgacaaattcgaggtgagtgccgattctagcacctccaaaaataaggagccaggggtggagcggagcagtccaagcaagtgcccttctctcgatgatcgctggtatatgcactcgtgtagtggttcactgcagaaccgaaattatcccagccaagaggagctgatcaaagtggtcgatgtggaagaacagcagctggaagagtctggaccacatgacctgactgagacaagttacctgccacggcaggatttggaaggaaccccctacctcgagtccggaatcagcctgttttccgacgaccctgaatctgatcctagcgaagatagggcgccagagtcagcccgggtcggcaacattccctccagcacctcagccctgaaggttccccagcttaaagttgctgagtctgcccagagccccgccgctgcacacactacggatactgccgggtacaatgccatggaagagtccgtttccagagagaagccagagctaacagcgtctactgaaagggtgaacaagcgtatgagtatggtagtgtcaggcctgacacctgaagagtttatgctcgtgtataaatttgcacggaagcatcatataaccctgacaaatttgatcactgaagagaccacccacgtcgtgatgaaaacagatgctgaatttgtgtgcgagcggaccctcaagtacttcctgggcattgccggcgggaagtgggtcgtgagttatttttgggtgactcagtctataaaggagcgaaagatgctcaatgagcacgacttcgaggtacgcggagacgtggtgaatgggcggaatcatcagggtcccaagcgtgctagagaaagtcaggatcggaagatatttcggggcctggaaatctgttgttatgggccgttcaccaacatgcccaccggatgcccgccaaattgtggatgtgccgcgcgctgtctggatcggggacagtggttgccctgtaactgggctgacgtgtag

SEQ ID NO: 171717 - DNA, 669 bp, Artificial Sequence
  derived and/or modified sequence
atggacctgagcgccctgcgggtggaggaggtgcagaacgtgatcaacgccatgcagaagatcttagagtgccctatctgcctagaactgatcaaggaacccgtgtccacaaaatgtgaccatatcttctgcaaattctgcatgctgaaactactgaaccagaagaaaggtcctagtcagtgtccactctgcaagaatgatatcacaaaaagatccctgcaagaaagcacccggttctcccagctggtggaagagcttttaaagattatatgcgccttccagctcgacactggtcttgaatacgccaattcatataatttcgccaagaaagaaaacaacagtccagagcatttgaaggatgaagtgagcatcatacagagcatgggttaccggaatcgggcaaagaggcttctgcagagcgaacccgaaaatccctccctcgagacaagcctgagcgtccagctctcaaacctgggaaccgttcgaaccctaagaaccaaacagcgcatccagcctcaaaaaacatctgtctatatcgagttgggctctgattctagtgaggacaccgttaacaaggccacatattgcagcgtgggggaccaagaactactgcagatcactccacaggggactcgggatgagatctctctcgattcagccaagaaatag

SEQ ID NO: 171718 - DNA, 1872 bp, Artificial Sequence
  derived and/or modified sequence
atggacctgagcgccctgcgggtggaggaggtgcagaacgtgatcaacgccatgcagaagatcttagagtgtcccatatgtctagaacttattaaagagccagtgtcaacgaaatgcgaccatatattctgtaaattttgcatgctgaaactactgaaccagaaaaaaggcccctcccagtgccctctgtgtaagaatgatatcaccaaacgttccctgcaggagagtacaagattctcccagctcgtcgaggaattattgaagatcatctgtgctttccaacttgacacgggcctcgagtacgcaaactcttataacttcgcaaagaaggagaataactcgcctgaacacctcaaggatgaggtgtctattatccagtctatgggctatcgcaatagggccaagaggctccttcagtccgagcccgagaatccttctctcgagactagcctttccgtccaactgtccaatctgggaaccgtgaggaccctacggactaagcagcggatccagccccagaagacctccgtgtatatcgaactgggaagcgattcctccgaggatactgtgaataaagcaacgtactgctccgttggcgatcaggaactgctccagataaccccgcagggaactagagatgaaatctcactggactctgccaaaaaggctgcatgtgagtttagtgaaacggacgtaaccaataccgagcaccaccagccaagcaacaatgacctgaacaccactgagaagcgggctgctgagcgtcaccctgagaagtaccagggagaggccgccagcggctgcgagtcagagacttctgtgtccgaagactgctccggactcagctctcagtctgacatcctcaccacacaacagcgcgacaccatgcagcacaatctaataaagctgcagcaggaaatggccgagctggaagcggttctggagcagcacggcagccaaccatcaaactcctacccaagtatcatcagtgattctagtgcgctcgaggacctgagaaacccagagcagtctacctctgaaaaggccgtgctgacttctcaaaagagctctgaataccccatttcccagaaccctgagggcctgtctgcggataagtttgaggtctctgcagactccagcacaagcaaaaacaaggaaccaggagtagaacgctcatcaccctcaaagtgcccctcactggacgatcgctggtacatgcactcatgcagcggatcccttcaaaacagaaactatccgagccaggaggagttgataaaagttgttgacgtggaagagcaacagctggaggagtctggtccccacgatctcactgagacatcatacctccctagacaggacttggagggcaccccatatttagaatccgggatctccctgttctccgatgatcctgaaagtgatcccagcgaggatcgcgcccctgaaagcgcgagagttgggaacatcccctcatccaccagcgcgctgaaggttccccagctcaaggtggcggagtcagctcagagccccgccgccgcacacacgaccgataccgcaggttataacgccatggaggaatctgtgtccagagagaagccagagctgactgcgagcactgagcgcgtgaacaaacgaatgtctatggtggtgtctgggcttactccagaggaattcatgttagtttataagttcgcgaggaagcaccatataacccttacaaacctgattacagaagaaactacccacgtggttatgaagaccgatgccgaatttgtttgtgaacgtacactcaagtacttcttgggaattgccggcggaaaatgggtcgtgagttacttttgggtcacccagagcatcaaggagagaaaatag

SEQ ID NO: 171719 - DNA, 1497 bp, Artificial Sequence
  derived and/or modified sequence
gagctgctgaagatcatctgcgccttccagctggacaccggcctggagtatgcgaattcttacaatttcgccaagaaggagaacaatagtccagaacatcttaaagacgaagtctccattatccaatctatgggttaccggaaccgagccaaacgactgctgcagtccgagcccgaaaacccgtcgttggagacttctctgtctgtgcagctgtcgaacctggggaccgtgcggacattgagaacgaaacagcgtatccaaccccagaagacttctgtatatatcgagctggccgcttgcgagtttagcgaaacagacgtcaccaatacagagcatcatcagcccagcaacaatgacttgaatactactgaaaaacgcgccgctgagagacatcccgagaagtaccagggagaagccgcctccggctgcgaatccgagacttccgtttctgaagattgctctgggctatcctcacagtccgatatcctgacgacccagcagagagacacaatgcagcataatctgatcaagctacagcaggagatggctgagctggaagccgtactagagcagcacggaagtcagccctcaaatagctatccctcaatcatttctgattcgagcgctctcgaggacttgcgtaaccccgaacagtccacaagcgaaaaggcagtgcttaccagtcagaaaagttccgagtatccaatcagccagaacccagagggcttatcagcagacaagttcgaagttagtgcagatagcagtacgtccaaaaataaggagcccggagtcgagaggtcatcaccctccaaatgccctagcctggacgataggtggtacatgcactcctgttccggcagcctccagaatcgcaactacccaagtcaggaagaactcatcaaggtggttgacgtggaagagcaacagctggaagagtccggacctcacgatcttactgaaacctcttacctgcctcgccaggatttggaaggcacaccctacctggagtcagggatcagtctcttctcagatgatcctgagtccgatcctagtgaggacagggccccggagtcagcgagggttggcaacatcccctctagcaccagcgcgctcaaggttccccagctgaaggtcgccgagtcggctcaaagcccagccgccgcgcacaccaccgacacggccggatataacgccatggaggagtcggtgtccagggagaaaccagaactgaccgcaagcacagagcgagtgaacaagcgcatgagtatggtggtgagcggcttgacccctgaggaattcatgttggtttacaaattcgccaggaaacaccacattactcttacaaacctcattacagaggagacaacccacgtggtgatgaagacagacgctgagttcgtgtgtgaaaggacactgaaatactttttgggcatcgccggaggcaagtgggttgttagctatttctgggtcactcagtcaatcaaagaaagaaagtag

SEQ ID NO: 171720 - DNA, 297 bp, Artificial Sequence
  derived and/or modified sequence
atggacctgagcgccctgcgggtggaggaggtgcagaacgtgatcaacgcgatgcagaagattctcgagtgcccaatttgcctggagcttattaaggagcccgtgtctactaagtgcgaccacatcttctgtaagtccctccaggaatcaaccagattttcccagctggttgaggagctcctgaagattatttgcgcttttcagttggatactggactcgagtacgctaacagctacaacttcgccaagaaggagaacaactccccagaacatctgaaggacgaagtaagcatttag

SEQ ID NO: 171721 - DNA, 180 bp, Artificial Sequence
  derived and/or modified sequence
atggacctgagcgccctgcgggtggaggaggtgcagaacgtgatcaatgcaatgcaaaaaatcctggagtgtccaatctgccttgaactcataaaagagcctgtatcaacgaagtgcgaccacatcttttgtaaggtccttctgtgttgcccttcctggagcactgttgtccgatcatag

SEQ ID NO: 171722 - DNA, 1719 bp, Artificial Sequence
  derived and/or modified sequence
atgctgaagctgctgaaccagaagaagggccccagccagtgccccctttgtaagaatgatatcactaagagatctctgcaggagtcaacacgcttttctcagttagtggaagagctactcaagatcatctgcgccttccagctggacactggtctggaatacgccaatagctacaactttgccaaaaaagagaacaattcccccgagcacctgaaggacgaagtttccataatccagagcatgggctatcggaatcgcgcaaagagactactgcagtcagagcccgaaaacccctctttacaagagacatccctctctgtacagctgtccaatctgggtaccgtgcgaactctgagaaccaaacagcggatacagccccagaagacatccgtgtatattgagttgggaagcgacagctccgaggacactgtgaataaggccacctactgcagtgtaggcgaccaggagttgctccagattaccccgcaggggactagagatgaaatttcactggattccgcgaagaaagcagcctgtgaattctctgagacagacgtgaccaacacagaacaccatcagccatcaaataacgatctgaatacaacagaaaagcgggctgccgagcgtcatcccgaaaagtaccaaggagaagcagctagcggatgcgagagcgagacctcagtcagcgaggactgctctggcctgtctagtcagtctgatatcctaaccacccagcagagagataccatgcagcacaatttgatcaaattacaacaggaaatggctgaacttgaggccgtgctggagcagcacggttcccagccttcgaattcttatccctcaatcatatccgattcctcagctttggaggatctccggaatcctgagcagagcactagtgaaaaggccgtgcttacaagccagaaatctagcgagtaccccatatcccagaatccagaggggctaagcgccgacaagttcgaggtgtccgccgacagtagcacaagtaaaaacaaggagccaggagtggagaggagttcaccatccaagtgtccaagcctggacgaccgatggtacatgcatagttgtagtggctcgctccagaaccgtaactatccatctcaggaggagctgataaaggtagtggacgtggaggaacagcagctggaagaatccggaccgcacgatttgactgagacttcctacctaccgcgccaggacttggaaggtacaccttacctcgagagcggcatttcactcttttccgatgatcccgaatctgatccctcagaggaccgggcccccgagtcagcgcgcgtaggcaacatacctagctcaacctcggcattgaaagttcctcaactgaaagtagccgaaagcgctcagagtcctgcagcagcgcacaccaccgacaccgccggctataatgctatggaggaatctgtgtcccgagaaaaaccagaactcacggccagcactgagcgggttaataagaggatgtccatggtcgtcagtggcctgacacccgaggaatttatgctagtctataagttcgctcgcaagcatcatattacattgactaacctgattaccgaagagactacgcatgtcgttatgaagacagacgccgagttcgtttgcgaaagaactctaaaatatttcctgggaattgctggcggaaaatgggtggttagctacttctgggtcacacagtcctag

SEQ ID NO: 171723 - DNA, 192 bp, Artificial Sequence
  derived and/or modified sequence
atggacctctccgccctgcgggtggaggaggttcagaatgtgatcaatgccatgcagaagattctcgaatgtcccatctgcctcgagctcattaaggagccggtgagcacaaaatgcgatcatatcttctgtaagttttgcatgctgaagctcctcaaccagaagaaggggcctagtcagtgccccctgtag

SEQ ID NO: 171724 - DNA, 192 bp, Artificial Sequence
  derived and/or modified sequence
atggacttatccgcattacgggtcgaagaagtgcagaacgtgataaacgctatgcaaaagatcctcgaatgtccgatctgtctggaattgatcaaagaaccggtgtcgacgaaatgcgaccacattttctgcaaattttgcatgcttaaactattgaaccagaagaagggccctagtcagtgtccgctctag

SEQ ID NO: 171725 - DNA, 2100 bp, Artificial Sequence
  derived and/or modified sequence
atggacctatcagccttacgggttgaggaggtgcagaacgttatcaacgccatgcagaagatactggagtgcccaatctgcctcgagctgatcaaagagccagtttccaccaaatgcgaccacattttctgcaagttctgcatgcttaaactgttgaaccagaagaagggtccctcccaatgtcccttatgtaagaatgatataacaaagcgctcactccaggaatccacgcgttttagccagctcgtcgaggaactccttaagatcatttgcgcctttcagttggacacaggccttgaatacgccaattcctataacttcgcaaaaaaggaaaataacagccctgagcatttgaaagatgaggtctccatcatccagtcgatgggctatagaaatagggctaagaggttactgcagtctgagccagagaacccgtctctgcaagagacgtccctgagcgttcagttatcaaacctgggcacagtgagaaccctgcgcaccaagcagagaatacagcctcagaaaacttcagtgtatatcgaacttggttctgacagctcggaggacacagtgaacaaggcaacctactgctcagtgggggaccaggagctgctgcagatcacccctcaggggacaagagatgagatttccttggattccgctaagaaagcagcctgcgaatttagcgagaccgatgttaccaacaccgagcaccaccagccctccaataacgatctcaatacaactgagaagcgggcagccgaaaggcatcccgagaaataccagggggaagcagcttccggctgtgagagtgaaacgagcgttagtgaagattgtagcggcttgtcctcacaatctgatatactcaccacacagcagcgtgacacaatgcaacataaccttattaaactgcagcaagagatggccgaactggaagcggttttagagcagcacggtagccagccatcaaattcttacccttccatcatctcggacagtagcgcgcttgaagatctacgcaaccctgagcagtcgaccagcgagaaggtcctcacgtcccaaaagtcctcagagtatcccatttcccaaaaccccgaaggactgagcgcggacaagtttgaggtgtccgccgacagctcaaccagcaagaacaaagagccaggagtggagcgctcctcaccctctaaatgtccatccctagatgatcgatggtatatgcactcatgttccggcagcttacaaaaccggaattaccctagtcaggaggaacttataaaagtggtagacgtagaggaacaacagcttgaagaatccgggcctcacgacctaactgagacatcctacctgccaaggcaagacctggaaggcacaccatacttagagtctggcatctcactattcagcgatgatcccgagagcgacccgtctgaggaccgggctccagagtccgccagagtgggcaacatcccttcctccacgagtgcgctgaaggtcccacaattgaaagtagcagaaagcgcacagagccccgcagctgctcacactaccgatacagcgggttataatgccatggaagagtctgtgagcagagaaaagcctgagcttactgccagtactgagagggtgaataagcggatgtctatggtggtttctggtctgacaccagaagaattcatgttggtgtataaattcgcgagaaaacatcacatcaccctcaccaacctgattacagaagagactacccacgtggtgatgaaaacagacgcggaatttgtttgtgaacggactcttaagtactttctcggcattgcagggggtaaatgggtggtttcctatttttgggtgacccagagtattaaagaaaggaagatgctgaacgagcacgactttgaggtgcgcggagacgtagtgaatggtcggaaccaccaggggcctaaaagagcccgagagtcccaggatagaaagatctttcgaggcctcgagatctgttgctacggcccattcactaacatgcctaccggctgtccaccaaattgtggctgtgccgcacgatgtctggatcgaggccaatggctgccgtgcaactgggcggacgtctag

SEQ ID NO: 171726 - DNA, 669 bp, Artificial Sequence
  derived and/or modified sequence
atggacctgtccgctctacgcgtggaggaagtgcagaatgtgattaacgccatgcagaagatcctcgagtgtcctatttgcctggaactcattaaggagccagttagtacaaaatgtgatcacatattctgtaaattttgcatgctcaaactgctgaatcagaagaagggaccatcccagtgtcctctgtgcaaaaacgatatcacaaaacggtccttacaggagtccacaagatttagccagcttgtcgaggaactattaaagatcatttgtgcatttcagctggacacagggctggagtacgccaatagttacaactttgccaagaaagaaaataactccccagaacacctgaaggacgaggtttccattatccagtcaatggggtaccggaatagagccaagagactattgcagtcagaacccgaaaacccatcactggaaacttcactgagcgtgcagttgagcaacctcggtacggtgcgcacactccggacaaagcagcgcattcagcctcagaaaaccagcgtgtatattgaattaggatctgactcttccgaggacacggtcaataaggcgacctattgcagtgtgggggaccaggagctgctacagatcaccccccaggggaccagggacgaaatctccctggatagcgcgaagaagtag

SEQ ID NO: 171727 - DNA, 1872 bp, Artificial Sequence
  derived and/or modified sequence
atggatttgagtgccctccgagtcgaagaagttcaaaatgtcattaacgcgatgcagaagattctcgaatgtcccatttgtcttgaactgatcaaggagccagtgtctacgaagtgcgatcacatcttctgtaaattttgcatgctcaaactgcttaatcagaagaagggaccctcccagtgccctctttgcaagaacgacattaccaagcggtcactgcaggaaagtacaagatttagccagctcgttgaagaactcctgaagatcatatgcgctttccagttagatacagggctggagtacgccaactcctacaacttcgctaaaaaggaaaataatagccctgagcacctgaaagatgaggtgtcaatcatccaaagcatgggctatcggaatcgggctaagcgcctactccaatcagaaccagagaatccctctctagaaacctctctgtctgtccagttgtctaacttaggaacagtccggacgcttaggaccaagcagaggatacagcctcagaaaacatctgtgtatatcgaactgggaagcgatagcagtgaggacacagttaataaagctacatattgctcagtcggcgaccaggaactgctgcaaataaccccacaagggactcgcgacgagattagtctggatagtgcgaagaaagctgcgtgtgagtttagtgagacagacgtgaccaacactgaacaccatcagccatcgaacaatgacctaaacactacagagaaaagagccgcagaacggcaccccgaaaaataccagggcgaagctgcaagcgggtgtgagtcagaaacatctgtctctgaagactgtagcggactatcttcccagtcagatatcttgaccacacagcagcgagataccatgcagcacaatctgatcaaactgcagcaagagatggccgaattggaggcggtgctagagcagcacggtagtcagccatcaaactcgtacccatccataataagcgatagtagcgcactagaggacttacgtaatcctgaacagtccaccagcgaaaaggctgttcttacatcacaaaaatctagtgagtatcccattagtcagaatccagagggactcagcgcagacaagtttgaggtctcagccgactcctccacatcaaaaaacaaggagcctggcgtcgaacggagctccccttccaaatgtcccagtctggacgatagatggtacatgcacagttgttccggttcgctacagaatcggaattacccaagccaggaagagctcattaaggtcgtggatgtggaagagcaacagttagaggagtcaggaccccacgatctgaccgagacctcatacctacccaggcaggatttggaggggacaccataccttgaatctggcatcagcctgtttagcgacgaccccgagtccgatccctccgaagatagagccccagagtctgctcgcgttggaaatatcccgagtagtaccagcgcactgaaagtgccccagcttaaggtagccgagtcagcccaaagcccagctgccgcacacactacagatactgcaggatacaacgccatggaggaatctgtctctcgtgagaaaccagagcttacggcgagcaccgaacgagtgaacaaaagaatgtctatggtggtcagcggactcacgcccgaagagttcatgctggtctacaagtttgcacggaagcaccatatcacactgacaaacctaatcaccgaagagaccacccatgtcgtgatgaaaacggacgccgagtttgtgtgcgagcgcacactgaaatactttctgggaatcgccggagggaagtgggttgtttcttatttctgggtcacgcagagcattaaagagcggaaatag

SEQ ID NO: 171728 - DNA, 1497 bp, Artificial Sequence
  derived and/or modified sequence
gagttacttaaaattatatgtgccttccagctggatacagggctggaatatgcaaattcatataacttcgcaaaaaaggaaaacaatagtccagaacacctgaaagatgaggtgtccatcattcagagtatgggataccgcaacagagccaaaaggttgctccagagcgaaccagagaatcccagtctggagacttcactttccgtgcagctatccaacttagggaccgttcggactttgagaactaagcaaaggattcagccacaaaaaacaagtgtctatattgaactggccgcatgtgagttcagtgaaactgacgtgacaaacacggaacatcatcaaccgtctaataacgatctgaatactactgaaaagagggctgcagagcggcacccggaaaaatatcagggggaagcggcatctggttgtgaatctgagacgagcgtgagtgaggattgctctggcttgagctcacagtcagacattctgactacgcagcagagggatactatgcaacacaatttaataaagcttcagcaagaaatggccgagcttgaagccgtgctggagcaacacggctcacagccctcaaattcatacccttctataattagtgatagcagtgcattggaggacctgcggaaccccgaacaaagcacgtctgaaaaagccgtgctcacgagccagaaaagcagcgagtaccctatatcccagaatccagaagggctctccgcagacaaatttgaagtgtcagcggatagcagcacaagcaaaaataaggaacccggagtagaaagaagctccccgtccaagtgcccgagtctcgacgaccggtggtacatgcacagctgctctggctcactccagaataggaactacccgagtcaagaggaactgattaaggttgtagacgttgaggagcagcagctggaggagtcggggccacacgaccttacggagacctcttatctccctagacaggacctggaggggacaccctacctggaatccgggatttccctgttcagtgacgatccagagtccgatccttccgaagatcgggctcccgagtcagcgcgagtcggaaacataccctctagtacgtcagcgctcaaagtgccccagttgaaagtggcggaatcggcccagtcacctgctgctgcgcatacaaccgacactgccggatacaacgcgatggaggagagtgtctcacgtgaaaagcctgaactcacggcctcaaccgaaagagtgaacaagcggatgtctatggtggtttccggactcacacctgaagagttcatgttggtgtacaagtttgctagaaagcaccacatcacacttaccaacctgattacagaggagactacccacgtcgtgatgaagacagacgcggagttcgtgtgcgaaaggactctgaagtactttctgggaattgccggagggaaatgggtggtgtcctacttttgggtcacccagagcatcaaggagcggaagtag

SEQ ID NO: 171729 - DNA, 297 bp, Artificial Sequence
  derived and/or modified sequence
atggatctgtccgcactccgggtggaagaggtccaaaacgtgataaatgcaatgcagaagatattggaatgccccatctgcttggagttgatcaaagaacccgtgagtaccaagtgtgaccatattttttgcaaatcactgcaggagtcgaccaggttcagccagctggtggaagagttgcttaagatcatctgcgcctttcagctcgataccgggctagagtatgctaacagctataatttcgccaagaaagagaataactccccggaacatctgaaggatgaggtgagtatatag

SEQ ID NO: 171730 - DNA, 180 bp, Artificial Sequence
  derived and/or modified sequence
atggatctgtcagctctgcgagtcgaagaggttcaaaatgttataaacgcgatgcaaaaaattttagaatgccccatctgcctcgaactgatcaaagagccagtttcaacgaaatgcgatcatattttttgtaaagtgttactctgctgcccatcttggtccacagtggtcaggtcttag

SEQ ID NO: 171731 - DNA, 1719 bp, Artificial Sequence
  derived and/or modified sequence
atgctcaagctcctgaatcagaagaagggtcctagtcagtgccccctttgcaagaatgacatcaccaaacgctccctccaggaatcgactcgatttagccagctggtggaggagcttctcaagatcatctgtgcatttcagcttgacacaggcttggaatatgccaattcctacaatttcgctaagaaagaaaacaacagtcctgagcatttaaaagacgaggtgtctatcatccaaagcatgggatatagaaaccgggcaaaacgcctgctgcagtctgagcctgaaaatccatctctgcaggaaacatcacttagcgtgcagctgtccaacctcgggactgtgcgcacccttcgcaccaaacaacgcatacagcctcagaagacgtctgtttatatcgaactgggaagcgattcatccgaggacaccgttaacaaggccacttactgctctgtcggagatcaggaactgcttcagataacccctcaaggcacgcgggatgaaatatcactagattcagcgaagaaagctgcatgcgaattcagcgagaccgatgtaaccaatactgaacaccatcagccgagtaacaacgatctgaatactacagagaagagggctgcagagcgccatccagagaaatatcagggggaagcagcgtccggttgtgagtccgagacttccgtatcagaagattgttccggcctttccagtcagagcgatatactgacgacacagcaacgcgataccatgcagcataaccttatcaaactccagcaggaaatggctgagctggaagctgttctggagcagcatgggagccagccctcaaacagctatccgagtattatctctgatagtagtgccctggaagacctacgaaacccggagcagtccacctctgaaaaagctgtgcttacctcccaaaagagtagtgagtatccgatttcccagaatccagaaggtctgagcgccgacaaattcgaggtcagcgcagatagcagcacttcaaagaataaggaaccaggggtcgagaggtccagcccaagcaagtgtccttcgctcgacgaccgatggtacatgcatagttgctcagggagtttgcagaatcggaattatcccagtcaggaggaactgattaaagtggtagatgttgaggagcaacagctggaggagtcaggccctcatgatctgacagaaacatcctacctccctagacaggatctagagggtactccatacctggagtccggtatcagtttgttttccgacgatcctgagagcgacccttccgaggatcgggctccagagagcgcccgtgttgggaatatcccaagctccactagcgcattgaaagtgccccaattgaaagtggctgaaagtgcccaaagccccgcagccgctcatactacggataccgccggatacaacgccatggaagaatcggttagtcgagagaagccagagctgaccgcttcaacggagcgggtcaataagcggatgagcatggtcgtctccggtctcacgcctgaagagtttatgctggtttataaattcgctagaaaacaccacatcacactgacaaaccttatcactgaagaaacaacccacgttgtcatgaagaccgatgcagagttcgtgtgtgagcggactttgaagtatttcctgggcattgctggaggtaagtgggttgtatcttacttctgggtgacccagagttag

SEQ ID NO: 171732 - DNA, 3273 bp, Artificial Sequence
  derived and/or modified sequence
cttagcggtagccccttggtttccgtggcaacggaaaagcgcgggaattacagataaattaaaactgcgactgcgcggcgtgagctcgctgagacttcctggacgggggacaggctgtggggtttctcagataactgggcccctgcgctcaggaggccttcaccctctgctctggttcattggaacagaaagaaatggatttatctgctcttcgcgttgaagaagtacaaaatgtcattaatgctatgcagaaaatcttagagtgtcccatctgtctggagttgatcaaggaacctgtctccacaaagtgtgaccacatattttgcaaattttgcatgctgaaacttctcaaccagaagaaagggccttcacagtgtcctttatgtaagaatgatataaccaaaaggagcctacaagaaagtacgagatttagtcaacttgttgaagagctattgaaaatcatttgtgcttttcagcttgacacaggtttggagtatgcaaacagctataattttgcaaaaaaggaaaataactctcctgaacatctaaaagatgaagtttctatcatccaaagtatgggctacagaaaccgtgccaaaagacttctacagagtgaacccgaaaatccttccttgcaggaaaccagtctcagtgtccaactctctaaccttggaactgtgagaactctgaggacaaagcagcggatacaacctcaaaagacgtctgtctacattgaattgggatctgattcttctgaagataccgttaataaggcaacttattgcagtgtgggagatcaagaattgttacaaatcacccctcaaggaaccagggatgaaatcagtttggattctgcaaaaaaggctgcttgtgaattttctgagacggatgtaacaaatactgaacatcatcaacccagtaataatgatttgaacaccactgagaagcgtgcagctgagaggcatccagaaaagtatcagggtgaagcagcatctgggtgtgagagtgaaacaagcgtctctgaagactgctcagggctatcctctcagagtgacattttaaccactcagcagagggataccatgcaacataacctgataaagctccagcaggaaatggctgaactagaagctgtgttagaacagcatgggagccagccttctaacagctacccttccatcataagtgactcttctgcccttgaggacctgcgaaatccagaacaaagcacatcagaaaaagtattaacttcacagaaaagtagtgaataccctataagccagaatccagaaggcctttctgctgacaagtttgaggtgtctgcagatagttctaccagtaaaaataaagaaccaggagtggaaaggtcatccccttctaaatgcccatcattagatgataggtggtacatgcacagttgctctgggagtcttcagaatagaaactacccatctcaagaggagctcattaaggttgttgatgtggaggagcaacagctggaagagtctgggccacacgatttgacggaaacatcttacttgccaaggcaagatctagagggaaccccttacctggaatctggaatcagcctcttctctgatgaccctgaatctgatccttctgaagacagagccccagagtcagctcgtgttggcaacataccatcttcaacctctgcattgaaagttccccaattgaaagttgcagaatctgcccagagtccagctgctgctcatactactgatactgctgggtataatgcaatggaagaaagtgtgagcagggagaagccagaattgacagcttcaacagaaagggtcaacaaaagaatgtccatggtggtgtctggcctgaccccagaagaatttatgctcgtgtacaagtttgccagaaaacaccacatcactttaactaatctaattactgaagagactactcatgttgttatgaaaacagatgctgagtttgtgtgtgaacggacactgaaatattttctaggaattgcgggaggaaaatgggtagttagctatttctgggtgacccagtctattaaagaaagaaaaatgctgaatgagcatgattttgaagtcagaggagatgtggtcaatggaagaaaccaccaaggtccaaagcgagcaagagaatcccaggacagaaagatcttcagggggctagaaatctgttgctatgggcccttcaccaacatgcccacagggtgtccacccaattgtggttgtgcagccagatgcctggacagaggacaatggcttccatgcaattgggcagatgtgtgaggcacctgtggtgacccgagagtgggtgttggacagtgtagcactctaccagtgccaggagctggacacctacctgataccccagatcccccacagccactactgactgcagccagccacaggtacagagccacaggaccccaagaatgagcttacaaagtggcctttccaggccctgggagctcctctcactcttcagtccttctactgtcctggctactaaatattttatgtacatcagcctgaaaaggacttctggctatgcaagggtcccttaaagattttctgcttgaagtctcccttggaaatctgccatgagcacaaaattatggtaatttttcacctgagaagattttaaaaccatttaaacgccaccaattgagcaagatgctgattcattatttatcagccctattctttctattcaggctgttgttggcttagggctggaagcacagagtggcttggcctcaagagaatagctggtttccctaagtttacttctctaaaaccctgtgttcacaaaggcagagagtcagacccttcaatggaaggagagtgcttgggatcgattatgtgacttaaagtcagaatagtccttgggcagttctcaaatgttggagtggaacattggggaggaaattctgaggcaggtattagaaatgaaaaggaaacttgaaacctgggcatggtggctcacgcctgtaatcccagcactttgggaggccaaggtgggcagatcactggaggtcaggagttcgaaaccagcctggccaacatggtgaaaccccatctctactaaaaatacagaaattagccggtcatggtggtggacacctgtaatcccagctactcaggtggctaaggcaggagaatcacttcagcccgggaggtggaggttgcagtgagccaagatcataccacggcactccagcctgggtgacagtgagactgtggctcaaaaaaaaaaaaaaaaaaa

SEQ ID NO: 171733 - DNA, 769 bp, Artificial Sequence
  derived and/or modified sequence
ctggacgggggacaggctgtggggtttctcagataactgggcccctgcgctcaggaggccttcaccctctgctctgggtaaagttcattggaacagaaagaaatggatttatctgctcttcgcgttgaagaagtacaaaatgtcattaatgctatgcagaaaatcttagagtgtcccatctgtctggagttgatcaaggaacctgtctccacaaagtgtgaccacatattttgcaaattttgcatgctgaaacttctcaaccagaagaaagggccttcacagtgtcctttatgtaagaatgatataaccaaaaggagcctacaagaaagtacgagatttagtcaacttgttgaagagctattgaaaatcatttgtgcttttcagcttgacacaggtttggagtatgcaaacagctataattttgcaaaaaaggaaaataactctcctgaacatctaaaagatgaagtttctatcatccaaagtatgggctacagaaaccgtgccaaaagacttctacagagtgaacccgaaaatccttccttggaaaccagtctcagtgtccaactctctaaccttggaactgtgagaactctgaggacaaagcagcggatacaacctcaaaagacgtctgtctacattgaattgggatctgattcttctgaagataccgttaataaggcaacttattgcagtgtgggagatcaagaattgttacaaatcacccctcaaggaaccagggatgaaatcagtttggattctgcaaaaaagg

SEQ ID NO: 171734 - DNA, 1972 bp, Artificial Sequence
  derived and/or modified sequence
gacttcctggacgggggacaggctgtggggtttctcagataactgggcccctgcgctcaggaggccttcaccctctgctctggttcattggaacagaaagaaatggatttatctgctcttcgcgttgaagaagtacaaaatgtcattaatgctatgcagaaaatcttagagtgtcccatctgtctggagttgatcaaggaacctgtctccacaaagtgtgaccacatattttgcaaattttgcatgctgaaacttctcaaccagaagaaagggccttcacagtgtcctttatgtaagaatgatataaccaaaaggagcctacaagaaagtacgagatttagtcaacttgttgaagagctattgaaaatcatttgtgcttttcagcttgacacaggtttggagtatgcaaacagctataattttgcaaaaaaggaaaataactctcctgaacatctaaaagatgaagtttctatcatccaaagtatgggctacagaaaccgtgccaaaagacttctacagagtgaacccgaaaatccttccttggaaaccagtctcagtgtccaactctctaaccttggaactgtgagaactctgaggacaaagcagcggatacaacctcaaaagacgtctgtctacattgaattgggatctgattcttctgaagataccgttaataaggcaacttattgcagtgtgggagatcaagaattgttacaaatcacccctcaaggaaccagggatgaaatcagtttggattctgcaaaaaaggctgcttgtgaattttctgagacggatgtaacaaatactgaacatcatcaacccagtaataatgatttgaacaccactgagaagcgtgcagctgagaggcatccagaaaagtatcagggtgaagcagcatctgggtgtgagagtgaaacaagcgtctctgaagactgctcagggctatcctctcagagtgacattttaaccactcagcagagggataccatgcaacataacctgataaagctccagcaggaaatggctgaactagaagctgtgttagaacagcatgggagccagccttctaacagctacccttccatcataagtgactcttctgcccttgaggacctgcgaaatccagaacaaagcacatcagaaaaagcagtattaacttcacagaaaagtagtgaataccctataagccagaatccagaaggcctttctgctgacaagtttgaggtgtctgcagatagttctaccagtaaaaataaagaaccaggagtggaaaggtcatccccttctaaatgcccatcattagatgataggtggtacatgcacagttgctctgggagtcttcagaatagaaactacccatctcaagaggagctcattaaggttgttgatgtggaggagcaacagctggaagagtctgggccacacgatttgacggaaacatcttacttgccaaggcaagatctagagggaaccccttacctggaatctggaatcagcctcttctctgatgaccctgaatctgatccttctgaagacagagccccagagtcagctcgtgttggcaacataccatcttcaacctctgcattgaaagttccccaattgaaagttgcagaatctgcccagagtccagctgctgctcatactactgatactgctgggtataatgcaatggaagaaagtgtgagcagggagaagccagaattgacagcttcaacagaaagggtcaacaaaagaatgtccatggtggtgtctggcctgaccccagaagaatttatgctcgtgtacaagtttgccagaaaacaccacatcactttaactaatctaattactgaagagactactcatgttgttatgaaaacagatgctgagtttgtgtgtgaacggacactgaaatattttctaggaattgcgggaggaaaatgggtagttagctatttctgggtgacccagtctattaaagaaagaaaaa

SEQ ID NO: 171735 - DNA, 1495 bp, Artificial Sequence
  derived and/or modified sequence
gagctattgaaaatcatttgtgcttttcagcttgacacaggtttggagtatgcaaacagctataattttgcaaaaaaggaaaataactctcctgaacatctaaaagatgaagtttctatcatccaaagtatgggctacagaaaccgtgccaaaagacttctacagagtgaacccgaaaatccttccttggaaaccagtctcagtgtccaactctctaaccttggaactgtgagaactctgaggacaaagcagcggatacaacctcaaaagacgtctgtctacattgaattggctgcttgtgaattttctgagacggatgtaacaaatactgaacatcatcaacccagtaataatgatttgaacaccactgagaagcgtgcagctgagaggcatccagaaaagtatcagggtgaagcagcatctgggtgtgagagtgaaacaagcgtctctgaagactgctcagggctatcctctcagagtgacattttaaccactcagcagagggataccatgcaacataacctgataaagctccagcaggaaatggctgaactagaagctgtgttagaacagcatgggagccagccttctaacagctacccttccatcataagtgactcttctgcccttgaggacctgcgaaatccagaacaaagcacatcagaaaaagcagtattaacttcacagaaaagtagtgaataccctataagccagaatccagaaggcctttctgctgacaagtttgaggtgtctgcagatagttctaccagtaaaaataaagaaccaggagtggaaaggtcatccccttctaaatgcccatcattagatgataggtggtacatgcacagttgctctgggagtcttcagaatagaaactacccatctcaagaggagctcattaaggttgttgatgtggaggagcaacagctggaagagtctgggccacacgatttgacggaaacatcttacttgccaaggcaagatctagagggaaccccttacctggaatctggaatcagcctcttctctgatgaccctgaatctgatccttctgaagacagagccccagagtcagctcgtgttggcaacataccatcttcaacctctgcattgaaagttccccaattgaaagttgcagaatctgcccagagtccagctgctgctcatactactgatactgctgggtataatgcaatggaagaaagtgtgagcagggagaagccagaattgacagcttcaacagaaagggtcaacaaaagaatgtccatggtggtgtctggcctgaccccagaagaatttatgctcgtgtacaagtttgccagaaaacaccacatcactttaactaatctaattactgaagagactactcatgttgttatgaaaacagatgctgagtttgtgtgtgaacggacactgaaatattttctaggaattgcgggaggaaaatgggtagttagctatttctgggtgacccagtctattaaagaaagaaaaa

SEQ ID NO: 171736 - DNA, 455 bp, Artificial Sequence
  derived and/or modified sequence
ataactgggcccctgcgctcaggaggccttcaccctctgctctgggtaaaggtagtagagtcccgggaaagggacagggggcccaagtgatgctctggggtactggcgtgggagagtggatttccgaagctgacagatggttcattggaacagaaagaaatggatttatctgctcttcgcgttgaagaagtacaaaatgtcattaatgctatgcagaaaatcttagagtgtcccatctgtctggagttgatcaaggaacctgtctccacaaagtgtgaccacatattttgcaagagcctacaagaaagtacgagatttagtcaacttgttgaagagctattgaaaatcatttgtgcttttcagcttgacacaggtttggagtatgcaaacagctataattttgcaaaaaaggaaaataactctcctgaacatctaaaagatgaagtttctatcat

SEQ ID NO: 171737 - DNA, 1948 bp, Artificial Sequence
  derived and/or modified sequence
acagataaattaaaactgcgactgcgcggcgtgagctcgctgagacttcctggacgggggacaggctgtggggtttctcagataactgggcccctgcgctcaggaggccttcaccctctgctctggttcattggaacagaaagaaatggatttatctgctcttcgcgttgaagaagtacaaaatgtcattaatgctatgcagaaaatcttagagtgtcccatctgattttgcatgctgaaacttctcaaccagaagaaagggccttcacagtgtcctttatgtaagaatgatataaccaaaaggagcctacaagaaagtacgagatttagtcaacttgttgaagagctattgaaaatcatttgtgcttttcagcttgacacaggtttggagtatgcaaacagctataattttgcaaaaaaggaaaataactctcctgaacatctaaaagatgaagtttctatcatccaaagtatgggctacagaaaccgtgccaaaagacttctacagagtgaacccgaaaatccttccttgcaggaaaccagtctcagtgtccaactctctaaccttggaactgtgagaactctgaggacaaagcagcggatacaacctcaaaagacgtctgtctacattgaattgggatctgattcttctgaagataccgttaataaggcaacttattgcagtgtgggagatcaagaattgttacaaatcacccctcaaggaaccagggatgaaatcagtttggattctgcaaaaaaggctgcttgtgaattttctgagacggatgtaacaaatactgaacatcatcaacccagtaataatgatttgaacaccactgagaagcgtgcagctgagaggcatccagaaaagtatcagggtgaagcagcatctgggtgtgagagtgaaacaagcgtctctgaagactgctcagggctatcctctcagagtgacattttaaccactcagcagagggataccatgcaacataacctgataaagctccagcaggaaatggctgaactagaagctgtgttagaacagcatgggagccagccttctaacagctacccttccatcataagtgactcttctgcccttgaggacctgcgaaatccagaacaaagcacatcagaaaaagcagtattaacttcacagaaaagtagtgaataccctataagccagaatccagaaggcctttctgctgacaagtttgaggtgtctgcagatagttctaccagtaaaaataaagaaccaggagtggaaaggtcatccccttctaaatgcccatcattagatgataggtggtacatgcacagttgctctgggagtcttcagaatagaaactacccatctcaagaggagctcattaaggttgttgatgtggaggagcaacagctggaagagtctgggccacacgatttgacggaaacatcttacttgccaaggcaagatctagagggaaccccttacctggaatctggaatcagcctcttctctgatgaccctgaatctgatccttctgaagacagagccccagagtcagctcgtgttggcaacataccatcttcaacctctgcattgaaagttccccaattgaaagttgcagaatctgcccagagtccagctgctgctcatactactgatactgctgggtataatgcaatggaagaaagtgtgagcagggagaagccagaattgacagcttcaacagaaagggtcaacaaaagaatgtccatggtggtgtctggcctgaccccagaagaatttatgctcgtgtacaagtttgccagaaaacaccacatcactttaactaatctaattactgaagagactactcatgttgttatgaaaacagatgctgagtttgtgtgtgaacggacactgaaatattttctaggaattgcgggaggaaaatgggtagttagctatttctgggtgacccagtct

SEQ ID NO: 171738 - DNA, 192 bp, Artificial Sequence
  derived and/or modified sequence
atggacctgagcgccctgagagtggaggaggtgcagaacgtgatcaacgccatgcagaagatcctggagtgccccatctgcctggagctgatcaaggagcccgtgagcaccaagtgcgaccacatcttctgcaagttctgcatgctgaagctgctgaaccagaagaagggccccagccagtgccccctgtag

SEQ ID NO: 171739 - DNA, 2100 bp, Artificial Sequence
  derived and/or modified sequence
atggacctgagcgccctgagagtggaggaggtgcagaacgtgatcaacgccatgcagaagatcctggagtgccccatctgcctggagctgatcaaggagcccgtgagcaccaagtgcgaccacatcttctgcaagttctgcatgctgaagctgctgaaccagaagaagggccccagccagtgccccctgtgcaagaacgacatcaccaagagaagcctgcaggagagcaccagattcagccagctggtggaggagctgctgaagatcatctgcgccttccagctggacaccggcctggagtacgccaacagctacaacttcgccaagaaggagaacaacagccccgagcacctgaaggacgaggtgagcatcatccagagcatgggctacagaaacagagccaagagactgctgcagagcgagcccgagaaccccagcctgcaggagaccagcctgagcgtgcagctgagcaacctgggcaccgtgagaaccctgagaaccaagcagagaatccagccccagaagaccagcgtgtacatcgagctgggcagcgacagcagcgaggacaccgtgaacaaggccacctactgcagcgtgggcgaccaggagctgctgcagatcaccccccagggcaccagagacgagatcagcctggacagcgccaagaaggccgcctgcgagttcagcgagaccgacgtgaccaacaccgagcaccaccagcccagcaacaacgacctgaacaccaccgagaagagagccgccgagagacaccccgagaagtaccagggcgaggccgccagcggctgcgagagcgagaccagcgtgagcgaggactgcagcggcctgagcagccagagcgacatcctgaccacccagcagagagacaccatgcagcacaacctgatcaagctgcagcaggagatggccgagctggaggccgtgctggagcagcacggcagccagcccagcaacagctaccccagcatcatcagcgacagcagcgccctggaggacctgagaaaccccgagcagagcaccagcgagaaggtgctgaccagccagaagagcagcgagtaccccatcagccagaaccccgagggcctgagcgccgacaagttcgaggtgagcgccgacagcagcaccagcaagaacaaggagcccggcgtggagagaagcagccccagcaagtgccccagcctggacgacagatggtacatgcacagctgcagcggcagcctgcagaacagaaactaccccagccaggaggagctgatcaaggtggtggacgtggaggagcagcagctggaggagagcggcccccacgacctgaccgagaccagctacctgcccagacaggacctggagggcaccccctacctggagagcggcatcagcctgttcagcgacgaccccgagagcgaccccagcgaggacagagcccccgagagcgccagagtgggcaacatccccagcagcaccagcgccctgaaggtgccccagctgaaggtggccgagagcgcccagagccccgccgccgcccacaccaccgacaccgccggctacaacgccatggaggagagcgtgagcagagagaagcccgagctgaccgccagcaccgagagagtgaacaagagaatgagcatggtggtgagcggcctgacccccgaggagttcatgctggtgtacaagttcgccagaaagcaccacatcaccctgaccaacctgatcaccgaggagaccacccacgtggtgatgaagaccgacgccgagttcgtgtgcgagagaaccctgaagtacttcctgggcatcgccggcggcaagtgggtggtgagctacttctgggtgacccagagcatcaaggagagaaagatgctgaacgagcacgacttcgaggtgagaggcgacgtggtgaacggcagaaaccaccagggccccaagagagccagagagagccaggacagaaagatcttcagaggcctggagatctgctgctacggccccttcaccaacatgcccaccggctgcccccccaactgcggctgcgccgccagatgcctggacagaggccagtggctgccctgcaactgggccgacgtgtag

SEQ ID NO: 171740 - DNA, 669 bp, Artificial Sequence
  derived and/or modified sequence
atggacctgagcgccctgagagtggaggaggtgcagaacgtgatcaacgccatgcagaagatcctggagtgccccatctgcctggagctgatcaaggagcccgtgagcaccaagtgcgaccacatcttctgcaagttctgcatgctgaagctgctgaaccagaagaagggccccagccagtgccccctgtgcaagaacgacatcaccaagagaagcctgcaggagagcaccagattcagccagctggtggaggagctgctgaagatcatctgcgccttccagctggacaccggcctggagtacgccaacagctacaacttcgccaagaaggagaacaacagccccgagcacctgaaggacgaggtgagcatcatccagagcatgggctacagaaacagagccaagagactgctgcagagcgagcccgagaaccccagcctggagaccagcctgagcgtgcagctgagcaacctgggcaccgtgagaaccctgagaaccaagcagagaatccagccccagaagaccagcgtgtacatcgagctgggcagcgacagcagcgaggacaccgtgaacaaggccacctactgcagcgtgggcgaccaggagctgctgcagatcaccccccagggcaccagagacgagatcagcctggacagcgccaagaagtag

SEQ ID NO: 171741 - DNA, 1872 bp, Artificial Sequence
  derived and/or modified sequence
atggacctgagcgccctgagagtggaggaggtgcagaacgtgatcaacgccatgcagaagatcctggagtgccccatctgcctggagctgatcaaggagcccgtgagcaccaagtgcgaccacatcttctgcaagttctgcatgctgaagctgctgaaccagaagaagggccccagccagtgccccctgtgcaagaacgacatcaccaagagaagcctgcaggagagcaccagattcagccagctggtggaggagctgctgaagatcatctgcgccttccagctggacaccggcctggagtacgccaacagctacaacttcgccaagaaggagaacaacagccccgagcacctgaaggacgaggtgagcatcatccagagcatgggctacagaaacagagccaagagactgctgcagagcgagcccgagaaccccagcctggagaccagcctgagcgtgcagctgagcaacctgggcaccgtgagaaccctgagaaccaagcagagaatccagccccagaagaccagcgtgtacatcgagctgggcagcgacagcagcgaggacaccgtgaacaaggccacctactgcagcgtgggcgaccaggagctgctgcagatcaccccccagggcaccagagacgagatcagcctggacagcgccaagaaggccgcctgcgagttcagcgagaccgacgtgaccaacaccgagcaccaccagcccagcaacaacgacctgaacaccaccgagaagagagccgccgagagacaccccgagaagtaccagggcgaggccgccagcggctgcgagagcgagaccagcgtgagcgaggactgcagcggcctgagcagccagagcgacatcctgaccacccagcagagagacaccatgcagcacaacctgatcaagctgcagcaggagatggccgagctggaggccgtgctggagcagcacggcagccagcccagcaacagctaccccagcatcatcagcgacagcagcgccctggaggacctgagaaaccccgagcagagcaccagcgagaaggccgtgctgaccagccagaagagcagcgagtaccccatcagccagaaccccgagggcctgagcgccgacaagttcgaggtgagcgccgacagcagcaccagcaagaacaaggagcccggcgtggagagaagcagccccagcaagtgccccagcctggacgacagatggtacatgcacagctgcagcggcagcctgcagaacagaaactaccccagccaggaggagctgatcaaggtggtggacgtggaggagcagcagctggaggagagcggcccccacgacctgaccgagaccagctacctgcccagacaggacctggagggcaccccctacctggagagcggcatcagcctgttcagcgacgaccccgagagcgaccccagcgaggacagagcccccgagagcgccagagtgggcaacatccccagcagcaccagcgccctgaaggtgccccagctgaaggtggccgagagcgcccagagccccgccgccgcccacaccaccgacaccgccggctacaacgccatggaggagagcgtgagcagagagaagcccgagctgaccgccagcaccgagagagtgaacaagagaatgagcatggtggtgagcggcctgacccccgaggagttcatgctggtgtacaagttcgccagaaagcaccacatcaccctgaccaacctgatcaccgaggagaccacccacgtggtgatgaagaccgacgccgagttcgtgtgcgagagaaccctgaagtacttcctgggcatcgccggcggcaagtgggtggtgagctacttctgggtgacccagagcatcaaggagagaaagtag

SEQ ID NO: 171742 - DNA, 1497 bp, Artificial Sequence
  derived and/or modified sequence
gagctgctgaagatcatctgcgccttccagctggacaccggcctggagtacgccaacagctacaacttcgccaagaaggagaacaacagccccgagcacctgaaggacgaggtgagcatcatccagagcatgggctacagaaacagagccaagagactgctgcagagcgagcccgagaaccccagcctggagaccagcctgagcgtgcagctgagcaacctgggcaccgtgagaaccctgagaaccaagcagagaatccagccccagaagaccagcgtgtacatcgagctggccgcctgcgagttcagcgagaccgacgtgaccaacaccgagcaccaccagcccagcaacaacgacctgaacaccaccgagaagagagccgccgagagacaccccgagaagtaccagggcgaggccgccagcggctgcgagagcgagaccagcgtgagcgaggactgcagcggcctgagcagccagagcgacatcctgaccacccagcagagagacaccatgcagcacaacctgatcaagctgcagcaggagatggccgagctggaggccgtgctggagcagcacggcagccagcccagcaacagctaccccagcatcatcagcgacagcagcgccctggaggacctgagaaaccccgagcagagcaccagcgagaaggccgtgctgaccagccagaagagcagcgagtaccccatcagccagaaccccgagggcctgagcgccgacaagttcgaggtgagcgccgacagcagcaccagcaagaacaaggagcccggcgtggagagaagcagccccagcaagtgccccagcctggacgacagatggtacatgcacagctgcagcggcagcctgcagaacagaaactaccccagccaggaggagctgatcaaggtggtggacgtggaggagcagcagctggaggagagcggcccccacgacctgaccgagaccagctacctgcccagacaggacctggagggcaccccctacctggagagcggcatcagcctgttcagcgacgaccccgagagcgaccccagcgaggacagagcccccgagagcgccagagtgggcaacatccccagcagcaccagcgccctgaaggtgccccagctgaaggtggccgagagcgcccagagccccgccgccgcccacaccaccgacaccgccggctacaacgccatggaggagagcgtgagcagagagaagcccgagctgaccgccagcaccgagagagtgaacaagagaatgagcatggtggtgagcggcctgacccccgaggagttcatgctggtgtacaagttcgccagaaagcaccacatcaccctgaccaacctgatcaccgaggagaccacccacgtggtgatgaagaccgacgccgagttcgtgtgcgagagaaccctgaagtacttcctgggcatcgccggcggcaagtgggtggtgagctacttctgggtgacccagagcatcaaggagagaaagtag

SEQ ID NO: 171743 - DNA, 297 bp, Artificial Sequence
  derived and/or modified sequence
atggacctgagcgccctgagagtggaggaggtgcagaacgtgatcaacgccatgcagaagatcctggagtgccccatctgcctggagctgatcaaggagcccgtgagcaccaagtgcgaccacatcttctgcaagagcctgcaggagagcaccagattcagccagctggtggaggagctgctgaagatcatctgcgccttccagctggacaccggcctggagtacgccaacagctacaacttcgccaagaaggagaacaacagccccgagcacctgaaggacgaggtgagcatctag

SEQ ID NO: 171744 - DNA, 180 bp, Artificial Sequence
  derived and/or modified sequence
atggacctgagcgccctgagagtggaggaggtgcagaacgtgatcaacgccatgcagaagatcctggagtgccccatctgcctggagctgatcaaggagcccgtgagcaccaagtgcgaccacatcttctgcaaggtgctgctgtgctgccccagctggagcaccgtggtgagaagctag

SEQ ID NO: 171745 - DNA, 1719 bp, Artificial Sequence
  derived and/or modified sequence
atgctgaagctgctgaaccagaagaagggccccagccagtgccccctgtgcaagaacgacatcaccaagagaagcctgcaggagagcaccagattcagccagctggtggaggagctgctgaagatcatctgcgccttccagctggacaccggcctggagtacgccaacagctacaacttcgccaagaaggagaacaacagccccgagcacctgaaggacgaggtgagcatcatccagagcatgggctacagaaacagagccaagagactgctgcagagcgagcccgagaaccccagcctgcaggagaccagcctgagcgtgcagctgagcaacctgggcaccgtgagaaccctgagaaccaagcagagaatccagccccagaagaccagcgtgtacatcgagctgggcagcgacagcagcgaggacaccgtgaacaaggccacctactgcagcgtgggcgaccaggagctgctgcagatcaccccccagggcaccagagacgagatcagcctggacagcgccaagaaggccgcctgcgagttcagcgagaccgacgtgaccaacaccgagcaccaccagcccagcaacaacgacctgaacaccaccgagaagagagccgccgagagacaccccgagaagtaccagggcgaggccgccagcggctgcgagagcgagaccagcgtgagcgaggactgcagcggcctgagcagccagagcgacatcctgaccacccagcagagagacaccatgcagcacaacctgatcaagctgcagcaggagatggccgagctggaggccgtgctggagcagcacggcagccagcccagcaacagctaccccagcatcatcagcgacagcagcgccctggaggacctgagaaaccccgagcagagcaccagcgagaaggccgtgctgaccagccagaagagcagcgagtaccccatcagccagaaccccgagggcctgagcgccgacaagttcgaggtgagcgccgacagcagcaccagcaagaacaaggagcccggcgtggagagaagcagccccagcaagtgccccagcctggacgacagatggtacatgcacagctgcagcggcagcctgcagaacagaaactaccccagccaggaggagctgatcaaggtggtggacgtggaggagcagcagctggaggagagcggcccccacgacctgaccgagaccagctacctgcccagacaggacctggagggcaccccctacctggagagcggcatcagcctgttcagcgacgaccccgagagcgaccccagcgaggacagagcccccgagagcgccagagtgggcaacatccccagcagcaccagcgccctgaaggtgccccagctgaaggtggccgagagcgcccagagccccgccgccgcccacaccaccgacaccgccggctacaacgccatggaggagagcgtgagcagagagaagcccgagctgaccgccagcaccgagagagtgaacaagagaatgagcatggtggtgagcggcctgacccccgaggagttcatgctggtgtacaagttcgccagaaagcaccacatcaccctgaccaacctgatcaccgaggagaccacccacgtggtgatgaagaccgacgccgagttcgtgtgcgagagaaccctgaagtacttcctgggcatcgccggcggcaagtgggtggtgagctacttctgggtgacccagagctag

SEQ ID NO: 171746 - protein, 1624 aa, Artificial Sequence
  derived and/or modified sequence
MDLSALRVEEVQNVINAMQKILECPICLELIKEPVSTKCDHIFCKFCMLKLLNQKKGPSQCPLCKNDITKRSLQESTRFSQLVEELLKIICAFQLDTGLEYANSYNFAKKENNSPEHLKDEVSIIQSMGYRNRAKRLLQSEPENPSLQETSLSVQLSNLGTVRTLRTKQRIQPQKTSVYIELGSDSSEDTVNKATYCSVGDQELLQITPQGTRDEISLDSAKKAACEFSETDVTNTEHHQPSNNDLNTTEKRAAERHPEKYQGSSVSNLHVEPCGTNTHASSLQHENSSLLLTKDRMNVEKAEFCNKSKQPGLARSQHNRWAGSKETCNDRRTPSTEKKVDLNADPLCERKEWNKQKLPCSENPRDTEDVPWITLNSSIQKVNEWFSRSDELLGSDDSHDGESESNAKVADVLDVLNEVDEYSGSSEKIDLLASDPHEALICKSERVHSKSVESNIEDKIFGKTYRKKASLPNLSHVTENLIIGAFVTEPQIIQERPLTNKLKRKRRPTSGLHPEDFIKKADLAVQKTPEMINQGTNQTEQNGQVMNITNSGHENKTKGDSIQNEKNPNPIESLEKESAFKTKAEPISSSISNMELELNIHNSKAPKKNRLRRKSSTRHIHALELVVSRNLSPPNCTELQIDSCSSSEEIKKKKYNQMPVRHSRNLQLMEGKEPATGAKKSNKPNEQTSKRHDSDTFPELKLTNAPGSFTKCSNTSELKEFVNPSLPREEKEEKLETVKVSNNAEDPKDLMLSGERVLQTERSVESSSISLVPGTDYGTQESISLLEVSTLGKAKTEPNKCVSQCAAFENPKGLIHGCSKDNRNDTEGFKYPLGHEVNHSRETSIEMEESELDAQYLQNTFKVSKRQSFAPFSNPGNAEEECATFSAHSGSLKKQSPKVTFECEQKEENQGKNESNIKPVQTVNITAGFPVVGQKDKPVDNAKCSIKGGSRFCLSSQFRGNETGLITPNKHGLLQNPYRIPPLFPIKSFVKTKCKKNLLEENFEEHSMSPEREMGNENIPSTVSTISRNNIRENVFKEASSSNINEVGSSTNEVGSSINEIGSSDENIQAELGRNRGPKLNAMLRLGVLQPEVYKQSLPGSNCKHPEIKKQEYEEVVQTVNTDFSPYLISDNLEQPMGSSHASQVCSETPDDLLDDGEIKEDTSFAENDIKESSAVFSKSVQKGELSRSPSPFTHTHLAQGYRRGAKKLESSEENLSSEDEELPCFQHLLFGKVNNIPSQSTRHSTVATECLSKNTEENLLSLKNSLNDCSNQVILAKASQEHHLSEETKCSASLFSSQCSELEDLTANTNTQDPFLIGSSKQMRHQSESQGVGLSDKELVSDDEERGTGLEENNQEEQSMDSNLGEAASGCESETSVSEDCSGLSSQSDILTTQQRDTMQHNLIKLQQEMAELEAVLEQHGSQPSNSYPSIISDSSALEDLRNPEQSTSEKDAEFVCERTLKYFLGIAGGKWVVSYFWVTQSIKERKMLNEHDFEVRGDVVNGRNHQGPKRARESQDRKIFRGLEICCYGPFTNMPTDQLEWMVQLCGASVVKELSSFTLGTGVHPIVVVQPDAWTEDNGFHAIGQMCEAPVVTREWVLDSVALYQCQELDTYLIPQIPHSHY

SEQ ID NO: 171747 - protein, 1884 aa, Artificial Sequence
  derived and/or modified sequence
MDLSALRVEEVQNVINAMQKILECPICLELIKEPVSTKCDHIFCKFCMLKLLNQKKGPSQCPLCKNDITKRSLQESTRFSQLVEELLKIICAFQLDTGLEYANSYNFAKKENNSPEHLKDEVSIIQSMGYRNRAKRLLQSEPENPSLQETSLSVQLSNLGTVRTLRTKQRIQPQKTSVYIELGSDSSEDTVNKATYCSVGDQELLQITPQGTRDEISLDSAKKAACEFSETDVTNTEHHQPSNNDLNTTEKRAAERHPEKYQGSSVSNLHVEPCGTNTHASSLQHENSSLLLTKDRMNVEKAEFCNKSKQPGLARSQHNRWAGSKETCNDRRTPSTEKKVDLNADPLCERKEWNKQKLPCSENPRDTEDVPWITLNSSIQKVNEWFSRSDELLGSDDSHDGESESNAKVADVLDVLNEVDEYSGSSEKIDLLASDPHEALICKSERVHSKSVESNIEDKIFGKTYRKKASLPNLSHVTENLIIGAFVTEPQIIQERPLTNKLKRKRRPTSGLHPEDFIKKADLAVQKTPEMINQGTNQTEQNGQVMNITNSGHENKTKGDSIQNEKNPNPIESLEKESAFKTKAEPISSSISNMELELNIHNSKAPKKNRLRRKSSTRHIHALELVVSRNLSPPNCTELQIDSCSSSEEIKKKKYNQMPVRHSRNLQLMEGKEPATGAKKSNKPNEQTSKRHDSDTFPELKLTNAPGSFTKCSNTSELKEFVNPSLPREEKEEKLETVKVSNNAEDPKDLMLSGERVLQTERSVESSSISLVPGTDYGTQESISLLEVSTLGKAKTEPNKCVSQCAAFENPKGLIHGCSKDNRNDTEGFKYPLGHEVNHSRETSIEMEESELDAQYLQNTFKVSKRQSFAPFSNPGNAEEECATFSAHSGSLKKQSPKVTFECEQKEENQGKNESNIKPVQTVNITAGFPVVGQKDKPVDNAKCSIKGGSRFCLSSQFRGNETGLITPNKHGLLQNPYRIPPLFPIKSFVKTKCKKNLLEENFEEHSMSPEREMGNENIPSTVSTISRNNIRENVFKEASSSNINEVGSSTNEVGSSINEIGSSDENIQAELGRNRGPKLNAMLRLGVLQPEVYKQSLPGSNCKHPEIKKQEYEEVVQTVNTDFSPYLISDNLEQPMGSSHASQVCSETPDDLLDDGEIKEDTSFAENDIKESSAVFSKSVQKGELSRSPSPFTHTHLAQGYRRGAKKLESSEENLSSEDEELPCFQHLLFGKVNNIPSQSTRHSTVATECLSKNTEENLLSLKNSLNDCSNQVILAKASQEHHLSEETKCSASLFSSQCSELEDLTANTNTQDPFLIGSSKQMRHQSESQGVGLSDKELVSDDEERGTGLEENNQEEQSMDSNLGEAASGCESETSVSEDCSGLSSQSDILTTQQRDTMQHNLIKLQQEMAELEAVLEQHGSQPSNSYPSIISDSSALEDLRNPEQSTSEKDSHIHGQRNNSMFSKRPREHISVLTSQKSSEYPISQNPEGLSADKFEVSADSSTSKNKEPGVERSSPSKCPSLDDRWYMHSCSGSLQNRNYPSQEELIKVVDVEEQQLEESGPHDLTETSYLPRQDLEGTPYLESGISLFSDDPESDPSEDRAPESARVGNIPSSTSALKVPQLKVAESAQSPAAAHTTDTAGYNAMEESVSREKPELTASTERVNKRMSMVVSGLTPEEFMLVYKFARKHHITLTNLITEETTHVVMKTDAEFVCERTLKYFLGIAGGKWVVSYFWVTQSIKERKMLNEHDFEVRGDVVNGRNHQGPKRARESQDRKIFRGLEICCYGPFTNMPTDQLEWMVQLCGASVVKELSSFTLGTGVHPIVVVQPDAWTEDNGFHAIGQMCEAPVVTREWVLDSVALYQCQELDTYLIPQIPHSHY

SEQ ID NO: 171748 - protein, 63 aa, Artificial Sequence
  derived and/or modified sequence
MDLSALRVEEVQNVINAMQKILECPICLELIKEPVSTKCDHIFCKFCMLKLLNQKKGPSQCPL

SEQ ID NO: 171749 - protein, 649 aa, Artificial Sequence
  derived and/or modified sequence
MDLSALRVEEVQNVINAMQKILECPICLELIKEPVSTKCDHIFCKFCMLKLLNQKKGPSQCPLCKNDITKRSLQESTRFSQLVEELLKIICAFQLDTGLEYANSYNFAKKENNSPEHLKDEVSIIQSMGYRNRAKRLLQSEPENPSLQETSLSVQLSNLGTVRTLRTKQRIQPQKTSVYIELGSDSSEDTVNKATYCSVGDQELLQITPQGTRDEISLDSAKKAACEFSETDVTNTEHHQPSNNDLNTTEKRAAERHPEKYQGSSVSNLHVEPCGTNTHASSLQHENSSLLLTKDRMNVEKAEFCNKSKQPGLARSQHNRWAGSKETCNDRRTPSTEKKVDLNADPLCERKEWNKQKLPCSENPRDTEDVPWITLNSSIQKVNEWFSRSDELLGSDDSHDGESESNAKVADVLDVLNEVDEYSGSSEKIDLLASDPHEALICKSERVHSKSVESNIEDKIFGKTYRKKASLPNLSHVTENLIIGAFVTEPQIIQERPLTNKLKRKRRPTSGLHPEDFIKKADLAVQKTPEMINQGTNQTEQNGQVMNITNSGHENKTKGDSIQNEKNPNPIESLEKESAFKTKAEPISSSISNMELELNIHNSKAPKKNRLRRKSSTRHIHALELVVSRNLSPPNCTELQIDSCSSSEE

SEQ ID NO: 171750 - protein, 1885 aa, Artificial Sequence
  derived and/or modified sequence
MDLSALRVEEVQNVINAMQKILECPICLELIKEPVSTKCDHIFCKFCMLKLLNQKKGPSQCPLCKNDITKRSLQESTRFSQLVEELLKIICAFQLDTGLEYANSYNFAKKENNSPEHLKDEVSIIQSMGYRNRAKRLLQSEPENPSLQETSLSVQLSNLGTVRTLRTKQRIQPQKTSVYIELGSDSSEDTVNKATYCSVGDQELLQITPQGTRDEISLDSAKKAACEFSETDVTNTEHHQPSNNDLNTTEKRAAERHPEKYQGSSVSNLHVEPCGTNTHASSLQHENSSLLLTKDRMNVEKAEFCNKSKQPGLARSQHNRWAGSKETCNDRRTPSTEKKVDLNADPLCERKEWNKQKLPCSENPRDTEDVPWITLNSSIQKVNEWFSRSDELLGSDDSHDGESESNAKVADVLDVLNEVDEYSGSSEKIDLLASDPHEALICKSERVHSKSVESNIEDKIFGKTYRKKASLPNLSHVTENLIIGAFVTEPQIIQERPLTNKLKRKRRPTSGLHPEDFIKKADLAVQKTPEMINQGTNQTEQNGQVMNITNSGHENKTKGDSIQNEKNPNPIESLEKESAFKTKAEPISSSISNMELELNIHNSKAPKKNRLRRKSSTRHIHALELVVSRNLSPPNCTELQIDSCSSSEEIKKKKYNQMPVRHSRNLQLMEGKEPATGAKKSNKPNEQTSKRHDSDTFPELKLTNAPGSFTKCSNTSELKEFVNPSLPREEKEEKLETVKVSNNAEDPKDLMLSGERVLQTERSVESSSISLVPGTDYGTQESISLLEVSTLGKAKTEPNKCVSQCAAFENPKGLIHGCSKDNRNDTEGFKYPLGHEVNHSRETSIEMEESELDAQYLQNTFKVSKRQSFAPFSNPGNAEEECATFSAHSGSLKKQSPKVTFECEQKEENQGKNESNIKPVQTVNITAGFPVVGQKDKPVDNAKCSIKGGSRFCLSSQFRGNETGLITPNKHGLLQNPYRIPPLFPIKSFVKTKCKKNLLEENFEEHSMSPEREMGNENIPSTVSTISRNNIRENVFKEASSSNINEVGSSTNEVGSSINEIGSSDENIQAELGRNRGPKLNAMLRLGVLQPEVYKQSLPGSNCKHPEIKKQEYEEVVQTVNTDFSPYLISDNLEQPMGSSHASQVCSETPDDLLDDGEIKEDTSFAENDIKESSAVFSKSVQKGELSRSPSPFTHTHLAQGYRRGAKKLESSEENLSSEDEELPCFQHLLFGKVNNIPSQSTRHSTVATECLSKNTEENLLSLKNSLNDCSNQVILAKASQEHHLSEETKCSASLFSSQCSELEDLTANTNTQDPFLIGSSKQMRHQSESQGVGLSDKELVSDDEERGTGLEENNQEEQSMDSNLGEAASGCESETSVSEDCSGLSSQSDILTTQQRDTMQHNLIKLQQEMAELEAVLEQHGSQPSNSYPSIISDSSALEDLRNPEQSTSEKDSHIHGQRNNSMFSKRPREHISAVLTSQKSSEYPISQNPEGLSADKFEVSADSSTSKNKEPGVERSSPSKCPSLDDRWYMHSCSGSLQNRNYPSQEELIKVVDVEEQQLEESGPHDLTETSYLPRQDLEGTPYLESGISLFSDDPESDPSEDRAPESARVGNIPSSTSALKVPQLKVAESAQSPAAAHTTDTAGYNAMEESVSREKPELTASTERVNKRMSMVVSGLTPEEFMLVYKFARKHHITLTNLITEETTHVVMKTDAEFVCERTLKYFLGIAGGKWVVSYFWVTQSIKERKMLNEHDFEVRGDVVNGRNHQGPKRARESQDRKIFRGLEICCYGPFTNMPTDQLEWMVQLCGASVVKELSSFTLGTGVHPIVVVQPDAWTEDNGFHAIGQMCEAPVVTREWVLDSVALYQCQELDTYLIPQIPHSHY

SEQ ID NO: 171751 - protein, 98 aa, Artificial Sequence
  derived and/or modified sequence
MDLSALRVEEVQNVINAMQKILECPICLELIKEPVSTKCDHIFCKSLQESTRFSQLVEELLKIICAFQLDTGLEYANSYNFAKKENNSPEHLKDEVSI

SEQ ID NO: 171752 - protein, 473 aa, Artificial Sequence
  derived and/or modified sequence
MDLSALRVEEVQNVINAMQKILECPICLELIKEPVSTKCDHIFCKFCMLKLLNQKKGPSQCPLCKNDITKRSLQESTRFSQLVEELLKIICAFQLDTGLEYANSYNFAKKENNSPEHLKDEVSIIQSMGYRNRAKRLLQSEPENPSLQETSLSVQLSNLGTVRTLRTKQRIQPQKTSVYIELGSDSSEDTVNKATYCSVGDQELLQITPQGTRDEISLDSAKKAACEFSETDVTNTEHHQPSNNDLNTTEKRAAERHPEKYQGSSVSNLHVEPCGTNTHASSLQHENSSLLLTKDRMNVEKAEFCNKSKQPGLARSQHNRWAGSKETCNDRRTPSTEKKVDLNADPLCERKEWNKQKLPCSENPRDTEDVPWITLNSSIQKVNEWFSRSDELLGSDDSHDGESESNAKVADVLDVLNEVDEYSGSSEKIDLLASDPHEALICKSERVHSKSVESNIEDKIFGKTYRKKASLPN

SEQ ID NO: 171753 - DNA, 4875 bp, Artificial Sequence
  derived and/or modified sequence
atggatttatctgcccttagggtcgaggaggtgcagaacgtcatcaacgccatgcaaaagatcttggaatgccccatttgcctagaacttatcaaggagccagttagtactaaatgtgaccatattttttgcaagttctgcatgttgaaacttttaaatcagaagaagggtccttctcagtgtccactctgtaaaaacgatattacaaaacgctctctccaggagagcacacgattctcgcaactcgtcgaggagttactgaagatcatttgcgccttccaattagacaccgggctggaatacgcgaacagctacaacttcgccaaaaaggagaataatagtccagagcacctcaaagacgaggtttcaattatacagagcatgggctatagaaatagagcaaagcgtttgttgcaatccgagcctgaaaatccatctctgcaagagacatccctttctgtacagttgtccaacctgggaactgtcaggacactgcgaacaaagcagcgaatacagccgcagaagacatcagtctacatcgagctgggatctgacagctccgaggatactgttaataaagcaacctactgtagtgtgggagatcaggagctgctccagattacccctcaaggcacgcgagatgaaatttccttagactctgctaaaaaagcggcatgtgagttctccgaaaccgatgtgaccaacactgaacatcaccaacctagcaataatgacctcaatactacggaaaaaagggccgccgagcggcacccagaaaagtatcaagggagctctgtgtctaacctacatgtggaaccatgtggaactaacacacatgcctcctccctccaacacgagaactcatccctgctgttgacaaaggaccggatgaatgtggagaaggccgagttttgcaataagtcaaaacaacctggcctcgctcgcagtcagcacaatcgctgggccgggtcgaaggaaacatgtaacgataggcgaacaccaagcacggaaaagaaagtagatctcaacgctgatccactgtgtgagcgaaaggagtggaacaaacagaagcttccttgcagtgagaatccccgagacaccgaggatgtgccttggatcaccttgaactcaagcatacagaaggtcaacgaatggttctccaggagcgacgagctcctgggcagcgatgactcccacgacggtgagtccgagagcaacgctaaggtagccgacgtgttggacgtactcaacgaggttgatgagtattcaggttcgtctgagaagatcgatctgctggcctccgaccctcatgaagccctcatctgcaaaagtgaacgcgtgcattcaaaatccgtggaatccaatatcgaagacaaaatctttggaaaaacttacagaaagaaggcaagtctgcccaatctttcccacgttactgagaacctgatcatcggggcatttgttacggagccccagattatacaggaacggcccctgacgaataaacttaagcggaagagacggccaacttctgggctgcatcccgaggactttatcaagaaagctgacttagcggtgcagaaaacacccgaaatgatcaaccagggcaccaatcagaccgagcagaatggtcaggtaatgaatattactaattccggccatgagaataaaacgaaaggcgacagtatccagaatgagaagaatcctaatcccattgaatccctggaaaaagagagtgcctttaagacaaaagctgagcccatctctagttcaatctctaacatggagctggagttgaacatccataattccaaagcccccaaaaagaatcgtctcagacggaaatcctcaaccagacatatacacgccttggagttagtcgtaagtagaaatctttccccacccaattgtaccgaactgcaaatcgacagctgctcatcatccgaggaaatcaagaagaaaaaatacaaccaaatgcccgtgagacattcacgaaatcttcaactcatggaggggaaggagccagctacaggagctaagaagtccaacaagcccaatgaacagacatccaagcgccacgactcagatacattccccgagcttaagttaacaaacgccccaggcagtttcacaaagtgctctaacacctccgagctgaaagaattcgttaacccctctctccctagggaggaaaaggaagaaaaactggaaacagtcaaggtgtcaaacaacgcagaagaccccaaggaccttatgctgagcggcgagcgcgtgttgcagaccgagcgctctgtggaaagctcttctattagtttagtgcccgggactgactatggcacacaggagagcatttctcttctagaggtctctactctgggaaaggctaaaacagaacctaataagtgtgtgtcacaatgcgccgcattcgagaaccccaagggtctaattcatggttgttctaaggacaatcgaaacgatactgaaggcttcaaataccccttgggccacgaggtgaatcactcccgcgagacatccatcgagatggaggagagcgaacttgacgcacagtacctgcagaacacattcaaagtgtcaaaacggcaatcatttgccccctttagtaacccgggaaatgccgaagaagagtgtgccacattttctgcccactccgggagtctgaagaagcagagtcctaaggtaacttttgagtgcgagcagaaggaggaaaatcaggggaagaatgagagcaacattaaacctgttcagacggtgaatataaccgcaggctttccggtcgtgggccaaaaggacaagcccgttgataacgccaagtgttccatcaagggtggatcacggttttgtcttagcagccagtttcgggggaacgagactgggctcattactcctaacaaacacgggctactccagaacccatatagaatcccccctctgtttccaataaagtccttcgtgaagaccaaatgcaaaaaaaacctcctggaagaaaacttcgaagagcactcaatgtctcctgaacgagagatgggaaatgagaatattcctagcactgtgtccaccatcagccgaaacaacattcgagagaacgtttttaaagaggccagcagctcaaacatcaacgaggttggctcttcaacaaatgaagtgggaagcagtatcaacgagatcgggtcttccgatgagaacattcaagctgaactcggccgtaaccgcggccctaaactgaacgccatgctcaggcttggcgtcctccagcccgaggtgtacaaacagagcctaccaggttccaattgtaaacaccccgagataaaaaagcaggagtacgaagaggtggtgcagaccgtgaacaccgacttttctccctacctcatctctgacaatctcgaacagcctatgggctccagccacgccagtcaggtgtgctctgaaacgcccgacgatctccttgacgatggagagattaaggaggacacaagtttcgcggagaatgacatcaaagagagcagtgccgtcttcagtaaaagcgtgcagaagggcgagctcagtcgatccccgagtccattcactcacacgcacctcgcccagggatatcgacgaggtgcaaaaaaactggaaagttctgaagagaatctgtcctcggaagatgaggagctcccatgttttcaacacttgttgtttggcaaggtcaataatatcccaagtcagtcaacacgccacagcacagtggctactgagtgcctttccaagaacacagaggagaacctgctgagcctgaagaattccctcaatgactgctcaaatcaggtaattctggccaaggcgagccaggaacatcacctgagcgaggaaaccaaatgtagtgccagtttgttcagctcacagtgttcagagttagaggatctgaccgccaataccaacacacaggatcctttcctcatcggcagctccaagcagatgcgacatcagtccgaaagccagggtgttggcctcagtgataaggaactcgtgtccgacgacgaggagaggggtacggggctggaagagaataatcaggaggaacagagtatggactctaacctgggggaagctgcttcagggtgtgaatccgagacatctgtgtccgaagattgttcagggctgtcatctcagtctgacattttgacgacacagcagcgcgataccatgcagcacaacctgatcaagctgcagcaggagatggcagaactggaagccgtccttgagcagcatggctcccagccctcaaacagctatccctctatcatttcagactcttctgccctggaagacttaagaaaccctgaacagagcacctccgagaaagatgctgagtttgtatgcgagcggaccctaaaatatttcctaggcatcgcaggcggcaagtgggttgtgtcctacttctgggtcacacaaagtataaaagagaggaagatgttgaacgagcatgatttcgaagtccgcggagatgttgtgaacggccgtaatcaccaaggtccaaagagagcaagagaaagtcaggacaggaaaatttttcgtggtctggaaatttgctgttacggaccctttacaaacatgccaactgaccaactggagtggatggtccagctctgcggagccagtgtagttaaggaattgagcagctttactctgggcactggtgtgcatcctattgtcgtcgtccagcctgacgcctggaccgaggacaatgggttccatgcgatcgggcagatgtgcgaagctccagtggttactcgagaatgggtgctagattctgttgcactctaccaatgccaggagctcgatacttacctgataccacagatccctcattcacactactag

SEQ ID NO: 171754 - DNA, 5655 bp, Artificial Sequence
  derived and/or modified sequence
atggatctaagtgcactcagggtggaagaggttcagaatgtgattaatgctatgcagaaaattctggagtgtccaatatgtcttgagcttattaaagagcccgtttcaactaaatgcgaccacatattttgtaaattttgtatgctgaagctgttgaatcaaaagaaaggcccttctcaatgccctctttgtaaaaatgacataacgaaacgctccctgcaggagtctactcgctttagtcagttggtggaggagcttctgaagatcatctgtgctttccagctggacacaggattagaatacgctaatagctataatttcgccaaaaaggaaaacaactcccctgaacatctgaaggatgaggttagcattattcagagtatgggatatcgaaatcgagccaaaagattgctgcagtctgagcccgaaaatccctccctccaagaaacttctttgtccgtccagctgtctaacttgggaaccgtgagaactctgaggacgaagcaaaggattcagcctcagaaaacatctgtatacattgagttgggaagcgactcttccgaagacaccgtcaataaagccacctactgctcggtgggcgatcaggagctgttgcagatcacccctcagggcacacgggacgaaatctccctcgattccgctaagaaagcagcgtgcgagttttccgagaccgacgttacaaacactgaacaccatcaaccatcaaataacgatctcaataccaccgagaaacgcgctgcagagcggcatcctgagaagtaccagggtagctctgtctctaacctgcacgtagaaccatgcggcacaaacacccatgccagttctctccagcatgaaaactcttcactcctcctaacaaaagatcgtatgaatgtcgaaaaggcggagttctgcaacaagagtaagcagcctggcctggcgaggagccagcataacaggtgggctggcagtaaagaaacttgtaatgaccgcagaaccccatccactgagaagaaggtcgatttgaacgctgaccctctgtgtgaacgcaaagaatggaataagcagaagcttccctgttcagaaaatcccagggacactgaagacgttccctggattacactcaattcctcgatccagaaagtaaatgaatggttttcacgctcagacgagctgctagggtcagatgactcccacgacggggaatccgaatctaatgccaaggtagctgatgtgctggacgtgctgaacgaggtcgacgagtactcagggtcaagcgaaaaaattgatctcctcgccagtgacccccatgaagcactgatctgtaagtctgagagggtgcacagtaagtcggtagagtccaatatcgaggacaagatctttggaaagacctaccgcaagaaggcgtcattgcctaatttgtcccatgttacggaaaacttgattattggagcgttcgtcacagagccacagataatccaggagaggccactgaccaacaagcttaagcggaagcgcagacccacaagcggcctccatcctgaggactttatcaaaaaggcagatctggcggtccagaagacacccgagatgattaaccagggaaccaaccagaccgagcagaacggccaggttatgaacatcaccaatagcgggcatgagaataagaccaaaggcgactccatccagaacgaaaagaatcccaaccctattgagtccctggagaaggaatctgcttttaagacaaaggcggagccaataagctcaagcatttctaatatggaactggagctgaacattcacaacagtaaagccccaaagaagaataggctgagaagaaaaagtagcaccagacacattcacgccctggaactggtcgtgtcacgtaatctgagcccacctaattgcaccgaactgcagatcgattcctgttcatcatccgaagagataaaaaagaagaagtacaaccagatgccagtacggcattctaggaaccttcagctcatggagggcaaggaaccagctaccggagctaaaaagtctaacaagccaaatgaacagacttctaagcgacacgattccgacacctttcccgagcttaaactcaccaacgcccctgggagctttactaaatgctctaatacctcagagctcaaagagtttgttaaccctagcctgccaagggaagagaaggaagagaagttggaaaccgtgaaggtgagtaacaatgccgaggatcccaaggacctcatgttgtctggagaacgggtcctacaaacggagcggagtgtggaatcgagtagtattagcctcgtcccaggcacggattacggaacacaggaatctatttcacttttagaagttagcacactaggcaaggcaaaaactgagcccaacaagtgcgtctcccagtgtgccgctttcgagaaccctaagggactcattcacggatgcagcaaggacaaccggaatgacacagagggtttcaagtaccctctcggtcacgaggttaaccactccagagagacgtccatcgaaatggaggagtcagagctggacgcacagtacctgcagaatacatttaaggtctccaagcgacaatccttcgctcctttttcaaacccaggaaacgcagaggaagagtgtgctaccttttctgcccattcgggcagcttgaagaagcagagtcctaaagtgacattcgagtgtgagcaaaaagaggaaaatcaaggtaaaaacgaaagtaatatcaagcccgtacagaccgtcaacatcaccgcagggtttcctgtagttggtcaaaaggataagccagtcgacaatgctaagtgtagcatcaaagggggaagcagattctgtctctcttctcagtttaggggaaatgagacaggtttgattacccctaacaagcacggacttctgcagaacccctaccggataccacctcttttccctataaaaagcttcgtgaaaactaagtgcaagaagaaccttctggaagagaacttcgaagagcactccatgagccctgagagggagatgggaaacgagaacattccttctactgtatcaacgatttccagaaataacatacgggagaatgtttttaaagaggccagttcttcaaatatcaatgaggtggggtcttccacaaatgaggtaggcagtagcattaacgaaataggaagttcagacgagaatatccaggccgaactcggtagaaatagaggccccaaacttaacgctatgctgcggctgggcgtcctccagccagaggtgtacaaacagtctttacccgggagtaactgcaaacaccctgagatcaagaagcaggaatacgaagaggtagttcaaaccgtgaataccgatttttctccctatctcatttccgataacctagaacagccaatgggatcctcacatgcctctcaagtgtgtagcgagactcctgacgatcttctggatgacggagagatcaaggaagacaccagtttcgccgagaatgatattaaagaatcctctgctgtcttttcaaaaagcgtgcagaagggggaactctcaaggtccccgtctcccttcacacacacacatctggcccaggggtataggaggggcgccaaaaaactagaaagttccgaggagaacctgagcagcgaggatgaggaactgccatgcttccagcacttactgttcggcaaagtgaacaacattccctcccagtccacccgacactctacagtcgctaccgaatgcctgagtaagaacacagaggagaatctgctctctctcaagaatagtctaaacgactgttcaaatcaggtaatcctggctaaggcctcccaggagcaccacctctccgaggagaccaaatgcagtgcttcattgttttcatcacaatgctctgaattagaagacctcactgctaacacaaatacacaggaccctttcttgattgggagcagtaagcagatgcgacaccagagtgaaagtcagggggtggggctgagtgataaagaactggtgagtgatgacgaggaacgaggcactggtctggaagaaaataaccaggaagaacaaagcatggattcaaatttgggagaagcagccagcggctgcgagtctgaaacatctgtttccgaagactgtagtggcctttccagtcagtcagatattctcactacccaacaaagggacaccatgcaacataaccttatcaagctgcagcaggaaatggccgagctggaagccgtactggagcagcatgggtctcaacctagcaatagctacccttcaatcatatcagattcctcagcactggaagacctgaggaacccagagcagtctacctccgagaaagacagccatattcacggacagagaaacaacagcatgttctccaagcgccctagagaacatatctctgtccttacctctcaaaaatctagcgagtatcccatcagccaaaaccccgagggcctatcggcagacaagtttgaggtgtcggctgattcctccactagcaagaacaaagagcctggtgtggagcggagtagtccctccaagtgtcccagtctggacgatcgctggtacatgcattcatgctctggctctctgcagaatcggaactatccctcacaggaagagctgataaaggtggtagatgtcgaggagcaacagctcgaagaaagcggcccccatgatttgaccgagacatcatatctgcccaggcaggaccttgaggggaccccgtacctggaaagtggaatctcacttttctccgacgaccccgaatccgacccctctgaggaccgggcccccgagagtgctagggtggggaacattccgtcaagcacctcggccctgaaggtcccgcagctgaaagtggctgagagtgcacagtcacccgccgccgcacatacaacagacactgctggctacaatgccatggaggagagcgtgtctcgcgagaagccggagctgacagcctctaccgagcgcgttaataagaggatgagcatggtcgttagcggtctgacccccgaggaattcatgctggtgtacaaattcgctcgcaaacatcacattactttgactaatctgatcacagaggaaaccacacacgtagtgatgaagactgacgccgagttcgtgtgtgagaggaccctgaaatatttcctagggatagccggcggcaagtgggtggtctcatacttttgggttacacagtcaatcaaagaacgaaagatgcttaatgagcatgattttgaggtcagaggtgacgtagttaacggacggaatcatcaaggtccaaaacgcgcccgcgagtcccaggaccgcaaaatattccgtggtctcgagatctgttgctatggcccattcacgaacatgccaaccgaccagctggaatggatggtgcagctctgtggggctagcgtagtgaaagaattgtctagcttcacactggggaccggggtgcatcccatcgtcgtggtgcagcccgacgcatggaccgaagataatggcttccatgcgattggacagatgtgtgaggcacccgtggtgacccgcgagtgggttctagacagcgttgctctctaccagtgccaagagctggatacatacctcattccccagattccgcactcccactactag

SEQ ID NO: 171755 - DNA, 5658 bp, Artificial Sequence
  derived and/or modified sequence
atggatctgtctgcacttcgcgtggaggaagtccaaaatgtcattaatgcgatgcagaagattctagaatgtcctatatgtctagagctgatcaaagaaccagtttcaaccaagtgcgatcatattttctgcaaattttgcatgctgaaactcctcaaccaaaagaaaggccccagccagtgtcccctctgtaaaaatgatatcacaaagaggagtctgcaggaatcaacaaggttttcacagctggtggaagaactgctcaaaatcatttgcgccttccaattagatacaggtttggagtatgcaaactcttacaatttcgctaaaaaggaaaataatagcccggagcatctcaaggacgaggttagcattattcagtccatggggtaccgaaaccgcgccaagcggttgctgcagtccgaacctgagaatccatcactgcaggagacctccctctcggtgcaactttcgaatctgggcactgttcgtaccctcagaaccaaacaacggatccagccgcaaaaaacttcagtgtatatcgagctgggctcggattcctccgaagataccgtgaacaaggccacttattgcagcgtgggcgatcaagagttattgcagattacccctcagggcacacgcgatgagattagccttgacagcgccaagaaagcagcctgcgaattctccgaaacagacgtaactaatacagagcaccatcagccatccaataacgacttaaatactaccgaaaaaagggccgccgagagacatccagagaaataccaagggagcagtgtgtccaacttacacgtcgagccctgtggaaccaatactcacgcaagctctttacaacatgagaactccagcctgcttttgactaaggatcggatgaatgtggaaaaggcagagttctgcaacaagtccaagcagcctggactcgcccggtcccagcataaccgctgggcgggcagtaaggaaacctgcaacgaccgacgaacaccttcgacagagaagaaggtcgacctgaacgccgaccctctctgtgagcgcaaggagtggaataagcagaaacttccttgttctgagaatccacgtgacacagaggacgtgccttggattaccctcaactcaagcattcagaaggttaatgaatggtttagtaggagcgacgaattactcgggtcagacgacagtcatgatggcgagtcagaatcaaacgctaaagttgcagatgtactcgacgtcttgaatgaagtggacgaatatagtggaagctccgagaagattgacctgctcgcatcagatcctcatgaagccctcatttgtaaatcagaaagggtacactctaaaagcgtggagtcaaacattgaggacaagatcttcggcaagacgtatagaaaaaaagcctccctcccgaacctttcccatgtgacagaaaacttgatcattggcgcgtttgtcaccgagccccagatcatccaggagaggcctctgaccaacaagttaaagcggaaacgtcggcctacatcaggcctccatcccgaagacttcataaagaaggcagatctcgctgtgcagaagacacctgagatgatcaatcaggggacgaaccagacagagcagaatggacaggtgatgaacataacgaactcagggcatgagaacaagaccaaaggtgacagcatccagaacgagaaaaatcccaaccccatcgaatccctcgagaaagagtcagcattcaagaccaaagctgagcctattagtagcagtatcagtaatatggaactcgagttgaatatccataacagtaaagcccctaaaaagaacagactgagacgcaaatcatctactcgtcacatccatgcactggaactggttgtgtcccggaacctttcgccacccaactgcacagaactgcagatcgattcatgctcaagttctgaagaaatcaaaaagaaaaagtacaaccagatgccggtccgccactcccgtaatctgcagctcatggaaggcaaggaaccagcaaccggggccaagaaatcaaataagccaaacgaacagacatccaagcgtcacgactccgacaccttccccgagctgaagctcactaatgctcccggaagtttcactaagtgctccaatacctcagaactgaaagagttcgtgaatccgtccctcccacgagaggaaaaggaagaaaagctagagacagtcaaagtatccaataacgccgaggatcccaaggatctgatgctgtctggcgagcgggtgctccaaaccgagagaagcgtcgaatctagcagcatcagtttggttccgggcactgattacggaactcaggagtcaattagccttctggaagtgagtacactggggaaagctaaaaccgagccaaataaatgtgtgtcacaatgtgccgcctttgagaaccccaaagggctcatccatggttgttcaaaggacaaccgcaatgatacagaagggtttaagtatccactggggcacgaagtgaatcactctcgcgaaactagtatcgaaatggaggaatccgaactggatgctcagtacctgcagaacacgtttaaagtaagcaagcggcagagcttcgctccattcagcaaccccggaaacgcggaagaagagtgcgcaaccttcagcgcacacagcggctcccttaaaaagcagagtccgaaagtgactttcgaatgtgagcagaaggaggagaatcagggtaagaatgagtctaacattaaaccagtgcagaccgtgaatattacggccggcttccctgtggtcggccagaaggataaacctgtcgacaacgcgaagtgttctataaaggggggctctcggttctgtctctcctctcagtttcgagggaatgagactggtctcatcacccctaacaagcacgggttgttgcagaatccttaccggataccacctctgtttcctatcaagtcctttgtgaagactaagtgcaagaagaatttgctcgaagagaactttgaggagcatagcatgtctccagagagagagatggggaatgagaacattccaagtacagtatcaacaatctccaggaacaatattagggaaaatgtcttcaaggaagctagcagctccaatataaatgaagtgggtagttcgaccaatgaagtcggcagctcaattaatgaaattggatctagtgatgagaatatccaggcagagctcggccgcaatcgtggcccgaagctcaacgccatgcttcgcctgggtgtgttgcagcccgaggtgtacaagcagagcctccccggctcaaactgtaaacacccagagatcaaaaagcaggagtacgaggaagtagtacaaaccgtgaacactgattttagcccctatctgatctctgataacctggaacagccaatgggtagctcccatgcgtctcaggtgtgtagtgaaacacctgatgacctgttagacgatggagagataaaggaggacacttctttcgccgagaacgacatcaaggagtcctccgcagtgttcagcaagagtgtccagaagggtgaactctcccgctccccatctcctttcacccacacacacttagctcagggctaccgccgaggagcaaagaagctggagagcagcgaggagaacctatcgagtgaggatgaggagctgccctgctttcagcatctgctcttcggaaaagtgaataacatcccatcacagtcgaccaggcactccaccgtggctacagagtgtctctctaagaacactgaagaaaatcttcttagtctgaagaatagtctcaacgattgtagcaaccaggtaatcctagctaaggcttcccaggagcatcatctgtcagaagaaaccaaatgtagcgcaagtctgttcagctctcagtgttcagaactggaagaccttactgccaatacaaatacccaggatccgtttcttatcggctcctctaaacagatgaggcatcagagcgagagccaaggtgtgggcttaagcgataaggagctagtgtcagacgacgaggaaagaggaaccggcttggaagaaaataaccaagaggagcaaagtatggattccaaccttggggaggccgcttcaggctgtgagtcagagacatctgtgtcagaagactgtagcggtctcagtagccaaagtgatatactgacaacccaacagagagacaccatgcaacacaacttgattaaactccagcaggaaatggcagagcttgaggcagtgttagaacagcatggaagccaaccatccaacagctacccttctattatttccgacagcagtgccttagaagacctgaggaaccccgagcaatccactagtgaaaaggattctcatattcacgggcaacgcaacaattcaatgttcagcaagcggccaagagagcatataagcgccgtccttacgtcccagaagagttctgagtatccaatcagccagaatccagagggcctgagtgcggacaaattcgaggtgtccgcagactcatccaccagtaagaataaagagccaggcgtggaaaggagttctcctagtaaatgcccttctttggacgaccgatggtacatgcatagctgcagcgggtccttacaaaatagaaactacccgagtcaggaagagcttattaaggtcgtcgatgtcgaagaacaacaactggaagagagtgggccacacgacttaaccgagacaagttacttgccccgccaggacctggagggtaccccttacctcgagagcggaatatccctgttctctgatgaccccgaaagtgatccatcagaagatagggccccagaatccgcacgggtgggcaatatcccttcctctactagcgcgctgaaagttccccagcttaaggtggccgaaagtgcccagtcacccgctgccgcacataccaccgacacagccgggtacaacgcaatggaggagtctgtgtccagagaaaaacccgagttgacggctagcacagagagagtgaacaagagaatgtctatggtggtcagcggactaacacccgaggagttcatgctggtctataaatttgctagaaaacatcacattaccctcactaatcttatcacagaagagaccacacatgtggtgatgaaaactgacgctgagtttgtctgtgagagaactctgaagtattttctcgggatcgccgggggcaaatgggtggtgtcctatttctgggtcacccaatccattaaagagcggaagatgctgaacgagcatgactttgaggtccgtggggacgttgtcaatgggcggaatcaccagggtcccaagagagctagggaatcccaggaccgcaagatttttcgcggactggagatatgttgctatggtccattcacaaatatgccgacagaccagctggaatggatggtgcagctgtgcggagcttctgttgtgaaggaactgtcctctttcacccttggaactggcgtgcatccaatcgtggtggtgcagcccgacgcctggaccgaggacaatggcttccacgctattgggcagatgtgcgaggcccccgtcgtcacgagagaatgggtgctcgattccgtcgcattgtatcagtgtcaggaattggacacttatcttattccacagattccacatagccattattag

SEQ ID NO: 171756 - DNA, 4875 bp, Artificial Sequence
  derived and/or modified sequence
atggacctgagcgccctgcgggtggaggaggtgcagaatgtcatcaatgccatgcagaagatcctggagtgccccatctgcctggagctgatcaaggagcctgtgtccaccaagtgtgaccacatcttctgcaagttctgcatgctgaagctgctgaaccagaagaagggccccagccagtgccccctgtgcaagaatgacatcaccaagaggagcctgcaggagagcacccgcttcagccagctggtggaggagctgctgaagatcatctgtgccttccagctggacaccggcctggagtatgccaacagctacaactttgccaagaaggagaacaacagccctgagcacctgaaggatgaggtgtccatcatccagagcatgggctacagaaacagagccaagaggctgctgcagagcgagcctgagaaccccagcctgcaggagaccagcctgtctgtgcagctgagcaacctgggcaccgtgaggaccctgcggaccaagcagaggatccagccccagaagacctctgtgtacatcgagctgggcagtgacagcagcgaggacacagtgaacaaggccacctactgcagcgtgggggaccaggagctgctgcagatcaccccccagggcaccagagatgagatcagcctggacagcgccaagaaggccgcctgtgagttcagcgagacagatgtgaccaacacagagcaccaccagcccagcaacaatgacctgaacaccacagagaagagagctgctgagcggcaccctgagaagtaccagggcagctctgtgagcaacctgcacgtggagccctgtggcaccaacacccacgccagcagcctgcagcacgagaacagcagcctgctgctgaccaaggacaggatgaatgtggagaaggccgagttctgcaacaagagcaagcagcccggcctggcccggagccagcacaaccgctgggccggcagcaaggagacctgcaatgacaggaggacccccagcacagagaagaaggtggacctgaatgctgaccccctgtgtgagaggaaggagtggaacaagcagaagctgccctgcagcgagaacccccgggacacagaagatgtgccctggatcaccctgaacagcagcatccagaaggtgaatgagtggttcagcagaagtgatgagctgctgggcagtgatgacagccatgatggagagagcgagagcaatgccaaggtggctgatgtgctggatgtgctgaatgaggtggatgagtacagcggcagcagcgagaagattgacctgctggccagtgacccccatgaggccctgatctgcaagtctgagcgggtgcacagcaagtctgtggagagcaacatcgaggacaagatctttgggaagacctacaggaagaaggccagcctgcccaacctgagccacgtgacagaaaatctcatcattggagcctttgtgacagagccccagatcatccaggagcggcccctgaccaacaagctgaagaggaagaggcggcccaccagcggcctgcaccctgaggacttcatcaagaaggctgacctggccgtgcagaagaccccagagatgatcaaccagggcaccaaccagacagagcagaatggccaggtgatgaacatcaccaacagcggccacgagaacaagaccaagggggacagcatccagaatgagaagaaccccaaccccatcgagagcctggagaaggagagcgccttcaagaccaaggccgagcccatcagcagcagcatcagcaacatggagctggagctgaacatccacaacagcaaggcccccaagaagaaccggctgcggaggaagagcagcaccaggcacatccacgccctggagctggtggtgtccaggaacctgagcccccccaactgcacagagctgcagattgacagctgcagcagcagcgaggagatcaagaagaagaagtacaaccagatgcctgtgcgccacagcaggaacctgcagctgatggagggcaaggagcccgccaccggggccaagaagagcaacaagcccaatgagcagaccagcaagagacatgacagcgacaccttccctgagctgaagctgaccaatgcccctggcagcttcaccaagtgcagcaacaccagcgagctgaaggagtttgtgaaccccagcctgccccgggaggagaaggaggagaagctggagaccgtgaaggtgagcaacaatgctgaggaccccaaggacctgatgctgtctggagagcgggtgctgcagacagagaggtctgtggagagcagcagcatcagcctggtgcctggaacagattatggcacccaggagagcatcagcctgctggaggtgtccaccctgggcaaggccaagacagagcccaacaagtgtgtgtcccagtgtgccgcctttgagaaccccaagggcctcatccacggctgcagcaaggacaacagaaatgacacagagggcttcaagtaccccctgggccacgaggtgaaccacagccgggagaccagcattgagatggaggagagcgagctggatgcccagtacctgcagaacaccttcaaggtgtccaagaggcagagctttgcccccttcagcaaccctggaaatgctgaggaggagtgtgccaccttcagcgcccacagcggcagcctgaagaagcagagccccaaggtgacctttgaatgtgagcagaaggaggagaaccagggcaagaatgaaagcaacatcaagcctgtgcagacagtgaacatcacagctggcttccctgtggtgggccagaaggacaagcctgtggacaatgccaagtgcagcatcaagggcggcagccgcttctgcctgagcagccagttcagaggaaatgaaacaggcctcatcacccccaacaagcacggcctgctgcagaacccctaccgcatccccccactcttccccatcaagagctttgtgaagaccaagtgcaagaagaacctgctggaggagaactttgaggagcacagcatgagccctgagcgggagatgggaaatgaaaacatccccagcacagtgtccaccatcagcaggaacaacatcagagaaaatgtgttcaaggaggccagcagcagcaacatcaatgaggtgggcagcagcaccaatgaggtgggcagcagcatcaatgaaattggcagcagtgatgagaacatccaggccgagctgggcaggaacagaggccccaagctgaatgccatgctgcggctgggcgtgctgcagcctgaggtgtacaagcagagcctgcccggcagcaactgcaagcaccctgagatcaagaagcaggagtatgaggaggtggtgcagacagtgaacacagacttcagcccctacctgatcagtgacaacctggagcagcccatgggcagcagccacgccagccaggtgtgcagcgagaccccagatgacctgctggatgatggagagatcaaggaggacaccagctttgctgaaaatgacatcaaggagagcagcgctgtgttcagcaagtctgtgcagaagggggagctgagccgcagccccagccccttcacccacacccacctggcccagggctacagaagaggagccaagaagctggagagcagcgaggagaacctgagcagtgaagatgaggagctgccctgcttccagcacctgctgtttgggaaggtgaacaacatccccagccagagcaccaggcacagcacagtggccacagagtgcctgagcaagaacacagaggagaacctgctgagcctgaagaacagcctgaatgactgcagcaaccaggtgatcctggccaaggccagccaggagcaccacctgtctgaggagaccaagtgcagcgccagcctcttcagcagccagtgcagcgagctggaggacctgacagccaacaccaacacccaggaccccttcctgattggcagcagcaagcagatgaggcaccagagcgagagccagggcgtgggcctgagtgacaaggagctggtgtctgatgatgaggagcggggcaccggcctggaggagaacaaccaggaggagcagagcatggacagcaacctgggggaggccgccagcggctgtgagagcgagacctctgtgtctgaggactgcagcggcctgagcagccagagcgacatcctgaccacccagcagagggacaccatgcagcacaacctgatcaagctgcagcaggagatggccgagctggaggccgtgctggagcagcacggcagccagcccagcaacagctaccccagcatcatcagtgacagcagcgccctggaggacctgagaaatcctgagcagagcaccagcgagaaggatgctgagtttgtgtgtgagaggaccctgaagtacttcctgggcattgctgggggcaagtgggtggtgtcctacttctgggtgacccagagcatcaaggagaggaagatgctgaatgaacatgactttgaggtgagaggagatgtggtgaatggaagaaaccaccagggccccaagagggcccgggagagccaggacaggaagatcttccggggcctggagatctgctgctacggccccttcaccaacatgcccacagaccagctggagtggatggtgcagctgtgtggggcctctgtggtgaaggagctgagcagcttcaccctgggcactggagtgcaccccatcgtggtggtgcagccagatgcctggacagaggacaatggcttccacgccatcggccagatgtgtgaggcccctgtggtgacccgggagtgggtgctggacagcgtggccctgtaccagtgccaggagctggacacctacctgatcccccagatcccccacagccactactag

SEQ ID NO: 171757 - DNA, 5655 bp, Artificial Sequence
  derived and/or modified sequence
atggacctgagcgccctgcgggtggaggaggtgcagaatgtcatcaatgccatgcagaagatcctggagtgccccatctgcctggagctgatcaaggagcctgtgtccaccaagtgtgaccacatcttctgcaagttctgcatgctgaagctgctgaaccagaagaagggccccagccagtgccccctgtgcaagaatgacatcaccaagaggagcctgcaggagagcacccgcttcagccagctggtggaggagctgctgaagatcatctgtgccttccagctggacaccggcctggagtatgccaacagctacaactttgccaagaaggagaacaacagccctgagcacctgaaggatgaggtgtccatcatccagagcatgggctacagaaacagagccaagaggctgctgcagagcgagcctgagaaccccagcctgcaggagaccagcctgtctgtgcagctgagcaacctgggcaccgtgaggaccctgcggaccaagcagaggatccagccccagaagacctctgtgtacatcgagctgggcagtgacagcagcgaggacacagtgaacaaggccacctactgcagcgtgggggaccaggagctgctgcagatcaccccccagggcaccagagatgagatcagcctggacagcgccaagaaggccgcctgtgagttcagcgagacagatgtgaccaacacagagcaccaccagcccagcaacaatgacctgaacaccacagagaagagagctgctgagcggcaccctgagaagtaccagggcagctctgtgagcaacctgcacgtggagccctgtggcaccaacacccacgccagcagcctgcagcacgagaacagcagcctgctgctgaccaaggacaggatgaatgtggagaaggccgagttctgcaacaagagcaagcagcccggcctggcccggagccagcacaaccgctgggccggcagcaaggagacctgcaatgacaggaggacccccagcacagagaagaaggtggacctgaatgctgaccccctgtgtgagaggaaggagtggaacaagcagaagctgccctgcagcgagaacccccgggacacagaagatgtgccctggatcaccctgaacagcagcatccagaaggtgaatgagtggttcagcagaagtgatgagctgctgggcagtgatgacagccatgatggagagagcgagagcaatgccaaggtggctgatgtgctggatgtgctgaatgaggtggatgagtacagcggcagcagcgagaagattgacctgctggccagtgacccccatgaggccctgatctgcaagtctgagcgggtgcacagcaagtctgtggagagcaacatcgaggacaagatctttgggaagacctacaggaagaaggccagcctgcccaacctgagccacgtgacagaaaatctcatcattggagcctttgtgacagagccccagatcatccaggagcggcccctgaccaacaagctgaagaggaagaggcggcccaccagcggcctgcaccctgaggacttcatcaagaaggctgacctggccgtgcagaagaccccagagatgatcaaccagggcaccaaccagacagagcagaatggccaggtgatgaacatcaccaacagcggccacgagaacaagaccaagggggacagcatccagaatgagaagaaccccaaccccatcgagagcctggagaaggagagcgccttcaagaccaaggccgagcccatcagcagcagcatcagcaacatggagctggagctgaacatccacaacagcaaggcccccaagaagaaccggctgcggaggaagagcagcaccaggcacatccacgccctggagctggtggtgtccaggaacctgagcccccccaactgcacagagctgcagattgacagctgcagcagcagcgaggagatcaagaagaagaagtacaaccagatgcctgtgcgccacagcaggaacctgcagctgatggagggcaaggagcccgccaccggggccaagaagagcaacaagcccaatgagcagaccagcaagagacatgacagcgacaccttccctgagctgaagctgaccaatgcccctggcagcttcaccaagtgcagcaacaccagcgagctgaaggagtttgtgaaccccagcctgccccgggaggagaaggaggagaagctggagaccgtgaaggtgagcaacaatgctgaggaccccaaggacctgatgctgtctggagagcgggtgctgcagacagagaggtctgtggagagcagcagcatcagcctggtgcctggaacagattatggcacccaggagagcatcagcctgctggaggtgtccaccctgggcaaggccaagacagagcccaacaagtgtgtgtcccagtgtgccgcctttgagaaccccaagggcctcatccacggctgcagcaaggacaacagaaatgacacagagggcttcaagtaccccctgggccacgaggtgaaccacagccgggagaccagcattgagatggaggagagcgagctggatgcccagtacctgcagaacaccttcaaggtgtccaagaggcagagctttgcccccttcagcaaccctggaaatgctgaggaggagtgtgccaccttcagcgcccacagcggcagcctgaagaagcagagccccaaggtgacctttgaatgtgagcagaaggaggagaaccagggcaagaatgaaagcaacatcaagcctgtgcagacagtgaacatcacagctggcttccctgtggtgggccagaaggacaagcctgtggacaatgccaagtgcagcatcaagggcggcagccgcttctgcctgagcagccagttcagaggaaatgaaacaggcctcatcacccccaacaagcacggcctgctgcagaacccctaccgcatccccccactcttccccatcaagagctttgtgaagaccaagtgcaagaagaacctgctggaggagaactttgaggagcacagcatgagccctgagcgggagatgggaaatgaaaacatccccagcacagtgtccaccatcagcaggaacaacatcagagaaaatgtgttcaaggaggccagcagcagcaacatcaatgaggtgggcagcagcaccaatgaggtgggcagcagcatcaatgaaattggcagcagtgatgagaacatccaggccgagctgggcaggaacagaggccccaagctgaatgccatgctgcggctgggcgtgctgcagcctgaggtgtacaagcagagcctgcccggcagcaactgcaagcaccctgagatcaagaagcaggagtatgaggaggtggtgcagacagtgaacacagacttcagcccctacctgatcagtgacaacctggagcagcccatgggcagcagccacgccagccaggtgtgcagcgagaccccagatgacctgctggatgatggagagatcaaggaggacaccagctttgctgaaaatgacatcaaggagagcagcgctgtgttcagcaagtctgtgcagaagggggagctgagccgcagccccagccccttcacccacacccacctggcccagggctacagaagaggagccaagaagctggagagcagcgaggagaacctgagcagtgaagatgaggagctgccctgcttccagcacctgctgtttgggaaggtgaacaacatccccagccagagcaccaggcacagcacagtggccacagagtgcctgagcaagaacacagaggagaacctgctgagcctgaagaacagcctgaatgactgcagcaaccaggtgatcctggccaaggccagccaggagcaccacctgtctgaggagaccaagtgcagcgccagcctcttcagcagccagtgcagcgagctggaggacctgacagccaacaccaacacccaggaccccttcctgattggcagcagcaagcagatgaggcaccagagcgagagccagggcgtgggcctgagtgacaaggagctggtgtctgatgatgaggagcggggcaccggcctggaggagaacaaccaggaggagcagagcatggacagcaacctgggggaggccgccagcggctgtgagagcgagacctctgtgtctgaggactgcagcggcctgagcagccagagcgacatcctgaccacccagcagagggacaccatgcagcacaacctgatcaagctgcagcaggagatggccgagctggaggccgtgctggagcagcacggcagccagcccagcaacagctaccccagcatcatcagtgacagcagcgccctggaggacctgagaaatcctgagcagagcaccagcgagaaggacagccacatccacggccagaggaacaacagcatgttcagcaagaggccccgggagcacatctctgtgctgaccagccagaagagcagcgagtaccccatcagccagaaccctgagggcctgtctgctgacaagtttgaggtgtctgctgacagcagcaccagcaagaacaaggagcccggggtggagaggagcagccccagcaaatgtcccagcctggatgaccgctggtacatgcacagctgcagcggcagcctgcagaacagaaactaccccagccaggaggagctgatcaaggtggtggatgtggaggagcagcagctggaggagagcggcccccatgacctgacagagaccagctacctgccccggcaggacctggagggcaccccctacctggagagcggcatcagcctcttcagtgatgatcctgagagtgaccccagcgaggaccgggcccctgagagcgcccgggtgggcaacatccccagcagcaccagcgccctgaaggtgccccagctgaaggtggccgagagcgcccagagccctgctgctgcccacaccacagacacagctggctacaatgccatggaggagagcgtgtcccgggagaagccagagctgacagccagcacagagcgggtgaacaagaggatgtccatggtggtgtctggcctgaccccagaggagttcatgctggtgtacaagtttgccaggaagcaccacatcaccctgaccaacctgatcacagaggagaccacccacgtggtgatgaagacagatgctgagtttgtgtgtgagaggaccctgaagtacttcctgggcattgctgggggcaagtgggtggtgtcctacttctgggtgacccagagcatcaaggagaggaagatgctgaatgaacatgactttgaggtgagaggagatgtggtgaatggaagaaaccaccagggccccaagagggcccgggagagccaggacaggaagatcttccggggcctggagatctgctgctacggccccttcaccaacatgcccacagaccagctggagtggatggtgcagctgtgtggggcctctgtggtgaaggagctgagcagcttcaccctgggcactggagtgcaccccatcgtggtggtgcagccagatgcctggacagaggacaatggcttccacgccatcggccagatgtgtgaggcccctgtggtgacccgggagtgggtgctggacagcgtggccctgtaccagtgccaggagctggacacctacctgatcccccagatcccccacagccactactag

SEQ ID NO: 171758 - DNA, 5658 bp, Artificial Sequence
  derived and/or modified sequence
atggacctgagcgccctgcgggtggaggaggtgcagaatgtcatcaatgccatgcagaagatcctggagtgccccatctgcctggagctgatcaaggagcctgtgtccaccaagtgtgaccacatcttctgcaagttctgcatgctgaagctgctgaaccagaagaagggccccagccagtgccccctgtgcaagaatgacatcaccaagaggagcctgcaggagagcacccgcttcagccagctggtggaggagctgctgaagatcatctgtgccttccagctggacaccggcctggagtatgccaacagctacaactttgccaagaaggagaacaacagccctgagcacctgaaggatgaggtgtccatcatccagagcatgggctacagaaacagagccaagaggctgctgcagagcgagcctgagaaccccagcctgcaggagaccagcctgtctgtgcagctgagcaacctgggcaccgtgaggaccctgcggaccaagcagaggatccagccccagaagacctctgtgtacatcgagctgggcagtgacagcagcgaggacacagtgaacaaggccacctactgcagcgtgggggaccaggagctgctgcagatcaccccccagggcaccagagatgagatcagcctggacagcgccaagaaggccgcctgtgagttcagcgagacagatgtgaccaacacagagcaccaccagcccagcaacaatgacctgaacaccacagagaagagagctgctgagcggcaccctgagaagtaccagggcagctctgtgagcaacctgcacgtggagccctgtggcaccaacacccacgccagcagcctgcagcacgagaacagcagcctgctgctgaccaaggacaggatgaatgtggagaaggccgagttctgcaacaagagcaagcagcccggcctggcccggagccagcacaaccgctgggccggcagcaaggagacctgcaatgacaggaggacccccagcacagagaagaaggtggacctgaatgctgaccccctgtgtgagaggaaggagtggaacaagcagaagctgccctgcagcgagaacccccgggacacagaagatgtgccctggatcaccctgaacagcagcatccagaaggtgaatgagtggttcagcagaagtgatgagctgctgggcagtgatgacagccatgatggagagagcgagagcaatgccaaggtggctgatgtgctggatgtgctgaatgaggtggatgagtacagcggcagcagcgagaagattgacctgctggccagtgacccccatgaggccctgatctgcaagtctgagcgggtgcacagcaagtctgtggagagcaacatcgaggacaagatctttgggaagacctacaggaagaaggccagcctgcccaacctgagccacgtgacagaaaatctcatcattggagcctttgtgacagagccccagatcatccaggagcggcccctgaccaacaagctgaagaggaagaggcggcccaccagcggcctgcaccctgaggacttcatcaagaaggctgacctggccgtgcagaagaccccagagatgatcaaccagggcaccaaccagacagagcagaatggccaggtgatgaacatcaccaacagcggccacgagaacaagaccaagggggacagcatccagaatgagaagaaccccaaccccatcgagagcctggagaaggagagcgccttcaagaccaaggccgagcccatcagcagcagcatcagcaacatggagctggagctgaacatccacaacagcaaggcccccaagaagaaccggctgcggaggaagagcagcaccaggcacatccacgccctggagctggtggtgtccaggaacctgagcccccccaactgcacagagctgcagattgacagctgcagcagcagcgaggagatcaagaagaagaagtacaaccagatgcctgtgcgccacagcaggaacctgcagctgatggagggcaaggagcccgccaccggggccaagaagagcaacaagcccaatgagcagaccagcaagagacatgacagcgacaccttccctgagctgaagctgaccaatgcccctggcagcttcaccaagtgcagcaacaccagcgagctgaaggagtttgtgaaccccagcctgccccgggaggagaaggaggagaagctggagaccgtgaaggtgagcaacaatgctgaggaccccaaggacctgatgctgtctggagagcgggtgctgcagacagagaggtctgtggagagcagcagcatcagcctggtgcctggaacagattatggcacccaggagagcatcagcctgctggaggtgtccaccctgggcaaggccaagacagagcccaacaagtgtgtgtcccagtgtgccgcctttgagaaccccaagggcctcatccacggctgcagcaaggacaacagaaatgacacagagggcttcaagtaccccctgggccacgaggtgaaccacagccgggagaccagcattgagatggaggagagcgagctggatgcccagtacctgcagaacaccttcaaggtgtccaagaggcagagctttgcccccttcagcaaccctggaaatgctgaggaggagtgtgccaccttcagcgcccacagcggcagcctgaagaagcagagccccaaggtgacctttgaatgtgagcagaaggaggagaaccagggcaagaatgaaagcaacatcaagcctgtgcagacagtgaacatcacagctggcttccctgtggtgggccagaaggacaagcctgtggacaatgccaagtgcagcatcaagggcggcagccgcttctgcctgagcagccagttcagaggaaatgaaacaggcctcatcacccccaacaagcacggcctgctgcagaacccctaccgcatccccccactcttccccatcaagagctttgtgaagaccaagtgcaagaagaacctgctggaggagaactttgaggagcacagcatgagccctgagcgggagatgggaaatgaaaacatccccagcacagtgtccaccatcagcaggaacaacatcagagaaaatgtgttcaaggaggccagcagcagcaacatcaatgaggtgggcagcagcaccaatgaggtgggcagcagcatcaatgaaattggcagcagtgatgagaacatccaggccgagctgggcaggaacagaggccccaagctgaatgccatgctgcggctgggcgtgctgcagcctgaggtgtacaagcagagcctgcccggcagcaactgcaagcaccctgagatcaagaagcaggagtatgaggaggtggtgcagacagtgaacacagacttcagcccctacctgatcagtgacaacctggagcagcccatgggcagcagccacgccagccaggtgtgcagcgagaccccagatgacctgctggatgatggagagatcaaggaggacaccagctttgctgaaaatgacatcaaggagagcagcgctgtgttcagcaagtctgtgcagaagggggagctgagccgcagccccagccccttcacccacacccacctggcccagggctacagaagaggagccaagaagctggagagcagcgaggagaacctgagcagtgaagatgaggagctgccctgcttccagcacctgctgtttgggaaggtgaacaacatccccagccagagcaccaggcacagcacagtggccacagagtgcctgagcaagaacacagaggagaacctgctgagcctgaagaacagcctgaatgactgcagcaaccaggtgatcctggccaaggccagccaggagcaccacctgtctgaggagaccaagtgcagcgccagcctcttcagcagccagtgcagcgagctggaggacctgacagccaacaccaacacccaggaccccttcctgattggcagcagcaagcagatgaggcaccagagcgagagccagggcgtgggcctgagtgacaaggagctggtgtctgatgatgaggagcggggcaccggcctggaggagaacaaccaggaggagcagagcatggacagcaacctgggggaggccgccagcggctgtgagagcgagacctctgtgtctgaggactgcagcggcctgagcagccagagcgacatcctgaccacccagcagagggacaccatgcagcacaacctgatcaagctgcagcaggagatggccgagctggaggccgtgctggagcagcacggcagccagcccagcaacagctaccccagcatcatcagtgacagcagcgccctggaggacctgagaaatcctgagcagagcaccagcgagaaggacagccacatccacggccagaggaacaacagcatgttcagcaagaggccccgggagcacatctctgctgtgctgaccagccagaagagcagcgagtaccccatcagccagaaccctgagggcctgtctgctgacaagtttgaggtgtctgctgacagcagcaccagcaagaacaaggagcccggggtggagaggagcagccccagcaagtgccccagcctggatgaccgctggtacatgcacagctgcagcggcagcctgcagaacagaaactaccccagccaggaggagctgatcaaggtggtggatgtggaggagcagcagctggaggagagcggcccccatgacctgacagagaccagctacctgccccggcaggacctggagggcaccccctacctggagagcggcatcagcctcttcagtgatgatcctgagagtgaccccagtgaagatcgggcccctgagagcgcccgggtgggcaacatccccagcagcaccagcgccctgaaggtgccccagctgaaggtggccgagagcgcccagagccctgctgctgcccacaccacagacacagctggctacaatgccatggaggagagcgtgtcccgggagaagccagagctgacagccagcacagagcgggtgaacaagaggatgtccatggtggtgtctggcctgaccccagaggagttcatgctggtgtacaagtttgccaggaagcaccacatcaccctgaccaacctgatcacagaggagaccacccacgtggtgatgaagacagatgctgagtttgtgtgtgagaggaccctgaagtacttcctgggcattgctgggggcaagtgggtggtgtcctacttctgggtgacccagagcatcaaggagaggaagatgctgaatgaacatgactttgaggtgagaggagatgtggtgaatggaagaaaccaccagggccccaagagggcccgggagagccaggacaggaagatcttccggggcctggagatctgctgctacggccccttcaccaacatgcccacagaccagctggagtggatggtgcagctgtgtggggcctctgtggtgaaggagctgagcagcttcaccctgggcaccggggtgcaccccatcgtggtggtgcagccagatgcctggacagaagataatggcttccacgccatcggccagatgtgtgaggcccctgtggtgacccgggagtgggtgctggacagcgtggccctgtaccagtgccaggagctggacacctacctgatcccccagatcccccacagccactactag

SEQ ID NO: 171759 - DNA, 4875 bp, Artificial Sequence
  derived and/or modified sequence
atggacctgagcgccctgcgggtggaggaggtgcagaacgtgatcaatgctatgcagaagatactcgagtgcccaatctgcttggaacttatcaaagaacctgtgtcaacaaaatgcgaccacatcttctgcaagttttgcatgcttaagctgcttaaccagaagaaagggcctagccagtgtccgctatgtaagaatgacatcaccaagaggtccctgcaggaatctactcgatttagtcagctggtggaggagcttctcaagatcatttgtgcgttccagctggataccggcttggagtatgccaattcctataatttcgcaaagaaagagaacaactcgcccgagcacctgaaagatgaggtttccatcattcagagcatggggtacagaaatagagcgaaacgactcctgcagtccgagcccgagaatccctcgcttcaggaaacttccctgagcgttcaactgtccaaccttggaacagtaaggacactgagaactaaacagaggatccagcctcagaagaccagtgtctacatcgagttagggtctgacagttccgaggacactgtgaacaaagctacgtattgtagtgtgggcgaccaggagttgctccaaataaccccgcagggtacaagagacgaaataagccttgattccgcaaagaaggcagcttgtgaattttccgaaacagatgtaaccaacaccgagcaccaccagccatcaaataacgatctgaacacaacagaaaaaagagcggctgagcggcatcccgaaaagtaccaaggctccagtgtctctaaccttcatgttgagccctgcggcactaacacgcacgcgtcttctttgcagcacgagaattccagcctattgctgacgaaagatcgcatgaatgtggagaaagccgaattctgtaataagtccaagcagcctggtctggcccgctcccagcataatagatgggcagggagcaaggaaacctgcaacgaccggaggacgccttctacagaaaaaaaggttgacctgaacgcggatccattgtgcgagaggaaggaatggaataaacagaagttgccttgcagcgagaatccccgggataccgaagacgtgccctggattaccctaaacagttccatccagaaagtgaacgaatggttcagcaggtctgacgagctgttgggaagcgatgacagccacgacggcgaatcggagtccaatgcaaaagtggccgacgtacttgacgtgctcaatgaagttgacgagtattctggaagctcggagaagattgacctgttggctagcgatccccatgaagctctgatatgtaagagcgagagagtgcattccaagagtgtagaatctaacatcgaggataaaatcttcggcaaaacctacaggaagaaggcatcactcccgaacttatctcatgtgactgagaacctgatcattggcgccttcgttacagagccacagatcattcaggagagacccctgaccaacaaacttaaaagaaagcggaggcctaccagcgggctccaccccgaagattttattaagaaggcagacttggccgtccagaagacccctgaaatgataaaccaggggaccaatcagaccgagcaaaacggccaggtgatgaatatcactaacagcgggcatgagaataaaactaaaggcgactcaatacaaaatgagaaaaatcctaatcctatcgagagtctggagaaggagtccgctttcaaaaccaaggcagaaccaatcagctcttctatctcgaacatggagctggaacttaacattcacaattccaaagcccccaaaaaaaatcggttgcgacggaaaagcagcacccgccacatacacgccctggagctggtggtgtcgagaaatctcagccctcctaactgcaccgaactgcagatcgactcttgctcctcttctgaggaaatcaaaaagaagaagtacaatcagatgccagtccgtcactcacggaatctacagctgatggaaggcaaggaacccgcaactggagccaagaagtccaataagcccaacgagcagacttcgaagcggcacgatagtgacacgtttccagagctgaagctaactaacgcccctggttcgtttactaagtgcagcaatacgtctgaattgaaagaattcgttaacccttctctgccgcgtgaagagaaggaagagaagctcgagacagtaaaggtgagcaacaacgcggaagatcctaaggacttgatgctctctggagagcgagtgttacagactgagcgttccgtcgagtcaagttcaatctctttggtcccagggaccgattatgggacccaggaaagcatctctctgctggaagtcagcaccctcggcaaggccaaaactgagcctaacaaatgcgtctcccagtgcgcagcctttgaaaatcccaagggcctgatccatggttgcagtaaggataacagaaacgacacagaggggttcaagtatcccctcggacacgaggttaaccactctagagagacatccatcgagatggaggagtccgagctcgacgcgcaataccttcagaacactttcaaagtgtccaagcgccagtcctttgcacccttctcaaatcccggtaacgcagaagaagagtgtgccaccttcagtgcacacagtggtagcctgaagaaacaaagcccaaaagtgacattcgagtgtgagcaaaaagaggagaaccagggaaaaaacgagagcaacattaaacctgttcaaaccgtcaatatcaccgctggatttcccgttgtcggtcagaaagacaagcccgtcgacaatgccaagtgcagcatcaagggcggtagcagattctgtctgtcttctcagttccgtggcaacgaaacaggtttgatcacccctaataagcatgggctgcttcaaaacccgtacaggatccccccactcttccctatcaagtcttttgtcaagaccaagtgtaaaaagaatttgctggaggagaactttgaggagcattcgatgtctcctgagcgtgagatgggcaatgagaacatcccctctacagtatccaccatctctcggaataacattcgtgagaacgtattcaaggaagcctcatcatccaacatcaacgaggttggttcctctaccaatgaagtggggtcctccatcaacgagataggatcttctgacgagaacatacaggctgagttgggaagaaaccgaggcccgaagttaaatgcgatgcttcgcctgggggtattgcagcccgaagtttataaacagtccctgccaggctccaactgtaaacatcccgaaatcaagaaacaggagtacgaggaggtcgttcaaaccgtgaacacagacttctccccctaccttatcagcgacaacctcgagcagcccatgggatccagccatgcttcccaggtttgtagtgagactccggatgacttgttggatgacggcgagattaaggaagacacatcttttgccgagaatgacatcaaagaatcttcggccgtgttcagcaaatcagttcagaaaggagagctgtccaggtcaccttctccttttactcacacgcacctagcccagggttatcggaggggtgcaaaaaagcttgagtctagcgaggagaacctgagttccgaggacgaggaattaccttgtttccagcatttattatttggaaaagtgaataacatccctagtcagtctacgagacactcaacagtagcgacagagtgcctgtcaaagaacactgaggagaacctgctgtccctgaaaaactcactgaatgactgcagtaaccaggttatattagccaaggcctcgcaagagcatcacctgagtgaggaaactaaatgtagcgcctccctcttctcctcccagtgctcggagctggaggatctgactgctaatactaacacgcaggatccatttctgataggttcgtcaaaacagatgcgacaccagtcagagtcacaaggggtcggattgagcgataaagaactggtgtccgatgacgaggagcggggtaccggcttagaggaaaataaccaggaggagcaatccatggatagcaatctaggcgaagctgcaagcgggtgcgaatcagagacgtctgtcagtgaagattgctccggcttatcctctcagagcgatattcttacaacccagcagagagatacgatgcaacataatctgattaaactgcagcaggaaatggcagaactagaagcagttctggagcagcatgggtcgcagccttctaattcctacccctcgattatatcggattcttctgccttggaggacctgagaaaccctgagcaatctacttcagagaaagacgccgagtttgtttgtgagaggactttgaagtactttctggggattgcaggaggcaagtgggttgtgtcatatttttgggtgacccagtccatcaaggagcgtaaaatgctcaacgagcacgacttcgaagtgcgaggtgatgtggtgaatggcaggaatcaccagggacccaaacgcgctagggagtcacaagatcgaaagatattccgggggctagaaatatgctgttatggcccatttacgaacatgccaacagaccagttggagtggatggttcagctgtgcggagccagcgtggtgaaggaactgtcaagttttacactcggaactggtgtgcaccccatagtcgtcgtccagcctgatgcgtggaccgaagacaatggctttcatgctatcggccagatgtgtgaggcccccgttgttactagggaatgggtgcttgactctgtagctctataccagtgccaagaactcgatacttatctgataccgcaaataccgcactcccattactag

SEQ ID NO: 171760 - DNA, 5655 bp, Artificial Sequence
  derived and/or modified sequence
atggacctgagcgccctgcgggtggaggaggtgcagaacgtgatcaatgctatgcagaaaattctcgaatgccccatctgtctggaactgattaaggagcctgttagtactaaatgtgaccatattttctgcaaattttgcatgttaaagcttctgaaccagaaaaaagggccttcacagtgtcctctatgtaaaaacgacatcaccaaacggagccttcaagagtctacacgtttttcccagcttgtcgaagagctgcttaagattatatgcgcttttcagctggacactggcctagaatatgcaaactcctataattttgccaaaaaggagaataactcaccagaacacctgaaggatgaagtgagtattattcagtcaatgggatataggaacagggccaagagattgttgcagagtgaacccgaaaacccgtctttgcaggagacttccctgtcagtgcaactctcgaatctgggtaccgtcagaactctgcgcaccaaacagagaatccagcctcagaagacctcagtttacattgagttgggatccgacagctccgaggataccgttaacaaagccacgtactgctcagttggggatcaggaattgttgcagattacaccacagggaacgcgggatgaaattagtttagattccgcaaagaaggctgcatgcgagttttcagaaacagacgtgaccaacaccgagcatcaccaaccctctaacaatgatctgaatactactgaaaagcgtgctgccgagagacacccagagaagtatcagggatctagcgtgagtaatctccacgtcgagccgtgcggaacaaatacgcatgctagctcccttcagcatgagaattccagcttgctactgactaaagaccgcatgaatgtggaaaaggccgagttttgcaacaagtctaagcaaccagggctcgcccgctctcagcacaatcgatgggccgggagcaaagagacatgcaatgatcggaggaccccctccactgagaagaaggtggaccttaacgcagatcccctgtgtgaacgcaaagaatggaacaaacagaagctaccctgttctgaaaatccaagggatacggaagatgtaccctggattactctgaacagtagcattcaaaaagtgaacgaatggttttcccgatccgatgagcttttgggaagcgacgattcccatgatggggagtccgaaagtaacgcgaaagtggccgatgtcctggacgtccttaatgaagtggatgaatacagcggcagctctgaaaaaatcgatcttctagctagtgatccgcacgaagccctcatctgcaagagcgagcgggtccactctaaatctgtcgaaagcaacatagaggacaagattttcggcaagacatatcgcaagaaggctagtcttccaaacttgtctcatgtcacggaaaacctgattatcggcgccttcgtgaccgagcctcagataatccaggagaggccccttacgaacaagctcaaaagaaagagacgccccaccagcggacttcaccctgaagatttcattaaaaaagctgacctcgcggtgcagaagactcctgaaatgataaatcaagggacgaatcagaccgagcagaatggacaggtcatgaacataactaattctggccatgagaacaagaccaagggagatagcatccaaaacgagaagaatccgaatcctattgagtcgctagaaaaggagagcgcctttaagaccaaggcggaacctattagcagctctatctctaatatggagctggaactgaatatacataactccaaggcacctaagaagaacagactccgacgaaagtcaagtacccgccacatacacgccctcgagttagtcgtgtccaggaaccttagccctcccaattgtaccgagctccaaatcgactcatgctcttccagcgaggagatcaagaagaagaagtataaccagatgcctgtccgtcatagtcgcaatctccagttgatggaggggaaagagccagctaccggcgctaagaaatccaacaagcccaacgaacagacctccaaacggcatgatagtgacacattcccagagttaaagctgacgaacgctcccggatcctttaccaaatgcagcaataccagcgagctgaaggaattcgttaacccctccctgccaagggaggagaaggaggagaagctggaaaccgtgaaggtgtcaaacaatgccgaggatcccaaagacctgatgctgtccggggaacgggtattgcagacagagcggtcagtcgagagctcttcaatatcactcgttccaggtactgattatggtacccaggaaagtataagcctgcttgaggtttccaccctggggaaggcaaaaactgagcccaataaatgtgtttcgcagtgtgctgcattcgagaaccccaaaggtctgatacatggctgctcgaaggataatcggaatgatactgaggggttcaagtaccccctggggcatgaggtgaatcacagtagagaaacaagtatcgagatggaggagtcagagctcgatgcacagtacctccagaacacattcaaggtgtccaagcggcagtcattcgctcctttctctaaccccggtaacgctgaggaagagtgcgccacattctcagctcattctggctccctcaagaaacagtctccaaaagtgaccttcgaatgtgaacagaaggaggagaaccaagggaagaacgagtccaacatcaagcctgtacaaactgtgaatattactgctggcttccccgtggttggccagaaggataaacccgtggataacgcgaagtgtagcatcaagggggggagcagattctgcttgagctcacaattccggggcaacgagactgggctgattaccccaaataaacacggtctcctgcagaacccatatcggatcccccctctgttccctattaagtcatttgttaagaccaagtgtaagaaaaacctcttggaagagaacttcgaagaacactccatgagtcccgagagagagatggggaatgaaaacattcccagtaccgtttccacgattagtcgcaataatatcagagagaatgtattcaaggaggcatcctctagcaatataaatgaggtcggctctagcacaaacgaggtcggatctagtataaatgagatcgggagttctgacgagaacatacaggctgagttgggaaggaacaggggacctaagctgaacgccatgttgcggttgggggtcctgcaacccgaggtctacaaacagagtctgcctggctcgaactgcaagcatccagagattaagaagcaggaatatgaagaggtagtccagacagtgaacaccgatttcagcccttacctgatctctgataacttagagcaacccatggggagtagccatgcttcacaagtatgctccgagacaccagatgacctgctggacgacggtgagatcaaggaggacaccagttttgcggagaacgacattaaggaatcaagtgccgtcttttcgaagtcagtgcaaaaaggtgaactgagcaggagtcctagccccttcactcatactcatcttgcacaaggttatcggcgtggagccaagaagctggaatctagcgaagagaacttatcaagtgaggacgaggagcttccatgcttccaacacttattattcggaaaggtgaacaatatcccatctcaaagcacccgccactccactgtggcaaccgagtgcctctcgaaaaacaccgaggagaacctcttaagcctcaagaattctttgaatgactgctccaatcaggtgatcctcgcgaaagccagccaggaacaccacctctccgaggagacaaagtgcagtgcaagtctgttctcctcacagtgcagcgagttggaggacttaacagccaatacgaacactcaggacccattcttaatcggatcaagcaagcaaatgcggcatcagagcgagtctcagggggtagggctgtctgataaggaactcgtgagtgacgacgaggaacgaggtaccggactggaggagaataatcaggaagagcagtcgatggatagcaacctgggtgaggccgcctccgggtgtgaatcagagacctctgtgtccgaagattgttcaggcctgtcctctcagtcagatattttaacaacccaacagagggacaccatgcagcacaacttgatcaagttacagcaggagatggccgaactcgaggccgttttggagcaacatgggagccagcctagtaattcgtaccccagcattatttcagatagctcggcactggaggatctgaggaacccagaacagagcacctcagagaaggactcccatatccatggtcagagaaacaactctatgttttcaaaaagacccagagagcacatcagcgtccttacgtctcaaaagtcaagcgaatatcctatatcacagaaccccgaaggcttatcagcagataagtttgaagtttctgcggactctagcacatctaagaacaaggagcccggggtggaacggagtagcccttccaagtgccccagtctggacgatcgatggtatatgcatagctgtagcggctcgctacagaataggaattatccctcgcaggaagaactgattaaagtcgttgatgtcgaggagcagcagctggaagaaagcggaccacacgacctcaccgagacaagctacctgccgcggcaggacctcgaggggaccccctatcttgagagtggaatcagtctctttagtgatgatcctgaaagcgacccgagcgaggatcgggcaccagaatcagctcgcgtcggcaatatcccctcatcaacaagtgccctgaaggtcccccaattgaaagtggccgagagcgctcagagccccgctgcagcacacactaccgacacagctggctataacgctatggaagagtccgtgtctagagagaagcctgagctgactgcctccaccgaaagggtgaacaagcgaatgtcaatggtggtgagcggattgacaccggaggagtttatgctggtgtacaaatttgcacggaagcaccacatcaccctgaccaacctgattactgaagagacgacccacgttgtcatgaagaccgacgccgagtttgtctgtgaacggacactgaagtactttttagggatagctgggggcaagtgggtggtgtcttatttctgggtgacccagagcatcaaagaaagaaagatgttgaacgagcatgactttgaggtgaggggtgacgtcgtgaacggaaggaaccaccaaggacccaagcgggccagggagagtcaggaccggaagatatttcgagggctcgagatctgctgctacggaccatttaccaacatgcctaccgaccagctcgagtggatggttcagctgtgcggggcctcggtcgttaaggagctcagttcgttcaccttgggcactggggtgcaccctatcgtggtggtgcagcccgacgcgtggactgaggataacggattccacgcaatcggccagatgtgtgaagcccctgtagtaactcgtgaatgggtactcgatagtgtggccctctatcagtgtcaagaacttgacacctacctgattccgcagatcccacatagccactattag

SEQ ID NO: 171761 - DNA, 5658 bp, Artificial Sequence
  derived and/or modified sequence
atggacctgagcgccctgcgggtggaggaggtgcagaacgtgatcaacgcgatgcagaagattctcgaatgtcctatttgcctcgaactcattaaagaacccgtgtcgactaagtgtgaccatattttctgtaaattctgtatgctgaaactactgaaccagaagaagggacccagccagtgccctctctgcaaaaacgacataacgaagaggtccctgcaagagtcgaccaggttttctcagctggtagaagagctgctaaagatcatatgcgccttccagctcgataccggccttgagtatgccaactcctacaacttcgccaaaaaggaaaataacagccccgagcatctgaaagatgaggtgtctatcattcagtctatgggctacaggaacagagcgaagcgtttacttcaaagcgagcccgagaacccgtcactacaagaaacctctttgtccgtgcaactctctaatctgggtacagttcggaccctgcgcactaagcaaagaattcagcctcagaagacaagcgtgtatatagaattgggatctgacagtagcgaggacacagtgaacaaagctacatactgcagcgtcggggatcaggagcttctgcaaataactcctcagggaacacgagatgagatttccttagactcggctaagaaggctgcctgtgagtttagtgaaaccgacgtcactaataccgagcaccaccagccaagcaataatgatcttaacaccactgagaagcgtgctgccgagcggcacccagagaaatatcaggggagctcagtcagcaacctccacgtagagccctgtggtacaaacacccacgcctcatctttgcagcatgaaaatagtagcttgctcctgaccaaggataggatgaatgtggaaaaggccgagttctgtaacaagtctaagcagccagggctggccagaagccagcacaaccggtgggccggcagtaaggagacgtgtaatgaccgcaggacacccagtaccgaaaaaaaggtggatctgaacgccgacccactgtgcgagcgcaaggagtggaacaagcagaagctgccctgctcagaaaatcccagagatactgaagacgttccctggatcactttaaactcttctatacagaaagttaatgagtggttcagcagaagcgatgagcttttaggaagcgatgactcccatgacggagagagcgagtctaacgctaaggtcgccgacgtcctggatgtgctaaacgaggttgatgagtattctggaagcagcgagaagattgatttgctggcctcagatccgcacgaagccctgatctgtaagtcggaacgggtgcacagtaagtccgtagagtccaacatcgaggataaaatttttggtaagacgtaccgtaagaaggctagcttgccgaacctctctcacgtgacagagaatttaataattggggcttttgtgaccgagccccagatcattcaggaacgcccactcactaacaaattaaagcgtaaaaggagacctacgagcggtctacaccctgaggactttatcaagaaagcagatctagctgtacaaaaaacccctgaaatgataaatcaggggactaaccagacagagcagaatgggcaagtaatgaacataacaaacagcggccacgagaataagaccaagggggacagcattcagaatgagaagaacccaaatcctattgagtcgctcgagaaagagtccgctttcaaaacaaaggcagagccaatatcatctagtattagcaatatggagctggagctcaatattcataactcaaaggctcccaagaagaaccggctgaggagaaagtcttcaactagacatatccacgcactggagttggttgtgtcacgcaacttgtccccccccaattgcaccgagctgcaaatcgactcttgttcaagcagcgaagagatcaaaaagaaaaaatacaaccagatgcccgttcgccatagccgcaacctgcagttgatggagggaaaagagccagccactggagcgaaaaaatccaataaacctaacgagcaaactagtaagcgtcacgatagtgacacgtttccagagctgaagctgaccaacgctccaggaagcttcacaaaatgcagtaacacttctgaactaaaagagttcgtgaacccctccctgccgagagaggagaaggaagaaaagctggagaccgtcaaggtctccaacaacgccgaggacccaaaggacctcatgctgtctggcgagcgtgtgctgcaaactgagcggtcagttgaatcttcgtcaatcagcctagtgccaggcactgactacggtactcaggaatcgatatccctgctggaagttagcacgctcggaaaggctaaaactgagccaaataaatgtgtctcccaatgtgcagcgtttgagaaccctaagggactgatacacggttgttctaaagacaacaggaatgacacagaaggatttaaatacccccttgggcacgaggtaaatcacagccgagaaacgtcaatagaaatggaggagagtgagctggacgctcagtacttgcagaataccttcaaagtctctaagagacagtcttttgcgccattctcaaatcccggtaacgcggaggaagagtgcgcaaccttcagtgcacattcaggctcgctgaagaaacaatcgccaaaggtgacatttgaatgtgaacagaaggaagagaaccaaggaaaaaacgaatccaatatcaagccggtgcagactgttaatattacagctggcttcccagttgttgggcagaaggacaagcctgtcgacaatgctaaatgtagtattaagggcggaagccggttctgtttatccagtcaatttagaggaaatgaaacgggactgatcacaccaaataagcacgggttgctacagaacccataccggatacccccactgtttcccatcaagtcatttgtgaagaccaagtgcaagaaaaacctactcgaagaaaattttgaggaacatagtatgagcccggagagggagatgggtaacgagaatatcccctcgacggtatccaccatttcacggaataatatcagagaaaacgtcttcaaggaggccagttcaagtaacattaacgaggttgggtctagtacgaacgaggttggctcctctatcaatgagatcgggtccagcgacgaaaacattcaggcagaattgggacgcaaccgtggtcccaagctgaatgcaatgctccgcctgggtgtcctacagcccgaggtgtataaacaatcgctccctggctccaactgtaagcacccggagatcaaaaaacaggagtacgaggaggtggtgcagacagtgaacacggatttctccccttacctgatatctgacaatctcgagcagcctatggggtcctctcatgcatcacaggtgtgttcagagaccccagacgatctgctcgacgacggtgaaattaaagaagatacatctttcgctgaaaatgatatcaaagagtctagtgctgtgtttagcaagagcgtacagaagggagaactctctcgatctcctagtccatttactcacactcacctggctcaggggtataggagaggggcgaaaaaactggaaagcagcgaagagaacctgtcttcggaggatgaagagttgccctgctttcagcatctgctgttcggaaaggtcaataatatcccctcgcagagcacaaggcactccacagtggccaccgagtgtttgagtaagaacacggaagagaatcttttgagtctgaaaaattctctaaatgactgcagcaatcaggtgatcttggccaaggctagccaggaacaccacctaagcgaagagacaaagtgcagcgcctccctcttcagtagtcagtgcagcgagctggaggacctaacagccaataccaacacacaagatccattcttgatagggagcagtaaacagatgaggcaccaatctgaatcacagggggtgggactgagtgataaggagctggtgagtgatgatgaggaacggggaactgggcttgaggagaataaccaggaggagcaatccatggactcgaatcttggagaagctgctagcggctgcgagtccgagaccagcgtgtccgaggactgtagtggattgtcatcccaaagcgatatcctcactacccagcagcgcgataccatgcagcacaatctgatcaagctccagcaggagatggctgagttagaggcggtcctagagcagcacggctcccagccaagtaactcatatccctctattatcagtgattcttccgcactagaagatctgagaaaccctgaacagtctacttccgagaaggacagtcatattcacggacaaagaaataactcgatgttctctaagaggccacgggaacacatctcggccgttctcacctctcagaagtcttctgagtacccaattagccagaatcccgaaggattaagtgccgacaagttcgaggtgagtgccgattcgagtacatctaaaaacaaggaacccggagtggaaagatccagtccttcgaagtgcccttctttagacgaccgatggtacatgcacagttgttctgggtccttgcagaatagaaattatccatcacaggaggagctcatcaaagtagttgatgttgaagagcagcaactagaggaatctggtccccacgatcttaccgaaaccagctatctgccgagacaggacctcgagggtactccatacttagagtctggcataagtctgttctccgatgatcccgagtcggatccatctgaagacagagcaccagagagcgcgcgcgtgggcaacatcccttcctcaacctcggctttgaaggtcccacagctcaaagttgccgaatctgcgcagagcccagctgcggctcacaccactgatacagccggttacaacgccatggaggagagtgtaagtcgtgaaaaaccagagctgacagcctccacggagagggttaacaagcgcatgtctatggttgtgtctggtctcacccctgaagagtttatgctggtgtacaaatttgcacgaaagcatcacattaccctcacaaacctgatcaccgaggagacaactcacgtggtaatgaagacagacgcagagtttgtatgcgagcgcactctgaagtattttttggggattgcgggtggcaaatgggttgtctcatacttctgggtgacacagtcaatcaaggagagaaagatgcttaatgagcatgacttcgaggtgagaggtgatgtcgtgaacggtcgcaatcaccagggacccaagcgagcaagggagagccaggacaggaaaatcttcagaggcctggaaatctgctgctatggaccattcaccaatatgccgactgaccagctagagtggatggtacagctatgcggtgcatctgtcgtgaaagagttgtcaagtttcacactggggaccggggttcatccaatagtggtggtgcagcccgatgcatggactgaagacaacggctttcatgctatcggacaaatgtgcgaggcccccgtggtcacacgcgaatgggtgctggatagtgtggccctctaccagtgccaggagctggacacatatttgattccccagatccctcactctcattactag

SEQ ID NO: 171762 - DNA, 4875 bp, Artificial Sequence
  derived and/or modified sequence
atggatctgagcgccttgcgcgtggaggaggtgcagaacgtaattaatgccatgcagaaaatactggaatgcccgatttgcctggaactgataaaggaacctgtctccacgaaatgcgaccatattttctgtaagttctgtatgttgaaattgctgaatcagaagaagggcccatcacagtgccccctttgcaagaacgacataactaagcgctctctccaggagagtacccgctttagtcagctcgtagaggagctcctgaagatcatctgtgcctttcaactcgacactggcctggagtacgctaattcatacaattttgccaagaaagagaataactcacccgagcatctgaaagacgaggtctctatcattcagtccatgggctatcggaatagggccaaacggttgcttcagagcgaaccagagaatccttctttgcaggagacatctttgagcgtgcagctgtcaaacctcgggacagtacgcaccttgcgcaccaagcagcggattcagcctcagaaaactagtgtttacattgaattaggcagtgactcgtcagaagacaccgtaaataaggcgacatactgctctgtcggagatcaagaactgttgcagatcacccctcaagggactagagatgaaatcagtctcgactcagctaagaaagctgcgtgcgagtttagtgagaccgatgtcacaaacactgagcaccaccagccctcgaacaacgacctcaatacaaccgagaaacgggctgctgagaggcacccagaaaaataccagggctcttctgtgagcaacctgcatgtcgagccctgcggtaccaacacacacgcttcctctctgcagcacgagaactcttctctgcttttaaccaaagatcgtatgaacgtggagaaggccgaattttgtaacaaatctaaacagcctggtctggctaggtctcagcacaacaggtgggctggaagcaaagagacatgcaacgaccggagaactcccagtactgagaaaaaagtcgatcttaacgccgaccccctctgtgaaagaaaagagtggaacaaacagaagttaccatgttcagagaatccaagagacacggaggacgttccttggataaccttgaactcttccattcagaaggtcaatgagtggttcagtcgctctgatgaattactggggagtgatgacagccacgacggggagagcgagagtaatgcaaaagtagccgatgtgcttgatgtgctaaatgaagtggacgagtattccgggtctagtgaaaagattgatcttctggccagcgaccctcacgaagctctaatctgcaagagcgaaagagtgcatagcaaaagcgttgagtccaacattgaagataagatttttggtaaaacgtacaggaaaaaagcttcattgccaaacctttcccacgtgacagaaaatttaattatcggggctttcgtgactgaaccccagatcatccaggagcgacccctaaccaacaagctgaaacggaaaaggaggccaactagtggcctgcatcccgaggacttcataaaaaaagccgatttggccgttcaaaagactcccgaaatgattaaccagggcacaaaccagacagagcaaaatggccaggtgatgaacatcaccaattcaggccacgaaaacaagaccaagggtgatagtattcaaaacgaaaaaaaccctaatccaatcgaaagtctcgaaaaagagtctgcatttaagacaaaggcggagcctatatcgtcttctatttcaaacatggaactggagctgaatattcacaatagtaaagcccctaagaagaacagactaagaaggaagtcaagtacccgccacatccacgcccttgaactggtagtgagtaggaatttaagccctcctaactgcacagaattgcagatcgacagctgctctagcagcgaagagatcaaaaaaaaaaaatacaaccagatgccagtgagacatagtcggaacctacaactaatggagggcaaggagcccgcaaccggcgctaaaaagtcaaacaagccaaatgaacagacctccaagaggcacgatagcgatacctttcccgagctcaaactgacgaatgcacccggatcatttactaagtgttccaatacttccgagctgaaagagttcgtgaatccctctctgcccagggaggagaaggaggaaaaactcgaaaccgtgaaagtgtccaataacgccgaagaccccaaggacctgatgttatctggcgaaagagtactgcagacagagaggagtgttgaaagctccagcatcagtttggtgcctgggacggactatggcacccaggagagcatatcattgctggaggtctcgacactgggaaaggcaaagacagagccaaataagtgcgtctcccagtgtgccgcatttgagaaccccaagggtttaatccatggctgttcgaaggataacagaaatgatacagagggatttaagtatcccctggggcatgaggtgaaccacagtagagagaccagcatcgagatggaggagtcggagctggatgcccagtaccttcagaataccttcaaggtttcaaaaaggcaatccttcgctcccttcagcaaccccggaaacgcagaggaggagtgtgccaccttttcagctcacagcgggagcctgaaaaagcaaagcccaaaggtgacttttgagtgtgaacagaaggaagagaatcagggaaaaaacgaatccaacatcaagcctgtccagactgttaacatcaccgcgggtttcccagtggttgggcagaaagataaaccggtggacaatgctaagtgctccatcaagggtggtagtcgtttctgcctgtcctcgcagttcagaggcaacgaaaccggcctgattactccaaacaaacacgggctgctgcagaacccataccggatcccccctctgttccccatcaaatccttcgttaaaaccaaatgtaagaaaaacttgttggaggaaaatttcgaagaacatagtatgagtcccgagagagagatgggcaatgagaacattccctccaccgtcagtaccatcagccgaaacaacattcgggagaacgtcttcaaggaggcttcaagttctaacatcaacgaggtcggttcctcaactaacgaggtagggtcaagcatcaacgagattggttcttcagatgagaatatccaggccgagctgggccgtaacagaggcccaaaattgaatgcaatgctcagactcggcgtgctgcaacctgaggtgtataagcagtccctgcccggtagtaattgcaaacacccggagataaagaagcaggaatacgaagaagtggttcaaacagtgaacacagacttttcaccttacctcattagcgacaacctggagcagccaatgggctcatcacacgcttcccaggtgtgctctgaaacgcctgacgacttgctagacgatggggaaatcaaagaagatacctcatttgccgagaacgacattaaggaaagctctgctgtgtttagtaagagtgtgcagaagggtgaactcagcaggagccctagtccttttactcatacccacctcgctcaggggtatcgcaggggggctaaaaaactggaaagttccgaagagaatctgagttccgaagatgaggagctcccatgcttccagcaccttctatttggcaaggttaataacatcccatcccagagcaccaggcactcgaccgtggccaccgagtgtttatcaaagaacaccgaggaaaatctgttgagcctcaagaacagtttgaacgattgctcgaatcaggtgatcctggccaaagcttcccaggaacaccacttatccgaagagaccaaatgctctgcgagcttgttcagcagccagtgtagcgaactggaggacctcacagccaatactaacactcaggatcctttcctgattggttcctcaaaacagatgagacaccagtctgaatcccaaggggtgggtttaagcgacaaagaattggttagtgatgatgaggagcgtggcactggcttggaggagaataaccaggaggagcagtcaatggatagcaacctcggggaagccgcaagtgggtgtgaatccgagacttccgtatccgaagactgttcggggctcagctcacaatccgacattctgacaacccaacagagggacacgatgcaacacaacctgatcaagttacagcaggagatggccgaactcgaggcggttctcgaacaacacgggagtcagcccagcaattcgtacccgtccataatcagcgattctagcgccctggaggacttgcggaaccctgagcagtcgaccagcgagaaggacgccgaattcgtgtgcgaaaggacgcttaaatattttctgggtattgcgggtggcaaatgggtagttagctatttttgggtgactcagtccattaaagagcgtaagatgctcaatgagcacgactttgaagtgaggggagacgtggttaatgggcgaaaccaccagggacctaagcgagctcgcgagtcccaggaccgcaagatttttcgcggtttggagatctgctgctacggcccattcacaaacatgcctactgatcagctggaatggatggtgcaattgtgtggagcatctgtggtcaaggagctaagttcattcacactcgggaccggcgtgcacccaatcgtcgtcgtgcaacccgatgcctggaccgaggacaatggattccacgccattggccagatgtgcgaggctccagtcgttactagggagtgggtgctggattccgtagccctttaccagtgccaggaactggatacctacctgatccctcaaattccccactcccactactag

SEQ ID NO: 171763 - DNA, 5654 bp, Artificial Sequence
  derived and/or modified sequence
atggacctttctgcactgagggtggaggaggtgcaaaacgtgattaatgcaatgcagaaaattttggagtgcccgatttgtttagagttgatcaaggagccagttagtacaaaatgcgatcacattttctgcaagttctgcatgttgaaacttctcaaccagaagaaaggacctagccagtgtccattgtgcaagaacgacatcaccaaacgctcattgcaagaaagcaccaggttttcacaattggtggaagagctgctgaagattatctgcgccttccagctcgatacgggtttagaatacgcaaattcctataatttcgccaagaaggagaataacagtcctgagcatttgaaggatgaggtgtccatcatccagagcatgggctaccggaatcgtgctaaaagattattacaaagtgagccagagaacccttctctgcaggagactagtttaagcgtacagcttagcaatttgggcacagtgcgcacactgaggactaaacagagaatccagccccagaaaacttcggtttatatcgaactgggctctgactcgtccgaggacacagtgaataaagcaacttattgtagcgtgggtgaccaggaactcctgcaaatcaccccacagggaacccgagatgagattagcctggactcagcaaaaaaagcggcatgcgaatttagcgaaacggatgttacaaacactgagcaccatcagccatccaataacgacttgaacaccaccgaaaagagggcggctgaacgccatcccgagaaataccaaggctcttcagtgagcaacttacatgtcgagccctgtgggactaacactcatgcctctagtctgcagcatgagaactcgagcctgctgcttaccaaagaccgcatgaatgtggaaaaagccgagttttgcaacaaaagcaagcagcccggtctggcccgatctcagcacaatagatgggcgggatctaaggagacatgcaatgataggagaactccatctactgagaaaaaggtggatctgaacgccgatcccttgtgtgagcgaaaagaatggaacaaacagaagctcccatgttctgagaatccccgtgatacggaggacgttccatggattaccctaaattcgtcaatccagaaggtgaacgagtggttcagtcgatctgatgaactgctggggtccgacgatagccacgatggcgaaagcgaaagcaatgctaaagtcgccgatgtgctggatgtgctgaacgaggtggacgagtactctggctcctctgagaagatcgacctactggcctctgaccctcacgaggctctgatctgtaagtcggagcgggtgcattccaagtctgtcgaatcgaacatcgaggacaaaattttcggcaaaacttaccggaagaaggctagtctgcccaacctcagtcacgttacagagaatctcatcattggtgcctttgtgacagagccccagattatccaggaacgcccattgacaaataagcttaagcgaaaacggaggccaacttctggactgcatccggaagacttcatcaagaaagccgatctggccgtccagaagacacctgagatgatcaaccagggaactaaccagacagaacagaacggccaggtaatgaacatcaccaacagtgggcatgagaacaagacgaaaggggactccatacagaatgaaaaaaaccccaatccaattgagagccttgaaaaggaatctgcgtttaagaccaaagcagagcctatcagctccagtatcagcaacatggaattggaactgaacattcacaattctaaagctccgaaaaaaaacaggctccggaggaagtcgagcactagacacatccacgcactcgaactggttgtgtctcggaacttgagcccccctaactgtactgagctgcagatcgactcttgttccagctccgaagagatcaaaaaaaagaagtacaatcagatgccagtgcggcattcaaggaacctgcaactcatggaaggcaaggaaccagccactggggcaaagaagagcaacaagcccaatgagcaaacgtccaagcggcatgacagcgatacgtttcctgaacttaagctcactaacgcaccgggttcctttaccaagtgctccaacacatccgagctgaaagagtttgtgaatccttcgctgccgagggaagagaaagaagaaaagttagagaccgttaaggtgtcgaataatgccgaagacccgaaagacctgatgctgtcaggtgagagagtcttacagactgagaggtccgtggagtcttcttcaatttcactggtacctggcacagattatggaacacaggaatcaataagcctcctcgaggtctctaccttgggcaaggcgaaaacagagcccaacaaatgtgtctcccagtgtgcagccttcgagaatcctaagggtctcatccatggctgcagcaaggataatagaaacgatacggagggcttcaagtaccctcttggacacgaagtgaatcattctagggaaacgtctatcgagatggaggaatccgaactagatgcccaatatctgcagaacaccttcaaagttagtaaacgccagagctttgccccttttagtaaccccggaaacgccgaggaggagtgcgccacattcagcgctcattccggatcactgaagaagcagtcacctaaagtgactttcgagtgtgagcagaaggaagaaaaccaaggcaagaatgagagtaacatcaagccagtgcagactgtgaacattaccgccggattccctgtggtgggacaaaaggacaaacctgtcgataatgcaaagtgttcgatcaaggggggatccaggttttgtctgtcctcgcagttccgcggaaacgaaactgggctgattactcccaacaaacacggtctgttacaaaatccttacaggattccaccactctttcctatcaaaagtttcgtgaagaccaaatgcaaaaagaatcttcttgaggagaatttcgaggaacattcaatgtcaccagaacgcgaaatggggaatgaaaacatcccttcaacagtatctaccatcagcaggaacaacatccgtgagaatgtctttaaggaggctagctccagtaacatcaacgaagtaggttcatcaacaaatgaggtcggaagcagtatcaatgaaattggatcctcagacgaaaatattcaggccgagctcgggagaaatcggggaccaaaactaaacgctatgctgcgactgggtgtgctgcagcccgaagtatataaacagtcacttcccggttccaattgcaagcatcctgaaatcaagaaacaagagtatgaagaagtggttcaaacggttaatacagatttttcaccatacttgatcagtgacaacctcgaacagcccatgggcagctcacacgctagccaggtgtgttccgagaccccagacgatctgctcgacgatggggagattaaggaggacacatcctttgcggagaatgacatcaaagagagctcagccgtttttagcaaatccgtacaaaaaggtgagctaagtaggtccccgtctccctttacccacacccatctcgcgcagggctaccggaggggggctaaaaagctggagagtagcgaggagaacttaagctccgaggatgaagagcttccgtgcttccagcacctcctgttcggcaaggtgaacaacattcccagtcagagcactaggcactccacagtggccactgaatgtctgtctaagaatactgaggaaaatcttttaagcctcaaaaactccctgaacgactgtagcaatcaagttattctagcaaaagcatcgcaggagcaccatctcagtgaagaaaccaagtgctccgcgtccctattttcttcgcagtgttcagaactggaagatctaacagccaatactaacacacaggacccatttctgattggttcctcgaagcagatgcggcaccagtcagaaagccagggagtaggactgagcgataaggagctggtttccgacgatgaagagagagggaccggtctcgaagagaataaccaggaggagcagtcaatggattcaaatctcggagaggctgcttccggctgtgagagtgagacgtcggtctccgaggattgttccggcctgagtagtcaatctgacatcctcacaactcagcagcgcgatactatgcagcacaaccttattaagctccagcaagagatggccgagctggaagccgttctcgagcagcatggctcccaaccctctaactcatacccttccatcatctctgactcttcagccctcgaggatctgagaaacccggagcagagtacttctgagaaagacagccacatccatggccaacgaaacaattcaatgttttccaaaaggcctagggagcacatttctgtgctgacttcacagaagtcctcggaatatccgatcagccagaatcccgaagggctgtccgccgataaattcgaggtgtctgccgactcatccactagcaaaaacaaggagccaggggtggagcggtcatctccaagcaaatgcccgtccttagatgataggtggtacatgcattcctgctcaggcagcttgcaaaatcgcaactacccctcccaggaggagctgattaaggtcgttgatgttgaagagcaacaactagaagagagcgggcctcatgacctcactgagacctcctacctgcccagacaggatctcgaaggcacaccatacttggagtccggaatcagcctgttcagcgatgatcccgagtctgaccccagcgaggatcgcgcacccgaatctgccagggtcggtaatatcccaagtagcactagtgctcttaaagtgccacaattgaaggttgccgagtcagctcagtctccggctgccgctcatactactgacactgctggctacaacgccatggaagaatcagtgagcagggagaaaccagagctgaccgctagtacggagagggtgaacaaacgaatgtccatggtcgtttcaggcctcactcctgaggagtttatgctggtgtacaagttcgctagaaagcaccacattacgcttaccaacctcattacagaggagacaacacacgtggtgatgaagaccgatgccgagtttgtgtgcgaaaggacactgaagtatttcctgggaatcgcaggcggtaaatgggttgtgagctacttctgggtgactcagtccatcaaagagaggaaaatgctgaatgagcatgacttcgaagtgaggggggatgtggtcaatggaagaaaccatcaagggccaaagcgagctcgagagagtcaggaccgaaagatattcagaggattggagatctgctgttacggcccttttacaaacatgcctaccgatcagttagaatggatggtgcagctgtgcggggctagtgtcgtaaaggaattatcttcctttactcttggaaccggagtccacccgatagtggtcgtgcagcccgatgcctggactgaggacaacggatttcacgccataggtcagatgtgtgaagctcccgtagtcaccagggagtgggtcctggactctgtagcattgtaccaatgtcaagagctggatacctacctgatccctcaaattccacactcccactacta

SEQ ID NO: 171764 - DNA, 5657 bp, Artificial Sequence
  derived and/or modified sequence
atggacctgtccgcgctaagggtggaagaagtccaaaatgtaatcaacgcaatgcaaaagattcttgaatgtcccatctgtttggaacttattaaggaacccgtatcaaccaagtgcgaccacatcttctgtaagttctgcatgctcaagctcctcaatcagaagaaaggcccatctcaatgtccactgtgtaagaacgatatcactaaaagaagtctgcaagagagcacccgcttctcccaactcgtcgaggagctgctcaaaattatttgcgcgtttcaattagatacaggcttggagtacgctaactcatacaatttcgccaaaaaagaaaataacagtcccgaacacttgaaagacgaagtttctattattcagagtatggggtaccggaatcgggcaaagcgcctgttacagtctgagcccgaaaacccttctctgcaggagacgagcctgtcagtccagctatcgaatcttggtacagtcaggaccctgcggacaaagcagcgtatccagccacagaagacctctgtctacattgaactcggttctgactccagtgaggacaccgttaacaaggcgacatattgtagtgtgggcgatcaggagctcctgcagatcaccccacagggaacaagggatgagataagtcttgatagtgcaaagaaggcggcatgcgaattttccgagacagacgtcactaatactgagcaccaccagccgagcaataacgatctgaatacgactgagaagagggccgcagagagacaccccgagaaatatcaggggtcttctgtaagcaacctgcacgtcgaaccctgcggtaccaacacgcacgcaagcagtctgcaacacgagaattcttccctcctattgacaaaagataggatgaatgtagagaaggccgagttctgcaataaaagtaagcagccagggttagcacgatcacagcataataggtgggcagggagtaaagagacttgcaatgacagacgaactccatctaccgaaaagaaggtggacctgaatgccgatccattgtgcgagcgcaaggagtggaacaaacagaagttgccctgcagcgaaaaccctagggacacagaagatgtaccctggattacactcaatagctctattcagaaagtgaacgagtggttctctagaagcgacgagctgctgggctcagacgacagtcatgatggtgagtctgaatcgaacgccaaagttgccgacgtattggatgttctgaatgaagttgacgagtattccggttcttctgagaaaatcgatctgctggcaagcgatccgcacgaggccctgatttgtaagtccgaacgagtccactcaaaaagcgtggagtcgaatatagaggacaaaatctttgggaagacatatagaaaaaaagccagcctgcctaatctgtcacacgtaacagaaaacctgatcatcggtgcttttgttacggaaccccagattatacaggaacggccactgactaacaagctgaaacggaaaagaaggcctacttcgggtttgcaccccgaggacttcattaagaaagccgatctggctgtgcaaaagacgccagagatgattaaccagggaaccaaccagacagagcagaatggccaggtgatgaatatcactaattcgggacatgaaaacaaaacaaaaggcgattctatccaaaatgaaaaaaaccccaaccctatcgaatcattggagaaggagagcgcattcaagaccaaggctgaaccaattagttcatctatctccaatatggagttggagctcaacattcataatagcaaggcacctaagaaaaacaggctcaggagaaaaagtagtacccgccatattcacgcactagagttggtcgtgagccgaaacctatctcccccaaactgtaccgaactgcaaatcgattcctgctcctcctcagaagagatcaaaaagaagaaatataatcaaatgccagtccgacacagtcgcaacctccagctgatggaaggcaaggagcctgctacaggcgcaaaaaagtctaacaagcccaacgagcagacgtcaaaaagacacgactctgatacatttcctgagctcaagctgaccaatgcacccggaagtttcactaaatgttccaatacatctgagctgaaagagttcgtgaacccgtcccttcccagagaagagaaagaagagaaacttgaaactgttaaagtttccaataacgctgaggacccaaaggatctcatgctatccggggaaagggtgctgcaaaccgaaagaagtgtggaaagttcatccatctctctcgtcccagggactgactatggcacacaggaaagcattagcctgttagaggtgtccacacttggcaaggccaagaccgaacctaacaagtgcgttagccagtgcgctgcattcgaaaatcccaaaggactcattcatggatgtagtaaggataatagaaatgacaccgagggtttcaagtacccactgggacacgaagtgaatcattccagagaaaccagcatagaaatggaggagtccgagctcgacgcccaatacttgcaaaacacgtttaaagtttctaaaagacagagctttgccccttttagcaatccgggtaatgcagaagaagaatgcgcaacatttagtgctcacagtggcagtctaaaaaaacagtctcccaaagtaacatttgagtgtgagcagaaggaagagaaccaggggaagaacgagagcaacattaagcccgtacaaacagtgaatattactgctggcttcccggtggtgggacaaaaagacaaaccagtcgataatgcgaagtgtagtatcaagggtgggtctcgtttttgcctgtccagtcaattccgaggtaatgaaaccggactgatcactcccaacaaacatgggttactgcagaatccctaccggatccctcctctgttccctatcaagagtttcgtgaaaacaaaatgcaagaaaaacctgctggaggagaacttcgaggaacactctatgtcacccgaacgggaaatgggcaacgaaaacatccctagtactgtatctaccatttctaggaacaatattagagagaatgtgttcaaggaggcgtcctcttccaatatcaatgaagtcggttcgtcaaccaatgaggtgggaagcagtattaatgagatcggctcctccgatgaaaacattcaggcagaactgggccgaaatagagggccaaaattgaacgccatgctccgattaggcgttctgcagcctgaggtttacaaacagagtctgccgggtagcaactgcaagcacccggagattaaaaaacaagaatacgaggaagtggtacagaccgtaaatacggatttctctccttatctcatctcagacaacctggagcagccaatgggttcatcccacgcctctcaggtgtgctctgaaacccccgatgacctgctggacgatggagagatcaaagaggacacaagcttcgcagagaacgatatcaaagagtcatccgcagtcttctcaaaatctgttcagaagggggaactgagtcgtagtccatcaccgtttacccacacccaccttgctcagggttacagaagaggagctaagaaattagaatccagtgaggagaacttatcttcagaggacgaggagctcccctgctttcagcatttgcttttcggcaaggtcaataacattccaagtcagagcacgcgtcacagtactgtagccaccgagtgcttatcaaaaaatacagaagagaacctgctgagtctgaaaaatagcctgaatgactgtagtaatcaggtgattctggcaaaagctagtcaggagcatcatttgagcgaagagaccaaatgttcagctagcttatttagtagccagtgtagcgaactggaagacctcaccgcgaatactaacacccaggatcctttccttatcgggtcttcaaagcagatgcgccaccaatccgaatctcagggggtaggacttagtgataaagaactagtgagtgatgatgaagagagaggaactggtctggaggagaacaatcaggaggagcaaagcatggactctaacctgggtgaggccgctagcggctgtgaatcggagaccagcgtgtcggaggactgctcagggctgagcagccagtcagacatacttacaacccaacaacgcgacactatgcaacataacttgataaaactgcagcaggaaatggcggagcttgaggccgtattggagcagcacgggtcacagccatctaacagctacccctctattatctcagatagttccgcactcgaggatttaaggaatcccgagcagtccacatcggaaaaggactcccatatccatggccagagaaacaattccatgttcagtaagcgcccacgtgaacatatctcggccgttctcaccagccagaaaagttccgaataccccatttcccagaatccggaaggtctgtcggctgataaatttgaggtctccgccgacagcagtacctcgaagaataaggaaccgggagtcgagcgctctagccctagtaaatgcccttcactggatgatcggtggtacatgcactcatgcagtggctccttgcagaacagaaactatcccagccaagaggagttaataaaagttgtagatgtcgaagaacagcagctggaggaaagtggtccacacgacctcaccgagaccagctacctaccacgtcaggacctcgagggaactccctaccttgaatcaggaatcagcctttttagcgacgatcctgagtccgacccttccgaagacagggcaccagagtcagctagggttggcaacattccatcatccacctctgcccttaaagtgccccaactgaaggtggccgagagcgcccagtcgcccgcagctgcccatacgaccgatacggcaggctacaatgccatggaagaatcggtaagcagagagaagcccgaattgaccgcctcgactgaacgcgtgaacaagcgtatgtccatggtggtttcaggtctgacaccagaggagtttatgctcgtgtacaaattcgcccgaaaacaccacattactttgacaaatctcattacagaggagaccacacacgtggtgatgaagaccgacgctgagtttgtctgtgaacgcactttgaaatatttcctgggaattgctggcggaaagtgggtggtaagctatttttgggttacccagtctataaaggaaagaaagatgctgaatgaacacgatttcgaagtcagaggagatgtggtcaacggaaggaatcaccagggacctaaacgagcccgagaaagtcaggacaggaaaatcttccgtggcctggagatatgttgctatggaccatttaccaatatgcccaccgaccaattggagtggatggtgcagctgtgtggcgcttcagttgtgaaggaactgtcttcattcaccctcggaacgggcgtgcatcctatagtcgtggttcagcctgacgcctggacggaggataacggctttcatgctattggtcaaatgtgcgaagccccagttgtgaccagagagtgggttctcgacagtgtggcgttgtaccagtgtcaggagttagacacctacctgatcccccagatccctcattctcattacta

SEQ ID NO: 171765 - DNA, 6451 bp, Artificial Sequence
  derived and/or modified sequence
cttagcggtagccccttggtttccgtggcaacggaaaagcgcgggaattacagataaattaaaactgcgactgcgcggcgtgagctcgctgagacttcctggacgggggacaggctgtggggtttctcagataactgggcccctgcgctcaggaggccttcaccctctgctctggttcattggaacagaaagaaatggatttatctgctcttcgcgttgaagaagtacaaaatgtcattaatgctatgcagaaaatcttagagtgtcccatctgtctggagttgatcaaggaacctgtctccacaaagtgtgaccacatattttgcaaattttgcatgctgaaacttctcaaccagaagaaagggccttcacagtgtcctttatgtaagaatgatataaccaaaaggagcctacaagaaagtacgagatttagtcaacttgttgaagagctattgaaaatcatttgtgcttttcagcttgacacaggtttggagtatgcaaacagctataattttgcaaaaaaggaaaataactctcctgaacatctaaaagatgaagtttctatcatccaaagtatgggctacagaaaccgtgccaaaagacttctacagagtgaacccgaaaatccttccttgcaggaaaccagtctcagtgtccaactctctaaccttggaactgtgagaactctgaggacaaagcagcggatacaacctcaaaagacgtctgtctacattgaattgggatctgattcttctgaagataccgttaataaggcaacttattgcagtgtgggagatcaagaattgttacaaatcacccctcaaggaaccagggatgaaatcagtttggattctgcaaaaaaggctgcttgtgaattttctgagacggatgtaacaaatactgaacatcatcaacccagtaataatgatttgaacaccactgagaagcgtgcagctgagaggcatccagaaaagtatcagggtagttctgtttcaaacttgcatgtggagccatgtggcacaaatactcatgccagctcattacagcatgagaacagcagtttattactcactaaagacagaatgaatgtagaaaaggctgaattctgtaataaaagcaaacagcctggcttagcaaggagccaacataacagatgggctggaagtaaggaaacatgtaatgataggcggactcccagcacagaaaaaaaggtagatctgaatgctgatcccctgtgtgagagaaaagaatggaataagcagaaactgccatgctcagagaatcctagagatactgaagatgttccttggataacactaaatagcagcattcagaaagttaatgagtggttttccagaagtgatgaactgttaggttctgatgactcacatgatggggagtctgaatcaaatgccaaagtagctgatgtattggacgttctaaatgaggtagatgaatattctggttcttcagagaaaatagacttactggccagtgatcctcatgaggctttaatatgtaaaagtgaaagagttcactccaaatcagtagagagtaatattgaagacaaaatatttgggaaaacctatcggaagaaggcaagcctccccaacttaagccatgtaactgaaaatctaattataggagcatttgttactgagccacagataatacaagagcgtcccctcacaaataaattaaagcgtaaaaggagacctacatcaggccttcatcctgaggattttatcaagaaagcagatttggcagttcaaaagactcctgaaatgataaatcagggaactaaccaaacggagcagaatggtcaagtgatgaatattactaatagtggtcatgagaataaaacaaaaggtgattctattcagaatgagaaaaatcctaacccaatagaatcactcgaaaaagaatctgctttcaaaacgaaagctgaacctataagcagcagtataagcaatatggaactcgaattaaatatccacaattcaaaagcacctaaaaagaataggctgaggaggaagtcttctaccaggcatattcatgcgcttgaactagtagtcagtagaaatctaagcccacctaattgtactgaattgcaaattgatagttgttctagcagtgaagagataaagaaaaaaaagtacaaccaaatgccagtcaggcacagcagaaacctacaactcatggaaggtaaagaacctgcaactggagccaagaagagtaacaagccaaatgaacagacaagtaaaagacatgacagcgatactttcccagagctgaagttaacaaatgcacctggttcttttactaagtgttcaaataccagtgaacttaaagaatttgtcaatcctagccttccaagagaagaaaaagaagagaaactagaaacagttaaagtgtctaataatgctgaagaccccaaagatctcatgttaagtggagaaagggttttgcaaactgaaagatctgtagagagtagcagtatttcattggtacctggtactgattatggcactcaggaaagtatctcgttactggaagttagcactctagggaaggcaaaaacagaaccaaataaatgtgtgagtcagtgtgcagcatttgaaaaccccaagggactaattcatggttgttccaaagataatagaaatgacacagaaggctttaagtatccattgggacatgaagttaaccacagtcgggaaacaagcatagaaatggaagaaagtgaacttgatgctcagtatttgcagaatacattcaaggtttcaaagcgccagtcatttgctccgttttcaaatccaggaaatgcagaagaggaatgtgcaacattctctgcccactctgggtccttaaagaaacaaagtccaaaagtcacttttgaatgtgaacaaaaggaagaaaatcaaggaaagaatgagtctaatatcaagcctgtacagacagttaatatcactgcaggctttcctgtggttggtcagaaagataagccagttgataatgccaaatgtagtatcaaaggaggctctaggttttgtctatcatctcagttcagaggcaacgaaactggactcattactccaaataaacatggacttttacaaaacccatatcgtataccaccactttttcccatcaagtcatttgttaaaactaaatgtaagaaaaatctgctagaggaaaactttgaggaacattcaatgtcacctgaaagagaaatgggaaatgagaacattccaagtacagtgagcacaattagccgtaataacattagagaaaatgtttttaaagaagccagctcaagcaatattaatgaagtaggttccagtactaatgaagtgggctccagtattaatgaaataggttccagtgatgaaaacattcaagcagaactaggtagaaacagagggccaaaattgaatgctatgcttagattaggggttttgcaacctgaggtctataaacaaagtcttcctggaagtaattgtaagcatcctgaaataaaaaagcaagaatatgaagaagtagttcagactgttaatacagatttctctccatatctgatttcagataacttagaacagcctatgggaagtagtcatgcatctcaggtttgttctgagacacctgatgacctgttagatgatggtgaaataaaggaagatactagttttgctgaaaatgacattaaggaaagttctgctgtttttagcaaaagcgtccagaaaggagagcttagcaggagtcctagccctttcacccatacacatttggctcagggttaccgaagaggggccaagaaattagagtcctcagaagagaacttatctagtgaggatgaagagcttccctgcttccaacacttgttatttggtaaagtaaacaatataccttctcagtctactaggcatagcaccgttgctaccgagtgtctgtctaagaacacagaggagaatttattatcattgaagaatagcttaaatgactgcagtaaccaggtaatattggcaaaggcatctcaggaacatcaccttagtgaggaaacaaaatgttctgctagcttgttttcttcacagtgcagtgaattggaagacttgactgcaaatacaaacacccaggatcctttcttgattggttcttccaaacaaatgaggcatcagtctgaaagccagggagttggtctgagtgacaaggaattggtttcagatgatgaagaaagaggaacgggcttggaagaaaataatcaagaagagcaaagcatggattcaaacttaggtgaagcagcatctgggtgtgagagtgaaacaagcgtctctgaagactgctcagggctatcctctcagagtgacattttaaccactcagcagagggataccatgcaacataacctgataaagctccagcaggaaatggctgaactagaagctgtgttagaacagcatgggagccagccttctaacagctacccttccatcataagtgactcttctgcccttgaggacctgcgaaatccagaacaaagcacatcagaaaaagatgctgagtttgtgtgtgaacggacactgaaatattttctaggaattgcgggaggaaaatgggtagttagctatttctgggtgacccagtctattaaagaaagaaaaatgctgaatgagcatgattttgaagtcagaggagatgtggtcaatggaagaaaccaccaaggtccaaagcgagcaagagaatcccaggacagaaagatcttcagggggctagaaatctgttgctatgggcccttcaccaacatgcccacagatcaactggaatggatggtacagctgtgtggtgcttctgtggtgaaggagctttcatcattcacccttggcacaggtgtccacccaattgtggttgtgcagccagatgcctggacagaggacaatggcttccatgcaattgggcagatgtgtgaggcacctgtggtgacccgagagtgggtgttggacagtgtagcactctaccagtgccaggagctggacacctacctgataccccagatcccccacagccactactgactgcagccagccacaggtacagagccacaggaccccaagaatgagcttacaaagtggcctttccaggccctgggagctcctctcactcttcagtccttctactgtcctggctactaaatattttatgtacatcagcctgaaaaggacttctggctatgcaagggtcccttaaagattttctgcttgaagtctcccttggaaatctgccatgagcacaaaattatggtaatttttcacctgagaagattttaaaaccatttaaacgccaccaattgagcaagatgctgattcattatttatcagccctattctttctattcaggctgttgttggcttagggctggaagcacagagtggcttggcctcaagagaatagctggtttccctaagtttacttctctaaaaccctgtgttcacaaaggcagagagtcagacccttcaatggaaggagagtgcttgggatcgattatgtgacttaaagtcagaatagtccttgggcagttctcaaatgttggagtggaacattggggaggaaattctgaggcaggtattagaaatgaaaaggaaacttgaaacctgggcatggtggctcacgcctgtaatcccagcactttgggaggccaaggtgggcagatcactggaggtcaggagttcgaaaccagcctggccaacatggtgaaaccccatctctactaaaaatacagaaattagccggtcatggtggtggacacctgtaatcccagctactcaggtggctaaggcaggagaatcacttcagcccgggaggtggaggttgcagtgagccaagatcataccacggcactccagcctgggtgacagtgagactgtggctcaaaaaaaaaaaaaaaaaaaggaaaatgaaactagaagagatttctaaaagtctgagatatatttgctagatttctaaagaatgtgttctaaaacagcagaagattttcaagaaccggtttccaaagacagtcttctaattcctcattagtaataagtaaaatgtttattgttgtagctctggtatataatccattcctcttaaaatataagacctctggcatgaatatttcatatctataaaatgacagatcccaccaggaaggaagctgttgctttctttgaggtgatttttttcctttgctccctgttgctgaaaccatacagcttcataaataattttgcttgctgaaggaagaaaaagtgtttttcataaacccattatccaggactgtttatagctgttggaaggactaggtcttccctagcccccccagtgtgcaagggcagtgaagacttgattgtacaaaatacgttttgtaaatgttgtgctgttaacactgcaaataaacttggtagcaaacacttcc

SEQ ID NO: 171766 - DNA, 7269 bp, Artificial Sequence
  derived and/or modified sequence
gtaccttgatttcgtattctgagaggctgctgcttagcggtagccccttggtttccgtggcaacggaaaagcgcgggaattacagataaattaaaactgcgactgcgcggcgtgagctcgctgagacttcctggacgggggacaggctgtggggtttctcagataactgggcccctgcgctcaggaggccttcaccctctgctctgggtaaagttcattggaacagaaagaaatggatttatctgctcttcgcgttgaagaagtacaaaatgtcattaatgctatgcagaaaatcttagagtgtcccatctgtctggagttgatcaaggaacctgtctccacaaagtgtgaccacatattttgcaaattttgcatgctgaaacttctcaaccagaagaaagggccttcacagtgtcctttatgtaagaatgatataaccaaaaggagcctacaagaaagtacgagatttagtcaacttgttgaagagctattgaaaatcatttgtgcttttcagcttgacacaggtttggagtatgcaaacagctataattttgcaaaaaaggaaaataactctcctgaacatctaaaagatgaagtttctatcatccaaagtatgggctacagaaaccgtgccaaaagacttctacagagtgaacccgaaaatccttccttgcaggaaaccagtctcagtgtccaactctctaaccttggaactgtgagaactctgaggacaaagcagcggatacaacctcaaaagacgtctgtctacattgaattgggatctgattcttctgaagataccgttaataaggcaacttattgcagtgtgggagatcaagaattgttacaaatcacccctcaaggaaccagggatgaaatcagtttggattctgcaaaaaaggctgcttgtgaattttctgagacggatgtaacaaatactgaacatcatcaacccagtaataatgatttgaacaccactgagaagcgtgcagctgagaggcatccagaaaagtatcagggtagttctgtttcaaacttgcatgtggagccatgtggcacaaatactcatgccagctcattacagcatgagaacagcagtttattactcactaaagacagaatgaatgtagaaaaggctgaattctgtaataaaagcaaacagcctggcttagcaaggagccaacataacagatgggctggaagtaaggaaacatgtaatgataggcggactcccagcacagaaaaaaaggtagatctgaatgctgatcccctgtgtgagagaaaagaatggaataagcagaaactgccatgctcagagaatcctagagatactgaagatgttccttggataacactaaatagcagcattcagaaagttaatgagtggttttccagaagtgatgaactgttaggttctgatgactcacatgatggggagtctgaatcaaatgccaaagtagctgatgtattggacgttctaaatgaggtagatgaatattctggttcttcagagaaaatagacttactggccagtgatcctcatgaggctttaatatgtaaaagtgaaagagttcactccaaatcagtagagagtaatattgaagacaaaatatttgggaaaacctatcggaagaaggcaagcctccccaacttaagccatgtaactgaaaatctaattataggagcatttgttactgagccacagataatacaagagcgtcccctcacaaataaattaaagcgtaaaaggagacctacatcaggccttcatcctgaggattttatcaagaaagcagatttggcagttcaaaagactcctgaaatgataaatcagggaactaaccaaacggagcagaatggtcaagtgatgaatattactaatagtggtcatgagaataaaacaaaaggtgattctattcagaatgagaaaaatcctaacccaatagaatcactcgaaaaagaatctgctttcaaaacgaaagctgaacctataagcagcagtataagcaatatggaactcgaattaaatatccacaattcaaaagcacctaaaaagaataggctgaggaggaagtcttctaccaggcatattcatgcgcttgaactagtagtcagtagaaatctaagcccacctaattgtactgaattgcaaattgatagttgttctagcagtgaagagataaagaaaaaaaagtacaaccaaatgccagtcaggcacagcagaaacctacaactcatggaaggtaaagaacctgcaactggagccaagaagagtaacaagccaaatgaacagacaagtaaaagacatgacagcgatactttcccagagctgaagttaacaaatgcacctggttcttttactaagtgttcaaataccagtgaacttaaagaatttgtcaatcctagccttccaagagaagaaaaagaagagaaactagaaacagttaaagtgtctaataatgctgaagaccccaaagatctcatgttaagtggagaaagggttttgcaaactgaaagatctgtagagagtagcagtatttcattggtacctggtactgattatggcactcaggaaagtatctcgttactggaagttagcactctagggaaggcaaaaacagaaccaaataaatgtgtgagtcagtgtgcagcatttgaaaaccccaagggactaattcatggttgttccaaagataatagaaatgacacagaaggctttaagtatccattgggacatgaagttaaccacagtcgggaaacaagcatagaaatggaagaaagtgaacttgatgctcagtatttgcagaatacattcaaggtttcaaagcgccagtcatttgctccgttttcaaatccaggaaatgcagaagaggaatgtgcaacattctctgcccactctgggtccttaaagaaacaaagtccaaaagtcacttttgaatgtgaacaaaaggaagaaaatcaaggaaagaatgagtctaatatcaagcctgtacagacagttaatatcactgcaggctttcctgtggttggtcagaaagataagccagttgataatgccaaatgtagtatcaaaggaggctctaggttttgtctatcatctcagttcagaggcaacgaaactggactcattactccaaataaacatggacttttacaaaacccatatcgtataccaccactttttcccatcaagtcatttgttaaaactaaatgtaagaaaaatctgctagaggaaaactttgaggaacattcaatgtcacctgaaagagaaatgggaaatgagaacattccaagtacagtgagcacaattagccgtaataacattagagaaaatgtttttaaagaagccagctcaagcaatattaatgaagtaggttccagtactaatgaagtgggctccagtattaatgaaataggttccagtgatgaaaacattcaagcagaactaggtagaaacagagggccaaaattgaatgctatgcttagattaggggttttgcaacctgaggtctataaacaaagtcttcctggaagtaattgtaagcatcctgaaataaaaaagcaagaatatgaagaagtagttcagactgttaatacagatttctctccatatctgatttcagataacttagaacagcctatgggaagtagtcatgcatctcaggtttgttctgagacacctgatgacctgttagatgatggtgaaataaaggaagatactagttttgctgaaaatgacattaaggaaagttctgctgtttttagcaaaagcgtccagaaaggagagcttagcaggagtcctagccctttcacccatacacatttggctcagggttaccgaagaggggccaagaaattagagtcctcagaagagaacttatctagtgaggatgaagagcttccctgcttccaacacttgttatttggtaaagtaaacaatataccttctcagtctactaggcatagcaccgttgctaccgagtgtctgtctaagaacacagaggagaatttattatcattgaagaatagcttaaatgactgcagtaaccaggtaatattggcaaaggcatctcaggaacatcaccttagtgaggaaacaaaatgttctgctagcttgttttcttcacagtgcagtgaattggaagacttgactgcaaatacaaacacccaggatcctttcttgattggttcttccaaacaaatgaggcatcagtctgaaagccagggagttggtctgagtgacaaggaattggtttcagatgatgaagaaagaggaacgggcttggaagaaaataatcaagaagagcaaagcatggattcaaacttaggtgaagcagcatctgggtgtgagagtgaaacaagcgtctctgaagactgctcagggctatcctctcagagtgacattttaaccactcagcagagggataccatgcaacataacctgataaagctccagcaggaaatggctgaactagaagctgtgttagaacagcatgggagccagccttctaacagctacccttccatcataagtgactcttctgcccttgaggacctgcgaaatccagaacaaagcacatcagaaaaagattcgcatatacatggccaaaggaacaactccatgttttctaaaaggcctagagaacatatatcagtattaacttcacagaaaagtagtgaataccctataagccagaatccagaaggcctttctgctgacaagtttgaggtgtctgcagatagttctaccagtaaaaataaagaaccaggagtggaaaggtcatccccttctaaatgcccatcattagatgataggtggtacatgcacagttgctctgggagtcttcagaatagaaactacccatctcaagaggagctcattaaggttgttgatgtggaggagcaacagctggaagagtctgggccacacgatttgacggaaacatcttacttgccaaggcaagatctagagggaaccccttacctggaatctggaatcagcctcttctctgatgaccctgaatctgatccttctgaagacagagccccagagtcagctcgtgttggcaacataccatcttcaacctctgcattgaaagttccccaattgaaagttgcagaatctgcccagagtccagctgctgctcatactactgatactgctgggtataatgcaatggaagaaagtgtgagcagggagaagccagaattgacagcttcaacagaaagggtcaacaaaagaatgtccatggtggtgtctggcctgaccccagaagaatttatgctcgtgtacaagtttgccagaaaacaccacatcactttaactaatctaattactgaagagactactcatgttgttatgaaaacagatgctgagtttgtgtgtgaacggacactgaaatattttctaggaattgcgggaggaaaatgggtagttagctatttctgggtgacccagtctattaaagaaagaaaaatgctgaatgagcatgattttgaagtcagaggagatgtggtcaatggaagaaaccaccaaggtccaaagcgagcaagagaatcccaggacagaaagatcttcagggggctagaaatctgttgctatgggcccttcaccaacatgcccacagatcaactggaatggatggtacagctgtgtggtgcttctgtggtgaaggagctttcatcattcacccttggcacaggtgtccacccaattgtggttgtgcagccagatgcctggacagaggacaatggcttccatgcaattgggcagatgtgtgaggcacctgtggtgacccgagagtgggtgttggacagtgtagcactctaccagtgccaggagctggacacctacctgataccccagatcccccacagccactactgactgcagccagccacaggtacagagccacaggaccccaagaatgagcttacaaagtggcctttccaggccctgggagctcctctcactcttcagtccttctactgtcctggctactaaatattttatgtacatcagcctgaaaaggacttctggctatgcaagggtcccttaaagattttctgcttgaagtctcccttggaaatctgccatgagcacaaaattatggtaatttttcacctgagaagattttaaaaccatttaaacgccaccaattgagcaagatgctgattcattatttatcagccctattctttctattcaggctgttgttggcttagggctggaagcacagagtggcttggcctcaagagaatagctggtttccctaagtttacttctctaaaaccctgtgttcacaaaggcagagagtcagacccttcaatggaaggagagtgcttgggatcgattatgtgacttaaagtcagaatagtccttgggcagttctcaaatgttggagtggaacattggggaggaaattctgaggcaggtattagaaatgaaaaggaaacttgaaacctgggcatggtggctcacgcctgtaatcccagcactttgggaggccaaggtgggcagatcactggaggtcaggagttcgaaaccagcctggccaacatggtgaaaccccatctctactaaaaatacagaaattagccggtcatggtggtggacacctgtaatcccagctactcaggtggctaaggcaggagaatcacttcagcccgggaggtggaggttgcagtgagccaagatcataccacggcactccagcctgggtgacagtgagactgtggctcaaaaaaaaaaaaaaaaaaaggaaaatgaaactagaagagatttctaaaagtctgagatatatttgctagatttctaaagaatgtgttctaaaacagcagaagattttcaagaaccggtttccaaagacagtcttctaattcctcattagtaataagtaaaatgtttattgttgtagctctggtatataatccattcctcttaaaatataagacctctggcatgaatatttcatatctataaaatgacagatcccaccaggaaggaagctgttgctttctttgaggtgatttttttcctttgctccctgttgctgaaaccatacagcttcataaataattttgcttgctgaaggaagaaaaagtgtttttcataaacccattatccaggactgtttatagctgttggaaggactaggtcttccctagcccccccagtgtgcaagggcagtgaagacttgattgtacaaaatacgttttgtaaatgttgtgctgttaacactgcaaataaacttggtagcaaacacttcc

SEQ ID NO: 171767 - DNA, 582 bp, Artificial Sequence
  derived and/or modified sequence
gagctcgctgagacttcctggacgggggacaggctgtggggtttctcagataactgggcccctgcgctcaggaggccttcaccctctgctctggttcattggaacagaaagaaatggatttatctgctcttcgcgttgaagaagtacaaaatgtcattaatgctatgcagaaaatcttagagtgtcccatctgtctggagttgatcaaggaacctgtctccacaaagtgtgaccacatattttgcaaattttgcatgctgaaacttctcaaccagaagaaagggccttcacagtgtcctttatgagcctacaagaaagtacgagatttagtcaacttgttgaagagctattgaaaatcatttgtgcttttcagcttgacacaggtttggagtatgcaaacagctataattttgcaaaaaaggaaaataactctcctgaacatctaaaagatgaagtttctatcatccaaagtatgggctacagaaaccgtgccaaaagacttctacagagtgaacccgaaaatccttccttgcaggaaaccagtctcagtgtccaactctctaaccttggaactgtgagaac

SEQ ID NO: 171768 - DNA, 5939 bp, Artificial Sequence
  derived and/or modified sequence
gtaccttgatttcgtattctgagaggctgctgcttagcggtagccccttggtttccgtggcaacggaaaagcgcgggaattacagataaattaaaactgcgactgcgcggcgtgagctcgctgagacttcctggacgggggacaggctgtggggtttctcagataactgggcccctgcgctcaggaggccttcaccctctgctctgggtaaagttcattggaacagaaagaaatggatttatctgctcttcgcgttgaagaagtacaaaatgtcattaatgctatgcagaaaatcttagagtgtcccatctgtctggagttgatcaaggaacctgtctccacaaagtgtgaccacatattttgcaaattttgcatgctgaaacttctcaaccagaagaaagggccttcacagtgtcctttatgtaagaatgatataaccaaaaggagcctacaagaaagtacgagatttagtcaacttgttgaagagctattgaaaatcatttgtgcttttcagcttgacacaggtttggagtatgcaaacagctataattttgcaaaaaaggaaaataactctcctgaacatctaaaagatgaagtttctatcatccaaagtatgggctacagaaaccgtgccaaaagacttctacagagtgaacccgaaaatccttccttgcaggaaaccagtctcagtgtccaactctctaaccttggaactgtgagaactctgaggacaaagcagcggatacaacctcaaaagacgtctgtctacattgaattgggatctgattcttctgaagataccgttaataaggcaacttattgcagtgtgggagatcaagaattgttacaaatcacccctcaaggaaccagggatgaaatcagtttggattctgcaaaaaaggctgcttgtgaattttctgagacggatgtaacaaatactgaacatcatcaacccagtaataatgatttgaacaccactgagaagcgtgcagctgagaggcatccagaaaagtatcagggtagttctgtttcaaacttgcatgtggagccatgtggcacaaatactcatgccagctcattacagcatgagaacagcagtttattactcactaaagacagaatgaatgtagaaaaggctgaattctgtaataaaagcaaacagcctggcttagcaaggagccaacataacagatgggctggaagtaaggaaacatgtaatgataggcggactcccagcacagaaaaaaaggtagatctgaatgctgatcccctgtgtgagagaaaagaatggaataagcagaaactgccatgctcagagaatcctagagatactgaagatgttccttggataacactaaatagcagcattcagaaagttaatgagtggttttccagaagtgatgaactgttaggttctgatgactcacatgatggggagtctgaatcaaatgccaaagtagctgatgtattggacgttctaaatgaggtagatgaatattctggttcttcagagaaaatagacttactggccagtgatcctcatgaggctttaatatgtaaaagtgaaagagttcactccaaatcagtagagagtaatattgaagacaaaatatttgggaaaacctatcggaagaaggcaagcctccccaacttaagccatgtaactgaaaatctaattataggagcatttgttactgagccacagataatacaagagcgtcccctcacaaataaattaaagcgtaaaaggagacctacatcaggccttcatcctgaggattttatcaagaaagcagatttggcagttcaaaagactcctgaaatgataaatcagggaactaaccaaacggagcagaatggtcaagtgatgaatattactaatagtggtcatgagaataaaacaaaaggtgattctattcagaatgagaaaaatcctaacccaatagaatcactcgaaaaagaatctgctttcaaaacgaaagctgaacctataagcagcagtataagcaatatggaactcgaattaaatatccacaattcaaaagcacctaaaaagaataggctgaggaggaagtcttctaccaggcatattcatgcgcttgaactagtagtcagtagaaatctaagcccacctaattgtactgaattgcaaattgatagttgttctagcagtgaagagataaagaaaaaaaagtacaaccaaatgccagtcaggcacagcagaaacctacaactcatggaaggtaaagaacctgcaactggagccaagaagagtaacaagccaaatgaacagacaagtaaaagacatgacagcgatactttcccagagctgaagttaacaaatgcacctggttcttttactaagtgttcaaataccagtgaacttaaagaatttgtcaatcctagccttccaagagaagaaaaagaagagaaactagaaacagttaaagtgtctaataatgctgaagaccccaaagatctcatgttaagtggagaaagggttttgcaaactgaaagatctgtagagagtagcagtatttcattggtacctggtactgattatggcactcaggaaagtatctcgttactggaagttagcactctagggaaggcaaaaacagaaccaaataaatgtgtgagtcagtgtgcagcatttgaaaaccccaagggactaattcatggttgttccaaagataatagaaatgacacagaaggctttaagtatccattgggacatgaagttaaccacagtcgggaaacaagcatagaaatggaagaaagtgaacttgatgctcagtatttgcagaatacattcaaggtttcaaagcgccagtcatttgctccgttttcaaatccaggaaatgcagaagaggaatgtgcaacattctctgcccactctgggtccttaaagaaacaaagtccaaaagtcacttttgaatgtgaacaaaaggaagaaaatcaaggaaagaatgagtctaatatcaagcctgtacagacagttaatatcactgcaggctttcctgtggttggtcagaaagataagccagttgataatgccaaatgtagtatcaaaggaggctctaggttttgtctatcatctcagttcagaggcaacgaaactggactcattactccaaataaacatggacttttacaaaacccatatcgtataccaccactttttcccatcaagtcatttgttaaaactaaatgtaagaaaaatctgctagaggaaaactttgaggaacattcaatgtcacctgaaagagaaatgggaaatgagaacattccaagtacagtgagcacaattagccgtaataacattagagaaaatgtttttaaagaagccagctcaagcaatattaatgaagtaggttccagtactaatgaagtgggctccagtattaatgaaataggttccagtgatgaaaacattcaagcagaactaggtagaaacagagggccaaaattgaatgctatgcttagattaggggttttgcaacctgaggtctataaacaaagtcttcctggaagtaattgtaagcatcctgaaataaaaaagcaagaatatgaagaagtagttcagactgttaatacagatttctctccatatctgatttcagataacttagaacagcctatgggaagtagtcatgcatctcaggtttgttctgagacacctgatgacctgttagatgatggtgaaataaaggaagatactagttttgctgaaaatgacattaaggaaagttctgctgtttttagcaaaagcgtccagaaaggagagcttagcaggagtcctagccctttcacccatacacatttggctcagggttaccgaagaggggccaagaaattagagtcctcagaagagaacttatctagtgaggatgaagagcttccctgcttccaacacttgttatttggtaaagtaaacaatataccttctcagtctactaggcatagcaccgttgctaccgagtgtctgtctaagaacacagaggagaatttattatcattgaagaatagcttaaatgactgcagtaaccaggtaatattggcaaaggcatctcaggaacatcaccttagtgaggaaacaaaatgttctgctagcttgttttcttcacagtgcagtgaattggaagacttgactgcaaatacaaacacccaggatcctttcttgattggttcttccaaacaaatgaggcatcagtctgaaagccagggagttggtctgagtgacaaggaattggtttcagatgatgaagaaagaggaacgggcttggaagaaaataatcaagaagagcaaagcatggattcaaacttaggtgaagcagcatctgggtgtgagagtgaaacaagcgtctctgaagactgctcagggctatcctctcagagtgacattttaaccactcagcagagggataccatgcaacataacctgataaagctccagcaggaaatggctgaactagaagctgtgttagaacagcatgggagccagccttctaacagctacccttccatcataagtgactcttctgcccttgaggacctgcgaaatccagaacaaagcacatcagaaaaagattcgcatatacatggccaaaggaacaactccatgttttctaaaaggcctagagaacatatatcagcagtattaacttcacagaaaagtagtgaataccctataagccagaatccagaaggcctttctgctgacaagtttgaggtgtctgcagatagttctaccagtaaaaataaagaaccaggagtggaaaggtcatccccttctaaatgcccatcattagatgataggtggtacatgcacagttgctctgggagtcttcagaatagaaactacccatctcaagaggagctcattaaggttgttgatgtggaggagcaacagctggaagagtctgggccacacgatttgacggaaacatcttacttgccaaggcaagatctagagggaaccccttacctggaatctggaatcagcctcttctctgatgaccctgaatctgatccttctgaagacagagccccagagtcagctcgtgttggcaacataccatcttcaacctctgcattgaaagttccccaattgaaagttgcagaatctgcccagagtccagctgctgctcatactactgatactgctgggtataatgcaatggaagaaagtgtgagcagggagaagccagaattgacagcttcaacagaaagggtcaacaaaagaatgtccatggtggtgtctggcctgaccccagaagaatttatgctcgtgtacaagtttgccagaaaacaccacatcactttaactaatctaattactgaagagactactcatgttgttatgaaaacagatgctgagtttgtgtgtgaacggacactgaaatattttctaggaattgcgggaggaaaatgggtagttagctatttctgggtgacccagtctattaaagaaagaaaaatgctgaatgagcatgattttgaagtcagaggagatgtggtcaatggaagaaaccaccaaggtccaaagcgagcaagagaatcccaggacagaaagatcttcagggggctagaaatctgttgctatgggcccttcaccaacatgcccacagatcaactggaatggatggtacagctgtgtggtgcttctgtggtgaaggagctttcatcattcacccttggcacaggtgtccacccaattgtggttgtgcagccagatgcctggacagaggacaatggcttccatgcaattgggcagatgtgtgaggcacctgtggtgacccgagagtgggtgttggacagtgtagcactctaccagtgccaggagctggacacctacctgataccccagatcccccacagccactactgactgcagccagccacaggtacagagccacaggaccccaagaatgagctta

SEQ ID NO: 171769 - DNA, 4875 bp, Artificial Sequence
  derived and/or modified sequence
atggacctgagcgccctgagagtggaggaggtgcagaacgtgatcaacgccatgcagaagatcctggagtgccccatctgcctggagctgatcaaggagcccgtgagcaccaagtgcgaccacatcttctgcaagttctgcatgctgaagctgctgaaccagaagaagggccccagccagtgccccctgtgcaagaacgacatcaccaagagaagcctgcaggagagcaccagattcagccagctggtggaggagctgctgaagatcatctgcgccttccagctggacaccggcctggagtacgccaacagctacaacttcgccaagaaggagaacaacagccccgagcacctgaaggacgaggtgagcatcatccagagcatgggctacagaaacagagccaagagactgctgcagagcgagcccgagaaccccagcctgcaggagaccagcctgagcgtgcagctgagcaacctgggcaccgtgagaaccctgagaaccaagcagagaatccagccccagaagaccagcgtgtacatcgagctgggcagcgacagcagcgaggacaccgtgaacaaggccacctactgcagcgtgggcgaccaggagctgctgcagatcaccccccagggcaccagagacgagatcagcctggacagcgccaagaaggccgcctgcgagttcagcgagaccgacgtgaccaacaccgagcaccaccagcccagcaacaacgacctgaacaccaccgagaagagagccgccgagagacaccccgagaagtaccagggcagcagcgtgagcaacctgcacgtggagccctgcggcaccaacacccacgccagcagcctgcagcacgagaacagcagcctgctgctgaccaaggacagaatgaacgtggagaaggccgagttctgcaacaagagcaagcagcccggcctggccagaagccagcacaacagatgggccggcagcaaggagacctgcaacgacagaagaacccccagcaccgagaagaaggtggacctgaacgccgaccccctgtgcgagagaaaggagtggaacaagcagaagctgccctgcagcgagaaccccagagacaccgaggacgtgccctggatcaccctgaacagcagcatccagaaggtgaacgagtggttcagcagaagcgacgagctgctgggcagcgacgacagccacgacggcgagagcgagagcaacgccaaggtggccgacgtgctggacgtgctgaacgaggtggacgagtacagcggcagcagcgagaagatcgacctgctggccagcgacccccacgaggccctgatctgcaagagcgagagagtgcacagcaagagcgtggagagcaacatcgaggacaagatcttcggcaagacctacagaaagaaggccagcctgcccaacctgagccacgtgaccgagaacctgatcatcggcgccttcgtgaccgagccccagatcatccaggagagacccctgaccaacaagctgaagagaaagagaagacccaccagcggcctgcaccccgaggacttcatcaagaaggccgacctggccgtgcagaagacccccgagatgatcaaccagggcaccaaccagaccgagcagaacggccaggtgatgaacatcaccaacagcggccacgagaacaagaccaagggcgacagcatccagaacgagaagaaccccaaccccatcgagagcctggagaaggagagcgccttcaagaccaaggccgagcccatcagcagcagcatcagcaacatggagctggagctgaacatccacaacagcaaggcccccaagaagaacagactgagaagaaagagcagcaccagacacatccacgccctggagctggtggtgagcagaaacctgagcccccccaactgcaccgagctgcagatcgacagctgcagcagcagcgaggagatcaagaagaagaagtacaaccagatgcccgtgagacacagcagaaacctgcagctgatggagggcaaggagcccgccaccggcgccaagaagagcaacaagcccaacgagcagaccagcaagagacacgacagcgacaccttccccgagctgaagctgaccaacgcccccggcagcttcaccaagtgcagcaacaccagcgagctgaaggagttcgtgaaccccagcctgcccagagaggagaaggaggagaagctggagaccgtgaaggtgagcaacaacgccgaggaccccaaggacctgatgctgagcggcgagagagtgctgcagaccgagagaagcgtggagagcagcagcatcagcctggtgcccggcaccgactacggcacccaggagagcatcagcctgctggaggtgagcaccctgggcaaggccaagaccgagcccaacaagtgcgtgagccagtgcgccgccttcgagaaccccaagggcctgatccacggctgcagcaaggacaacagaaacgacaccgagggcttcaagtaccccctgggccacgaggtgaaccacagcagagagaccagcatcgagatggaggagagcgagctggacgcccagtacctgcagaacaccttcaaggtgagcaagagacagagcttcgcccccttcagcaaccccggcaacgccgaggaggagtgcgccaccttcagcgcccacagcggcagcctgaagaagcagagccccaaggtgaccttcgagtgcgagcagaaggaggagaaccagggcaagaacgagagcaacatcaagcccgtgcagaccgtgaacatcaccgccggcttccccgtggtgggccagaaggacaagcccgtggacaacgccaagtgcagcatcaagggcggcagcagattctgcctgagcagccagttcagaggcaacgagaccggcctgatcacccccaacaagcacggcctgctgcagaacccctacagaatcccccccctgttccccatcaagagcttcgtgaagaccaagtgcaagaagaacctgctggaggagaacttcgaggagcacagcatgagccccgagagagagatgggcaacgagaacatccccagcaccgtgagcaccatcagcagaaacaacatcagagagaacgtgttcaaggaggccagcagcagcaacatcaacgaggtgggcagcagcaccaacgaggtgggcagcagcatcaacgagatcggcagcagcgacgagaacatccaggccgagctgggcagaaacagaggccccaagctgaacgccatgctgagactgggcgtgctgcagcccgaggtgtacaagcagagcctgcccggcagcaactgcaagcaccccgagatcaagaagcaggagtacgaggaggtggtgcagaccgtgaacaccgacttcagcccctacctgatcagcgacaacctggagcagcccatgggcagcagccacgccagccaggtgtgcagcgagacccccgacgacctgctggacgacggcgagatcaaggaggacaccagcttcgccgagaacgacatcaaggagagcagcgccgtgttcagcaagagcgtgcagaagggcgagctgagcagaagccccagccccttcacccacacccacctggcccagggctacagaagaggcgccaagaagctggagagcagcgaggagaacctgagcagcgaggacgaggagctgccctgcttccagcacctgctgttcggcaaggtgaacaacatccccagccagagcaccagacacagcaccgtggccaccgagtgcctgagcaagaacaccgaggagaacctgctgagcctgaagaacagcctgaacgactgcagcaaccaggtgatcctggccaaggccagccaggagcaccacctgagcgaggagaccaagtgcagcgccagcctgttcagcagccagtgcagcgagctggaggacctgaccgccaacaccaacacccaggaccccttcctgatcggcagcagcaagcagatgagacaccagagcgagagccagggcgtgggcctgagcgacaaggagctggtgagcgacgacgaggagagaggcaccggcctggaggagaacaaccaggaggagcagagcatggacagcaacctgggcgaggccgccagcggctgcgagagcgagaccagcgtgagcgaggactgcagcggcctgagcagccagagcgacatcctgaccacccagcagagagacaccatgcagcacaacctgatcaagctgcagcaggagatggccgagctggaggccgtgctggagcagcacggcagccagcccagcaacagctaccccagcatcatcagcgacagcagcgccctggaggacctgagaaaccccgagcagagcaccagcgagaaggacgccgagttcgtgtgcgagagaaccctgaagtacttcctgggcatcgccggcggcaagtgggtggtgagctacttctgggtgacccagagcatcaaggagagaaagatgctgaacgagcacgacttcgaggtgagaggcgacgtggtgaacggcagaaaccaccagggccccaagagagccagagagagccaggacagaaagatcttcagaggcctggagatctgctgctacggccccttcaccaacatgcccaccgaccagctggagtggatggtgcagctgtgcggcgccagcgtggtgaaggagctgagcagcttcaccctgggcaccggcgtgcaccccatcgtggtggtgcagcccgacgcctggaccgaggacaacggcttccacgccatcggccagatgtgcgaggcccccgtggtgaccagagagtgggtgctggacagcgtggccctgtaccagtgccaggagctggacacctacctgatcccccagatcccccacagccactactag

SEQ ID NO: 171770 - DNA, 5655 bp, Artificial Sequence
  derived and/or modified sequence
atggacctgagcgccctgagagtggaggaggtgcagaacgtgatcaacgccatgcagaagatcctggagtgccccatctgcctggagctgatcaaggagcccgtgagcaccaagtgcgaccacatcttctgcaagttctgcatgctgaagctgctgaaccagaagaagggccccagccagtgccccctgtgcaagaacgacatcaccaagagaagcctgcaggagagcaccagattcagccagctggtggaggagctgctgaagatcatctgcgccttccagctggacaccggcctggagtacgccaacagctacaacttcgccaagaaggagaacaacagccccgagcacctgaaggacgaggtgagcatcatccagagcatgggctacagaaacagagccaagagactgctgcagagcgagcccgagaaccccagcctgcaggagaccagcctgagcgtgcagctgagcaacctgggcaccgtgagaaccctgagaaccaagcagagaatccagccccagaagaccagcgtgtacatcgagctgggcagcgacagcagcgaggacaccgtgaacaaggccacctactgcagcgtgggcgaccaggagctgctgcagatcaccccccagggcaccagagacgagatcagcctggacagcgccaagaaggccgcctgcgagttcagcgagaccgacgtgaccaacaccgagcaccaccagcccagcaacaacgacctgaacaccaccgagaagagagccgccgagagacaccccgagaagtaccagggcagcagcgtgagcaacctgcacgtggagccctgcggcaccaacacccacgccagcagcctgcagcacgagaacagcagcctgctgctgaccaaggacagaatgaacgtggagaaggccgagttctgcaacaagagcaagcagcccggcctggccagaagccagcacaacagatgggccggcagcaaggagacctgcaacgacagaagaacccccagcaccgagaagaaggtggacctgaacgccgaccccctgtgcgagagaaaggagtggaacaagcagaagctgccctgcagcgagaaccccagagacaccgaggacgtgccctggatcaccctgaacagcagcatccagaaggtgaacgagtggttcagcagaagcgacgagctgctgggcagcgacgacagccacgacggcgagagcgagagcaacgccaaggtggccgacgtgctggacgtgctgaacgaggtggacgagtacagcggcagcagcgagaagatcgacctgctggccagcgacccccacgaggccctgatctgcaagagcgagagagtgcacagcaagagcgtggagagcaacatcgaggacaagatcttcggcaagacctacagaaagaaggccagcctgcccaacctgagccacgtgaccgagaacctgatcatcggcgccttcgtgaccgagccccagatcatccaggagagacccctgaccaacaagctgaagagaaagagaagacccaccagcggcctgcaccccgaggacttcatcaagaaggccgacctggccgtgcagaagacccccgagatgatcaaccagggcaccaaccagaccgagcagaacggccaggtgatgaacatcaccaacagcggccacgagaacaagaccaagggcgacagcatccagaacgagaagaaccccaaccccatcgagagcctggagaaggagagcgccttcaagaccaaggccgagcccatcagcagcagcatcagcaacatggagctggagctgaacatccacaacagcaaggcccccaagaagaacagactgagaagaaagagcagcaccagacacatccacgccctggagctggtggtgagcagaaacctgagcccccccaactgcaccgagctgcagatcgacagctgcagcagcagcgaggagatcaagaagaagaagtacaaccagatgcccgtgagacacagcagaaacctgcagctgatggagggcaaggagcccgccaccggcgccaagaagagcaacaagcccaacgagcagaccagcaagagacacgacagcgacaccttccccgagctgaagctgaccaacgcccccggcagcttcaccaagtgcagcaacaccagcgagctgaaggagttcgtgaaccccagcctgcccagagaggagaaggaggagaagctggagaccgtgaaggtgagcaacaacgccgaggaccccaaggacctgatgctgagcggcgagagagtgctgcagaccgagagaagcgtggagagcagcagcatcagcctggtgcccggcaccgactacggcacccaggagagcatcagcctgctggaggtgagcaccctgggcaaggccaagaccgagcccaacaagtgcgtgagccagtgcgccgccttcgagaaccccaagggcctgatccacggctgcagcaaggacaacagaaacgacaccgagggcttcaagtaccccctgggccacgaggtgaaccacagcagagagaccagcatcgagatggaggagagcgagctggacgcccagtacctgcagaacaccttcaaggtgagcaagagacagagcttcgcccccttcagcaaccccggcaacgccgaggaggagtgcgccaccttcagcgcccacagcggcagcctgaagaagcagagccccaaggtgaccttcgagtgcgagcagaaggaggagaaccagggcaagaacgagagcaacatcaagcccgtgcagaccgtgaacatcaccgccggcttccccgtggtgggccagaaggacaagcccgtggacaacgccaagtgcagcatcaagggcggcagcagattctgcctgagcagccagttcagaggcaacgagaccggcctgatcacccccaacaagcacggcctgctgcagaacccctacagaatcccccccctgttccccatcaagagcttcgtgaagaccaagtgcaagaagaacctgctggaggagaacttcgaggagcacagcatgagccccgagagagagatgggcaacgagaacatccccagcaccgtgagcaccatcagcagaaacaacatcagagagaacgtgttcaaggaggccagcagcagcaacatcaacgaggtgggcagcagcaccaacgaggtgggcagcagcatcaacgagatcggcagcagcgacgagaacatccaggccgagctgggcagaaacagaggccccaagctgaacgccatgctgagactgggcgtgctgcagcccgaggtgtacaagcagagcctgcccggcagcaactgcaagcaccccgagatcaagaagcaggagtacgaggaggtggtgcagaccgtgaacaccgacttcagcccctacctgatcagcgacaacctggagcagcccatgggcagcagccacgccagccaggtgtgcagcgagacccccgacgacctgctggacgacggcgagatcaaggaggacaccagcttcgccgagaacgacatcaaggagagcagcgccgtgttcagcaagagcgtgcagaagggcgagctgagcagaagccccagccccttcacccacacccacctggcccagggctacagaagaggcgccaagaagctggagagcagcgaggagaacctgagcagcgaggacgaggagctgccctgcttccagcacctgctgttcggcaaggtgaacaacatccccagccagagcaccagacacagcaccgtggccaccgagtgcctgagcaagaacaccgaggagaacctgctgagcctgaagaacagcctgaacgactgcagcaaccaggtgatcctggccaaggccagccaggagcaccacctgagcgaggagaccaagtgcagcgccagcctgttcagcagccagtgcagcgagctggaggacctgaccgccaacaccaacacccaggaccccttcctgatcggcagcagcaagcagatgagacaccagagcgagagccagggcgtgggcctgagcgacaaggagctggtgagcgacgacgaggagagaggcaccggcctggaggagaacaaccaggaggagcagagcatggacagcaacctgggcgaggccgccagcggctgcgagagcgagaccagcgtgagcgaggactgcagcggcctgagcagccagagcgacatcctgaccacccagcagagagacaccatgcagcacaacctgatcaagctgcagcaggagatggccgagctggaggccgtgctggagcagcacggcagccagcccagcaacagctaccccagcatcatcagcgacagcagcgccctggaggacctgagaaaccccgagcagagcaccagcgagaaggacagccacatccacggccagagaaacaacagcatgttcagcaagagacccagagagcacatcagcgtgctgaccagccagaagagcagcgagtaccccatcagccagaaccccgagggcctgagcgccgacaagttcgaggtgagcgccgacagcagcaccagcaagaacaaggagcccggcgtggagagaagcagccccagcaagtgccccagcctggacgacagatggtacatgcacagctgcagcggcagcctgcagaacagaaactaccccagccaggaggagctgatcaaggtggtggacgtggaggagcagcagctggaggagagcggcccccacgacctgaccgagaccagctacctgcccagacaggacctggagggcaccccctacctggagagcggcatcagcctgttcagcgacgaccccgagagcgaccccagcgaggacagagcccccgagagcgccagagtgggcaacatccccagcagcaccagcgccctgaaggtgccccagctgaaggtggccgagagcgcccagagccccgccgccgcccacaccaccgacaccgccggctacaacgccatggaggagagcgtgagcagagagaagcccgagctgaccgccagcaccgagagagtgaacaagagaatgagcatggtggtgagcggcctgacccccgaggagttcatgctggtgtacaagttcgccagaaagcaccacatcaccctgaccaacctgatcaccgaggagaccacccacgtggtgatgaagaccgacgccgagttcgtgtgcgagagaaccctgaagtacttcctgggcatcgccggcggcaagtgggtggtgagctacttctgggtgacccagagcatcaaggagagaaagatgctgaacgagcacgacttcgaggtgagaggcgacgtggtgaacggcagaaaccaccagggccccaagagagccagagagagccaggacagaaagatcttcagaggcctggagatctgctgctacggccccttcaccaacatgcccaccgaccagctggagtggatggtgcagctgtgcggcgccagcgtggtgaaggagctgagcagcttcaccctgggcaccggcgtgcaccccatcgtggtggtgcagcccgacgcctggaccgaggacaacggcttccacgccatcggccagatgtgcgaggcccccgtggtgaccagagagtgggtgctggacagcgtggccctgtaccagtgccaggagctggacacctacctgatcccccagatcccccacagccactactag

SEQ ID NO: 171771 - DNA, 5658 bp, Artificial Sequence
  derived and/or modified sequence
atggacctgagcgccctgagagtggaggaggtgcagaacgtgatcaacgccatgcagaagatcctggagtgccccatctgcctggagctgatcaaggagcccgtgagcaccaagtgcgaccacatcttctgcaagttctgcatgctgaagctgctgaaccagaagaagggccccagccagtgccccctgtgcaagaacgacatcaccaagagaagcctgcaggagagcaccagattcagccagctggtggaggagctgctgaagatcatctgcgccttccagctggacaccggcctggagtacgccaacagctacaacttcgccaagaaggagaacaacagccccgagcacctgaaggacgaggtgagcatcatccagagcatgggctacagaaacagagccaagagactgctgcagagcgagcccgagaaccccagcctgcaggagaccagcctgagcgtgcagctgagcaacctgggcaccgtgagaaccctgagaaccaagcagagaatccagccccagaagaccagcgtgtacatcgagctgggcagcgacagcagcgaggacaccgtgaacaaggccacctactgcagcgtgggcgaccaggagctgctgcagatcaccccccagggcaccagagacgagatcagcctggacagcgccaagaaggccgcctgcgagttcagcgagaccgacgtgaccaacaccgagcaccaccagcccagcaacaacgacctgaacaccaccgagaagagagccgccgagagacaccccgagaagtaccagggcagcagcgtgagcaacctgcacgtggagccctgcggcaccaacacccacgccagcagcctgcagcacgagaacagcagcctgctgctgaccaaggacagaatgaacgtggagaaggccgagttctgcaacaagagcaagcagcccggcctggccagaagccagcacaacagatgggccggcagcaaggagacctgcaacgacagaagaacccccagcaccgagaagaaggtggacctgaacgccgaccccctgtgcgagagaaaggagtggaacaagcagaagctgccctgcagcgagaaccccagagacaccgaggacgtgccctggatcaccctgaacagcagcatccagaaggtgaacgagtggttcagcagaagcgacgagctgctgggcagcgacgacagccacgacggcgagagcgagagcaacgccaaggtggccgacgtgctggacgtgctgaacgaggtggacgagtacagcggcagcagcgagaagatcgacctgctggccagcgacccccacgaggccctgatctgcaagagcgagagagtgcacagcaagagcgtggagagcaacatcgaggacaagatcttcggcaagacctacagaaagaaggccagcctgcccaacctgagccacgtgaccgagaacctgatcatcggcgccttcgtgaccgagccccagatcatccaggagagacccctgaccaacaagctgaagagaaagagaagacccaccagcggcctgcaccccgaggacttcatcaagaaggccgacctggccgtgcagaagacccccgagatgatcaaccagggcaccaaccagaccgagcagaacggccaggtgatgaacatcaccaacagcggccacgagaacaagaccaagggcgacagcatccagaacgagaagaaccccaaccccatcgagagcctggagaaggagagcgccttcaagaccaaggccgagcccatcagcagcagcatcagcaacatggagctggagctgaacatccacaacagcaaggcccccaagaagaacagactgagaagaaagagcagcaccagacacatccacgccctggagctggtggtgagcagaaacctgagcccccccaactgcaccgagctgcagatcgacagctgcagcagcagcgaggagatcaagaagaagaagtacaaccagatgcccgtgagacacagcagaaacctgcagctgatggagggcaaggagcccgccaccggcgccaagaagagcaacaagcccaacgagcagaccagcaagagacacgacagcgacaccttccccgagctgaagctgaccaacgcccccggcagcttcaccaagtgcagcaacaccagcgagctgaaggagttcgtgaaccccagcctgcccagagaggagaaggaggagaagctggagaccgtgaaggtgagcaacaacgccgaggaccccaaggacctgatgctgagcggcgagagagtgctgcagaccgagagaagcgtggagagcagcagcatcagcctggtgcccggcaccgactacggcacccaggagagcatcagcctgctggaggtgagcaccctgggcaaggccaagaccgagcccaacaagtgcgtgagccagtgcgccgccttcgagaaccccaagggcctgatccacggctgcagcaaggacaacagaaacgacaccgagggcttcaagtaccccctgggccacgaggtgaaccacagcagagagaccagcatcgagatggaggagagcgagctggacgcccagtacctgcagaacaccttcaaggtgagcaagagacagagcttcgcccccttcagcaaccccggcaacgccgaggaggagtgcgccaccttcagcgcccacagcggcagcctgaagaagcagagccccaaggtgaccttcgagtgcgagcagaaggaggagaaccagggcaagaacgagagcaacatcaagcccgtgcagaccgtgaacatcaccgccggcttccccgtggtgggccagaaggacaagcccgtggacaacgccaagtgcagcatcaagggcggcagcagattctgcctgagcagccagttcagaggcaacgagaccggcctgatcacccccaacaagcacggcctgctgcagaacccctacagaatcccccccctgttccccatcaagagcttcgtgaagaccaagtgcaagaagaacctgctggaggagaacttcgaggagcacagcatgagccccgagagagagatgggcaacgagaacatccccagcaccgtgagcaccatcagcagaaacaacatcagagagaacgtgttcaaggaggccagcagcagcaacatcaacgaggtgggcagcagcaccaacgaggtgggcagcagcatcaacgagatcggcagcagcgacgagaacatccaggccgagctgggcagaaacagaggccccaagctgaacgccatgctgagactgggcgtgctgcagcccgaggtgtacaagcagagcctgcccggcagcaactgcaagcaccccgagatcaagaagcaggagtacgaggaggtggtgcagaccgtgaacaccgacttcagcccctacctgatcagcgacaacctggagcagcccatgggcagcagccacgccagccaggtgtgcagcgagacccccgacgacctgctggacgacggcgagatcaaggaggacaccagcttcgccgagaacgacatcaaggagagcagcgccgtgttcagcaagagcgtgcagaagggcgagctgagcagaagccccagccccttcacccacacccacctggcccagggctacagaagaggcgccaagaagctggagagcagcgaggagaacctgagcagcgaggacgaggagctgccctgcttccagcacctgctgttcggcaaggtgaacaacatccccagccagagcaccagacacagcaccgtggccaccgagtgcctgagcaagaacaccgaggagaacctgctgagcctgaagaacagcctgaacgactgcagcaaccaggtgatcctggccaaggccagccaggagcaccacctgagcgaggagaccaagtgcagcgccagcctgttcagcagccagtgcagcgagctggaggacctgaccgccaacaccaacacccaggaccccttcctgatcggcagcagcaagcagatgagacaccagagcgagagccagggcgtgggcctgagcgacaaggagctggtgagcgacgacgaggagagaggcaccggcctggaggagaacaaccaggaggagcagagcatggacagcaacctgggcgaggccgccagcggctgcgagagcgagaccagcgtgagcgaggactgcagcggcctgagcagccagagcgacatcctgaccacccagcagagagacaccatgcagcacaacctgatcaagctgcagcaggagatggccgagctggaggccgtgctggagcagcacggcagccagcccagcaacagctaccccagcatcatcagcgacagcagcgccctggaggacctgagaaaccccgagcagagcaccagcgagaaggacagccacatccacggccagagaaacaacagcatgttcagcaagagacccagagagcacatcagcgccgtgctgaccagccagaagagcagcgagtaccccatcagccagaaccccgagggcctgagcgccgacaagttcgaggtgagcgccgacagcagcaccagcaagaacaaggagcccggcgtggagagaagcagccccagcaagtgccccagcctggacgacagatggtacatgcacagctgcagcggcagcctgcagaacagaaactaccccagccaggaggagctgatcaaggtggtggacgtggaggagcagcagctggaggagagcggcccccacgacctgaccgagaccagctacctgcccagacaggacctggagggcaccccctacctggagagcggcatcagcctgttcagcgacgaccccgagagcgaccccagcgaggacagagcccccgagagcgccagagtgggcaacatccccagcagcaccagcgccctgaaggtgccccagctgaaggtggccgagagcgcccagagccccgccgccgcccacaccaccgacaccgccggctacaacgccatggaggagagcgtgagcagagagaagcccgagctgaccgccagcaccgagagagtgaacaagagaatgagcatggtggtgagcggcctgacccccgaggagttcatgctggtgtacaagttcgccagaaagcaccacatcaccctgaccaacctgatcaccgaggagaccacccacgtggtgatgaagaccgacgccgagttcgtgtgcgagagaaccctgaagtacttcctgggcatcgccggcggcaagtgggtggtgagctacttctgggtgacccagagcatcaaggagagaaagatgctgaacgagcacgacttcgaggtgagaggcgacgtggtgaacggcagaaaccaccagggccccaagagagccagagagagccaggacagaaagatcttcagaggcctggagatctgctgctacggccccttcaccaacatgcccaccgaccagctggagtggatggtgcagctgtgcggcgccagcgtggtgaaggagctgagcagcttcaccctgggcaccggcgtgcaccccatcgtggtggtgcagcccgacgcctggaccgaggacaacggcttccacgccatcggccagatgtgcgaggcccccgtggtgaccagagagtgggtgctggacagcgtggccctgtaccagtgccaggagctggacacctacctgatcccccagatcccccacagccactactag

SEQ ID NO: 171772 - protein, 112 aa, Artificial Sequence
  derived and/or modified sequence
MDVFMKGLSKAKEGVVAAAEKTKQGVAEAAGKTKEGVLYVGSKTKEGVVHGVATVAEKTKEQVTNVGGAVVTGVTAVAQKTVEGAGSIAAATGFVKKDQLGKEGYQDYEPEA

SEQ ID NO: 171773 - DNA, 339 bp, Artificial Sequence
  derived and/or modified sequence
atggacgtgttcatgaagggcctgagcaaggccaaggagggcgtggtggccgccgccgagaagaccaagcagggcgtggccgaggccgccggcaagaccaaggagggcgtgctgtacgtgggcagcaagaccaaggagggcgtggtgcacggcgtggccaccgtggccgagaagaccaaggagcaggtgaccaacgtgggcggcgccgtggtgaccggcgtgaccgccgtggcccagaagaccgtggagggcgccggcagcatcgccgccgccaccggcttcgtgaagaaggaccagctgggcaaggagggctaccaggactacgagcccgaggcctag

SEQ ID NO: 171774 - DNA, 348 bp, Artificial Sequence
  derived and/or modified sequence
atggacgtgttcatgaagggcctgagcaaggccaaggagggcgtggtggccgccgccgagaagaccaagcagggcgtggccgaggccgccggcaagaccaaggagggcgtgctgtacgtgggcagcaagaccaaggagggcgtggtgcacggcgtggccaccgtggccgagaagaccaaggagcaggtgaccaacgtgggcggcgccgtggtgaccggcgtgaccgccgtggcccagaagaccgtggagggcgccggcagcatcgccgccgccaccggcttcgtgaagaaggaccagctgggcaaggtgtggctgtgcaccttctgcgtgaccttcatcagctggtag

SEQ ID NO: 171775 - DNA, 204 bp, Artificial Sequence
  derived and/or modified sequence
atggacgtgttcatgaagggcctgagcaaggccaaggagggcgtggtggccgccgccgagaagaccaagcagggcgtggccgaggccgccggcaagaccaaggagggcgtgctgtacgtgggcagcaagaccaaggagggcgtggtgcacggcgtggccaccgtggccgagaagaccaaggagcaggtgaccaacgtgggctag

SEQ ID NO: 171776 - DNA, 339 bp, Artificial Sequence
  derived and/or modified sequence
atggacgtgtttatgaaagggctctccaaggcaaaagagggagtcgtggcagcagctgagaaaaccaagcagggagtggccgaggccgctggaaagacaaaagaaggcgtgttgtacgttggatctaaaacgaaagaaggagtggttcatggggtggcaaccgtagcagaaaagaccaaggagcaggtcacgaacgtgggaggggctgtggtgaccggcgtaactgcagtggcccagaagactgtggaaggtgccggcagtatcgcagccgcaacggggtttgtcaagaaggatcagctcgggaaggaaggctaccaggactacgaaccagaagcctag

SEQ ID NO: 171777 - DNA, 339 bp, Artificial Sequence
  derived and/or modified sequence
atggacgtctttatgaagggactcagcaaggccaaggagggggtcgtagccgccgcagagaagacaaaacagggggtggcagaagccgccggaaagacaaaagagggggtgctgtatgttggttctaaaaccaaagagggagtggtccacggagtggccaccgtcgccgagaagaccaaggagcaggtgacgaacgtgggcggagctgttgtcacaggcgttacagccgtggctcagaagacagtggaaggagctggctcaatcgcagcagccaccgggtttgttaagaaagaccaactgggaaaggagggttatcaggactacgagccagaggcctag

SEQ ID NO: 171778 - DNA, 348 bp, Artificial Sequence
  derived and/or modified sequence
atggatgtctttatgaagggcttgtctaaagccaaagaaggcgtggtcgctgctgccgagaagacaaagcagggcgtcgccgaagcggccgggaagacgaaggaaggcgtgctatacgtgggctcaaaaactaaggaaggggtggtccatggtgtcgccacagtagcagaaaagaccaaagagcaggtaaccaacgttgggggggctgtcgtgactggcgtgaccgccgtggctcagaagaccgtcgagggcgcagggtctatcgctgctgctaccggttttgtgaaaaaggaccagctcggcaaagtctggctgtgtacattctgcgttacttttatcagctggtag

SEQ ID NO: 171779 - DNA, 204 bp, Artificial Sequence
  derived and/or modified sequence
atggacgttttcatgaagggactcagtaaagcgaaggaaggggtggtggccgccgcagagaaaactaagcagggcgtggcggaggctgccggcaaaacaaaagaaggcgtcctctacgtaggtagcaagaccaaagagggggtggtgcacggggtcgctaccgtggcggaaaaaaccaaagagcaggtgacaaatgtgggatag

SEQ ID NO: 171780 - DNA, 339 bp, Artificial Sequence
  derived and/or modified sequence
atggatgtgttcatgaagggcctgagcaaggccaaggagggcgtggtggccgctgctgagaagaccaagcagggcgtggccgaggccgccggcaagaccaaggagggcgtgctgtatgtgggcagcaagaccaaggagggcgtggtgcacggcgtggccaccgtggccgagaagaccaaggagcaggtgaccaacgtgggcggcgctgtggtgactggagtgacagctgtggcccagaagacagtggagggcgccggcagcattgctgctgccaccggctttgtgaagaaggaccagctgggcaaggagggctaccaggactatgagcctgaggcctag

SEQ ID NO: 171781 - DNA, 348 bp, Artificial Sequence
  derived and/or modified sequence
atggatgtgttcatgaagggcctgagcaaggccaaggagggcgtggtggccgctgctgagaagaccaagcagggcgtggccgaggccgccggcaagaccaaggagggcgtgctgtatgtgggcagcaagaccaaggagggcgtggtgcacggcgtggccaccgtggccgagaagaccaaggagcaggtgaccaacgtgggcggcgctgtggtgactggagtgacagctgtggcccagaagacagtggagggcgccggcagcattgctgctgccaccggctttgtgaagaaggaccagctgggcaaggtgtggctgtgcaccttctgtgtgaccttcatctcctggtag

SEQ ID NO: 171782 - DNA, 204 bp, Artificial Sequence
  derived and/or modified sequence
atggatgtgttcatgaagggcctgagcaaggccaaggagggcgtggtggccgctgctgagaagaccaagcagggcgtggccgaggccgccggcaagaccaaggagggcgtgctgtatgtgggcagcaagaccaaggagggcgtggtgcacggcgtggccaccgtggccgagaagaccaaggagcaggtgaccaacgtgggctag

SEQ ID NO: 171783 - DNA, 339 bp, Artificial Sequence
  derived and/or modified sequence
atggacgtgttcatgaagggcctgagcaaggccaaggagggcgtggtggcagctgccgaaaaaaccaagcaaggggtagccgaggctgcaggtaagaccaaggaaggtgtactttacgtgggttctaaaactaaggagggcgtcgtgcatggggttgccaccgtggccgaaaagacaaaggaacaggtgaccaacgtcggaggggcagtggttaccggcgtgacagctgtggcgcagaagacagtagaaggtgctggatctatcgcagctgctactggatttgtgaagaaggatcaactgggtaaggaaggttaccaagactatgagcccgaagcctag

SEQ ID NO: 171784 - DNA, 339 bp, Artificial Sequence
  derived and/or modified sequence
atggacgtgttcatgaagggcctgagcaaggccaaggagggcgtggtggccgccgctgagaagaccaagcagggcgttgccgaagccgctggaaagactaaagaaggtgtcctatatgtcgggagcaagaccaaagaaggggtcgtccacggagtcgccacagtcgcagagaaaacaaaggagcaggttacaaacgtgggtggagccgtggtgactggcgtgaccgcagtagcccaaaaaacagtggagggagcaggaagtatcgcggccgctacaggttttgtcaagaaggaccagttaggaaaagaagggtaccaagattatgagcctgaagcttag

SEQ ID NO: 171785 - DNA, 348 bp, Artificial Sequence
  derived and/or modified sequence
atggacgtgttcatgaagggcctgagcaaggccaaggagggcgtggtggctgctgctgaaaaaaccaagcaaggcgtcgcagaggccgctggtaagactaaagagggtgttctgtatgtgggttctaaaacaaaagaaggtgtggtgcatggcgtggcaaccgtcgccgagaagactaaagagcaggtgactaacgttggaggtgcggtagtgaccggagtaacggcggtagcacagaaaaccgttgaaggtgctggcagcatcgcggctgcaaccggcttcgtgaagaaagatcaactgggcaaagtatggctgtgtaccttctgtgtcacctttatttcctggtag

SEQ ID NO: 171786 - DNA, 204 bp, Artificial Sequence
  derived and/or modified sequence
atggacgtgttcatgaagggcctgagcaaggccaaggagggcgtggttgccgcagcagagaagactaagcaaggcgtggctgaggctgctggaaaaactaaagaaggcgtgctgtacgtgggtagtaaaacaaaggaaggtgtcgtccatggggtggctactgtcgctgagaagaccaaggaacaggtgaccaacgtggggtag

SEQ ID NO: 171787 - DNA, 339 bp, Artificial Sequence
  derived and/or modified sequence
atggatgtttttatgaagggactgtctaaagcaaaggagggtgtagttgctgcagcagagaaaaccaagcagggcgtggctgaggcagctggaaagacgaaggaaggggttttatacgtcggttcaaaaacaaaagagggtgtcgtccacggagttgcaaccgttgcagagaaaacaaaggagcaggtgactaacgtgggaggggctgtggtgactggtgtgaccgcagttgctcagaagacagtggagggagcagggagtatagccgctgccacaggtttcgttaaaaaagatcaacttggaaaagagggttatcaggactatgaacccgaagcatag

SEQ ID NO: 171788 - DNA, 339 bp, Artificial Sequence
  derived and/or modified sequence
atggacgtgtttatgaaaggattgtccaaggccaaagaaggtgtggttgccgctgccgagaagactaaacaaggcgtggccgaggcagccggtaagacaaaggagggggttctgtacgttggttctaaaacgaaggaaggggtcgtgcacggagtcgccactgtagcagagaagaccaaagagcaggtaaccaacgtgggtggggcagtggtaactggtgtcacggctgtggcacagaaaactgtggagggggcaggctccatcgcagccgcaaccggattcgtgaaaaaggaccagctgggaaaggaaggctaccaggactacgaacccgaagcctag

SEQ ID NO: 171789 - DNA, 348 bp, Artificial Sequence
  derived and/or modified sequence
atggacgtcttcatgaagggattaagcaaagccaaagagggcgttgtggcagctgccgagaagacaaaacagggcgtcgcggaggctgctggcaaaacaaaggagggggtgttatatgtgggttccaaaacaaaggagggggtggtgcatggtgtggccaccgtcgcagaaaagactaaggaacaggtgaccaatgtcgggggagccgttgtaactggggttactgcagtggcgcagaagactgtagagggagccggaagtatcgctgctgcgactggatttgtcaagaaagatcagttggggaaggtgtggttgtgtacattctgcgttacgtttattagctggtag

SEQ ID NO: 171790 - DNA, 204 bp, Artificial Sequence
  derived and/or modified sequence
atggatgttttcatgaagggcctgagtaaagctaaggagggagttgtagcagcagcggaaaagaccaagcagggggtggcagaggcagcgggaaagacaaaggagggggttctgtacgtaggcagtaaaacgaaggagggagtcgtccacggggtggccactgtcgctgaaaagaccaaggagcaggtgacaaacgtcggctag

SEQ ID NO: 171791 - DNA, 1096 bp, Artificial Sequence
  derived and/or modified sequence
gaattcattagccatggatgtattcatgaaaggactttcaaaggccaaggagggagttgtggctgctgctgagaaaaccaaacagggtgtggcagaagcagcaggaaagacaaaagagggtgttctctatgtaggctccaaaaccaaggagggagtggtgcatggtgtggcaacagtggctgagaagaccaaagagcaagtgacaaatgttggaggagcagtggtgacgggtgtgacagcagtagcccagaagacagtggagggagcagggagcattgcagcagccactggctttgtcaaaaaggaccagttgggcaaggaagggtatcaagactacgaacctgaagcctaagaaatatctttgctcccagtttcttgagatctgctgacagatgttccatcctgtacaagtgctcagttccaatgtgcccagtcatgacatttctcaaagtttttacagtgtatctcgaagtcttccatcagcagtgattgaagtatctgtacctgcccccactcagcatttcggtgcttccctttcactgaagtgaatacatggtagcagggtctttgtgtgctgtggattttgtggcttcaatctacgatgttaaaacaaattaaaaacacctaagtgactaccacttatttctaaatcctcactatttttttgttgctgttgttcagaagttgttagtgatttgctatcatatattataagatttttaggtgtcttttaatgatactgtctaagaataatgacgtattgtgaaatttgttaatatatataatacttaaaaatatgtgagcatgaaactatgcacctataaatactaaatatgaaattttaccattttgcgatgtgttttattcacttgtgtttgtatataaatggtgagaattaaaataaaacgttatctcattgcaaaaatattttatttttatcccatctcactttaataataaaaatcatgcttataagcaacatgaattaagaactgacacaaaggacaaaaatataaagttattaatagccatttgaagaaggaggaattttagaagaggtagagaaaatggaacattaaccctacactcggaattc

SEQ ID NO: 171792 - DNA, 3127 bp, Artificial Sequence
  derived and/or modified sequence
gccattcgacgacaggttagcgggtttgcctcccactcccccagcctcgcgtcgccggctcacagcggcctcctctggggacagtcccccccgggtgccgcctccgcccttcctgtgcgctccttttccttcttctttcctattaaatattatttgggaattgtttaaattttttttttaaaaaaagagagaggcggggaggagtcggagttgtggagaagcagagggactcagtgtggtgtaaaggaattcattagccatggatgtattcatgaaaggactttcaaaggccaaggagggagttgtggctgctgctgagaaaaccaaacagggtgtggcagaagcagcaggaaagacaaaagagggtgttctctatgtaggctccaaaaccaaggagggagtggtgcatggtgtggcaacagtggctgagaagaccaaagagcaagtgacaaatgttggaggagcagtggtgacgggtgtgacagcagtagcccagaagacagtggagggagcagggagcattgcagcagccactggctttgtcaaaaaggaccagttgggcaaggaagggtatcaagactacgaacctgaagcctaagaaatatctttgctcccagtttcttgagatctgctgacagatgttccatcctgtacaagtgctcagttccaatgtgcccagtcatgacatttctcaaagtttttacagtgtatctcgaagtcttccatcagcagtgattgaagtatctgtacctgcccccactcagcatttcggtgcttccctttcactgaagtgaatacatggtagcagggtctttgtgtgctgtggattttgtggcttcaatctacgatgttaaaacaaattaaaaacacctaagtgactaccacttatttctaaatcctcactatttttttgttgctgttgttcagaagttgttagtgatttgctatcatatattataagatttttaggtgtcttttaatgatactgtctaagaataatgacgtattgtgaaatttgttaatatatataatacttaaaaatatgtgagcatgaaactatgcacctataaatactaaatatgaaattttaccattttgcgatgtgttttattcacttgtgtttgtatataaatggtgagaattaaaataaaacgttatctcattgcaaaaatattttatttttatcccatctcactttaataataaaaatcatgcttataagcaacatgaattaagaactgacacaaaggacaaaaatataaagttattaatagccatttgaagaaggaggaattttagaagaggtagagaaaatggaacattaaccctacactcggaattccctgaagcaacactgccagaagtgtgttttggtatgcactggttccttaagtggctgtgattaattattgaaagtggggtgttgaagaccccaactactattgtagagtggtctatttctcccttcaatcctgtcaatgtttgctttacgtattttggggaactgttgtttgatgtgtatgtgtttataattgttatacatttttaattgagccttttattaacatatattgttatttttgtctcgaaataattttttagttaaaatctattttgtctgatattggtgtgaatgctgtacctttctgacaataaataatattcgaccatgaataaaaaaaaaaaaaaagtgggttcccgggaactaagcagtgtagaagatgattttgactacaccctccttagagagccataagacacattagcacatattagcacattcaaggctctgagagaatgtggttaactttgtttaactcagcattcctcactttttttttttaatcatcagaaattctctctctctctctctctttttctctcgctctctttttttttttttttttacaggaaatgcctttaaacatcgttggaactaccagagtcaccttaaaggagatcaattctctagactgataaaaatttcatggcctcctttaaatgttgccaaatatatgaattctaggatttttccttaggaaaggtttttctctttcagggaagatctattaactccccatgggtgctgaaaataaacttgatggtgaaaaactctgtataaattaatttaaaaattatttggtttctctttttaattattctggggcatagtcatttctaaaagtcactagtagaaagtataatttcaagacagaatattctagacatgctagcagtttatatgtattcatgagtaatgtgatatatattgggcgctggtgaggaaggaaggaggaatgagtgactataaggatggttaccatagaaacttccttttttacctaattgaagagagactactacagagtgctaagctgcatgtgtcatcttacactagagagaaatggtaagtttcttgttttatttaagttatgtttaagcaaggaaaggatttgttattgaacagtatatttcaggaaggttagaaagtggcggttaggatatattttaaatctacctaaagcagcatattttaaaaatttaaaagtattggtattaaattaagaaatagaggacagaactagactgatagcagtgacctagaacaatttgagattaggaaagttgtgaccatgaatttaaggatttatgtggatacaaattctcctttaaagtgtttcttcccttaatatttatctgacggtaatttttgagcagtgaattactttatatatcttaatagtttatttgggaccaaacacttaaacaaaaagttctttaagtcatataagccttttcaggaagcttgtctcatattcactcccgagacattcacctgccaagtggcctgaggatcaatccagtcctaggtttattttgcagacttacattctcccaagttattcagcctcatatgactccacggtcggctttaccaaaacagttcagagtgcactttggcacacaattgggaacagaacaatctaatgtgtggtttggtattccaagtggggtctttttcagaatctctgcactagtgtgagatgcaaacatgtttcctcatctttctggcttatccagtatgtagctatttgtgacataataaatatatacatatatgaaaata

SEQ ID NO: 171793 - DNA, 728 bp, Artificial Sequence
  derived and/or modified sequence
cagtgtggtgtaaaggaattcattagccatggatgtattcatgaaaggactttcaaaggccaaggagggagttgtggctgctgctgagaaaaccaaacagggtgtggcagaagcagcaggaaagacaaaagagggtgttctctatgtaggctccaaaaccaaggagggagtggtgcatggtgtggcaacagtggctgagaagaccaaagagcaagtgacaaatgttggaggagcagtggtgacgggtgtgacagcagtagcccagaagacagtggagggagcagggagcattgcagcagccactggctttgtcaaaaaggaccagttgggcaaggtatggctgtgtacgttttgtgttacatttataagctggtgagattacggttcattttcatgtgaggcctggaggcaggagcaagatacttactgtggggaacggctacctgaccctccccttgtgaaaaagtgctacctttatattggtcttgcttgtttcaggcattaacccagataaatgccatgcaaattttataattattatgattgtttcaatttctggaagaaagttaatgaaacaaaaaatgtagtaaaatgccaaaggaacagtgacatttcagaaagaatgagggctttcatgttaattgtaagtcttggaatttctcttccttggagtaacaaatccctttgtgcctaatttcctaatttccaaaataaagttcttttactta

SEQ ID NO: 171794 - DNA, 387 bp, Artificial Sequence
  derived and/or modified sequence
gaccccggcccggcccctccgagagcgtcctgggcgctccctcacgccttgccttcaagccttctgcctttccaccctcgtgagcggagaactgggagtggccattcgacgacagagagaggcggggaggagtcggagttgtggagaagcagagggactcagtgtggtgtaaaggaattcattagccatggatgtattcatgaaaggactttcaaaggccaaggagggagttgtggctgctgctgagaaaaccaaacagggtgtggcagaagcagcaggaaagacaaaagagggtgttctctatgtaggctccaaaaccaaggagggagtggtgcatggtgtggcaacagtggctgagaagaccaaagagcaagtgacaaatgttgg

SEQ ID NO: 171795 - protein, 1096 aa, Artificial Sequence [sequence omitted]

SEQ ID NO: 171796 - protein, 1096 aa, Artificial Sequence
  derived and/or modified sequence
MEQPGAAASGAGGGSEEPGGGRSNKRSAGNRAANEEETKNKPKLNIQIKTLADDVRDRITSFRKSTVKKEKPLIQHPIDSQVAMSEFPAAQPLYDERSLNLSEKEVLDLFEKMMEDMNLNEEKKAPLRNKDFTTKREMVVQYISATAKSGGLKNSKHECTLSSQEYVHELRSGISDEKLLNCLESLRVSLTSNPVSWVNNFGHEGLGLLLDELEKLLDKKQQENIDKKNQYKLIQCLKAFMNNKFGLQRILGDERSLLLLARAIDPKQPNMMTEIVKILSAICIVGEENILDKLLGAITTAAERNNRERFSPIVEGLENQEALQLQVACMQFINALVTSPYELDFRIHLRNEFLRSGLKTMLPDLKEKENDELDIQLKVFDENKEDDLTELSHRLNDIRAEMDDMNEVYHLLYNMLKDTAAENYFLSILQHFLLIRNDYYIRPQYYKIIEECVSQIVLHCSGMDPDFKYRQRLDIDLTHLIDSCVNKAKVEESEQKAAEFSKKFDEEFTARQEAQAELQKRDEKIKELEAEIQQLRTQAQVLSSSSGIPGPPAAPPLPGVGPPPPPPAPPLPGGAPLPPPPPPLPGMMGIPPPPPPPLLFGGPPPPPPLGGVPPPPGISLNLPYGMKQKKMYKPEVSMKRINWSKIEPTELSENCFWLRVKEDKFENPDLFAKLALNFATQIKVQKNAEALEEKKTGPTKKKVKELRILDPKTAQNLSIFLGSYRMPYEDIRNVILEVNEDMLSEALIQNLVKHLPEQKILNELAELKNEYDDLCEPEQFGVVMSSVKMLQPRLSSILFKLTFEEHINNIKPSIIAVTLACEELKKSESFNRLLELVLLVGNYMNSGSRNAQSLGFKINFLCKIRDTKSADQKTTLLHFIADICEEKYRDILKFPEELEHVESASKVSAQILKSNLASMEQQIVHLERDIKKFPQAENQHDKFVEKMTSFTKTAREQYEKLSTMHNNMMKLYENLGEYFIFDSKTVSIEEFFGDLNNFRTLFLEAVRENNKRREMEEKTRRAKLAKEKAEQEKLERQKKKKQLIDINKEGDETGVMDNLLEALQSGAAFRDRRKRIPRNPVVNHPCATRANPRSAT

SEQ ID NO: 171797 - protein, 221 aa, Artificial Sequence
  derived and/or modified sequence
MGDTKEQRILNHVLQHAEPGNAQSVLEAIDTYCEQKEWAMNVGDKKGKIVDAVIQEHQPSVLLELGAYCGYSAVRMARLLSPGARLITIEINPDCAAITQRMVDFAGVKDKVTLVVGASQDIIPQLKKKYDVDTLDMVFLDHWKDRYLPDTLLLEECGLLRKGTVLLADNVICPGAPDFLAHVRGSSCFECTHYQSFLEYREVVDGLEKAIYKGPGSEAGP

SEQ ID NO: 171798 - DNA, 666 bp, Artificial Sequence
  derived and/or modified sequence
atgggcgatacaaaggaacaaagaatcctgaatcacgtgctgcagcacgctgaacccgggaacgcgcaatcagtcctcgaggccatcgacacgtattgcgaacagaaagaatgggctatgaatgtaggcgataaaaaagggaagatagtggatgccgtgatccaggaacaccaaccatctgtcttgcttgaattaggagcctattgcgggtactcagctgtacggatggccaggcttttatctcccggtgcacgccttattactatcgaaattaatcccgactgcgccgcgattacacagcggatggtggatttcgcgggcgtgaaggacaaggtcactctcgttgtcggcgccagccaggatataatcccgcagctgaaaaagaaatacgatgtggatacactggacatggtcttcttggatcactggaaggatagatatttgccagacacccttcttttggaggaatgcggactactccggaaaggcaccgtcctgctggctgataatgtcatctgcccaggcgcaccagacttccttgcccacgttcgtgggtcatcatgctttgagtgcacacattaccagagtttcctggaatatagggaggttgtggacggcctggagaaggccatttacaagggacccggttcggaggccgggccatag

SEQ ID NO: 171799 - DNA, 666 bp, Artificial Sequence
  derived and/or modified sequence
atgggggatactaaagaacagcgcattctgaatcacgtccttcagcatgccgaacccgggaatgctcaatcagttcttgaagcgatcgacacctattgtgaacagaaggaatgggctatgaacgtgggtgacaaaaaggggaagatcgtcgatgcagtgatccaggaacaccagccctcggtgctgctagaactgggcgcttactgcggatactccgcagtgagaatggcccgtctcctgagccctggcgccagactgatcactatcgagataaatcctgattgtgcagcgattacacaaagaatggtggatttcgcaggcgtaaaggataaggtgacactggtggtgggagcctctcaggacataattccacaactgaaaaaaaagtacgacgtcgacaccctggatatggtgttcctggaccattggaaggacaggtacctcccagataccctgctcttggaggaatgtggcctgttgaggaagggtaccgtgcttcttgcagacaatgtgatttgccctggggctcctgatttcctcgcccatgtgagaggctctagctgcttcgagtgtactcactaccaatcttttctggaataccgtgaggtggtcgacggtctcgagaaagcaatatacaaaggacccgggagcgaggctggtccctag

SEQ ID NO: 171800 - DNA, 666 bp, Artificial Sequence
  derived and/or modified sequence
atgggagacaccaaggagcagaggatcctgaaccacgtgctgcagcacgccgagcctggaaatgcccagagcgtgctggaggccatcgacacctactgtgagcagaaggagtgggccatgaatgtgggggacaagaagggcaagatcgtggatgctgtgatccaggagcaccagcccagcgtgctgctggagctgggcgcctactgcggctacagcgctgtgaggatggcccggctgctgagccctggggcccggctcatcaccatcgagatcaacccagactgtgccgccatcacccagaggatggtggactttgctggggtgaaggacaaggtgaccctggtggtgggcgccagccaggacatcatcccccagctgaagaagaagtatgatgtggacaccctggacatggtgttcctggaccactggaaggaccgctacctgcctgacaccctgctgctggaggagtgtggcctgctgaggaagggcaccgtgctgctggccgacaacgtcatctgccctggggccccagacttcctggcccacgtgcggggcagcagctgctttgagtgcacccactaccagagcttcctggagtaccgggaggtggtggatggcctggagaaggccatctacaagggccctggcagcgaggccggcccctag

SEQ ID NO: 171801 - DNA, 666 bp, Artificial Sequence
  derived and/or modified sequence
atgggcgacaccaaggagcagcggatcctgaaccacgtgctgcagcacgcagagcctggcaacgctcagagcgtactggaagccatcgatacatactgtgaacaaaaggaatgggcaatgaatgttggtgataagaaggggaaaattgtggacgccgttattcaggaacaccagccaagcgtgcttcttgagttaggggcttattgcggctattcagccgtgaggatggcaagactgctgagtcccggagctagactgatcacaattgagatcaaccctgattgcgccgcaatcactcagaggatggtggactttgcgggcgtgaaggataaagtcaccttagtggtcggcgcgtcccaggatattattccacagctgaaaaagaaatatgatgtagataccctggacatggtgttcttagatcactggaaagataggtatctccctgatactttgcttctcgaagaatgcggattactgagaaaggggacagtactactggccgacaacgttatttgtccaggcgctcccgatttcctggcccatgtccggggcagctcttgctttgagtgcacacactaccagtcttttcttgagtatcgtgaggtggtggatgggctggagaaggccatatataaggggcctggctctgaagccgggccctag

SEQ ID NO: 171802 - DNA, 666 bp, Artificial Sequence
  derived and/or modified sequence
atgggcgacaccaaggagcagcggatcctgaaccacgtgctgcagcatgcggagccaggaaacgcccagtctgttctagaggctatcgacacctactgtgaacagaaggagtgggcaatgaacgtgggagacaaaaagggtaaaattgttgatgctgtaattcaggagcaccaacctagcgtcctgcttgagctgggggcgtactgcggttactctgccgtccgcatggcacgactgctgtcacccggagcaaggcttataacaattgagattaacccagactgtgcagccataactcagcggatggtggacttcgccggggtcaaagacaaggtaactttggtcgtgggcgctagtcaggatatcatcccacaactaaagaaaaaatatgacgtagacaccctggatatggtatttctcgatcactggaaggatagatacctgcctgacaccctcctgctcgaggagtgcggccttctgcggaaaggcacagtacttctggccgataacgtgatatgtcctggagcccccgattttctggcacatgtgagaggctcaagctgctttgagtgtacacactaccaatcttttttggagtatcgagaagttgtggacggattggagaaggccatttataagggcccgggcagcgaagctggaccctag

SEQ ID NO: 171803 - DNA, 666 bp, Artificial Sequence
  derived and/or modified sequence
atgggagacacaaaggaacagagaatactgaaccacgtcctgcagcacgccgagcctggtaatgctcaatcagtgctggaggccatcgacacatactgcgaacagaaggaatgggctatgaatgttggtgataaaaagggcaaaatcgtggacgcggtgattcaggagcatcagcctagtgtcctcctcgaactcggggcatattgcggttattcagccgtgagaatggcacgtctgttaagtccaggagctcggcttattacaatagagataaatcccgactgcgctgcgataacacagagaatggtggacttcgcaggagtgaaagataaggtgaccctagttgtaggtgccagtcaggacatcattccacagcttaagaagaaatatgatgtcgacactctggatatggtgtttctggaccactggaaggatagatacttaccagacactttgctcctggaagagtgcggcctgctgagaaaaggcacagtgctgcttgcagacaatgtgatatgtccaggagcacccgactttctggctcatgtccggggtagttcgtgttttgagtgtacccactaccagtccttccttgagtaccgcgaggtggtggacggattggagaaagctatttacaaaggccctggatccgaagccggaccatag

SEQ ID NO: 171804 - DNA, 666 bp, Artificial Sequence
  derived and/or modified sequence
atgggcgatacaaaagagcagcggatactgaatcacgtgctgcagcatgccgagcctgggaacgctcagagcgtcctcgaagcaatcgacacatattgcgagcaaaaggaatgggctatgaatgtgggtgacaaaaaaggcaagatcgtcgatgccgtcattcaagagcatcaaccttctgttttactagaactgggagcatactgcggctacagcgctgtgcggatggcacgcctgctgtctccaggggcaaggcttatcactatcgagataaatccagactgcgctgctatcacccagcgcatggttgactttgctggcgtcaaggacaaggttacgctcgtcgtgggtgccagccaagacattatacctcagcttaaaaagaagtatgacgtggacacactcgatatggtgttcctggaccattggaaggatcggtatctgccagacactttgctgctggaggagtgcgggctgctgcggaaagggaccgtgttgctggccgataacgttatatgtcccggtgcacctgactttctggcccacgtccgcggaagcagctgcttcgagtgtacccattaccagtctttcctcgagtaccgggaggtggtcgatggactggaaaaagccatctataaggggcctgggagtgaggccggaccttag

SEQ ID NO: 171805 - DNA, 666 bp, Artificial Sequence
  derived and/or modified sequence
atgggcgacaccaaggagcagagaatcctgaaccacgtgctgcagcacgccgagcccggcaacgcccagagcgtgctggaggccatcgacacctactgcgagcagaaggagtgggccatgaacgtgggcgacaagaagggcaagatcgtggacgccgtgatccaggagcaccagcccagcgtgctgctggagctgggcgcctactgcggctacagcgccgtgagaatggccagactgctgagccccggcgccagactgatcaccatcgagatcaaccccgactgcgccgccatcacccagagaatggtggacttcgccggcgtgaaggacaaggtgaccctggtggtgggcgccagccaggacatcatcccccagctgaagaagaagtacgacgtggacaccctggacatggtgttcctggaccactggaaggacagatacctgcccgacaccctgctgctggaggagtgcggcctgctgagaaagggcaccgtgctgctggccgacaacgtgatctgccccggcgcccccgacttcctggcccacgtgagaggcagcagctgcttcgagtgcacccactaccagagcttcctggagtacagagaggtggtggacggcctggagaaggccatctacaagggccccggcagcgaggccggcccctag

SEQ ID NO: 171806 - protein, 1149 aa, Artificial Sequence
  derived and/or modified sequence
MGQQPGKVLGDQRRPSLPALHFIKGAGKKESSRHGGPHCNVFVEHEALQRPVASDFEPQGLSEAARWNSKENLLAGPSENDPNLFVALYDFVASGDNTLSITKGEKLRVLGYNHNGEWCEAQTKNGQGWVPSNYITPVNSLEKHSWYHGPVSRNAAEYLLSSGINGSFLVRESESSPGQRSISLRYEGRVYHYRINTASDGKLYVSSESRFNTLAELVHHHSTVADGLITTLHYPAPKRNKPTVYGVSPNYDKWEMERTDITMKHKLGGGQYGEVYEGVWKKYSLTVAVKTLKEDTMEVEEFLKEAAVMKEIKHPNLVQLLGVCTREPPFYIITEFMTYGNLLDYLRECNRQEVNAVVLLYMATQISSAMEYLEKKNFIHRDLAARNCLVGENHLVKVADFGLSRLMTGDTYTAHAGAKFPIKWTAPESLAYNKFSIKSDVWAFGVLLWEIATYGMSPYPGIDLSQVYELLEKDYRMERPEGCPEKVYELMRACWQWNPSDRPSFAEIHQAFETMFQESSISDEVEKELGKQGVRGAVSTLLQAPELPTKTRTSRRAAEHRDTTDVPEMPHSKGQGESDPLDHEPAVSPLLPRKERGPPEGGLNEDERLLPKDKKTNLFSALIKKKKKTAPTPPKRSSSFREMDGQPERRGAGEEEGRDISNGALAFTPLDTADPAKSPKPSNGAGVPNGALRESGGSGFRSPHLWKKSSTLTSSRLATGEEEGGGSSSKRFLRSCSASCVPHGAKDTEWRSVTLPRDLQSTGRQFDSSTFGGHKSEKPALPRKRAGENRSDQVTRGTVTPPPRLVKKNEEAADEVFKDIMESSPGSSPPNLTPKPLRRQVTVAPASGLPHKEEAGKGSALGTPAAAEPVTPTSKAGSGAPGGTSKGPAEESRVRRHKHSSESPGRDKGKLSRLKPAPPPPPAASAGKAGGKPSQSPSQEAAGEAVLGAKTKATSLVDAVNSDAAKPSQPGEGLKKPVLPATPKPQSAKPSGTPISPAPVPSTLPSASSALAGDQPSSTAFIPLISTRVSLRKTRQPPERIASGAITKGVVLDSTEALCLAISRNSEQMASHSAVLEAGKNLYTFCVSYVDSIQQMRNKFAFREAINKLENNLRELQICPATAGSGPAATQDFSKLLSSVKEISDIVQR

SEQ ID NO: 171807 - protein, 64 aa, Artificial Sequence
  derived and/or modified sequence
MGQQPGKVLGDQRRPSLPALHFIKGAGKKESSRHGGPHCNVFVEQALQRPVASDFEPQGLSEAA

SEQ ID NO: 171808 - DNA, 3450 bp, Artificial Sequence
  derived and/or modified sequence
atgggacagcagcctgggaaggtgctgggggatcagcgcaggccctcgctgccagctctccatttcatcaagggagcaggcaaaaaggagagctctcgccacggtggtcctcattgtaacgtctttgtggaacatgaagctttgcaacgcccggtggcttccgatttcgaaccccagggtctgtcagaagccgctaggtggaactcaaaagagaacctcctggcaggcccttctgaaaacgaccccaatctgttcgtcgctttgtacgacttcgtcgcgtctggggacaacaccctgtcaataactaaaggcgagaagttgcgagtgctggggtataaccataacggggaatggtgcgaggcccagactaagaatgggcagggctgggtgccatccaattatatcactccagtgaactcccttgaaaagcactcttggtatcacggtcctgtgagccggaacgcggcagagtacctcctatcatctggcataaatgggtctttcttggtccgtgaatcggagtccagtcccggtcagaggtccattagcctgcgctacgaggggagagtttatcattatcggatcaacaccgcatctgacggtaagctgtatgtaagctctgaatctcggtttaatactcttgcagaactagtgcaccatcattcaaccgtggcagacggactgatcacaactctacattatcccgcccccaagcgaaacaaaccaacggtgtacggtgtgtctcctaattatgacaaatgggagatggagcgaactgacataactatgaagcataagcttggaggaggacagtacggtgaggtgtacgaaggcgtttggaagaaatattctctgacggtcgctgttaagaccttaaaagaggatacgatggaagtcgaggagttcctgaaggaggccgcagtaatgaaggaaatcaagcaccccaacttggtccagcttctgggtgtatgcactcgggaacctcccttttacattattaccgagttcatgacctacgggaacctgcttgactatctgagggaatgcaacagacaggaagtcaatgccgtggtcctgctatacatggccacacagatctctagcgccatggaatatttggagaagaaaaactttatccatagggaccttgccgctcggaattgcctagtaggtgaaaatcacctggtaaaagtggctgatttcgggctgtcccgactgatgacaggcgatacttatactgcacatgcgggagcaaaattcccaatcaagtggaccgctcccgaatcgctggcttataataagttttcaatcaagtctgatgtgtgggcctttggtgtgctgctgtgggagatagccacttacggaatgtccccatatccaggtattgacttgtcccaggtctacgaattactcgagaaagactatcggatggagcggcccgaaggctgcccagaaaaggtatacgagctcatgagggcctgctggcagtggaacccttcagaccgtccctcctttgctgagatccatcaggctttcgagacgatgtttcaagagagctccatctctgacgaggtagaaaaggagttaggcaagcaaggggtacggggagcagtttctactctgctccaggctccggagcttcctacaaagacccgcacctctcgtcgcgctgcagaacatcgcgataccacagatgtccccgaaatgccgcactctaaagggcagggcgaaagcgaccccctggaccatgagcctgccgtctccccactgctgccgagaaaggaaaggggacctcctgagggtggcctcaacgaggatgaacgtttactgcctaaggataagaagactaatctgttttccgctctgattaagaagaagaaaaagaccgcaccgacccccccaaaacgctccagcagtttccgagagatggacggacaaccagagaggcggggtgctggcgaggaagagggtcgggacatttctaatggcgcgctggcctttactcctcttgataccgcggaccccgctaagagtccgaagccttccaacggcgctggagtccccaatggagcattgagagaatccggcggtagtgggtttagaagtccccatttgtggaagaagtcctcaacactgacgtcgtctagactggccaccggtgaagaagagggaggggggtcttcctccaagcggttcttgcgcagctgcagtgctagttgtgtccctcatggcgccaaagacacagagtggaggtccgtgactttacccagagacctccaatctaccggtagacaattcgactctagtacatttggagggcacaagtccgagaagcccgcactcccgagaaagcgggctggagagaaccgcagcgatcaagtgacgagggggactgtgacgccgccaccgaggctggtcaagaaaaatgaggaggcagctgatgaggttttcaaggacatcatggagtcttcaccaggatctagcccacccaatctgactcctaaaccacttcgacgtcaggtgacagttgcccctgcatcgggcttgccccataaggaagaagccggaaagggatccgcactaggaaccccggccgcggctgagcctgtgacaccaacatctaaggccggctctggagcacctggcggaactagcaaggggccagccgaggagtcccgggtacgtagacataagcacagtagcgagagcccaggacgagataaggggaagctgagtagacttaagcctgccccacctcccccacccgcggccagtgcaggtaaggctggcggtaaaccttcgcagagcccaagtcaagaggccgccggagaagcggttctgggggccaaaactaaggccacaagtctggtcgatgcagtaaactctgacgccgccaaaccttcacaacctggagaaggattgaagaaacccgttctccccgccacacccaagccacagagcgccaaacctagtggaacccctatctcccctgctcctgttccttcaaccttaccttccgcatcctctgccctcgccggagatcaaccaagcagtacagcgtttatcccccttatatccacccgcgtgtccctgcgtaaaactcgccagccacctgagcgtatagcgtcaggcgccattaccaagggagtggtgcttgacagcaccgaggccttgtgcctcgccatttctaggaattctgagcagatggcttctcactctgctgttttggaggctggtaaaaacttgtacacattctgcgtgagctatgttgattccatccagcagatgaggaacaagtttgctttccgggaggcaatcaataagctggagaacaatctcagggaactgcagatttgtccggccacagcaggctctgggccagctgccactcaggacttttctaaacttttgtccagtgtcaaggagatctccgacattgtgcagagatag

SEQ ID NO: 171809 - DNA, 195 bp, Artificial Sequence
  derived and/or modified sequence
atgggtcagcaacccggaaaggttcttggtgatcaaaggaggccctctctccctgctctccactttatcaaaggagcaggaaagaaagagtcttcccgccacggtggcccccattgcaatgttttcgtggaacaggccctccagcgcccagtcgcctccgactttgaaccccagggattatcagaagctgcttag

SEQ ID NO: 171810 - DNA, 3450 bp, Artificial Sequence
  derived and/or modified sequence
atgggccagcagcccgggaaggtgctgggggaccagaggcggcccagcctgcctgccctgcacttcatcaagggggccggcaagaaggagagcagccgccacggcggcccccactgcaatgtgtttgtggagcacgaggccctgcagaggcctgtggccagtgactttgagccccagggcctgtctgaggccgcccgctggaacagcaaagaaaacctgctggccggccccagtgaaaatgaccccaacctgtttgtggccctgtatgactttgtggccagcggggacaacaccctgagcatcaccaagggggagaagctgcgggtgctgggctacaaccacaatggagagtggtgtgaggcccagaccaagaatggccagggctgggtgcccagcaactacatcacccctgtgaacagcctggagaagcacagctggtaccacggccctgtgtccagaaatgctgctgagtacctgctgagcagcggcatcaatggcagcttcctggtgcgggagagcgagagcagccctggccagaggagcatcagcctgcgctatgagggccgggtgtaccactaccgcatcaacacagccagtgatggcaagctgtatgtgtcctctgagagccgcttcaacaccctggccgagctggtgcaccaccacagcacagtggctgatggcctcatcaccaccctgcactacccagcccccaagaggaacaagcccaccgtgtatggagtgagccccaactatgacaagtgggagatggagaggacagacatcaccatgaagcacaagctgggcggcggccagtacggggaggtgtatgagggcgtgtggaagaagtacagcctgactgtggccgtgaagaccctgaaggaggacaccatggaggtggaggagttcctgaaggaggccgctgtgatgaaggagatcaagcaccccaacctggtgcagctgctgggcgtgtgcacccgggagccccccttctacatcatcacagagttcatgacctacggcaacctgctggactacctgcgggagtgcaaccggcaggaggtgaatgctgtggtgctgctgtacatggccacccagatcagcagcgccatggagtacctggagaagaagaacttcatccaccgggacctggccgccaggaactgcctggtgggggagaaccacctggtgaaggtggccgactttggcctgagccggctgatgaccggggacacctacacagcccacgccggggccaagttccccatcaagtggacagcccctgagagcctggcctacaacaagttcagcatcaagagtgatgtgtgggccttcggcgtgctgctgtgggagatcgccacctacggcatgagcccctacccaggcatcgacctgagccaggtgtatgagctgctggagaaggactacaggatggagaggcctgagggctgcccagagaaggtgtatgagctgatgagggcctgctggcagtggaaccccagcgaccggcccagctttgctgagatccaccaggcctttgagaccatgttccaggagagcagcatcagtgatgaggtggagaaggagctgggcaagcagggcgtgagaggagctgtgtccaccctgctgcaggcccctgagctgcccaccaagaccaggaccagcagaagagctgctgagcaccgggacaccacagatgtgcctgagatgccccacagcaagggccagggcgagagtgaccccctggaccacgagcctgctgtgagccccctgctgcccaggaaggagcggggccccccagagggcggcctgaatgaagatgagcggctgctgcccaaggacaagaagaccaacctcttcagcgccctgatcaagaagaagaagaagacagcccccaccccacccaagaggagcagcagcttccgggagatggatggccagcctgagaggagaggagctggggaggaggagggccgggacatcagcaatggagccctggccttcacccccctggacacagctgaccctgccaagagccccaagcccagcaatggagctggggtgcccaatggagccctgcgggagagcggcggcagcggcttccgcagcccccacctgtggaagaagagcagcaccctgaccagcagccggctggccactggagaggaggagggcggcggcagcagcagcaagcgcttcctgcggagctgcagcgccagctgtgtgccccatggagccaaggacacagagtggaggtctgtgaccctgccccgggacctgcagagcacaggccggcagtttgacagcagcacctttggaggccacaagtctgagaagccagccctgcccaggaagagagctggggagaacagaagtgaccaggtgacccggggcaccgtgaccccaccaccccggctggtgaagaagaatgaggaggccgcagatgaggtgttcaaggacatcatggagagcagccctggcagcagcccccccaacctgacccccaagcccctgcggcggcaggtgacagtggccccagccagcggcctgccccacaaggaggaggccgggaaaggaagtgccctgggcaccccagctgctgctgagcctgtgacccccaccagcaaggccggcagcggggcccctgggggcaccagcaagggccctgctgaggagagccgggtgagaagacacaagcacagcagcgagagccctggccgggacaagggcaagctgagccggctgaagccagcccctcctcctcctcctgctgccagcgctgggaaggccggcggcaagcccagccagagccccagccaggaggccgccggggaggccgtgctgggcgccaagaccaaggccaccagcctggtggatgctgtgaacagtgatgctgccaagcccagccagcccggggagggcctgaagaagcctgtgctgcctgccacccccaagccccagagcgccaagcccagcggcacccccatcagccctgcccctgtgcccagcaccctgcccagcgccagcagcgccctggccggggaccagcccagcagcacagccttcatccccctcatcagcaccagggtgtccctgaggaagacccggcagcccccagagagaattgccagcggggccatcaccaagggcgtggtgctggacagcacagaggccctgtgcctggccatcagcaggaacagcgagcagatggccagccacagcgctgtgctggaggccggcaagaacctgtacaccttctgtgtgtcctatgtggacagcatccagcagatgaggaacaagtttgccttccgggaggccatcaacaagctggagaacaacctgcgggagctgcagatctgcccagccacagctggcagcggccctgctgccacccaggacttcagcaagctgctgagctctgtgaaggagatcagtgacatcgtgcagaggtag

SEQ ID NO: 171811 - DNA, 195 bp, Artificial Sequence
  derived and/or modified sequence
atgggccagcagcccgggaaggtgctgggggaccagaggcggcccagcctgcctgccctgcacttcatcaagggggccggcaagaaggagagcagccgccacggcggcccccactgcaatgtgtttgtggagcaggccctgcagaggcctgtggccagtgactttgagccccagggcctgtctgaggccgcctag

SEQ ID NO: 171812 - DNA, 3450 bp, Artificial Sequence
  derived and/or modified sequence
atgggccagcagcccggcaaggtgctgggcgaccagcggcggcccagtttacccgccctccattttataaaaggtgccggtaagaaggagtccagcagacatgggggaccacactgcaacgtttttgttgagcacgaagcactacaaagaccggtggccagtgattttgagccacaagggctgtcggaggcggcccggtggaactctaaagaaaacctgctggcggggccgtctgaaaatgatcccaatctcttcgtcgccctatacgatttcgttgcatctggagataacactctttctataaccaaaggggaaaaacttcgggtgttaggttacaatcacaatggtgagtggtgtgaggctcagaccaaaaacgggcagggatgggtgccctccaactacattacacccgtcaacagtttagagaaacattcttggtatcatggcccagtctctcggaacgctgctgagtaccttctctctagtggcatcaacggcagcttcctggtccgggaatctgagagtagcccaggacagcgttcaatatccttgcgatacgagggtcgagtttatcattataggatcaatactgcgagtgacggcaaactgtatgtgagcagcgagtccagattcaatacgctcgcggagttggtacaccatcatagtacagtggccgatggcctgatcactacattgcactatccagcccctaaacgcaacaagcccaccgtgtatggtgtttctcccaattacgataaatgggagatggagcgaaccgacataactatgaaacacaaactgggaggcgggcagtacggagaagtctatgagggtgtctggaagaaatactctctgactgttgcagtcaaaaccctaaaggaggataccatggaggtggaagagttcctgaaagaagccgcagttatgaaggaaatcaaacaccccaacctggtgcagctccttggagtctgcaccagggagccccccttctacataataaccgagtttatgacgtacgggaacttactcgactatctgagggagtgcaacaggcaagaggtgaacgctgttgtgctgctgtatatggcaactcagatcagctctgctatggaataccttgaaaaaaagaatttcatccaccgggatctcgccgcaaggaactgtctggtcggggagaatcatctggtgaaggtggccgactttgggctgtctcgacttatgactggagatacatatactgcccacgctggagctaaatttcccattaagtggacagccccagagtcattagcttataacaaattctctataaagagtgacgtttgggctttcggggtcctgctgtgggaaatcgccacttacggcatgagtccttatcctgggattgatctcagccaggtctatgagcttttagaaaaagactaccgcatggagagaccagagggctgtccagaaaaggtctatgagttaatgagggcgtgttggcagtggaacccctcagataggcctagcttcgccgaaattcaccaagccttcgagaccatgtttcaagaaagctccatcagcgatgaagtggagaaggagctggggaaacagggtgttcgcggagcagtgtctactcttcttcaagcacccgagcttccaacaaagaccagaacctcacggcgagccgccgagcacagagataccactgatgtgccggagatgcctcactctaagggccagggcgaatccgatccactggaccacgagccagccgtgtctcccttgctcccaaggaaggagaggggccctccagaaggaggcttgaatgaggatgaacgcctcctccccaaggataagaagaccaacctattttccgcactgatcaaaaaaaaaaaaaagaccgcccccacacccccaaagcgcagttctagcttcagggaaatggatggccagcccgagcgtagaggcgctggtgaggaggagggacgcgatatttcgaacggcgctctcgcctttactcctctggatacagcagatcctgctaaatcaccgaagccttctaatggcgccggcgtgcctaacggtgccctgagggagtccggcggtagtggcttcagaagcccacatctttggaaaaaatctagcaccctgacttcgtcacgccttgccacaggggaagaagagggaggagggagcagcagcaagcgcttcttacgctcctgctctgcatcctgtgtgccacacggtgcgaaggacacagaatggcggtccgtgactttacctagggacctccagtccactgggaggcagttcgatagctccaccttcggggggcacaagagcgagaaacctgccctgcctcggaagagagctggggaaaatcggtccgatcaggtgacccgcggtaccgtaacaccacccccccgcctggtcaaaaaaaacgaagaagccgctgacgaagtgtttaaagatatcatggagagctctcccggttccagtcctcctaatttaacccccaaacccctcaggaggcaggttactgtggcccccgcctctggcctgccacacaaagaggaagctggaaaaggctccgccctgggaacccctgccgcagccgagcccgttacacctacgtctaaggccggctctggtgctccaggcgggaccagcaaggggcccgcggaggagtcaagggtgagacggcacaagcactcaagtgagagcccaggcagagacaagggcaagctcagcaggttaaaaccggcccctcctccacctcctgcagcttcggctggaaaggcaggtggaaagccttcgcaatctccctcccaggaggcagctggcgaggctgttcttggggcaaagacaaaagctacatcccttgttgatgcggtgaatagcgacgctgccaaaccatcacagcctggcgagggtctaaagaaacccgtcctgccagctaccccaaagcctcagtccgccaagccatccgggactcctatatccccggctcctgtcccgtctactctgccttccgcctcttctgcactcgccggggatcagccctctagcactgccttcattcctctgatcagcacacgcgtgtcactccggaagacaagacaaccgccagaacgcatcgcttccggagcaataaccaaaggcgtggttcttgattcaaccgaggcgctatgtttggctatcagccggaattctgagcagatggctagccacagcgccgtgcttgaagctggcaagaacctgtacacattctgtgtgagttacgtggatagcatccagcagatgaggaataagttcgcattccgtgaagccatcaacaaactcgaaaacaatctgcgagagcttcaaatctgccccgctactgctggctcaggacctgctgccacccaggacttttccaagctactgtcgagcgtgaaggaaattagtgacatcgttcagagatag

SEQ ID NO: 171813 - DNA, 195 bp, Artificial Sequence
  derived and/or modified sequence
atgggccagcagcccggcaaggtgctgggcgaccagcggcggcccagcctgcccgccctgcatttcattaaaggtgcaggaaagaaagagagttcacggcacggagggcctcactgcaacgtttttgtcgaacaggcgctccagaggccggttgcctctgactttgaaccacaggggttgtccgaagccgcatag

SEQ ID NO: 171814 - DNA, 3450 bp, Artificial Sequence
  derived and/or modified sequence
atgggtcagcaaccgggtaaggtgttaggcgaccagcggcgtccatcgctgccagctctccatttcattaagggagctggtaagaaagaatcctccaggcatggaggacctcactgcaatgtctttgtggagcacgaggccctgcagaggcccgtggcaagcgatttcgagccgcagggactttctgaagccgcacgttggaactccaaggaaaacttactggcaggtccttcagagaatgatccaaatctgtttgtagcactctatgattttgttgcctcaggcgacaacaccctgtccatcacaaagggtgagaaactcagagtcttgggctacaaccacaatggtgagtggtgcgaagctcagacaaagaacggtcagggctgggtgccgagcaattatattaccccggtcaattccttagagaagcactcgtggtatcatggccctgtctcccggaatgcagcggagtatctcctgtcctccggtatcaacggcagtttcctggtgagggagagcgaaagctctccagggcagcggagcatatctttgaggtacgagggtagagtataccactacaggataaataccgcaagcgacggcaagctatatgtgtctagtgagtcccggttcaatactctggcggagctagtacaccaccacagcacggtggctgatgggctgataacgacgctccattatcctgcccctaagaggaataagccgacagtgtacggagtatctccgaactatgacaaatgggagatggaacgcaccgacatcacgatgaagcacaagcttggcggaggtcagtatggtgaggtgtatgagggggtctggaaaaagtacagcctgaccgttgctgtgaagactctaaaagaggataccatggaggtcgaggaattcctgaaggaggctgccgtgatgaaggaaatcaagcaccccaacctcgtgcaactgctgggcgtgtgcacaagggaaccgccattctacataatcacagagttcatgacctatgggaatcttctggactatcttagggagtgtaatcgccaggaagtgaacgctgtggtgctgttgtatatggccacccaaatcagtagtgcaatggagtatctcgagaagaagaattttatacacagggatttggctgctcggaactgtctagtaggcgaaaatcatctcgtgaaggtggcagatttcggtctgtctaggttaatgaccggagacacatatactgcgcatgccggagctaaattccctatcaagtggaccgctcccgagtctctggcatataataagttcagcattaagtcagacgtgtgggccttcggcgtcctcctgtgggagatcgccacttacggcatgagcccttatcccggtatcgatcttagccaagtatatgagctccttgagaaggattatagaatggagcgaccagagggttgccctgaaaaagtttatgaactcatgagggcatgctggcagtggaacccctccgatcgacctagttttgccgagattcaccaggcgttcgaaacaatgtttcaggagagttctattagcgacgaagttgaaaaggagctcggcaaacaaggtgtgcgcggagcagtgagtactttgctccaggcccctgaacttccaactaagactaggactagccggagggcagccgagcacagagacacaaccgatgttcccgagatgccccactccaaaggacagggtgagtccgacccactggaccatgagccagccgtctccccactgttgccacgaaaggaaagaggcccacccgaggggggtctgaacgaagacgagcggctcctgcccaaagataagaaaacaaacttgttcagcgcgctgatcaaaaaaaaaaaaaagaccgccccaacacctcccaagagatctagttcgttcagggaaatggatggtcagccagagaggcgcggagctggcgaagaggagggccgtgacatcagcaatggcgctctggcatttaccccgctggacacagccgatccagcaaagtcccctaaaccctcgaatggggcaggagtgcctaatggcgctctgcgtgaatctgggggatctggattcaggtctccccacctgtggaagaagagctccactcttacatcctcaagactcgccactggggaagaagaaggaggtgggtccagctccaaaaggtttctccgatcctgttctgccagctgcgtgccacacggagccaaggatactgaatggaggtctgttactctaccccgtgaccttcaatcaaccggcaggcagttcgattcaagcacatttggcggacacaaatctgagaaaccagccctgcctcgcaaacgggctggtgaaaatagatccgatcaggtcactagggggacggtgacccccccaccacgcctggtgaaaaaaaatgaggaggcagctgacgaggttttcaaagacattatggagtcctccccagggagttccccgcctaatctgacaccaaagcccctgcggcgacaagtaaccgtagcgcctgcttccggactccctcataaagaagaggccggaaaaggatctgctttgggcacacctgccgcagctgagcctgtaaccccaacaagtaaggccggtagcggtgcacctggcggtacaagtaaaggacccgctgaagaatctagagtgcggcgtcataagcatagcagcgaaagtcctggcagagacaaaggcaagctcagccggttaaaacccgcaccacctcctcctcctgctgccagtgccggtaaggctggaggcaaaccctcacagtccccctcgcaagaggccgctggtgaggctgtgttgggagcaaagacaaaagccacatcgcttgtggatgctgtaaacagcgatgcagccaaaccttcacagccaggagaagggctgaaaaagcctgtgctgcctgccactccaaaaccccagtccgccaagccgtccgggactccaatctcccccgctcccgtgcccagtacactgccctctgccagttctgccctggccggtgaccagccatccagcactgccttcatacccctaattagtaccagggtctccctgcgtaagacgagacagcccccagaaaggatcgccagcggagccatcaccaaaggtgtagtgctcgattctaccgaggccttgtgtctggcgatcagccggaacagtgagcagatggcgtcgcattctgcagtgttggaagccggaaagaacctgtacacattctgcgtgtcgtacgtggacagcattcagcagatgaggaataaatttgccttccgggaggctatcaacaagctagagaataacctgcgcgaactgcagatttgccctgcgacagctggcagcggcccagcggcaacccaggacttttcaaagctgctttcaagcgtgaaggagatctccgacatcgttcagcggtag

SEQ ID NO: 171815 - DNA, 195 bp, Artificial Sequence
  derived and/or modified sequence
atgggtcagcagcctggaaaggttctgggggatcagagaaggccttccctgcccgcactgcattttataaagggagctgggaaaaaggagagcagtcgtcacggaggaccccattgtaacgttttcgtggagcaggccctgcagcgtccagtggcatccgattttgaacctcagggacttagtgaggcagcttag

SEQ ID NO: 171816 - DNA, 3824 bp, Artificial Sequence
  derived and/or modified sequence
tgtgagaattgaaatgactagcattattgacccttttcagcatcccctgtgaatatttctgtttaggtttttcttcttgaaaagaaattgttattcagcccgtttaaaacaaatcaagaaacttttgggtaacattgcaattacatgaaattgataaccgcgaaaataattggaactcctgcttgcaagtgtcaacctaaaaaaagtgcttccttttgttatggaagatgtctttctgtgattgacttcaattgctgacttgtggagatgcagcgaatgtgaaatcccacgtatatgccatttccctctacgctcgctgaccgttctggaagatcttgaaccctcttctggaaaggggtacctattattactttatggggcagcagcctggaaaagtacttggggaccaaagaaggccaagcttgcctgccctgcattttatcaaaggagcagggaagaaggaatcatcgaggcatgggggtccacactgcaatgtttttgtggaacatgaagcccttcagcggccagtagcatctgactttgagcctcagggtctgagtgaagccgctcgttggaactccaaggaaaaccttctcgctggacccagtgaaaatgaccccaaccttttcgttgcactgtatgattttgtggccagtggagataacactctaagcataactaaaggtgaaaagctccgggtcttaggctataatcacaatggggaatggtgtgaagcccaaaccaaaaatggccaaggctgggtcccaagcaactacatcacgccagtcaacagtctggagaaacactcctggtaccatgggcctgtgtcccgcaatgccgctgagtatctgctgagcagcgggatcaatggcagcttcttggtgcgtgagagtgagagcagtcctggccagaggtccatctcgctgagatacgaagggagggtgtaccattacaggatcaacactgcttctgatggcaagctctacgtctcctccgagagccgcttcaacaccctggccgagttggttcatcatcattcaacggtggccgacgggctcatcaccacgctccattatccagccccaaagcgcaacaagcccactgtctatggtgtgtcccccaactacgacaagtgggagatggaacgcacggacatcaccatgaagcacaagctgggcgggggccagtacggggaggtgtacgagggcgtgtggaagaaatacagcctgacggtggccgtgaagaccttgaaggaggacaccatggaggtggaagagttcttgaaagaagctgcagtcatgaaagagatcaaacaccctaacctggtgcagctccttggggtctgcacccgggagcccccgttctatatcatcactgagttcatgacctacgggaacctcctggactacctgagggagtgcaaccggcaggaggtgaacgccgtggtgctgctgtacatggccactcagatctcgtcagccatggagtacctggagaagaaaaacttcatccacagagatcttgctgcccgaaactgcctggtaggggagaaccacttggtgaaggtagctgattttggcctgagcaggttgatgacaggggacacctacacagcccatgctggagccaagttccccatcaaatggactgcacccgagagcctggcctacaacaagttctccatcaagtccgacgtctgggcatttggagtattgctttgggaaattgctacctatggcatgtccccttacccgggaattgacctgtcccaggtgtatgagctgctagagaaggactaccgcatggagcgcccagaaggctgcccagagaaggtctatgaactcatgcgagcatgttggcagtggaatccctctgaccggccctcctttgctgaaatccaccaagcctttgaaacaatgttccaggaatccagtatctcagacgaagtggaaaaggagctggggaaacaaggcgtccgtggggctgtgagtaccttgctgcaggccccagagctgcccaccaagacgaggacctccaggagagctgcagagcacagagacaccactgacgtgcctgagatgcctcactccaagggccagggagagagcgatcctctggaccatgagcctgccgtgtctccattgctccctcgaaaagagcgaggtcccccggagggcggcctgaatgaagatgagcgccttctccccaaagacaaaaagaccaacttgttcagcgccttgatcaagaagaagaagaagacagccccaacccctcccaaacgcagcagctccttccgggagatggacggccagccggagcgcagaggggccggcgaggaagagggccgagacatcagcaacggggcactggctttcacccccttggacacagctgacccagccaagtccccaaagcccagcaatggggctggggtccccaatggagccctccgggagtccgggggctcaggcttccggtctccccacctgtggaagaagtccagcacgctgaccagcagccgcctagccaccggcgaggaggagggcggtggcagctccagcaagcgcttcctgcgctcttgctccgcctcctgcgttccccatggggccaaggacacggagtggaggtcagtcacgctgcctcgggacttgcagtccacgggaagacagtttgactcgtccacatttggagggcacaaaagtgagaagccggctctgcctcggaagagggcaggggagaacaggtctgaccaggtgacccgaggcacagtaacgcctccccccaggctggtgaaaaagaatgaggaagctgctgatgaggtcttcaaagacatcatggagtccagcccgggctccagcccgcccaacctgactccaaaacccctccggcggcaggtcaccgtggcccctgcctcgggcctcccccacaaggaagaagctggaaagggcagtgccttagggacccctgctgcagctgagccagtgacccccaccagcaaagcaggctcaggtgcaccagggggcaccagcaagggccccgccgaggagtccagagtgaggaggcacaagcactcctctgagtcgccagggagggacaaggggaaattgtccaggctcaaacctgccccgccgcccccaccagcagcctctgcagggaaggctggaggaaagccctcgcagagcccgagccaggaggcggccggggaggcagtcctgggcgcaaagacaaaagccacgagtctggttgatgctgtgaacagtgacgctgccaagcccagccagccgggagagggcctcaaaaagcccgtgctcccggccactccaaagccacagtccgccaagccgtcggggacccccatcagcccagcccccgttccctccacgttgccatcagcatcctcggccctggcaggggaccagccgtcttccaccgccttcatccctctcatatcaacccgagtgtctcttcggaaaacccgccagcctccagagcggatcgccagcggcgccatcaccaagggcgtggtcctggacagcaccgaggcgctgtgcctcgccatctctaggaactccgagcagatggccagccacagcgcagtgctggaggccggcaaaaacctctacacgttctgcgtgagctatgtggattccatccagcaaatgaggaacaagtttgccttccgagaggccatcaacaaactggagaataatctccgggagcttcagatctgcccggcgacagcaggcagtggtccagcggccactcaggacttcagcaagctcctcagttcggtgaaggaaatcagtgacatagtgcagaggtag

SEQ ID NO: 171817 - DNA, 532 bp, Artificial Sequence
  derived and/or modified sequence
tttcagcatcccctgtgaatatttctgtttaggtttttcttcttgaaaagaaattgttattcagcccgtttaaaacaaatcaagaaacttttgggtaacattgcaattacatgaaattgataaccgcgaaaataattggaactcctgcttgcaagtgtcaacctaaaaaaagtgcttccttttgttatggaagatgtctttctgtgattgacttcaattgctgacttgtggagatgcagcgaatgtgaaatcccacgtatatgccatttccctctacgctcgctgaccgttctggaagatcttgaaccctcttctggaaaggggtacctattattactttatggggcagcagcctggaaaagtacttggggaccaaagaaggccaagcttgcctgccctgcattttatcaaaggagcagggaagaaggaatcatcgaggcatgggggtccacactgcaatgtttttgtggaacaagcccttcagcggccagtagcatctgactttgagcctcagggtctgagtgaagccgct

SEQ ID NO: 171818 - DNA, 3450 bp, Artificial Sequence
  derived and/or modified sequence
atgggccagcagcccggcaaggtgctgggcgaccagagaagacccagcctgcccgccctgcacttcatcaagggcgccggcaagaaggagagcagcagacacggcggcccccactgcaacgtgttcgtggagcacgaggccctgcagagacccgtggccagcgacttcgagccccagggcctgagcgaggccgccagatggaacagcaaggagaacctgctggccggccccagcgagaacgaccccaacctgttcgtggccctgtacgacttcgtggccagcggcgacaacaccctgagcatcaccaagggcgagaagctgagagtgctgggctacaaccacaacggcgagtggtgcgaggcccagaccaagaacggccagggctgggtgcccagcaactacatcacccccgtgaacagcctggagaagcacagctggtaccacggccccgtgagcagaaacgccgccgagtacctgctgagcagcggcatcaacggcagcttcctggtgagagagagcgagagcagccccggccagagaagcatcagcctgagatacgagggcagagtgtaccactacagaatcaacaccgccagcgacggcaagctgtacgtgagcagcgagagcagattcaacaccctggccgagctggtgcaccaccacagcaccgtggccgacggcctgatcaccaccctgcactaccccgcccccaagagaaacaagcccaccgtgtacggcgtgagccccaactacgacaagtgggagatggagagaaccgacatcaccatgaagcacaagctgggcggcggccagtacggcgaggtgtacgagggcgtgtggaagaagtacagcctgaccgtggccgtgaagaccctgaaggaggacaccatggaggtggaggagttcctgaaggaggccgccgtgatgaaggagatcaagcaccccaacctggtgcagctgctgggcgtgtgcaccagagagccccccttctacatcatcaccgagttcatgacctacggcaacctgctggactacctgagagagtgcaacagacaggaggtgaacgccgtggtgctgctgtacatggccacccagatcagcagcgccatggagtacctggagaagaagaacttcatccacagagacctggccgccagaaactgcctggtgggcgagaaccacctggtgaaggtggccgacttcggcctgagcagactgatgaccggcgacacctacaccgcccacgccggcgccaagttccccatcaagtggaccgcccccgagagcctggcctacaacaagttcagcatcaagagcgacgtgtgggccttcggcgtgctgctgtgggagatcgccacctacggcatgagcccctaccccggcatcgacctgagccaggtgtacgagctgctggagaaggactacagaatggagagacccgagggctgccccgagaaggtgtacgagctgatgagagcctgctggcagtggaaccccagcgacagacccagcttcgccgagatccaccaggccttcgagaccatgttccaggagagcagcatcagcgacgaggtggagaaggagctgggcaagcagggcgtgagaggcgccgtgagcaccctgctgcaggcccccgagctgcccaccaagaccagaaccagcagaagagccgccgagcacagagacaccaccgacgtgcccgagatgccccacagcaagggccagggcgagagcgaccccctggaccacgagcccgccgtgagccccctgctgcccagaaaggagagaggcccccccgagggcggcctgaacgaggacgagagactgctgcccaaggacaagaagaccaacctgttcagcgccctgatcaagaagaagaagaagaccgcccccaccccccccaagagaagcagcagcttcagagagatggacggccagcccgagagaagaggcgccggcgaggaggagggcagagacatcagcaacggcgccctggccttcacccccctggacaccgccgaccccgccaagagccccaagcccagcaacggcgccggcgtgcccaacggcgccctgagagagagcggcggcagcggcttcagaagcccccacctgtggaagaagagcagcaccctgaccagcagcagactggccaccggcgaggaggagggcggcggcagcagcagcaagagattcctgagaagctgcagcgccagctgcgtgccccacggcgccaaggacaccgagtggagaagcgtgaccctgcccagagacctgcagagcaccggcagacagttcgacagcagcaccttcggcggccacaagagcgagaagcccgccctgcccagaaagagagccggcgagaacagaagcgaccaggtgaccagaggcaccgtgacccccccccccagactggtgaagaagaacgaggaggccgccgacgaggtgttcaaggacatcatggagagcagccccggcagcagcccccccaacctgacccccaagcccctgagaagacaggtgaccgtggcccccgccagcggcctgccccacaaggaggaggccggcaagggcagcgccctgggcacccccgccgccgccgagcccgtgacccccaccagcaaggccggcagcggcgcccccggcggcaccagcaagggccccgccgaggagagcagagtgagaagacacaagcacagcagcgagagccccggcagagacaagggcaagctgagcagactgaagcccgcccccccccccccccccgccgccagcgccggcaaggccggcggcaagcccagccagagccccagccaggaggccgccggcgaggccgtgctgggcgccaagaccaaggccaccagcctggtggacgccgtgaacagcgacgccgccaagcccagccagcccggcgagggcctgaagaagcccgtgctgcccgccacccccaagccccagagcgccaagcccagcggcacccccatcagccccgcccccgtgcccagcaccctgcccagcgccagcagcgccctggccggcgaccagcccagcagcaccgccttcatccccctgatcagcaccagagtgagcctgagaaagaccagacagccccccgagagaatcgccagcggcgccatcaccaagggcgtggtgctggacagcaccgaggccctgtgcctggccatcagcagaaacagcgagcagatggccagccacagcgccgtgctggaggccggcaagaacctgtacaccttctgcgtgagctacgtggacagcatccagcagatgagaaacaagttcgccttcagagaggccatcaacaagctggagaacaacctgagagagctgcagatctgccccgccaccgccggcagcggccccgccgccacccaggacttcagcaagctgctgagcagcgtgaaggagatcagcgacatcgtgcagagatag

SEQ ID NO: 171819 - DNA, 195 bp, Artificial Sequence
  derived and/or modified sequence
atgggccagcagcccggcaaggtgctgggcgaccagagaagacccagcctgcccgccctgcacttcatcaagggcgccggcaagaaggagagcagcagacacggcggcccccactgcaacgtgttcgtggagcaggccctgcagagacccgtggccagcgacttcgagccccagggcctgagcgaggccgcctag

SEQ ID NO: 171820 - protein, 1182 aa, Artificial Sequence
  derived and/or modified sequence
MGQQVGRVGEAPGLQQPQPRGIRGSSAARPSGRRRDPAGRTTETGFNIFTQHDHFASCVEDGFEGDKTGGSSPEALHRPYGCDVEPQALNEAIRWSSKENLLGATESDPNLFVALYDFVASGDNTLSITKGEKLRVLGYNQNGEWSEVRSKNGQGWVPSNYITPVNSLEKHSWYHGPVSRSAAEYLLSSLINGSFLVRESESSPGQLSISLRYEGRVYHYRINTTADGKVYVTAESRFSTLAELVHHHSTVADGLVTTLHYPAPKCNKPTVYGVSPIHDKWEMERTDITMKHKLGGGQYGEVYVGVWKKYSLTVAVKTLKEDTMEVEEFLKEAAVMKEIKHPNLVQLLGVCTLEPPFYIVTEYMPYGNLLDYLRECNREEVTAVVLLYMATQISSAMEYLEKKNFIHRDLAARNCLVGENHVVKVADFGLSRLMTGDTYTAHAGAKFPIKWTAPESLAYNTFSIKSDVWAFGVLLWEIATYGMSPYPGIDLSQVYDLLEKGYRMEQPEGCPPKVYELMRACWKWSPADRPSFAETHQAFETMFHDSSISEEVAEELGRAASSSSVVPYLPRLPILPSKTRTLKKQVENKENIEGAQDATENSASSLAPGFIRGAQASSGSPALPRKQRDKSPSSLLEDAKETCFTRDRKGGFFSSFMKKRNAPTPPKRSSSFREMENQPHKKYELTGNFSSVASLQHADGFSFTPAQQEANLVPPKCYGGSFAQRNLCNDDGGGGGGSGTAGGGWSGITGFFTPRLIKKTLGLRAGKPTASDDTSKPFPRSNSTSSMSSGLPEQDRMAMTLPRNCQRSKLQLERTVSTSSQPEENVDRANDMLPKKSEESAAPSRERPKAKLLPRGATALPLRTPSGDLAITEKDPPGVGVAGVAAAPKGKEKNGGARLGMAGVPEDGEQPGWPSPAKAAPVLPTTHNHKVPVLISPTLKHTPADVQLIGTDSQGNKFKLLSEHQVTSSGDKDRPRRVKPKCAPPPPPVMRLLQHPSICSDPTEEPTALTAGQSTSETQEGGKKAALGAVPISGKAGRPVMPPPQVPLPTSSISPAKMANGTAGTKVALRKTKQAAEKISADKISKEALLECADLLSSALTEPVPNSQLVDTGHQLLDYCSGYVDCIPQTRNKFAFREAVSKLELSLQELQVSSAAAGVPGTNPVLNNLLSCVQEISDVVQR

SEQ ID NO: 171821 - DNA, 3549 bp, Artificial Sequence
  derived and/or modified sequence
atgggccagcaggtgggcagagtgggcgaggcccccggcctgcagcagccccagcccagaggcatcagaggcagcagcgccgccagacccagcggcagaagaagagaccccgccggcagaaccaccgagaccggcttcaacatcttcacccagcacgaccacttcgccagctgcgtggaggacggcttcgagggcgacaagaccggcggcagcagccccgaggccctgcacagaccctacggctgcgacgtggagccccaggccctgaacgaggccatcagatggagcagcaaggagaacctgctgggcgccaccgagagcgaccccaacctgttcgtggccctgtacgacttcgtggccagcggcgacaacaccctgagcatcaccaagggcgagaagctgagagtgctgggctacaaccagaacggcgagtggagcgaggtgagaagcaagaacggccagggctgggtgcccagcaactacatcacccccgtgaacagcctggagaagcacagctggtaccacggccccgtgagcagaagcgccgccgagtacctgctgagcagcctgatcaacggcagcttcctggtgagagagagcgagagcagccccggccagctgagcatcagcctgagatacgagggcagagtgtaccactacagaatcaacaccaccgccgacggcaaggtgtacgtgaccgccgagagcagattcagcaccctggccgagctggtgcaccaccacagcaccgtggccgacggcctggtgaccaccctgcactaccccgcccccaagtgcaacaagcccaccgtgtacggcgtgagccccatccacgacaagtgggagatggagagaaccgacatcaccatgaagcacaagctgggcggcggccagtacggcgaggtgtacgtgggcgtgtggaagaagtacagcctgaccgtggccgtgaagaccctgaaggaggacaccatggaggtggaggagttcctgaaggaggccgccgtgatgaaggagatcaagcaccccaacctggtgcagctgctgggcgtgtgcaccctggagccccccttctacatcgtgaccgagtacatgccctacggcaacctgctggactacctgagagagtgcaacagagaggaggtgaccgccgtggtgctgctgtacatggccacccagatcagcagcgccatggagtacctggagaagaagaacttcatccacagagacctggccgccagaaactgcctggtgggcgagaaccacgtggtgaaggtggccgacttcggcctgagcagactgatgaccggcgacacctacaccgcccacgccggcgccaagttccccatcaagtggaccgcccccgagagcctggcctacaacaccttcagcatcaagagcgacgtgtgggccttcggcgtgctgctgtgggagatcgccacctacggcatgagcccctaccccggcatcgacctgagccaggtgtacgacctgctggagaagggctacagaatggagcagcccgagggctgcccccccaaggtgtacgagctgatgagagcctgctggaagtggagccccgccgacagacccagcttcgccgagacccaccaggccttcgagaccatgttccacgacagcagcatcagcgaggaggtggccgaggagctgggcagagccgccagcagcagcagcgtggtgccctacctgcccagactgcccatcctgcccagcaagaccagaaccctgaagaagcaggtggagaacaaggagaacatcgagggcgcccaggacgccaccgagaacagcgccagcagcctggcccccggcttcatcagaggcgcccaggccagcagcggcagccccgccctgcccagaaagcagagagacaagagccccagcagcctgctggaggacgccaaggagacctgcttcaccagagacagaaagggcggcttcttcagcagcttcatgaagaagagaaacgcccccaccccccccaagagaagcagcagcttcagagagatggagaaccagccccacaagaagtacgagctgaccggcaacttcagcagcgtggccagcctgcagcacgccgacggcttcagcttcacccccgcccagcaggaggccaacctggtgccccccaagtgctacggcggcagcttcgcccagagaaacctgtgcaacgacgacggcggcggcggcggcggcagcggcaccgccggcggcggctggagcggcatcaccggcttcttcacccccagactgatcaagaagaccctgggcctgagagccggcaagcccaccgccagcgacgacaccagcaagcccttccccagaagcaacagcaccagcagcatgagcagcggcctgcccgagcaggacagaatggccatgaccctgcccagaaactgccagagaagcaagctgcagctggagagaaccgtgagcaccagcagccagcccgaggagaacgtggacagagccaacgacatgctgcccaagaagagcgaggagagcgccgcccccagcagagagagacccaaggccaagctgctgcccagaggcgccaccgccctgcccctgagaacccccagcggcgacctggccatcaccgagaaggacccccccggcgtgggcgtggccggcgtggccgccgcccccaagggcaaggagaagaacggcggcgccagactgggcatggccggcgtgcccgaggacggcgagcagcccggctggcccagccccgccaaggccgcccccgtgctgcccaccacccacaaccacaaggtgcccgtgctgatcagccccaccctgaagcacacccccgccgacgtgcagctgatcggcaccgacagccagggcaacaagttcaagctgctgagcgagcaccaggtgaccagcagcggcgacaaggacagacccagaagagtgaagcccaagtgcgcccccccccccccccccgtgatgagactgctgcagcaccccagcatctgcagcgaccccaccgaggagcccaccgccctgaccgccggccagagcaccagcgagacccaggagggcggcaagaaggccgccctgggcgccgtgcccatcagcggcaaggccggcagacccgtgatgccccccccccaggtgcccctgcccaccagcagcatcagccccgccaagatggccaacggcaccgccggcaccaaggtggccctgagaaagaccaagcaggccgccgagaagatcagcgccgacaagatcagcaaggaggccctgctggagtgcgccgacctgctgagcagcgccctgaccgagcccgtgcccaacagccagctggtggacaccggccaccagctgctggactactgcagcggctacgtggactgcatcccccagaccagaaacaagttcgccttcagagaggccgtgagcaagctggagctgagcctgcaggagctgcaggtgagcagcgccgccgccggcgtgcccggcaccaaccccgtgctgaacaacctgctgagctgcgtgcaggagatcagcgacgtggtgcagagatag

SEQ ID NO: 171822 - DNA, 3549 bp, Artificial Sequence
  derived and/or modified sequence
atggggcagcaagtaggccgggtcggcgaggcccccggtctgcaacagccgcagccccgtgggatcagagggagttcggcagcccgaccgagcggacggcgccgcgaccctgccggtcggactaccgagaccggatttaacatttttacgcagcacgaccacttcgcttcctgcgtggaagatggctttgagggtgacaagacaggcgggtcttcacccgaggcgctacaccgcccatatggctgcgatgtcgaaccacaggcattgaacgaggccatccggtggagctctaaggaaaatctcttgggagccaccgaaagtgaccccaatctgttcgttgcactatacgattttgtcgcttctggcgacaacacgttgagcataaccaaaggggagaaactgcgcgtgctaggctataatcagaacggagagtggtctgaggtgcgctctaaaaatggacaggggtgggtcccctcaaactatatcacacctgtcaactccttggaaaaacatagctggtatcatggtccagtgagtcgctccgcagctgaatatctactaagttcactgataaatggaagtttcttggtgcgtgaatctgagtctagcccaggtcagttaagtatttcccttagatatgagggcagagtgtaccattacagaataaatacaacagccgatgggaaggtgtacgtcacagcagaatcacgcttttcgaccctagccgagctggtgcaccatcacagcaccgtcgccgacggacttgtaaccactttgcactacccggccccaaaatgcaacaaacctacagtatatggcgtttctcctattcatgataaatgggaaatggagagaactgatataaccatgaagcacaaactgggagggggtcagtacggagaggtatacgtcggcgtatggaagaagtattccctgactgtcgccgtcaaaaccctgaaagaagataccatggaggtggaagaatttctgaaggaagctgcagtaatgaaggagatcaaacacccgaatctggtccagcttctgggtgtatgcacattagagcctcccttctacatcgttactgagtacatgccatatggtaacctattagactatctcagggagtgcaacagggaggaggtgacagcagtcgtactgctgtacatggctacccaaatctccagcgcaatggaatatctggaaaaaaagaactttatacaccgggacctcgcagccaggaactgtctagtgggtgagaaccacgtggtcaaggtcgccgatttcggtctgtcgagactaatgaccggggacacatataccgcacatgcgggggccaaattccctattaagtggaccgccccagagtctctggcttacaacactttctcaataaagagcgatgtgtgggctttcggcgtcctgctgtgggaaattgcaacatatggcatgtctccttaccccggaattgatctgtcccaggtgtatgatttattggagaaggggtacagaatggagcagccagaggggtgccctcctaaagtgtatgagttgatgcgggcttgctggaagtggtcgcctgccgatcgcccttcattcgcagagacacatcaagcattcgaaaccatgttccatgatagctctatctctgaggaggtggccgaggagctcggccgtgcagcctccagctccagtgtggttccatacttgcctaggctgccaattttgccttccaaaacaagaacgttgaaaaaacaggtcgaaaacaaggagaatatcgagggcgctcaagatgccacggagaatagcgcatcatccctggccccgggttttattaggggggcccaagccagtagcggctctccagcactcccacggaagcagcgggataaatcaccctccagtttactggaggacgccaaggaaacttgctttaccagggatcgcaagggtgggtttttctcaagtttcatgaaaaaaaggaatgccccaaccccgcccaagcgttctagctcgttcagagagatggaaaaccaacctcataagaagtacgaactcactggcaatttttcgagcgtggcaagccttcagcacgctgacggcttcagctttactcctgcacagcaggaagctaacttagtcccacctaagtgttacggcggtagtttcgcacaaagaaacttgtgtaacgatgatggcggcggcggtggcgggtcaggaactgccggtggcggatggtcaggcattactggctttttcacgccacggctgataaagaagacgttagggctacgtgcaggcaaacccacagcttcagatgataccagcaagccctttccacgttctaattctacttccagcatgtcatccggcttacccgaacaggatcgcatggcaatgaccctccctcggaattgccagcgctctaaattacagctggaacgcactgttagtaccagctcacaacccgaggaaaatgtggacagagctaatgacatgttgccaaagaaatctgaggaatccgctgcaccgtctagggagagacccaaggctaaattactccccagaggagcaactgctttgcctctcagaacgccttccggggacctggccatcaccgagaaggacccgcccggtgtgggagtcgctggtgtggctgctgccccgaaagggaaggagaagaatggcggggctagactgggcatggccggagtgcccgaagatggcgaacagccaggttggccttcccccgccaaggctgctcccgtgctgccaactacacacaaccataaagtgccagtcctgatatcccccactttaaaacacactcctgcagacgtgcagctgatagggactgattcccagggaaataaattcaaactgctgtccgagcaccaggtcaccagttcaggcgacaaggaccgtccaagacgggtcaaacctaagtgtgccccacccccaccccccgtaatgagattgcttcagcacccctcaatctgtagcgatccgaccgaagagccgacggccttgactgctggccaaagtacttcagaaacccaggaaggaggtaaaaaagccgcactgggtgctgtacctatcagcgggaaagccggacgccccgtaatgccacctcctcaggtgcccttgcctacaagctcaatctctccagccaaaatggctaacggcacagctgggacaaaagtggccctaagaaaaactaagcaggctgctgaaaagattagcgctgataagatctctaaagaggcgttgctcgaatgcgcagatctcctgtctagtgccctgactgagcccgttcctaacagccagcttgtagacacagggcaccagctcctggattattgttccggatacgtggattgtatcccccagactcggaacaagttcgcattcagagaggcagttagtaaattagagctgagcctgcaagagttgcaggtttcgagcgctgctgctggcgtccccgggactaatccagtgctgaataacttgcttagctgtgttcaggagattagcgacgtcgttcaaaggtag

SEQ ID NO: 171823 - DNA, 3549 bp, Artificial Sequence
  derived and/or modified sequence
atgggccagcaggtgggccgggtgggggaggcccctggcctgcagcagccccagccccggggcatccggggcagcagcgctgcccggcccagcggcagaagaagagatcctgctggccgcaccacagagaccggcttcaacatcttcacccagcacgaccactttgccagctgtgtggaggatggctttgaaggagacaagacaggaggcagcagccctgaggccctgcaccggccctacggctgtgatgtggagccccaggccctgaatgaggccatccgctggagcagcaaagaaaacctgctgggcgccacagaaagtgaccccaacctgtttgtggccctgtatgactttgtggccagcggggacaacaccctgagcatcaccaagggggagaagctgcgggtgctgggctacaaccagaatggagagtggagcgaggtgcgcagcaagaatggccagggctgggtgcccagcaactacatcacccctgtgaacagcctggagaagcacagctggtaccacggccctgtgagccgctctgctgctgagtacctgctgagcagcctcatcaatggcagcttcctggtgcgggagagcgagagcagccctggccagctgagcatcagcctgcgctatgagggccgggtgtaccactaccgcatcaacaccacagcagatggcaaggtgtatgtgacagctgagagccgcttcagcaccctggccgagctggtgcaccaccacagcacagtggctgatggcctggtgaccaccctgcactacccagcccccaagtgcaacaagcccaccgtgtatggagtgagccccatccatgacaagtgggagatggagaggacagacatcaccatgaagcacaagctgggcggcggccagtatggagaggtgtatgtgggcgtgtggaagaagtacagcctgactgtggccgtgaagaccctgaaggaggacaccatggaggtggaggagttcctgaaggaggccgctgtgatgaaggagatcaagcaccccaacctggtgcagctgctgggcgtgtgcaccctggagccccccttctacatcgtgacagagtacatgccctacggcaacctgctggactacctgcgggagtgcaaccgggaggaggtgacagctgtggtgctgctgtacatggccacccagatcagcagcgccatggagtacctggagaagaagaacttcatccaccgggacctggccgccaggaactgcctggtgggagaaaatcatgtggtgaaggtggccgactttggcctgagccggctgatgactggagacacctacacagcccatgctggggccaagttccccatcaagtggacagcccctgagagcctggcctacaacaccttcagcatcaagagtgatgtgtgggcctttggagtgctgctgtgggagatcgccacctacggcatgagcccctacccaggcatcgacctgagccaggtgtatgacctgctggagaagggctacaggatggagcagcctgagggctgcccccccaaggtgtatgagctgatgagggcctgctggaagtggagccctgctgaccggcccagctttgctgagacccaccaggcctttgagaccatgtttcatgacagcagcatcagcgaggaggtggccgaggagctgggccgggccgccagcagcagctctgtggtgccctacctgccccggctgcccatcctgcccagcaagaccaggaccctgaagaagcaggtggagaacaaggagaacatcgagggcgcccaggatgccacagagaacagcgccagcagcctggcccctggcttcatccggggggcccaggccagcagcggcagccctgccctgcccaggaagcagagggacaagagccccagcagcctgctggaggatgccaaggagacctgcttcacccgggacagaaaaggaggcttcttcagcagcttcatgaagaagagaaatgcccccaccccacccaagaggagcagcagcttccgggagatggagaaccagccccacaagaagtatgagctgaccggcaacttcagctctgtggccagcctgcagcacgcagatggcttctccttcaccccagcccagcaggaggccaacctggtgccccccaagtgctacggcggcagctttgcccagaggaacctgtgcaatgatgatggcggcggcggcggcggcagcggcacagctgggggcggctggagcggcatcaccggcttcttcacccccaggctcatcaagaagaccctgggcctgcgggccggcaagcccacagccagtgatgacaccagcaagcccttccccaggagcaacagcaccagctccatgagcagcggcctgcctgagcaggacaggatggccatgaccctgcccaggaactgccagaggagcaagctgcagctggagaggacagtgtccaccagcagccagcctgaggagaatgtggaccgggccaatgacatgctgcccaagaagtctgaggagagcgctgcccccagccgggagcggcccaaggccaagctgctgcccaggggggccacagccctgcccctgcggacccccagcggggacctggccatcacagagaaggaccccccaggagtgggcgtggccggcgtggccgccgcccccaagggcaaggagaagaatggaggagcccggctgggcatggccggcgtgcctgaagatggagagcagcccggctggcccagccctgccaaggccgcccctgtgctgcccaccacccacaaccacaaggtgcctgtgctgatcagccccaccctgaagcacaccccagcagatgtgcagctgattggaacagacagccagggcaacaagttcaagctgctgtctgagcaccaggtgaccagcagcggggacaaggaccggccccggcgggtgaagcccaagtgtgcccctcctcctcctcctgtgatgaggctgctgcagcaccccagcatctgcagcgaccccacagaggagcccacagccctgacagctggccagagcaccagcgagacccaggagggcggcaagaaggccgccctgggcgctgtgcccatcagcggcaaggccggccggcctgtgatgcccccaccccaggtgcccctgcccaccagcagcatcagccctgccaagatggccaacggcacagctggcaccaaggtggccctgaggaagaccaagcaggccgctgagaagatctctgctgacaagatcagcaaggaggccctgctggagtgtgccgacctgctgagcagcgccctgacagagcctgtgcccaacagccagctggtggacaccggccaccagctgctggactactgcagcggctacgtggactgcatcccccagaccaggaacaagtttgccttccgggaggccgtgtccaagctggagctgagcctgcaggagctgcaggtgagcagcgctgctgctggggtgcccggcaccaaccctgtgctgaacaacctgctgagctgtgtgcaggagatcagtgatgtggtgcagaggtag

SEQ ID NO: 171824 - DNA, 3549 bp, Artificial Sequence
  derived and/or modified sequence
atgggccagcaggtgggccgggtgggcgaggcccccggcctgcagcagccccaaccacgggggatcaggggcagcagcgccgctcgcccctccggacgcagaagggatcccgccggacgcaccaccgagacggggtttaatatctttactcagcacgatcactttgcaagctgtgtcgaagatggcttcgagggggataaaacaggagggagttcccccgaggcccttcataggccctatgggtgtgatgtagagcctcaggcactgaatgaggccatccgctggtcctctaaagaaaaccttctgggagcgacggagtctgaccctaacctcttcgttgctctgtacgacttcgtggcctccggtgataacacactgtcaattaccaaaggcgagaaactgagggtgctgggatataatcaaaacggtgagtggtctgaagtccggagcaaaaacgggcaggggtgggttccttccaattatattacacccgttaattccctggagaagcattcttggtaccatggaccagtgtccagaagtgccgccgagtatctgttgtccagtctgatcaacggtagcttcttggttagagaatcggagtcttctcccggccagctgtcgatctccctgcgctacgaaggtagagtgtatcactacagaataaataccaccgcagatggtaaggtatatgtcacagctgagtcgagattctctacactcgctgagctggtacaccatcactcaaccgtggcagacggcctggtgacgaccctgcactacccagccccaaaatgtaacaaacctaccgtgtatggcgtctcacctattcacgacaagtgggagatggagagaactgatatcaccatgaaacacaaactgggaggaggccagtatggagaagtctacgtcggtgtctggaagaagtactccttaaccgtggctgttaaaaccctcaaagaggacaccatggaggtggaggagtttctgaaagaggccgccgtgatgaaggaaatcaagcatcccaatctggtgcagctcctgggagtgtgtaccctcgagcctccattctacattgtgacagaatacatgccatacggcaatctgctcgactatctcagggagtgcaaccgggaggaggtgacagccgtggtgctgctttatatggccacccagatttccagtgctatggaatacctggaaaagaaaaactttattcacagggatttggccgccaggaattgtctggttggggaaaaccatgttgtgaaagttgctgatttcggcctgagcagattaatgacaggcgatacatacacagcccatgccggcgccaaatttccaattaagtggactgcacccgaatctctagcttacaacacgttcagtatcaagtccgatgtatgggcctttggcgtccttttgtgggagatcgcgacatacggcatgagtccctacccaggaattgacctgtcacaggtgtacgaccttctagagaaagggtaccgcatggaacagcccgagggttgccctccaaaagtgtacgaacttatgcgtgcctgttggaagtggagccctgcagacagacctagtttcgccgagacccatcaagcctttgaaacaatgtttcacgactcaagcatttccgaggaggtggccgaagagttggggagagccgccagctcgagtagcgtggtgccgtaccttccccgacttcccattctcccatccaagacacgaactcttaaaaaacaggttgagaataaggagaatatcgaaggtgctcaagacgctacggaaaattcagcctcctcccttgcacccggatttattcgaggagcacaagcgtccagcggttctccagcgctgccacgcaaacagagagacaaatctccaagctctctgctcgaagacgccaaagagacctgcttcactcgcgaccgcaaagggggatttttcagctcctttatgaaaaagcgtaatgcaccaacgcctcccaagcgttccagctctttcagggagatggagaaccagcctcataaaaagtacgaactgactggaaacttttcctccgtagcctcgttacaacacgccgacggctttagtttcacacctgcccaacaagaggctaacctcgtgcccccaaagtgttacggcgggtcgttcgcacagcggaacctgtgtaacgatgacgggggcggcggcggaggatctggcacagcaggcggggggtggagtgggataacaggattctttacaccccgtcttattaagaaaacattagggctgagagcaggaaaaccgaccgcaagcgatgatacatccaagccattcccccgatcaaattctacttcgtccatgtcatctggcctaccagaacaggatcggatggcgatgacactaccccggaattgtcagcggagtaagttacaactggagcggacggtctctacaagttcgcaaccagaggagaacgtggaccgcgccaatgatatgctgcctaagaagagcgaggaatcagcagccccgtcaagagagcgtccaaaggccaaattgctcccacgcggggcgactgcgttacccttgagaaccccatcaggtgatctcgccattacggagaaggatccaccaggtgtaggtgtagccggagttgctgctgccccaaaagggaaagaaaaaaacggcggggctcggcttggaatggcaggcgtccccgaagatggagaacagcccggctggcctagtcccgcaaaggccgcccctgtgctgcccaccacccacaatcacaaagtccccgttctgatctcccctacactgaaacatacgccagccgatgttcagctgattgggactgactctcaggggaataagtttaaactgctgagcgagcaccaggtgacttcgagtggagataaagaccgccctcggagggtcaagccaaagtgtgcacccccacctccacccgtgatgagactgctgcaacatccaagtatctgcagcgaccctactgaagaaccgacagctctaaccgctgggcaatctacctcagagacccaggaggggggcaaaaaggccgccctcggcgccgtccctattagcgggaaggcaggcaggcccgtcatgccgccaccccaggtgcccctgcccacctcttcaatatctcctgctaaaatggctaacggtacggccggcacgaaggtggccctccgcaagactaagcaagccgccgagaagatttcggctgataagatttcaaaagaggccctgctggagtgcgcggacctcctgtcatccgcgctcaccgagccagttcctaacagccaactggtcgacacaggccaccagttgcttgattactgctccggctatgtagattgtatccctcagacccgaaataagttcgcattccgcgaagctgtctcaaagctcgagctgtcgctacaagagctccaggtgagtagtgcggcagccggcgtcccaggaactaatcctgtcttaaataatctgctatcatgtgtgcaggaaataagtgacgtggtccagaggtag

SEQ ID NO: 171825 - DNA, 3549 bp, Artificial Sequence
  derived and/or modified sequence
atggggcagcaggtcggccgagtcggcgaggctcccggactgcagcagccccagccacgagggatcagggggagctctgcagctaggcccagtggaaggagacgagaccccgcaggaaggactacagaaaccggtttcaatattttcacgcagcacgatcacttcgcctcatgtgtcgaggacggtttcgagggtgacaagactgggggttcaagccccgaagcgttgcataggccatacggttgcgatgtggaaccccaggctctgaacgaggcaatcaggtggtctagcaaagagaatctgctcggtgctacggaatcggaccctaacctgtttgtggcgctttatgacttcgtggcttctggggataacacgctaagtatcaccaagggcgagaaacttagagttctggggtacaatcaaaatggggagtggtcggaagtgcggtctaagaatggccaggggtgggtcccatctaattacattactcccgttaattcacttgaaaagcacagctggtatcatggccctgtttcccggtccgctgctgaatatctgcttagcagtctgattaatggcagctttttagtacgtgagtccgagtcatcacctggacagctctcaatcagcttacgttatgaggggagggtttaccactaccggatcaacactaccgccgatgggaaagtgtatgtgaccgcggagtctcggttctcaactctggccgagctggtccatcaccactctacagtcgctgacggcctggtcactactctccactatccagcacccaaatgtaacaaaccaaccgtctatggcgtgtcaccaattcatgataagtgggaaatggagagaaccgacataacaatgaagcataagttgggtggaggacagtatggcgaggtgtatgtgggggtgtggaaaaaatactcactaactgtggccgttaaaacactgaaggaggatacaatggaagttgaagagttccttaaggaggctgcagttatgaaggagattaagcaccctaatctggtccagctgctaggggtgtgcacactggaaccacctttttacattgtgactgagtacatgccctatgggaatcttctggactacctgcgcgagtgcaatcgggaggaagtcaccgccgtagttctcttgtatatggccacccagattagttcagctatggagtacctggaaaagaagaacttcatccacagggacctcgccgctaggaattgtttggtgggggagaaccacgtcgtcaaagtggcggatttcggcctgagccgactgatgacaggtgacacctatacagcccatgcgggagccaaattccccatcaagtggacagctcccgaatctttagcctataatacctttagtatcaaaagcgacgtgtgggcgtttggagttctgctctgggagatcgcaacgtacggaatgagcccctacccaggaatagatctgtctcaggtgtatgacctgctggagaaaggctaccgtatggagcaaccggagggatgcccaccaaaggtttacgaactcatgagagcctgttggaaatggagccctgcggatagacctagttttgcagaaacccaccaggcctttgaaactatgttccatgattcttcgatctcggaggaagtggcagaggagttagggagggcagcctccagcagctctgtggtcccctacctgcctaggctgcccatactgccgtctaaaaccaggacgttaaaaaaacaggtggagaacaaggagaacattgagggcgcacaagatgcaacagagaattcagcttccagcctcgctcctggattcattcgaggagcacaggcatcatccggctccccagcactgccaaggaaacaacgggacaagtcgccaagctctctgctggaggacgccaaagagacctgctttacgcgcgatcgtaaaggtggtttcttctcttcttttatgaagaaacggaatgctcctacaccaccaaagagatcttcttcttttagagaaatggagaaccaaccgcataaaaaatacgaactgacgggtaacttcagttcagttgcatcgttacagcatgccgatggtttctccttcacccccgcacaacaggaggccaacctagtgccccctaaatgttatgggggtagtttcgcccaacgcaatttgtgtaatgacgacgggggaggcggaggaggtagcggaaccgcaggcggtgggtggtccggtatcaccgggtttttcacacccaggcttataaaaaagacacttggacttagagccggtaagcctaccgcctctgacgatacgagcaagcctttccctaggagcaacagcacctcctccatgagtagcggtctgcccgagcaggatcgcatggcgatgaccctccctagaaactgtcagcgcagcaagcttcagttggaacgaactgtgtctaccagctcccaaccagaggagaatgtcgatcgcgctaatgacatgctgccaaaaaagtccgaggagtctgccgcaccaagccgggagagaccaaaagctaaactgttgccaagaggtgccaccgctctcccattgagaacacctagtggtgatctggccattacggaaaaggaccccccaggagtcggcgtagcaggggtggccgcagcaccgaaaggaaaggaaaagaacggtggggctagacttggaatggctggcgtaccagaagatggagagcagccaggctggccttcaccggctaaggccgctcctgtgctgcccacaacacacaaccataaggtacccgttctgattagccctaccctgaagcacacacccgctgatgtgcagctgataggtacagacagccagggcaacaagttcaagctccttagtgagcatcaggttacgtctagcggtgacaaggatcgtccacgtcgcgtgaagcctaagtgtgctcctcctcccccaccagtgatgcgcttgctgcaacatccttctatctgctcagatcctaccgaagaacctactgcactgaccgcgggtcaatccacctctgaaacacaggagggaggaaaaaaggccgctctgggcgcagtgccaatatccggaaaggccggtcgacccgtcatgccccctccccaggtccccctcccaacgagctcaatctctcccgctaaaatggctaacgggacagccggaaccaaggtagctttgcgaaaaactaagcaagccgcagagaaaatctctgcagataagatctccaaagaggccctcctggagtgtgccgatctgttgtcttcagcgctgactgagcccgtccctaacagtcagctggttgacactgggcatcagctgctggattactgtagtgggtatgtcgattgtattccccagacccggaacaagttcgccttcagagaagccgtgagcaaactggagctttcactacaggagctgcaagtttcttccgctgctgctggagtgccaggaaccaatcccgtattaaacaacttgttatcatgcgtccaggaaattagtgatgtggttcaacggtag

SEQ ID NO: 171826 - DNA, 12144 bp, Artificial Sequence
  derived and/or modified sequence
aaaagcagaatctgtgagtcgcctggaggcagcgcggcggctgccgtgaggaggccgggtgcggagccgccggtggcccagccactcagggccagggcctgggctgggagggagagaccggagcagcgccaggagcccgaggccggagccgaggaggaatgtgaccaggggtcggcgggggcgcgggagtacgcgagagcagggatggggcagcaggtgggccgcgtcggggaagctccggggctccagcagcctcagccccgcgggatccggggcagcagtgcagccaggccctccggccgcaggcgggacccggcggggcgcaccacagagaccggcttcaatatcttcacccagcatgatcactttgccagctgtgtggaggatggatttgagggagacaagactggaggcagtagtccagaagctttgcatcgtccctatggttgtgatgttgaaccccaggcactaaatgaggctatcaggtggagctccaaggagaacttgctcggagccactgagagtgaccctaatctcttcgttgcactttatgattttgtagcaagtggtgataacacactcagcatcactaaaggtgaaaagctacgagtccttggttacaaccagaatggtgagtggagtgaagttcgctctaagaatgggcagggctgggtgccaagcaactacatcaccccagtgaacagcctggaaaaacactcctggtaccatggacctgtgtcacgcagtgcagctgagtatctgctcagcagtctaatcaatggcagcttcctggtgcgagaaagtgagagtagccctgggcagctgtccatctcgctcaggtacgagggacgtgtgtatcactacaggatcaataccactgcagatggcaaggtgtatgtgactgctgagagccgcttcagcaccttggcagagcttgtacaccatcactccacagtggctgatgggctggtgacaacattacactacccagcacccaagtgtaataagcctacagtctatggtgtgtcccccatccacgacaaatgggaaatggagcgaacagatattaccatgaagcacaaacttgggggcggtcagtatggagaggtttacgttggcgtctggaagaaatacagccttacagttgctgtgaaaacattgaaggaagataccatggaggtagaagaattcctgaaagaagctgcagtaatgaaggaaatcaagcatcctaatctggtacaacttttaggtgtgtgtactttggagccaccattttacattgtgactgaatacatgccatacgggaatttgctggattacctccgagaatgcaaccgagaagaggtgactgcagttgtgctgctctacatggccactcagatttcttctgcaatggagtacttagagaagaagaatttcatccatagagatcttgcagctcgtaactgcctagtgggagaaaaccatgtggtaaaagtggctgactttggcttaagtagattgatgactggagacacttatactgctcatgctggagccaaatttcctattaagtggacagcaccagagagtcttgcctacaataccttctcaattaaatctgacgtctgggcttttggggtattgttgtgggaaattgctacctatggaatgtcaccatatccaggtattgacctgtctcaggtctatgacctactagaaaaaggatatcgaatggaacagcctgagggatgcccccctaaggtttatgaacttatgagagcatgctggaagtggagccctgccgataggccctcttttgctgaaacacaccaagcttttgaaaccatgttccatgactccagcatttctgaagaggtagctgaggagcttgggagagccgcctcctcgtcatctgttgttccatacctgccccggctacctatacttccttccaagactcggacactgaagaaacaggtggagaacaaggagaacattgaaggggcacaagatgccacagaaaattctgcttccagtttagcaccagggttcatcagaggtgcacaggcctctagtggatccccagcactgcctcgaaagcaaagagacaagtcacccagcagcctcttggaagatgccaaagagacatgcttcaccagggataggaaggggggcttcttcagctccttcatgaagaagagaaatgctcctacaccccccaaacgcagcagctccttccgagaaatggagaatcagccccataagaaatacgaactcacgggtaacttctcatctgttgcttctctacagcatgctgatgggttctctttcactcctgcccagcaagaggcgaatctggtgccacccaagtgctatggggggagctttgcacagaggaacctctgtaatgacgacggtggtgggggtgggggcagtggcactgctgggggtgggtggtctggcatcacaggcttctttacaccacgcttaatcaaaaagacactgggcttacgagcaggtaaacccacagccagtgatgacacttccaagccttttccaaggtcaaactctacatcttccatgtcctcagggcttccagagcaggataggatggcaatgacccttcccaggaactgccagaggtccaaactccagctggaaaggacagtgtccacctcttctcagccagaagagaatgtggacagggccaatgacatgcttccaaaaaaatcagaggaaagtgctgctccaagcagggagagaccaaaagccaagttattgcccagaggagccacagctcttcctctcagaacaccctctggggatctagccattacagagaaggaccctccaggggtgggagtggctggagtggcagctgcccccaagggtaaagagaagaatggtggggcacgacttgggatggctggagttccagaggatggagagcagccgggctggccttctccagccaaggctgcccccgtcctcccaaccactcacaaccacaaagtgccagtccttatctcacccactctgaaacacactccagctgacgtgcagctcattggcacagactctcaggggaataaattcaagctcttatctgagcatcaggtcacatcctctggagacaaggaccgaccccgacgggtaaaaccaaagtgtgccccacccccaccaccagtgatgagactactgcagcatccgtccatctgctcagaccctacagaagagccaactgccctaactgcaggacagtccacatcagaaacacaggaaggaggaaagaaggcagctctgggcgcagtgcccatcagtgggaaagctgggaggccagtgatgcctccacctcaagtgcctctgcccacatcttccatctcgccagccaaaatggccaatggcacagcaggtactaaagtggctctgagaaaaaccaaacaggccgctgagaaaatctcagcagacaaaatcagcaaagaggccctgctggaatgtgctgacctactgtccagtgcactcacggaacctgtgcccaacagccagctggtagacactggacaccagctgcttgactactgctcaggctatgtggactgcatccctcaaactcgcaacaaatttgccttccgagaggctgtgagcaaactggaactcagcctgcaggagctacaggtttcttcagcagctgctggtgtgcccgggacaaaccctgtccttaataacttattgtcatgtgtacaggaaatcagtgatgtggtgcagaggtagccactgttagcctggtgggaaaatgcacacatttctgaggggagagggaaaaggacttgttttcctgtgttcttgttttcagaaaatgaaagactcatacttgagtgtgtttatgtgaagtacctcagatccctgagttctcacgtttacagtttcatctcaaaaataagaagcaaaccacataagtataggagaggtaaattaagtgggggcaaggcagtagtggacagggttggaaactgcactggaaaatagggaacatgtgtatgtcataaggaaggcaatgcagcccatccctacctggaatgctgggaagtgctaggcagggctgctctcagcaagactgcagcagctgcacccagacctggggctctggtaggtactaatggtgattatgctccaatttacctaatgaatttggtgggacagcagaaaagaaagctgggaatgtaccaagagaaatttttgttcagggctgttggaagtagctgttagccttgcttccacaaggccattgctgctgtaataagaactgcaaatcagagtgctacaacataaaactgggaaatatggccctatctgaatgcctctgtcctattttccgctggtgtatcagttagtgcaggaagtaaagaatgctggaaagttgaatcagaaattgaaaaccttctaaaatcttacacagattagcagaagtcacttctcccagtctggtatattatttcataatggaccaggatcggcttcctgcctgttggtggctatctgtaaaccataagtacaggggtctccctagtggttcttctctgtcttttgctgggcaggctgtcttcctttattcctggtagcattcagagcattaaccagtgttgattttgaaaatagtagtccctacaggttctcacaaaggaatgaatcctgttctgatacagttcccctgcatactgacatactggccaaggacttgagcagctgtgtatttttctttatcaactaaaataccagggagatggtcttttcttgaaacccagtggcctgtatgtgactgagaggaaaagctggcttggtcctaatggctgtttctctgtacctttcccttcccttaccaccttaagcccaatccaggtagagaatagggagaggcattctcctctctatggatttgaagtgaatcacccccacattattctcacatgcttttcttctctcacatattcctccctactcccccacccaatcattgtgcttatttgtacagatcttattgggaatattctttatttattttgtcatttcacttctattttaagaatgcataattgaaggagtagtcattttcagggagcaccaggtagaccctgggaacctaatgacttaatccttaaatatgttttgcccttgaaaaataggccttttccttccttccttagttataattgtggaagctaattaggatggcatggaagtgaatctaatgagttaggtattattaatgttcttggtatcgggtctaattccagttactgcttcattctctttttaaagctttatgaatacttcccccatcctccccaaggagagctcaatacacacatatttttattttattctctcaaaggaatattagcttaggaagataggaattcaacattgagcactgagttttcttctggctctgtcattgatacactgtcaaaccacagcctcatctcttaatctatttaattaaggtaacagtacatgttctcaagggtgttgcaagtaagtgtgcagctatcccttggagagcctctctggaaagctcttttagtgcagtgttgttatgctgaattgttttccattatcttatttgctgagtagaaaatattaatgaaattaagaattgttgagattatatgaattgggctagaatactaaggggaaaactatgttttgaatagagtttggcatttttgaccaagaacaaaattgagttttcattggaaagaaaggaaaccttgattcttaccattgctgctccaaaggaggcccaggttaagaggattagaggagacacgcggtgctgggcattcctggcaggtgttgggtgatccccgcagtatgtcacctgcagttgcagcacaggcagctagtgattgggttcatctcctcctagtggttggaagagaactcagatgtaaaaaccagcggtccttctcccaccttctttcctgccattcttgctcatcatacatgtccgtaaacttgaagaactcgttttagcagctagccttttaaggtcgaggatgggaaagctaaaactgtagaatattattatgctgctttttaggtttatccctgttgttgtgggatgcaagttaagggattgtaattgtttttcagggtttttttgttttttgttttttaagcaagggctctattttcccttgagagttctggaactaagccttggagaaacactactgagtgtatttaggctccctggttttcttgcccaacaacaatctgaagggtagggggtgggggctgtgtcttactcaggggcagcacctagctgtcttgcctacagtgggtgcacgatatataaatggaattgatttttgtcaacactgtcaagagtggcattgactattggagcataccccgtccacatgatgcttgaactatgtaacttcaggggttgagggctcaaggttcaggttaaagaggcactgtcaacttactatacaagcataatttaggtttttcctttttctacttgaaaaggaccagcttaaacacaaacccttatgtaaattaaaaggtttgaatccaaagcagagagaactgcttctggaaaagtgtagtttaattttaactattctaaaagcaatgagcaaaggcccttgtccaaggcgttgacagttttctaaagtggttatgctgtatatctggatgcatgcctttgggctgccactgcttgattcctttcatgtacagataatattacttcagtttagatttcccactttaaaatgcagtgatttgtgttgaatacatcttgattgtgctttacctaaagtattttcttaaaaggctttgtgtaaaatttaaatgtatatattttcctgtagacttccatcatgattttcagagattagccttaaaaaatttggccctaagaaattcattcagtgtttttctagatgacctctgtacatagaggtcattatagtggagaccctttaccagcagcattttaagatttaaattagatagaaagtttcttaggattcaactgaaaattggctagtaaaatatgtcccaggtaataaagcatgctgactttgctaaggcactgcccatttttatttaactaaagtcatggagattttgagtttaaaggatgcagtatagatagtggtttagtgtttaggctctaatgccagtctaaaaggcaagtcatttaaccttgggagcctcagtttcctcactgtaaaacagggataataatagtaactacctcagggttgttgtaaggattaaatgagatgatatttgtaagatacttagctcaagtgcctggcacacaatgagcacactctataaatgttctactactactattattaacacctagtctagggatgcacagcagaatcccctagggttaaaaaacaaaacaaaacaaacaaaaaaaactgacggaatagccccactccagatcagaattcccagtgggctggggtctcggccagtgtattctccagtaatctcgccaggtgtttgaaacacccagtgctatctgaaaactatcagtaccccaaccctttggtttatagattaagaaactagcagaagatggttaaattacttgcctattgtctcagaacggttaattagtggcggagccaaggctagaattcaagtctcttgactttatggttgtggggtctttccaccatacctgctgccatgtgagacactgcaaaaaagtggctcagaccgacaatcagcctgtgtggtgctgcacactttctaaagcacatgctcctgacactttgaccttaaggggcttgaatgtggagtaatgggaacacaagccaagcaagcactcagtagaattcagtcatttaaaaaattcaatggggtcattcttttggacagacctcagcaacacagcaatgtgcactttgtagtaaagaaataccaacttgagtttttaaaaaacctagttagtcctacattcccttttctttaaaaaaactttattgttcacattattttaatgactatgagataatgtatatgacagcactttgagaaaatatcaactgtaatataactataaggttgtagtattgtctgtttaaaagataagacagttgattcaatgtggatggaccctgtggggtacctgaaaatgtagatacgtaagaatcacctctgtcatttatcacatttagaaatatgaaactgcttaacaggtatgagcaggtatagcaagtgtttgctaaagttgtagttcagagctgaattacttcaggaaactagggaccaactttttggtttaattccgatctttaaaaagtaagaatgtgtactcactccagaacacagaagctcttccaaggaccttgactcaagaaggatgaggtcctcttactcttctccatttatccactatatgcttggccatttatcctaaatgtggtgggaacagacttgttatctgttgatgttgacagtgtcttttttaacctatgtcctgcatagttttgttaggtttacagggggaggtggatggccataaaaccagtgcactttgggaattacttttctaggatttcctaccagttataaatgacattgacatttgtcatcttttttttctttttctaaaaagaatagctgaatttaattcacctattataaaatactcaaaagtaaattgccttggtggccacttctgaattatagctacatttcattatgaccccttctgctcccttccattttgctactgatgtcattcttgttatcaggctgtgcccctaccaggagttcatattgggttgacagggttatctatatttttgttcttgatttttgagtttcatcatcttgcattaaattgttccacctggatttggggttcatctctgtgccctaaggatctgctatgaccaatcctctttttgtaggtgggtctctggcttaagtattgataggcttcagcggtttgtgtctctgtcttagcttgtatcaagccagtagtagctcacttcctttgtaaattcctgcttcagtctgggatccgtaggagtatgtgagaacttctgaaacgtctccaactcttaacagtcaagatatctatatcatttggatagagttctggttttccaactactagacttaaagaaattctggccgggtgcggtggctcacgcctgtaatcccagcactttggggggctgaggcgggtggatcacgaggtcaggagattgagaccatcctggctaacacggtgaaaccccacctctactaaaaatacaaaaacttagctgggcgtggtggcgggcgcctgtagtcccagctactggggaggctgaggcaggagaatggcgtgaacccaggaggcggagcttgcagtgagcccagatcgcgccactgcactccagcctgggtgacagtgagactccgtctcaaaaaaaaaaaaaaaaaaaaaaaaaaaaaaaaaaagaaattctaatgcaaagcttgctttttttttcttttttccagcaagccagtagtaatagttattgttacttgctctgttcagcacaactgtagttcacttgaacttcactgtcattccctacgctcctctcttactgagaagcatgggtgggattcagggctgtgggacaagctacagcctactctggagcactcacccccatgactcagtccagcctgtctcttgggaagtttattgcaatgtgcagacggatgaatttctgcttttcatgccacctctctgaggtatgtattctatcttgagtatgtacaagatgataccttttggctgggcacagtggctcgtgcctgtaatcccagcactttgggagaccaagatgggcggatcacttgaggtcaggagtttgagaccagcctggccaacatggtgaaaccccgtctctactaaaaatataaaaattagccgggcgtagtacatgcctgtaatcccagctactcccgaggctgaggcagaattgcttgaacccaggaggcggaggttgcagtgagctgagatcgcgccgctgcactccagcctaagtgacagagtgagacacgttaagaagaaaaaaaaaaaaaaggataccttcatttctgactcaatatcctagatccaaaggacaggaaattagggaaggcttcaccctgtgggatcaagataagaagatcccatacttcttcccaggtaaggaggcctgtggcaggtcatgattcaaagctgacttggaatggcagaaactgctgagaggccacccttggagatttgtgccttcaaagatgggtttcatgagtctcagagaggaaaagacttgtcagctgggttgattttgcatgattattgaactagagctggtagacacgagcttctcagatggcagtggccagatcctccatctgtgagaatccgccacttgaagtggtttcctgagagtgttcacttggcagttgctgcgtttctcaagcccacctggcgaggtctcgccggacccttccctccaagtgcacttacttcttcatccccatgtacatctctaactttgaaattgtttacctctcctacaaaaatcttaccttttgacctgagcagagtagcaaagccctgttcactctgagggagcagctggcgtgttgaaggggaaaggccaggcacagcactgtcctcagaccacaccatatttggagcagaattgtgatacatgtcatctgtgtctattctggaaggttctttgttcatcactgtactcgcatcagcaaattttcagggtcctacctgtcactccaggctactgagctgaaccctcagaagctgaggtctccgagcatgctaagtaaccttttagaaaagctggaggcaaactgtcgaatgctagcaggctttatgaaaggaaacataaggagtttgtgtagtcagaacttgcttaaatttgcttcggaattaggcaccataaactttagttggagaatgggacttaaattttcacatatatgtatacttaattttcagcaattatgacacaataaaaagaatatgcaaatttattgttgtttcagaaggttttgcaggactgggaacgctttagtgtcatcaacagtaaacctcagatactgttctgcacagttcagaagtaccataccaggtattgtgagtggcaagaacgccaggggacagagatgcttctggtagatgagggccagagaaaccagctctcctccattttgacagcaatttctcactgtggccatttggcctccattatgttttgagaggaatttcttgagatcttgagaaatcaccatgattaggccaattgtcaatcagtattcagaaactagaaaggaacaatgagatacttgtttatggttctttagggcatatgtttgaaaaccctctcatctcagatctgtatagctggtgtgtgtttgtgtccataaatacacgtgcattgctgtcgtgcccattaagaaagggggagtaagtaaaagaggaatcgctcagatctttccttggatgaacagcagtggcgtggttggtgtgttgactgtgaacaggctgacttagctgttgatgtatactcagaacctccatctcctcccagaccctgcacttttccttctctgcagtctgattctctaatgactgtcactggacaaaccccagttttatgctcgcttagtaaaaataagtttaaacatttcatggtggttgacagaactttgtccccaaacatgcggattcaattctttaaaactcgttgaacgtttataccaaaggtcccgccccgcaggtgtgtatgtggtgcacagagggtgaggtttggagcatcgggcactgtgtgcattgctaaggggacatagtgagacaatgtgggatttaactaaaaacacatcaattgtgtgtcacattaccagtgttgtcaggtatttgttcttaattgttattgtaatatattttcagttgtttttctaatttaattctctccgtctgttgtctgactgtgaactgctaacagtgttaaacttgatgtaaataaatgaggcccttgaaagggactgctttctctgtcttctcacaaggtttgccaagttgtgttctgttttaaataaaggttgcaatattttattggcaaagta

SEQ ID NO: 171827 - protein, 750 aa, Artificial Sequence
  derived and/or modified sequence
MSQWYELQQLDSKFLEQVHQLYDDSFPMEIRQYLAQWLEKQDWEHAANDVSFATIRFHDLLSQLDDQYSRFSLENNFLLQHNIRKSKRNLQDNFQEDPIQMSMIIYSCLKEERKILENAQRFNQAQSGNIQSTVMLDKQKELDSKVRNVKDKVMCIEHEIKSLEDLQDEYDFKCKTLQNREHETNGVAKSDQKQEQLLLKKMYLMLDNKRKEVVHKIIELLNVTELTQNALINDELVEWKRRQQSACIGGPPNACLDQLQNWFTIVAESLQQVRQQLKKLEELEQKYTYEHDPITKNKQVLWDRTFSLFQQLIQSSFVVERQPCMPTHPQRPLVLKTGVQFTVKLRLLVKLQELNYNLKVKVLFDKDVNERNTVKGFRKFNILGTHTKVMNMEESTNGSLAAEFRHLQLKEQKNAGTRTNEGPLIVTEELHSLSFETQLCQPGLVIDLETTSLPVVVISNVSQLPSGWASILWYNMLVAEPRNLSFFLTPPCARWAQLSEVLSWQFSSVTKRGLNVDQLNMLGEKLLGPNASPDGLIPWTRFCKENINDKNFPFWLWIESILELIKKHLLPLWNDGCIMGFISKERERALLKDQQPGTFLLRFSESSREGAITFTWVERSQNGGEPDFHAVEPYTKKELSAVTFPDIIRNYKVMAAENIPENPLKYLYPNIDKDHAFGKYYSRPKEAPEPMELDGPKGTGYIKTELISVSEVHPSRLQTTDNLLPMSPEEFDEVSRIVGSVEFDSMMNTV

SEQ ID NO: 171828 - protein, 712 aa, Artificial Sequence
  derived and/or modified sequence
MSQWYELQQLDSKFLEQVHQLYDDSFPMEIRQYLAQWLEKQDWEHAANDVSFATIRFHDLLSQLDDQYSRFSLENNFLLQHNIRKSKRNLQDNFQEDPIQMSMIIYSCLKEERKILENAQRFNQAQSGNIQSTVMLDKQKELDSKVRNVKDKVMCIEHEIKSLEDLQDEYDFKCKTLQNREHETNGVAKSDQKQEQLLLKKMYLMLDNKRKEVVHKIIELLNVTELTQNALINDELVEWKRRQQSACIGGPPNACLDQLQNWFTIVAESLQQVRQQLKKLEELEQKYTYEHDPITKNKQVLWDRTFSLFQQLIQSSFVVERQPCMPTHPQRPLVLKTGVQFTVKLRLLVKLQELNYNLKVKVLFDKDVNERNTVKGFRKFNILGTHTKVMNMEESTNGSLAAEFRHLQLKEQKNAGTRTNEGPLIVTEELHSLSFETQLCQPGLVIDLETTSLPVVVISNVSQLPSGWASILWYNMLVAEPRNLSFFLTPPCARWAQLSEVLSWQFSSVTKRGLNVDQLNMLGEKLLGPNASPDGLIPWTRFCKENINDKNFPFWLWIESILELIKKHLLPLWNDGCIMGFISKERERALLKDQQPGTFLLRFSESSREGAITFTWVERSQNGGEPDFHAVEPYTKKELSAVTFPDIIRNYKVMAAENIPENPLKYLYPNIDKDHAFGKYYSRPKEAPEPMELDGPKGTGYIKTELISVSEV

SEQ ID NO: 171829 - protein, 714 aa, Artificial Sequence
  derived and/or modified sequence
MWMSQWYELQQLDSKFLEQVHQLYDDSFPMEIRQYLAQWLEKQDWEHAANDVSFATIRFHDLLSQLDDQYSRFSLENNFLLQHNIRKSKRNLQDNFQEDPIQMSMIIYSCLKEERKILENAQRFNQAQSGNIQSTVMLDKQKELDSKVRNVKDKVMCIEHEIKSLEDLQDEYDFKCKTLQNREHETNGVAKSDQKQEQLLLKKMYLMLDNKRKEVVHKIIELLNVTELTQNALINDELVEWKRRQQSACIGGPPNACLDQLQNWFTIVAESLQQVRQQLKKLEELEQKYTYEHDPITKNKQVLWDRTFSLFQQLIQSSFVVERQPCMPTHPQRPLVLKTGVQFTVKLRLLVKLQELNYNLKVKVLFDKDVNERNTVKGFRKFNILGTHTKVMNMEESTNGSLAAEFRHLQLKEQKNAGTRTNEGPLIVTEELHSLSFETQLCQPGLVIDLETTSLPVVVISNVSQLPSGWASILWYNMLVAEPRNLSFFLTPPCARWAQLSEVLSWQFSSVTKRGLNVDQLNMLGEKLLGPNASPDGLIPWTRFCKENINDKNFPFWLWIESILELIKKHLLPLWNDGCIMGFISKERERALLKDQQPGTFLLRFSESSREGAITFTWVERSQNGGEPDFHAVEPYTKKELSAVTFPDIIRNYKVMAAENIPENPLKYLYPNIDKDHAFGKYYSRPKEAPEPMELDGPKGTGYIKTELISVSEV

SEQ ID NO: 171830 - protein, 180 aa, Artificial Sequence
  derived and/or modified sequence
MSQWYELQQLDSKFLEQVHQLYDDSFPMEIRQYLAQWLEKQDWEHAANDVSFATIRFHDLLSQLDDQYSRFSLENNFLLQHNIRKSKRNLQDNFQEDPIQMSMIIYSCLKEERKILENAQRFNQAQSGNIQSTVMLDKQKELDSKVRNVKDKVMCIEHEIKSLEDLQDEYDFKCKTLQNR

SEQ ID NO: 171831 - protein, 70 aa, Artificial Sequence
  derived and/or modified sequence
MSQWYELQQLDSKFLEQVHQLYDDSFPMEIRQYLAQWLEKQDWEHAANDVSFATIRFHDLLSQLDDQYSR

SEQ ID NO: 171832 - protein, 193 aa, Artificial Sequence
  derived and/or modified sequence
MSQWYELQQLDSKFLEQVHQLYDDSFPMEIRQYLAQWLEKQDWEHAANDVSFATIRFHDLLSQLDDQYSRFSLENNFLLQHNIRKSKRNLQDNFQEDPIQMSMIIYSCLKEERKILENAQRFNQAQSGNIQSTVMLDKQKELDSKVRNVKDKVMCIEHEIKSLEDLQDEYDFKCKTLQNRGSSSQNNRVAECH

SEQ ID NO: 171833 - protein, 150 aa, Artificial Sequence
  derived and/or modified sequence
MSQWYELQQLDSKFLEQVHQLYDDSFPMEIRQYLAQWLEKQDWEHAANDVSFATIRFHDLLSQLDDQYSRFSLENNFLLQHNIRKSKRNLQDNFQEDPIQMSMIIYSCLKEERKILENAQRFNQAQSGNIQSTVMLDKQKELDSKVRNVK

SEQ ID NO: 171834 - protein, 160 aa, Artificial Sequence
  derived and/or modified sequence
ECHEDPIQMSMIIYSCLKEERKILENAQRFNQAQSGNIQSTVMLDKQKELDSKVRNVKDKVMCIEHEIKSLEDLQDEYDFKCKTLQNREHETNGVAKSDQKQEQLLLKKMYLMLDNKRKEVVHKIIELLNVTELTQNALINDELVEWKRRQQSACIGGPP

SEQ ID NO: 171835 - DNA, 4326 bp, Artificial Sequence
  derived and/or modified sequence
gctgagcgcggagccgcccggtgattggtgggggcggaagggggccgggcgccagcgctgccttttctcctgccgggtagtttcgctttcctgcgcagagtctgcggaggggctcggctgcaccggggggatcgcgcctggcagaccccagaccgagcagaggcgacccagcgcgctcgggagaggctgcaccgccgcgcccccgcctagcccttccggatcctgcgcgcagaaaagtttcatttgctgtatgccatcctcgagagctgtctaggttaacgttcgcactctgtgtatataacctcgacagtcttggcacctaacgtgctgtgcgtagctgctcctttggttgaatccccaggcccttgttggggcacaaggtggcaggatgtctcagtggtacgaacttcagcagcttgactcaaaattcctggagcaggttcaccagctttatgatgacagttttcccatggaaatcagacagtacctggcacagtggttagaaaagcaagactgggagcacgctgccaatgatgtttcatttgccaccatccgttttcatgacctcctgtcacagctggatgatcaatatagtcgcttttctttggagaataacttcttgctacagcataacataaggaaaagcaagcgtaatcttcaggataattttcaggaagacccaatccagatgtctatgatcatttacagctgtctgaaggaagaaaggaaaattctggaaaacgcccagagatttaatcaggctcagtcggggaatattcagagcacagtgatgttagacaaacagaaagagcttgacagtaaagtcagaaatgtgaaggacaaggttatgtgtatagagcatgaaatcaagagcctggaagatttacaagatgaatatgacttcaaatgcaaaaccttgcagaacagagaacacgagaccaatggtgtggcaaagagtgatcagaaacaagaacagctgttactcaagaagatgtatttaatgcttgacaataagagaaaggaagtagttcacaaaataatagagttgctgaatgtcactgaacttacccagaatgccctgattaatgatgaactagtggagtggaagcggagacagcagagcgcctgtattggggggccgcccaatgcttgcttggatcagctgcagaactggttcactatagttgcggagagtctgcagcaagttcggcagcagcttaaaaagttggaggaattggaacagaaatacacctacgaacatgaccctatcacaaaaaacaaacaagtgttatgggaccgcaccttcagtcttttccagcagctcattcagagctcgtttgtggtggaaagacagccctgcatgccaacgcaccctcagaggccgctggtcttgaagacaggggtccagttcactgtgaagttgagactgttggtgaaattgcaagagctgaattataatttgaaagtcaaagtcttatttgataaagatgtgaatgagagaaatacagtaaaaggatttaggaagttcaacattttgggcacgcacacaaaagtgatgaacatggaggagtccaccaatggcagtctggcggctgaatttcggcacctgcaattgaaagaacagaaaaatgctggcaccagaacgaatgagggtcctctcatcgttactgaagagcttcactcccttagttttgaaacccaattgtgccagcctggtttggtaattgacctcgagacgacctctctgcccgttgtggtgatctccaacgtcagccagctcccgagcggttgggcctccatcctttggtacaacatgctggtggcggaacccaggaatctgtccttcttcctgactccaccatgtgcacgatgggctcagctttcagaagtgctgagttggcagttttcttctgtcaccaaaagaggtctcaatgtggaccagctgaacatgttgggagagaagcttcttggtcctaacgccagccccgatggtctcattccgtggacgaggttttgtaaggaaaatataaatgataaaaattttcccttctggctttggattgaaagcatcctagaactcattaaaaaacacctgctccctctctggaatgatgggtgcatcatgggcttcatcagcaaggagcgagagcgtgccctgttgaaggaccagcagccggggaccttcctgctgcggttcagtgagagctcccgggaaggggccatcacattcacatgggtggagcggtcccagaacggaggcgaacctgacttccatgcggttgaaccctacacgaagaaagaactttctgctgttactttccctgacatcattcgcaattacaaagtcatggctgctgagaatattcctgagaatcccctgaagtatctgtatccaaatattgacaaagaccatgcctttggaaagtattactccaggccaaaggaagcaccagagccaatggaacttgatggccctaaaggaactggatatatcaagactgagttgatttctgtgtctgaagttcacccttctagacttcagaccacagacaacctgctccccatgtctcctgaggagtttgacgaggtgtctcggatagtgggctctgtagaattcgacagtatgatgaacacagtatagagcatgaatttttttcatcttctctggcgacagttttccttctcatctgtgattccctcctgctactctgttccttcacatcctgtgtttctagggaaatgaaagaaaggccagcaaattcgctgcaacctgttgatagcaagtgaatttttctctaactcagaaacatcagttactctgaagggcatcatgcatcttactgaaggtaaaattgaaaggcattctctgaagagtgggtttcacaagtgaaaaacatccagatacacccaaagtatcaggacgagaatgagggtcctttgggaaaggagaagttaagcaacatctagcaaatgttatgcataaagtcagtgcccaactgttataggttgttggataaatcagtggttatttagggaactgcttgacgtaggaacggtaaatttctgtgggagaattcttacatgttttctttgctttaagtgtaactggcagttttccattggtttacctgtgaaatagttcaaagccaagtttatatacaattatatcagtcctctttcaaaggtagccatcatggatctggtagggggaaaatgtgtattttattacatctttcacattggctatttaaagacaaagacaaattctgtttcttgagaagagaatattagctttactgtttgttatggcttaatgacactagctaatatcaatagaaggatgtacatttccaaattcacaagttgtgtttgatatccaaagctgaatacattctgctttcatcttggtcacatacaattatttttacagttctcccaagggagttaggctattcacaaccactcattcaaaagttgaaattaaccatagatgtagataaactcagaaatttaattcatgtttcttaaatgggctactttgtcctttttgttattagggtggtatttagtctattagccacaaaattgggaaaggagtagaaaaagcagtaactgacaacttgaataatacaccagagataatatgagaatcagatcatttcaaaactcatttcctatgtaactgcattgagaactgcatatgtttcgctgatatatgtgtttttcacatttgcgaatggttccattctctctcctgtactttttccagacacttttttgagtggatgatgtttcgtgaagtatactgtatttttacctttttccttccttatcactgacacaaaaagtagattaagagatgggtttgacaaggttcttcccttttacatactgctgtctatgtggctgtatcttgtttttccactactgctaccacaactatattatcatgcaaatgctgtattcttctttggtggagataaagatttcttgagttttgttttaaaattaaagctaaagtatctgtattgcattaaatataatatgcacacagtgctttccgtggcactgcatacaatctgaggcctcctctctcagtttttatatagatggcgagaacctaagtttcagttgattttacaattgaaatgactaaaaaacaaagaagacaacattaaaacaatattgtttctaattgctgaggtttagctgtcagttctttttgccctttgggaattcggcatggtttcattttactgcactagccaagagactttacttttaagaagtattaaaattctaaaattcaaaaaaaaaaaaaaaaaa

SEQ ID NO: 171836 - DNA, 2253 bp, Artificial Sequence
  derived and/or modified sequence
atgagccagtggtacgagctgcagcagctggacagcaagttcctggagcaggtgcaccagctgtacgacgacagcttccccatggagatcagacagtacctggcccagtggctggagaagcaggactgggagcacgccgccaacgacgtgagcttcgccaccatcagattccacgacctgctgagccagctggacgaccagtacagcagattcagcctggagaacaacttcctgctgcagcacaacatcagaaagagcaagagaaacctgcaggacaacttccaggaggaccccatccagatgagcatgatcatctacagctgcctgaaggaggagagaaagatcctggagaacgcccagagattcaaccaggcccagagcggcaacatccagagcaccgtgatgctggacaagcagaaggagctggacagcaaggtgagaaacgtgaaggacaaggtgatgtgcatcgagcacgagatcaagagcctggaggacctgcaggacgagtacgacttcaagtgcaagaccctgcagaacagagagcacgagaccaacggcgtggccaagagcgaccagaagcaggagcagctgctgctgaagaagatgtacctgatgctggacaacaagagaaaggaggtggtgcacaagatcatcgagctgctgaacgtgaccgagctgacccagaacgccctgatcaacgacgagctggtggagtggaagagaagacagcagagcgcctgcatcggcggcccccccaacgcctgcctggaccagctgcagaactggttcaccatcgtggccgagagcctgcagcaggtgagacagcagctgaagaagctggaggagctggagcagaagtacacctacgagcacgaccccatcaccaagaacaagcaggtgctgtgggacagaaccttcagcctgttccagcagctgatccagagcagcttcgtggtggagagacagccctgcatgcccacccacccccagagacccctggtgctgaagaccggcgtgcagttcaccgtgaagctgagactgctggtgaagctgcaggagctgaactacaacctgaaggtgaaggtgctgttcgacaaggacgtgaacgagagaaacaccgtgaagggcttcagaaagttcaacatcctgggcacccacaccaaggtgatgaacatggaggagagcaccaacggcagcctggccgccgagttcagacacctgcagctgaaggagcagaagaacgccggcaccagaaccaacgagggccccctgatcgtgaccgaggagctgcacagcctgagcttcgagacccagctgtgccagcccggcctggtgatcgacctggagaccaccagcctgcccgtggtggtgatcagcaacgtgagccagctgcccagcggctgggccagcatcctgtggtacaacatgctggtggccgagcccagaaacctgagcttcttcctgacccccccctgcgccagatgggcccagctgagcgaggtgctgagctggcagttcagcagcgtgaccaagagaggcctgaacgtggaccagctgaacatgctgggcgagaagctgctgggccccaacgccagccccgacggcctgatcccctggaccagattctgcaaggagaacatcaacgacaagaacttccccttctggctgtggatcgagagcatcctggagctgatcaagaagcacctgctgcccctgtggaacgacggctgcatcatgggcttcatcagcaaggagagagagagagccctgctgaaggaccagcagcccggcaccttcctgctgagattcagcgagagcagcagagagggcgccatcaccttcacctgggtggagagaagccagaacggcggcgagcccgacttccacgccgtggagccctacaccaagaaggagctgagcgccgtgaccttccccgacatcatcagaaactacaaggtgatggccgccgagaacatccccgagaaccccctgaagtacctgtaccccaacatcgacaaggaccacgccttcggcaagtactacagcagacccaaggaggcccccgagcccatggagctggacggccccaagggcaccggctacatcaagaccgagctgatcagcgtgagcgaggtgcaccccagcagactgcagaccaccgacaacctgctgcccatgagccccgaggagttcgacgaggtgagcagaatcgtgggcagcgtggagttcgacagcatgatgaacaccgtgtag

SEQ ID NO: 171837 - DNA, 2253 bp, Artificial Sequence
  derived and/or modified sequence
atgtctcagtggtacgagttgcagcaacttgacagcaagtttctcgagcaagttcaccaactgtacgatgactcttttcctatggaaatccggcagtacctggctcagtggctggagaaacaggattgggaacacgctgcaaatgacgtgagtttcgccactatccggttccacgaccttctgtcccagctggacgatcaatactcaaggtttagtcttgagaacaatttcctcctgcaacataacatcaggaagtctaagcgcaacctgcaggacaacttccaggaggatccgatccagatgagtatgattatttatagttgcctgaaagaggagcggaaaatcctcgagaacgcgcagaggtttaaccaagctcagtccggaaatatccagagcaccgtcatgctcgataagcagaaagaactcgactctaaagtgcggaacgtcaaggacaaggtgatgtgcatcgagcacgagattaagagcctggaggacctccaggatgagtatgacttcaaatgtaagacactccagaatcgggagcatgaaacaaatggggtggctaagagcgaccagaagcaggaacaactgctgcttaaaaagatgtacctgatgctcgacaacaaaaggaaggaggtcgtacataagataatagaactgctaaacgttactgagctgactcagaatgccctaatcaatgatgagctagtggaatggaagcgtcggcagcagtctgcatgcataggagggccacctaacgcttgtctagaccagctgcagaattggttcacgatcgtcgctgagagcttacaacaagttcggcagcagctcaagaagctggaagagctggaacagaaatacacttatgagcacgaccctatcacgaaaaacaaacaggtgctctgggaccgtaccttttcccttttccagcagctgatacagtccagctttgtggtggagcggcagccatgcatgcccactcacccacaaagacctcttgtactcaaaactggagttcagtttacagtaaaactccgtctgcttgtgaagcttcaagaacttaattacaatctgaaagtaaaagtgctgtttgacaaggatgtgaatgaacgtaacacggtgaaggggttccggaagttcaacattctcgggacccacacaaaagttatgaatatggaagagtcgacaaacggcagcctggcggccgagtttcgccacttgcagctcaaagagcagaaaaacgcaggcacccgcacaaacgaaggcccacttattgttacagaggagctgcactctttgtcatttgagacacagctttgtcaaccaggactcgtgattgaccttgagaccacttctctacccgttgtggtaatcagcaatgtgtcccagctaccgtctgggtgggcttcgatcctctggtataatatgctggtcgcggaaccccgcaacttaagctttttcctgacccccccatgtgccaggtgggctcaattatcagaggtgctgtcgtggcaattttccagcgttaccaaaagaggactgaatgtggaccagctgaacatgctgggcgagaagctgttgggtccaaatgccagcccagatggtctgataccttggactaggttttgcaaggagaacataaacgacaagaacttccccttctggctgtggatcgagtctatcttggaattgatcaagaaacacttgctgccactgtggaatgatggttgcattatggggttcatcagtaaggaacgcgaaagagctctgctgaaagaccagcagccaggcaccttcctccttcgcttcagcgaaagttctagggagggcgccatcacctttacatgggtggagaggtcccagaacggcggcgagccggacttccatgcagtagaaccatacaccaaaaaggaattgtccgcggttacctttccggatataataaggaactataaggtgatggctgccgaaaatattcccgaaaaccccctcaaatacttgtaccctaacatcgataaggatcatgctttcggcaagtattatagtcggcctaaggaggcaccagaacctatggagctcgacgggcccaaaggcacaggctacataaagaccgagctcattagtgtgtcagaagttcatccgagccgcctccaaacaaccgacaatctcctaccgatgtctccggaggaatttgatgaggtgtctcggatcgtcgggagtgtggagttcgatagcatgatgaatactgtgtag

SEQ ID NO: 171838 - DNA, 2253 bp, Artificial Sequence
  derived and/or modified sequence
atgtcccaatggtacgagttacagcagctggactctaagttcttggaacaggtgcaccagctgtatgacgacagctttccgatggaaatcaggcagtatctggcacagtggttagaaaaacaggactgggagcacgccgcgaatgatgtgagtttcgcaacaatcagattccacgatctcctgtctcagctggacgatcagtatagtaggtttagtttggagaacaactttttactgcagcataacatcagaaaatccaaacggaatctgcaggataacttccaggaggatcccattcaaatgagtatgatcatatactcctgtctaaaagaggaacggaaaatccttgagaacgcccagcggttcaaccaggctcagagtggtaacatccagtcaaccgtaatgctcgacaagcagaaggaactggatagcaaggtgaggaatgtaaaagataaggtcatgtgtatcgagcatgaaatcaaatccttggaggatttgcaggacgagtatgatttcaaatgcaagaccttacagaacagggagcatgagacgaatggagtggccaagtccgaccaaaagcaagaacaattactgctgaaaaagatgtatctgatgctggataacaagcgcaaagaggtcgtgcataagatcatagaacttctgaacgtcactgagctcacacagaacgcgctgatcaatgatgagttagtggaatggaagcggagacagcagtcggcatgcatcggggggccgccgaacgcatgtcttgaccagttgcagaattggttcacaatcgttgctgagtcactccagcaggtgagacagcagctcaagaaactggaggaactggagcaaaaatacacatatgagcacgatcctattacaaaaaataaacaggtgctgtgggacaggacattctcgctattccagcagctgatccagtcttccttcgtcgtcgaaaggcaaccttgtatgcccactcacccacagcggcctcttgttctaaagacaggcgtccagtttaccgtgaaactcaggcttcttgttaagttacaggagctcaactacaatctgaaagtgaaggtgctatttgacaaggacgtgaacgagaggaacactgttaaaggatttcgcaagtttaatatcctcgggacacacacgaaagtgatgaatatggaagagtccaccaacggttctcttgcagccgaattcagacacctccagctgaaagagcagaaaaacgccggtacccgcacgaatgagggacccctcatcgttactgaggagctgcattccctgagtttcgagacccaactgtgccagcctgggctggtgatcgatcttgaaactacttctctcccggtcgtggtcatcagcaacgtgtcgcaactgccgtccggctgggccagcatactctggtataacatgttggtagcagaacctcgaaacctaagtttttttcttactcctccttgcgcaaggtgggcccaactaagcgaagtgctgtcgtggcagttttctagtgttaccaagcggggcttgaacgttgatcagcttaatatgttgggcgaaaagctgcttggccccaatgcgtcccctgatggtctcattccttggacaagattctgcaaggaaaacattaacgacaagaacttccccttttggctgtggatcgaaagcatcctggagctgatcaaaaagcatctcctccccctgtggaacgatggatgcattatggggtttatttccaaagagagagagcgagccctgctcaaggatcagcagcccggtaccttcctgctacggtttagtgagagttcccgggagggggcaattacttttacctgggtcgagagatctcagaacggtggcgagcctgattttcacgccgtggaaccctacaccaagaaagagcttagcgccgtgacattcccagacataattagaaattacaaggtcatggcagccgaaaatatcccagaaaaccctttgaaatacctctacccaaacatcgacaaggatcacgctttcggtaaatattacagtaggccaaaagaggcgcccgaacccatggagctggacggtccgaaaggtacaggatacatcaaaacagaactcatctccgtgtccgaggtgcacccctcacgcctgcaaaccacggataacctcctccctatgtcccccgaggaatttgatgaggtctcgcggattgtgggaagtgttgaattcgactctatgatgaacaccgtatag

SEQ ID NO: 171839 - DNA, 2253 bp, Artificial Sequence
  derived and/or modified sequence
atgagccagtggtatgagctgcagcagctggacagcaagttcctggagcaggtgcaccagctgtatgatgacagcttccccatggagatccggcagtacctggcccagtggctggagaagcaggactgggagcacgccgccaatgatgtgtcctttgccaccatccgcttccatgacctgctgagccagctggatgaccagtacagccgcttcagcctggagaacaacttcctgctgcagcacaacatcaggaagagcaagaggaacctgcaggacaacttccaggaggaccccatccagatgtccatgatcatctacagctgcctgaaggaggagaggaagatcctggagaatgcccagcgcttcaaccaggcccagagcggcaacatccagagcacagtgatgctggacaagcagaaggagctggacagcaaggtgagaaatgtgaaggacaaggtgatgtgcatcgagcacgagatcaagagcctggaggacctgcaggatgaatatgacttcaagtgcaagaccctgcagaaccgggagcacgagaccaatggagtggccaagagtgaccagaagcaggagcagctgctgctgaagaagatgtacctgatgctggacaacaagaggaaggaggtggtgcacaagatcatcgagctgctgaatgtgacagagctgacccagaatgccctgatcaatgatgagctggtggagtggaagaggcggcagcagagcgcctgcatcggcggccccccaaatgcctgcctggaccagctgcagaactggttcaccatcgtggccgagagcctgcagcaggtgcggcagcagctgaagaagctggaggagctggagcagaagtacacctatgaacatgaccccatcaccaagaacaagcaggtgctgtgggacaggaccttcagcctcttccagcagctgatccagagcagctttgtggtggagcggcagccctgcatgcccacccacccccagaggcccctggtgctgaagacaggagtgcagttcaccgtgaagctgcggctgctggtgaagctgcaggagctgaactacaacctgaaggtgaaggtgctgtttgacaaggatgtgaatgaaagaaacacagtgaagggcttcaggaagttcaacatcctgggcacccacaccaaggtgatgaacatggaggagagcaccaacggcagcctggccgctgagttccgccacctgcagctgaaggagcagaagaatgccggcaccaggaccaatgaaggccccctgattgtgacagaggagctgcacagcctgagctttgagacccagctgtgccagcccggcctggtgattgacctggagaccaccagcctgcctgtggtggtgatcagcaatgtgtcccagctgcccagcggctgggccagcatcctgtggtacaacatgctggtggccgagcccaggaacctgtccttcttcctgaccccaccctgtgcccgctgggcccagctgtctgaggtgctgtcctggcagttcagctctgtgaccaagaggggcctgaatgtggaccagctgaacatgctgggggagaagctgctgggccccaatgccagcccagatggcctcatcccctggacccgcttctgcaaggagaacatcaatgacaagaacttccccttctggctgtggattgagagcatcctggagctgatcaagaagcacctgctgcccctgtggaatgatggctgcatcatgggcttcatcagcaaggagcgggagcgggccctgctgaaggaccagcagcccggcaccttcctgctgcgcttcagcgagagcagccgggagggcgccatcaccttcacctgggtggagaggagccagaatggaggagagccagacttccacgctgtggagccctacaccaagaaggagctgtctgctgtgaccttcccagacatcatccggaactacaaggtgatggctgctgagaacatccctgagaaccccctgaagtacctgtaccccaacatcgacaaggaccacgccttcggcaagtactacagccggcccaaggaggcccctgagcccatggagctggatggccccaagggcaccggctacatcaagacagagctgatctctgtgtctgaggtgcaccccagccggctgcagaccacagacaacctgctgcccatgagccctgaggagtttgatgaggtgtccagaattgtgggctctgtggagtttgacagcatgatgaacacagtgtag

SEQ ID NO: 171840 - DNA, 2253 bp, Artificial Sequence
  derived and/or modified sequence
atgagccagtggtacgagctgcagcagctggacagcaagttcctggagcaggtgcaccagttatacgatgactcattccccatggaaatccggcaatatctggcccaatggctcgagaaacaagattgggaacacgccgctaacgacgtttccttcgccacaatacggtttcacgatctgctcagccagcttgatgaccagtattcccgattttctctggagaacaactttttgctacagcacaacattcggaagtccaagcgcaatctgcaggacaattttcaagaggatccgatccagatgagcatgattatctactcctgtctgaaagaggaacgcaaaattttggagaatgcccagcgctttaaccaggcacagtccggcaatattcaatcaactgtaatgctggataaacagaaagagctggattctaaggtaagaaatgtaaaagacaaggttatgtgcatcgagcacgagatcaagagcctcgaagacctgcaggatgaatacgattttaagtgtaaaacgcttcagaaccgggagcacgaaaccaatggggtggccaagagtgatcaaaagcaggaacaactgctgctgaaaaaaatgtacctgatgctcgataacaagcggaaggaagtggtacataagatcatcgaacttctgaatgtcacggaactaacccagaacgccctcataaacgatgaactggttgagtggaagaggaggcagcaaagcgcctgtataggggggcctccaaacgcctgtctggaccaactgcagaactggtttactatcgtggcagaatccctccagcaggtgaggcagcagttaaaaaaactggaggagctcgagcagaaatacacgtatgagcacgatccgatcacgaaaaataagcaagtgctgtgggatcgaactttctccttatttcagcagctgatccagtctagctttgtcgtagagcgtcagccttgtatgcccacacaccctcagcgacctctggtgctaaagaccggcgtccagtttactgtaaagcttcggctcctggtgaaactgcaggagctcaattacaatctcaaagtcaaagttctgtttgacaaggacgtcaatgagagaaacactgttaaaggatttaggaaatttaacatcctggggacacacactaaggtgatgaacatggaggagtcaacaaatggatctttggcggcagagttccggcacttacagctgaaagagcagaaaaacgccggtacgagaactaacgagggacctcttattgtcacagaagagctgcacagcctgtcatttgagacccaactgtgccagccagggctggttattgacctggaaaccactagtctgcctgtggtggtgattagtaacgtttctcaattaccttcaggatgggcctctatcctctggtacaacatgctggttgccgaaccccggaatctcagtttttttctcacccccccatgcgcgagatgggcccaactgagtgaagtcctatcttggcagttcagtagcgttacaaagaggggattaaatgttgaccagttaaacatgctgggggagaagctgttgggacccaatgcaagccccgacgggctgattccctggacgcgcttctgtaaggaaaacataaatgacaagaatttccccttctggctgtggatcgagtctatcctcgaactgatcaaaaagcacctcctcccgttgtggaatgacggatgcattatgggctttatttcaaaggaaagagaacgagctttgttaaaggaccaacagcctggcacatttctgctgcgtttttcagagtcgagcagagaaggcgctataacatttacatgggtagagagatcccagaatgggggggagcctgactttcacgctgtcgagccctatactaagaaggaactcagcgccgttacctttcccgacatcatccgcaactacaaggtgatggccgccgaaaatattccggagaacccacttaaatatctgtaccctaacatcgacaaagaccatgctttcggcaagtactactctagaccaaaagaagcacccgaaccgatggagctagacggccccaaaggaaccggctacattaagaccgagctgatttcggtgtcagaggtccacccttccaggctacagacaactgacaatctccttcctatgtcaccagaagaatttgacgaggtgtcgaggatagtcggatctgttgaatttgactctatgatgaacaccgtctag

SEQ ID NO: 171841 - DNA, 2253 bp, Artificial Sequence
  derived and/or modified sequence
atgagccagtggtacgagctgcagcagctggacagcaagttcctggaacaggtgcatcagctttacgatgacagcttcccaatggaaattcgccaatatctggcacaatggcttgagaaacaagattgggaacacgctgccaacgatgtctctttcgcaactattaggtttcacgacctactgtcacagcttgatgaccagtattcacgtttttccttggagaacaacttccttttgcagcataacattaggaaatcaaagcgcaatctgcaggataatttccaggaggaccccatccagatgagcatgataatatacagctgcctcaaagaggaaagaaagatcttagagaatgcccagagattcaaccaggcacagagcggtaatatccagtccacagtgatgcttgacaaacagaaggaacttgacagcaaagtccggaacgttaaagacaaggtgatgtgcatcgagcatgagatcaaatccttggaggacttgcaagacgaatatgatttcaaatgtaaaacgttacagaatcgggagcacgagacaaacggggtagccaaatcggaccagaagcaggagcagttgctgctgaagaagatgtacttgatgcttgacaacaaacgcaaagaggttgtccacaaaataattgagctgctgaatgttactgaacttacacaaaacgcactcatcaatgatgagctggtggagtggaagcgcaggcagcagtcagcgtgtatagggggacctcctaatgcttgcctggatcaactgcagaattggtttactatcgtggcggaatccctgcaacaggtacgccaacagctgaagaagttggaagagctcgaacagaagtacacatacgagcatgatcccattacaaagaataagcaggtgctttgggacaggaccttttcgctattccagcagttgatccagagctctttcgtggtggagaggcagccatgcatgccgacgcatcctcagagacctctcgtgctgaagactggtgtgcagttcaccgtaaagctgaggctactggtaaaacttcaggagctgaactataacctgaaggtgaaagtcctttttgataaagatgtcaacgaacggaatactgtcaagggatttagaaaatttaacatattggggacgcatacaaaagtcatgaacatggaggaatcaactaacggaagtttggccgctgagtttcgccacctgcaacttaaggaacagaaaaatgctgggactaggaccaacgaggggcccctcatagtgaccgaagaactgcattccctttcctttgaaacccagttgtgtcaaccgggtctagtgattgacctggaaacaacaagtctccccgtagttgtaatcagcaacgtgagccaactaccatcgggatgggccagtatactgtggtataacatgctcgtcgccgagccgcggaacctgtcattttttctgactcccccctgcgccaggtgggcccagttatctgaggtactctcttggcagttcagttccgtaactaagagaggcctgaatgtggatcaattgaacatgctcggagaaaaactgctgggccccaatgcctcacccgatgggcttataccatggacgagattttgtaaagagaacatcaacgacaaaaactttcccttctggttatggatagaatccatccttgaactgatcaagaagcatttgctgcctctttggaatgatgggtgcattatgggctttatctccaaggaacgtgagagggccctgctcaaagaccagcagcctgggacatttctgctccggttctccgagagttccagagagggagctataacatttacgtgggttgaaaggtcacaaaacggaggggagccggacttccatgccgtcgagccatacactaagaaagaactgtccgcggtgactttccctgacataattagaaattataaggtcatggcagccgagaatattcccgagaaccccctgaaatacttgtatccaaatatagacaaggatcatgctttcggcaagtactacagccgtcctaaggaagcaccagaaccaatggagctcgacggaccgaaaggaaccggatacattaagactgagctgatttctgtcagtgaggtacacccttctaggttgcaaaccaccgacaacttattgccaatgtcccctgaggaatttgatgaggtgagtcggattgttggaagtgtcgaattcgatagcatgatgaacaccgtgtag

SEQ ID NO: 171842 - DNA, 2253 bp, Artificial Sequence
  derived and/or modified sequence
atgagtcagtggtacgagctgcagcagctcgacagtaagtttctggagcaggtgcaccagttgtatgacgattcatttccaatggaaattagacagtacctagcccagtggctggaaaaacaggactgggagcacgccgctaacgacgtgagtttcgctaccatacgcttccacgacctcctatcacagctcgatgaccaatactcgaggttttcattggaaaacaacttcctactccagcacaatatccgcaagagcaagagaaacctgcaagataacttccaagaagatcctattcagatgtcaatgataatctacagttgtctgaaggaagagaggaagatccttgagaacgctcagagatttaaccaggcccaaagtgggaacattcagtcaaccgtcatgcttgataaacaaaaggagctcgatagtaaggtccgaaatgtgaaagataaggttatgtgcattgaacatgaaattaaatcattagaagatttgcaggacgagtacgactttaaatgtaagactctgcagaaccgggaacacgaaacaaacggcgttgccaagtctgatcagaagcaagagcaactgctgctgaaaaagatgtatttgatgctggataataagcgcaaagaagtcgttcataagataatcgaactcctgaacgtgaccgaactgacccagaacgccctaattaatgacgagctcgtggaatggaaacgacgccagcagtctgcttgcatcggcggacccccaaacgcttgcttggatcagctgcagaattggtttacaattgtcgctgagtctcttcagcaggtccgccagcaactgaagaaactggaggaactggagcaaaaatatacatatgaacacgatcctatcacgaaaaacaagcaggtgctgtgggaccgcaccttctctttgttccagcagctaatacagtcttccttcgtagtcgaacgacagccgtgtatgccgacacaccctcaacgacctctggtactaaaaacaggcgtgcagttcactgtgaagctccggcttctcgtgaagttgcaggagttaaattacaacctgaaggttaaagtactgttcgataaggacgtcaatgaacgcaacaccgtgaagggctttcgcaagtttaacatattgggcacccacactaaggtgatgaacatggaggagtcaactaacgggtcattagccgctgagtttcggcacctgcagctgaaggagcagaagaacgcaggcacaaggactaatgaaggccctctaatcgttactgaggagcttcactctctcagctttgagacccaactctgccagccaggattggtcatcgatttagagaccacttcactgcctgtcgtggtcatttctaatgtcagccagctgccctccggctgggcttccattttatggtacaacatgctggtggcagaaccgaggaatctgagctttttcttgacccctccttgtgctcgatgggcccagctgtctgaggttctcagctggcagttctcttcggtgaccaagaggggcttaaatgtggatcagctgaatatgctcggagaaaaactgctggggccaaacgcctccccagacggcctgattccttggactcggttttgcaaggaaaatataaatgacaaaaattttcccttctggttgtggatcgagtccattttggaattgatcaaaaagcacctactgcctttgtggaatgatgggtgtattatgggttttatctcaaaagaaagggaaagagccctgctgaaggaccagcaacctgggacctttctgctgagatttagcgaatcaagtagagagggcgctatcacattcacctgggtcgaaaggagtcaaaacgggggtgagcctgattttcacgccgtagagccctatacgaagaaggaactttccgctgtcacatttcccgatatcattcgtaattataaagtgatggcagcagaaaatattcctgaaaatcctctgaagtatctttatcccaacatcgacaaggatcatgcatttggtaagtattactcacggccaaaggaagcacctgagccaatggaacttgatggccctaaaggcacagggtatatcaaaaccgaactgatctccgtctcagaagtccatccaagccggctgcagacaacggataatctattacccatgagtccagaagagtttgatgaggtgtcaagaattgtaggctcagtcgagtttgatagcatgatgaatactgtttag

SEQ ID NO: 171843 - DNA, 2253 bp, Artificial Sequence
  derived and/or modified sequence
atgtcgcagtggtacgagttgcaacagctggattctaagttcctggagcaagtgcaccaattatacgacgactctttccccatggagatccggcagtatctcgcacagtggttggaaaaacaagattgggagcacgccgctaacgatgtcagcttcgcaacaattagatttcacgacctgctgagccagcttgacgaccagtattccaggttctccctcgaaaacaacttcctgctgcagcacaacattcggaagtccaagcgcaacctccaggataacttccaggaagaccccatccagatgtccatgattatctactcgtgtttgaaggaagaacgcaagatacttgaaaatgcacagcgctttaaccaagcacagagtggaaacatacagagtacagtgatgctggacaagcagaaggagcttgatagcaaagttaggaacgtgaaggataaagtcatgtgcatagagcatgagataaagtcactcgaggacctgcaggacgaatacgacttcaaatgcaagacgctgcagaaccgcgagcatgaaactaacggggtggctaagtctgaccagaaacaggaacagctcctgttgaagaagatgtacctgatgctcgacaacaaacggaaggaggttgtgcacaaaataattgaactgctgaacgttactgaactgactcaaaatgcgctgataaatgacgagcttgttgaatggaagcgccgacagcagtcagcatgtatcgggggaccacctaatgcctgtctggaccagttacagaactggttcaccattgtggccgaaagcctccaacaagtccgccaacagctgaagaaactcgaggaacttgaacagaagtatacatatgaacatgaccctatcacaaagaataaacaggtcttgtgggatcgtaccttctccctctttcagcagctcattcagtcaagcttcgttgtcgaaaggcagccctgcatgcctacccatccccagagacctctggtcctgaagacgggcgtgcagtttacagtgaagctgcgccttcttgtcaaattgcaggagctgaactacaatttgaaagtcaaggtgctgtttgataaagatgtgaacgagagaaacactgtgaaaggcttccggaaatttaatatcttaggtacacatacaaaggtcatgaatatggaggagagcacaaacgggtcgctcgcggcagagtttcggcaccttcagcttaaggagcaaaaaaacgcaggtactcgcactaatgagggaccacttattgttacagaggagctgcactccctcagctttgaaacgcagctctgtcaaccgggtctcgtgatcgacttggagactacgagcctgcccgtggttgtcattagcaacgtatcgcagctccccagcggctgggcaagcattctatggtacaacatgctcgtggcagaaccaagaaatcttagctttttccttactcctccatgcgcaaggtgggcacagctgagtgaggtgctgagttggcagtttagctccgtgactaaaagagggctcaacgtagaccagcttaacatgctgggggagaaactgctgggacccaacgcttcacctgacggcctcatcccatggaccaggttttgtaaggaaaatatcaatgataaaaattttcctttctggctgtggattgagtctattcttgagcttatcaagaagcatttgcttccactctggaatgatgggtgcataatgggctttataagcaaggaacgggagagagccttgcttaaggatcagcagcccggaactttcctgttgaggttttccgagtccagcagggagggcgcaataactttcacttgggttgaacgttcgcaaaatgggggtgaaccggactttcacgctgtagaaccttatactaaaaaagaactttcggccgttaccttccctgacattattaggaactacaaggtcatggcagctgagaatatcccagagaatcctttgaagtatttataccccaatatagataaagatcatgcgtttggcaaatattattcccgaccgaaagaagccccagagcctatggagcttgatggcccaaaaggcaccggctatataaagaccgaacttatttcagtgtcagaagtgcacccgtctcgtctacagacaaccgataacctgctgcctatgtcacccgaggaattcgacgaggtgagcaggattgtggggtccgtcgagttcgatagtatgatgaacacagtctag

SEQ ID NO: 171844 - DNA, 4310 bp, Artificial Sequence
  derived and/or modified sequence
gctgagcgcggagccgcccggtgattggtgggggcggaagggggccgggcgccagcgctgccttttctcctgccgggtagtttcgctttcctgcgcagagtctgcggaggggctcggctgcaccggggggatcgcgcctggcagaccccagaccgagcagaggcgacccagcgcgctcgggagaggctgcaccgccgcgcccccgcctagcccttccggatcctgcgcgcagaaaagtttcatttgctgtatgccatcctcgagagctgtctaggttaacgttcgcactctgtgtatataacctcgacagtcttggcacctaacgtgctgtgcgtagctgctcctttggttgaatccccaggcccttgttggggcacaaggtggcaggatgtctcagtggtacgaacttcagcagcttgactcaaaattcctggagcaggttcaccagctttatgatgacagttttcccatggaaatcagacagtacctggcacagtggttagaaaagcaagactgggagcacgctgccaatgatgtttcatttgccaccatccgttttcatgacctcctgtcacagctggatgatcaatatagtcgcttttctttggagaataacttcttgctacagcataacataaggaaaagcaagcgtaatcttcaggataattttcaggaagacccaatccagatgtctatgatcatttacagctgtctgaaggaagaaaggaaaattctggaaaacgcccagagatttaatcaggctcagtcggggaatattcagagcacagtgatgttagacaaacagaaagagcttgacagtaaagtcagaaatgtgaaggacaaggttatgtgtatagagcatgaaatcaagagcctggaagatttacaagatgaatatgacttcaaatgcaaaaccttgcagaacagagaacacgagaccaatggtgtggcaaagagtgatcagaaacaagaacagctgttactcaagaagatgtatttaatgcttgacaataagagaaaggaagtagttcacaaaataatagagttgctgaatgtcactgaacttacccagaatgccctgattaatgatgaactagtggagtggaagcggagacagcagagcgcctgtattggggggccgcccaatgcttgcttggatcagctgcagaactggttcactatagttgcggagagtctgcagcaagttcggcagcagcttaaaaagttggaggaattggaacagaaatacacctacgaacatgaccctatcacaaaaaacaaacaagtgttatgggaccgcaccttcagtcttttccagcagctcattcagagctcgtttgtggtggaaagacagccctgcatgccaacgcaccctcagaggccgctggtcttgaagacaggggtccagttcactgtgaagttgagactgttggtgaaattgcaagagctgaattataatttgaaagtcaaagtcttatttgataaagatgtgaatgagagaaatacagtaaaaggatttaggaagttcaacattttgggcacgcacacaaaagtgatgaacatggaggagtccaccaatggcagtctggcggctgaatttcggcacctgcaattgaaagaacagaaaaatgctggcaccagaacgaatgagggtcctctcatcgttactgaagagcttcactcccttagttttgaaacccaattgtgccagcctggtttggtaattgacctcgagacgacctctctgcccgttgtggtgatctccaacgtcagccagctcccgagcggttgggcctccatcctttggtacaacatgctggtggcggaacccaggaatctgtccttcttcctgactccaccatgtgcacgatgggctcagctttcagaagtgctgagttggcagttttcttctgtcaccaaaagaggtctcaatgtggaccagctgaacatgttgggagagaagcttcttggtcctaacgccagccccgatggtctcattccgtggacgaggttttgtaaggaaaatataaatgataaaaattttcccttctggctttggattgaaagcatcctagaactcattaaaaaacacctgctccctctctggaatgatgggtgcatcatgggcttcatcagcaaggagcgagagcgtgccctgttgaaggaccagcagccggggaccttcctgctgcggttcagtgagagctcccgggaaggggccatcacattcacatgggtggagcggtcccagaacggaggcgaacctgacttccatgcggttgaaccctacacgaagaaagaactttctgctgttactttccctgacatcattcgcaattacaaagtcatggctgctgagaatattcctgagaatcccctgaagtatctgtatccaaatattgacaaagaccatgcctttggaaagtattactccaggccaaaggaagcaccagagccaatggaacttgatggccctaaaggaactggatatatcaagactgagttgatttctgtgtctgaagttcacccttctagacttcagaccacagacaacctgctccccatgtctcctgaggagtttgacgaggtgtctcggatagtgggctctgtagaattcgacagtatgatgaacacagtatagagcatgaatttttttcatcttctctggcgacagttttccttctcatctgtgattccctcctgctactctgttccttcacatcctgtgtttctagggaaatgaaagaaaggccagcaaattcgctgcaacctgttgatagcaagtgaatttttctctaactcagaaacatcagttactctgaagggcatcatgcatcttactgaaggtaaaattgaaaggcattctctgaagagtgggtttcacaagtgaaaaacatccagatacacccaaagtatcaggacgagaatgagggtcctttgggaaaggagaagttaagcaacatctagcaaatgttatgcataaagtcagtgcccaactgttataggttgttggataaatcagtggttatttagggaactgcttgacgtaggaacggtaaatttctgtgggagaattcttacatgttttctttgctttaagtgtaactggcagttttccattggtttacctgtgaaatagttcaaagccaagtttatatacaattatatcagtcctctttcaaaggtagccatcatggatctggtagggggaaaatgtgtattttattacatctttcacattggctatttaaagacaaagacaaattctgtttcttgagaagagaatattagctttactgtttgttatggcttaatgacactagctaatatcaatagaaggatgtacatttccaaattcacaagttgtgtttgatatccaaagctgaatacattctgctttcatcttggtcacatacaattatttttacagttctcccaagggagttaggctattcacaaccactcattcaaaagttgaaattaaccatagatgtagataaactcagaaatttaattcatgtttcttaaatgggctactttgtcctttttgttattagggtggtatttagtctattagccacaaaattgggaaaggagtagaaaaagcagtaactgacaacttgaataatacaccagagataatatgagaatcagatcatttcaaaactcatttcctatgtaactgcattgagaactgcatatgtttcgctgatatatgtgtttttcacatttgcgaatggttccattctctctcctgtactttttccagacacttttttgagtggatgatgtttcgtgaagtatactgtatttttacctttttccttccttatcactgacacaaaaagtagattaagagatgggtttgacaaggttcttcccttttacatactgctgtctatgtggctgtatcttgtttttccactactgctaccacaactatattatcatgcaaatgctgtattcttctttggtggagataaagatttcttgagttttgttttaaaattaaagctaaagtatctgtattgcattaaatataatatgcacacagtgctttccgtggcactgcatacaatctgaggcctcctctctcagtttttatatagatggcgagaacctaagtttcagttgattttacaattgaaatgactaaaaaacaaagaagacaacattaaaacaatattgtttctaattgctgaggtttagctgtcagttctttttgccctttgggaattcggcatggtttcattttactgcactagccaagagactttacttttaagaagtattaaaattctaaaattcta

SEQ ID NO: 171845 - DNA, 3097 bp, Artificial Sequence
  derived and/or modified sequence
gtgcagttggacgccgggcgaggacgggccgtctgtgctgacccgcgaatagtgatcccagaggaagaacgcgtcctgagtattccaagtgcgagcagtgccacctgttctcggagatggcactgctcagcacgattgtccttgccagtcgtgctctggcagtgaagaggacttgtgaaatataattttcctctagaaggcactgcaccttcccatttaccgtcactttctcccgtttccacccctttccatcagtcacgttttcttcttttcgcagaaagtttcatttgctgtatgccatcctcgagagctgtctaggttaacgttcgcactctgtgtatataacctcgacagtcttggcacctaacgtgctgtgcgtagctgctcctttggttgaatccccaggcccttgttggggcacaaggtggcaggatgtctcagtggtacgaacttcagcagcttgactcaaaattcctggagcaggttcaccagctttatgatgacagttttcccatggaaatcagacagtacctggcacagtggttagaaaagcaagactgggagcacgctgccaatgatgtttcatttgccaccatccgttttcatgacctcctgtcacagctggatgatcaatatagtcgcttttctttggagaataacttcttgctacagcataacataaggaaaagcaagcgtaatcttcaggataattttcaggaagacccaatccagatgtctatgatcatttacagctgtctgaaggaagaaaggaaaattctggaaaacgcccagagatttaatcaggctcagtcggggaatattcagagcacagtgatgttagacaaacagaaagagcttgacagtaaagtcagaaatgtgaaggacaaggttatgtgtatagagcatgaaatcaagagcctggaagatttacaagatgaatatgacttcaaatgcaaaaccttgcagaacagagaacacgagaccaatggtgtggcaaagagtgatcagaaacaagaacagctgttactcaagaagatgtatttaatgcttgacaataagagaaaggaagtagttcacaaaataatagagttgctgaatgtcactgaacttacccagaatgccctgattaatgatgaactagtggagtggaagcggagacagcagagcgcctgtattggggggccgcccaatgcttgcttggatcagctgcagaactggttcactatagttgcggagagtctgcagcaagttcggcagcagcttaaaaagttggaggaattggaacagaaatacacctacgaacatgaccctatcacaaaaaacaaacaagtgttatgggaccgcaccttcagtcttttccagcagctcattcagagctcgtttgtggtggaaagacagccctgcatgccaacgcaccctcagaggccgctggtcttgaagacaggggtccagttcactgtgaagttgagactgttggtgaaattgcaagagctgaattataatttgaaagtcaaagtcttatttgataaagatgtgaatgagagaaatacagtaaaaggatttaggaagttcaacattttgggcacgcacacaaaagtgatgaacatggaggagtccaccaatggcagtctggcggctgaatttcggcacctgcaattgaaagaacagaaaaatgctggcaccagaacgaatgagggtcctctcatcgttactgaagagcttcactcccttagttttgaaacccaattgtgccagcctggtttggtaattgacctcgagacgacctctctgcccgttgtggtgatctccaacgtcagccagctcccgagcggttgggcctccatcctttggtacaacatgctggtggcggaacccaggaatctgtccttcttcctgactccaccatgtgcacgatgggctcagctttcagaagtgctgagttggcagttttcttctgtcaccaaaagaggtctcaatgtggaccagctgaacatgttgggagagaagcttcttggtcctaacgccagccccgatggtctcattccgtggacgaggttttgtaaggaaaatataaatgataaaaattttcccttctggctttggattgaaagcatcctagaactcattaaaaaacacctgctccctctctggaatgatgggtgcatcatgggcttcatcagcaaggagcgagagcgtgccctgttgaaggaccagcagccggggaccttcctgctgcggttcagtgagagctcccgggaaggggccatcacattcacatgggtggagcggtcccagaacggaggcgaacctgacttccatgcggttgaaccctacacgaagaaagaactttctgctgttactttccctgacatcattcgcaattacaaagtcatggctgctgagaatattcctgagaatcccctgaagtatctgtatccaaatattgacaaagaccatgcctttggaaagtattactccaggccaaaggaagcaccagagccaatggaacttgatggccctaaaggaactggatatatcaagactgagttgatttctgtgtctgaagttcacccttctagacttcagaccacagacaacctgctccccatgtctcctgaggagtttgacgaggtgtctcggatagtgggctctgtagaattcgacagtatgatgaacacagtatagagcatgaatttttttcatcttctctggcgacagttttccttctcatctgtgattccctcctgctactctgttccttcacatcctgtgtttctagggaaatgaaagaaaggccagcaaattcgctgcaacctgttgatagcaagtgaatttttctctaactcagaaacatcagttactctgaagggcatcatgcatcttactgaaggtaaaattgaaaggcattctctgaagagtgggtttcacaagtgaaaaacatccagatacacccaaagtatcaggacgagaatgagggtcctttgggaaaggagaagttaagcaacatctagcaaatgttatgcataaagtcagtgcccaactgttataggttgttggataaatcagtggttatttagggaactgcttgacgtaggaa

SEQ ID NO: 171846 - DNA, 2261 bp, Artificial Sequence
  derived and/or modified sequence
gtgctgtgcgtagctgctcctttggttgaatccccaggcccttgttggggcacaaggtggcaggatgtctcagtggtacgaacttcagcagcttgactcaaaattcctggagcaggttcaccagctttatgatgacagttttcccatggaaatcagacagtacctggcacagtggttagaaaagcaagactgggagcacgctgccaatgatgtttcatttgccaccatccgttttcatgacctcctgtcacagctggatgatcaatatagtcgcttttctttggagaataacttcttgctacagcataacataaggaaaagcaagcgtaatcttcaggataattttcaggaagacccaatccagatgtctatgatcatttacagctgtctgaaggaagaaaggaaaattctggaaaacgcccagagatttaatcaggctcagtcggggaatattcagagcacagtgatgttagacaaacagaaagagcttgacagtaaagtcagaaatgtgaaggacaaggttatgtgtatagagcatgaaatcaagagcctggaagatttacaagatgaatatgacttcaaatgcaaaaccttgcagaacagaggaagtagttcacaaaataatagagttgctgaatgtcactgaacttacccagaatgccctgattaatgatgaactagtggagtggaagcggagacagcagagcgcctgtattggggggccgcccaatgcttgcttggatcagctgcagaactggttcactatagttgcggagagtctgcagcaagttcggcagcagcttaaaaagttggaggaattggaacagaaatacacctacgaacatgaccctatcacaaaaaacaaacaagtgttatgggaccgcaccttcagtcttttccagcagctcattcagagctcgtttgtggtggaaagacagccctgcatgccaacgcaccctcagaggccgctggtcttgaagacaggggtccagttcactgtgaagttgagactgttggtgaaattgcaagagctgaattataatttgaaagtcaaagtcttatttgataaagatgtgaatgagagaaatacagtaaaaggatttaggaagttcaacattttgggcacgcacacaaaagtgatgaacatggaggagtccaccaatggcagtctggcggctgaatttcggcacctgcaattgaaagaacagaaaaatgctggcaccagaacgaatgagggtcctctcatcgttactgaagagcttcactcccttagttttgaaacccaattgtgccagcctggtttggtaattgacctcgagacgacctctctgcccgttgtggtgatctccaacgtcagccagctcccgagcggttgggcctccatcctttggtacaacatgctggtggcggaacccaggaatctgtccttcttcctgactccaccatgtgcacgatgggctcagctttcagaagtgctgagttggcagttttcttctgtcaccaaaagaggtctcaatgtggaccagctgaacatgttgggagagaagcttcttggtcctaacgccagccccgatggtctcattccgtggacgaggttttgtaaggaaaatataaatgataaaaattttcccttctggctttggattgaaagcatcctagaactcattaaaaaacacctgctccctctctggaatgatgggtgcatcatgggcttcatcagcaaggagcgagagcgtgccctgttgaaggaccagcagccggggaccttcctgctgcggttcagtgagagctcccgggaaggggccatcacattcacatgggtggagcggtcccagaacggaggcgaacctgacttccatgcggttgaaccctacacgaagaaagaactttctgctgttactttccctgacatcattcgcaattacaaagtcatggctgctgagaatattcctgagaatcccctgaagtatctgtatccaaatattgacaaagaccatgcctttggaaagtattactccaggccaaaggaagcaccagagccaatggaacttgatggccctaaaggaactggatatatcaagactgagttgatttctgtgtctgaagttcacccttctagacttcagaccacagacaacctgctccccatgtctcctgaggagtttgacgaggtgtctcggatagtgggctctgtagaattcgacagtatgatgaacacagtatagagcatgaatttttttcatcttctctggcgacagttt

SEQ ID NO: 171847 - protein, 665 aa, Artificial Sequence
  derived and/or modified sequence
MAAGGSTQQRRREMAAASAAAISGAGRCRLSKIGATRRPPPARVRVAVRLRPFVDGTAGASDPPCVRGMDSCSLEIANWRNHQETLKYQFDAFYGERSTQQDIYAGSVQPILRHLLEGQNASVLAYGPTGAGKTHTMLGSPEQPGVIPRALMDLLQLTREEGAEGRPWALSVTMSYLEIYQEKVLDLLDPASGDLVIREDCRGNILIPGLSQKPISSFADFERHFLPASRNRTVGATRLNQRSSRSHAVLLVKVDQRERLAPFRQREGKLYLIDLAGSEDNRRTGNKGLRLKESGAINTSLFVLGKVVDALNQGLPRVPYRDSKLTRLLQDSLGGSAHSILIANIAPERRFYLDTVSALNFAARSKEVINRPFTNESLQPHALGPVKLSQKELLGPPEAKRARGPEEEEIGSPEPMAAPASASQKLSPLQKLSSMDPAMLERLLSLDRLLASQGSQGAPLLSTPKRERMVLMKTVEEKDLEIERLKTKQKELEAKMLAQKAEEKENHCPTMLRPLSHRTVTGAKPLKKAVVMPLQLIQEQAASPNAEIHILKNKGRKRKLESLDALEPEEKAEDCWELQISPELLAHGRQKILDLLNEGSARDLRSLQRIGPKKAQLIVGWRELHGPFSQVEDLERVEGITGKQMESFLKANILGLAAGQRCGAS

SEQ ID NO: 171848 - protein, 597 aa, Artificial Sequence
  derived and/or modified sequence
MDSCSLEIANWRNHQETLKYQFDAFYGERSTQQDIYAGSVQPILRHLLEGQNASVLAYGPTGAGKTHTMLGSPEQPGVIPRALMDLLQLTREEGAEGRPWALSVTMSYLEIYQEKVLDLLDPASGDLVIREDCRGNILIPGLSQKPISSFADFERHFLPASRNRTVGATRLNQRSSRSHAVLLVKVDQRERLAPFRQREGKLYLIDLAGSEDNRRTGNKGLRLKESGAINTSLFVLGKVVDALNQGLPRVPYRDSKLTRLLQDSLGGSAHSILIANIAPERRFYLDTVSALNFAARSKEVINRPFTNESLQPHALGPVKLSQKELLGPPEAKRARGPEEEEIGSPEPMAAPASASQKLSPLQKLSSMDPAMLERLLSLDRLLASQGSQGAPLLSTPKRERMVLMKTVEEKDLEIERLKTKQKELEAKMLAQKAEEKENHCPTMLRPLSHRTVTGAKPLKKAVVMPLQLIQEQAASPNAEIHILKNKGRKRKLESLDALEPEEKAEDCWELQISPELLAHGRQKILDLLNEGSARDLRSLQRIGPKKAQLIVGWRELHGPFSQVEDLERVEGITGKQMESFLKANILGLAAGQRCGAS

SEQ ID NO: 171849 - DNA, 1998 bp, Artificial Sequence
  derived and/or modified sequence
atggccgctggtgggtcgacccaacagaggcgaagggaaatggctgccgcttcagcggcagccatctcaggcgccggccgatgtagactttctaagataggtgccacgagaaggccccctcccgccagagttagagtggcggtgcgcctcaggccctttgtcgacgggaccgccggggcctcagacccaccctgtgttagggggatggacagttgctccctggagatcgcgaactggcgaaaccatcaggaaaccctcaagtatcagtttgacgccttctacggcgaacgtagtacacaacaggatatttacgccggcagcgtgcagccaatcctccgccatctgctggagggacagaacgctagtgtcctcgcctacggccccaccggcgctggcaaaacacacactatgctgggaagccctgaacagcccggggtgatcccccgcgcactaatggacctcctgcagctgacacgcgaagaaggggcagagggccgaccctgggcgctgtccgtaacaatgtcctaccttgagatctaccaagagaaagtcctcgatctcctggacccagcatccggcgacttagtgataagagaagattgtaggggtaacatcctcattcctggccttagtcaaaagccaatctctagttttgcagactttgagaggcatttccttcccgcctccaggaacagaacggtgggagctactaggctgaatcagaggtcgagcagaagccacgcagttctgctggtaaaagtcgaccagagggaacggttggctccattccgccaacgtgaaggaaaactctatctgatagatcttgctggttctgaggacaaccggcggactggcaacaaaggtctgcgcctcaaagagagcggcgcaatcaacacaagtctgttcgtgttgggcaaagtggtcgacgcgctgaatcagggcctccctcgcgtgccctatcgcgattctaagctcacaaggctcctgcaggactctctggggggtagtgctcatagtatcctgatagccaatattgcgcctgagagacggttctacctggatacggtatcagcccttaacttcgccgctagaagcaaagaagtcataaaccgcccctttaccaacgagtcactgcaaccacacgcccttggccccgtaaagctgtcccaaaaagagctgcttggccctccagaagcaaagagagcccgcgggccagaggaggaggagatagggtcaccggaacctatggctgctccagcctctgccagccagaagcttagccctcttcaaaagctaagttctatggatcccgcgatgctagagagattactgtccctggatagattgcttgcgtcacagggctcacagggtgcaccactgcttagcacacctaaacgtgagaggatggtcctgatgaagacagtggaggagaaggatctggaaatcgaaagattaaagaccaaacagaaagagctggaggccaagatgctggctcaaaaagccgaagagaaagaaaatcactgcccaaccatgctgagacccctctcccatcggaccgttactggcgctaaacctttgaaaaaggcggtggtcatgccattgcagctgatccaggaacaagccgcctccccaaatgctgagatacatatcctgaagaataaaggtagaaagaggaaattggagtccctggatgctctggaaccagaagagaaggctgaagattgctgggagctgcaaatcagccccgagttactggctcacggcagacaaaaaatactggacctgttgaatgaaggaagtgcccgagacctgaggtctctccagcgtatcggaccaaaaaaggcgcagttgatcgtcgggtggagagagctccacgggcccttctctcaggtagaggatctggagagagtcgagggcatcacaggcaaacaaatggagagcttcctgaaggccaacattctgggcttggccgctggtcagaggtgtggggcctcctag

SEQ ID NO: 171850 - DNA, 2113 bp, Artificial Sequence
  derived and/or modified sequence
ggaattcgaatgggagaggcgggcccaaggagggagtggaatggccgcgggcggctcgacgcagcagaggcgacgcgagatggcggcagcttcagcggcggcgatctcaggagctggtcgctgtcggctaagcaagattggagctactcgtcgtccacctccagctcgcgtaagggtggctgtgcgactgcggccatttgtggatggaacagcgggagcaagtgatcccccctgtgtgcggggcatggacagctgctctctagagattgctaactggaggaaccaccaggagactctcaaataccagtttgatgccttctatggggagaggagtactcagcaggacatctatgcaggttcagtgcagcccatcctaaggcacttgctggaagggcagaatgccagtgtgcttgcctatggacccacaggagctgggaagacgcacacaatgctgggcagcccagagcaacctggggtgatcccgcgggctctcatggacctcctgcagctcacaagggaggagggtgccgagggccggccatgggccctttctgtcaccatgtcttacctagagatctaccaggagaaggtattagacctcctggaccctgcttcgggagacctggtaatccgagaagactgccgggggaatatcctgattccgggtctctcccagaagcccatcagtagctttgctgattttgagcggcacttcctgccagccagtcgaaatcggactgtaggagccacccggctcaaccagcgctcctcccgcagtcatgctgtgctcctggtcaaggtggaccagcgggaacgtttggccccatttcgccagcgagagggaaaactctacctgattgacttggctgggtcagaggacaaccggcgcacaggcaacaagggccttcggctaaaagagagtggagccatcaacacctccctgtttgtcctgggcaaagtggtagatgcgctgaatcagggcctccctcgtgtaccttatcgggacagcaagctcactcgcctattgcaggactctctgggtggctcagcccacagtatccttattgccaacattgcccctgagagacgcttctacctagacacagtctccgcactcaactttgctgccaggtccaaggaggtgatcaatcggccttttaccaatgagagcctgcagcctcatgccttgggacctgttaagctgtctcagaaagaattgcttggtccaccagaggcaaagagagcccgaggccctgaggaagaggagatcgggagccctgagcccatggcagctccagcctctgcctcccagaaactcagccccctacagaagctaagcagcatggacccggccatgctggagcgcctcctcagcttggaccgtctgcttgcctcccaggggagccagggggcccctctgttgagtaccccaaagcgagagcggatggtgctaatgaagacagtggaagagaaggacctagagattgagaggcttaagacgaagcaaaaagaactggaggccaagatgttggcccagaaggctgaggaaaaggagaaccattgtcccacaatgctccggcccctttcacatcgcacagtcacaggggcaaagcccctgaaaaaggctgtggtgatgcccctacagctaattcaggagcaggcagcatccccaaatgccgagatccacatcctgaagaataaaggccggaagagaaagctggagtccctggatgccctagagcctgaggagaaggctgaggactgctgggagctacagatcagcccggagctactggctcatgggcgccaaaaaatactggatctgctgaacgaaggctcagcccgagatctccgcagtcttcagcgcattggcccgaagaaggcccagctaatcgtgggctggcgggagctccacggccccttcagccaggtggaggacctggaacgcgtggagggcataacggggaaacagatggagtccttcctgaaggcaaacatcctgggtctcgccgccggccagcgctgtggcgcctcctgaccgtcgtctcctcactccgccttttcaaatttttgtataaccccgtgttgtgtaaatacagtttttgctccggtg

SEQ ID NO: 171851 - DNA, 1709 bp, Artificial Sequence
  derived and/or modified sequence
gtggaatggccgcgggcggctcgacgcagcagaggcgacgcgagatggcggcagcttcagcggcggcgatctcaggagctggtcgctgtcggctaagcaagattggagctactcgtcgtccacctccagctcgcgtaagggtggctgtgcgactgcggccatttgtggatggaacagcgggagcaagtgatcccccctgtgtgcggggcatggacagctgctctctagagattgctaactggaggaaccaccaggagactctcaaataccagtttgatgccttctatggggagaggagtactcagcaggacatctatgcaggttcagtgcagcccatcctaaggcacttgctggaagggcagaatgccagtgtgcttgcctatggacccacaggagctgggaagacgcacacaatgctgggcagcccagagcaacctggggtgatcccgcgggctctcatggacctcctgcagctcacaagggaggagggtgccgagggccggccatgggccctttctgtcaccatgtcttacctagagatctaccaggagaaggtattagacctcctggaccctgcttcgggagacctggtaatccgagaagactgccgggggaatatcctgattccgggtctctcccagaagcccatcagtagctttgctgattttgagcggcacttcctgccagccagtcgaaatcggactgtaggagccacccggctcaaccagcgctcctcccgcagtcatgctgtgctcctggtcaaggtggaccagcgggaacgtttggccccatttcgccagcgagagggaaaactctacctgattgacttggctgggtcagaggacaaccggcgcacaggcaacaagggccttcggctaaaagagagtggagccatcaacacctccctgtttgtcctgggcaaagtggtagatgcgctgaatcagggcctccctcgtgtaccttatcgggacagcaagctcactcgcctattgcaggactctctgggtggctcagcccacagtatccttattgccaacattgcccctgagagacgcttctacctagacacagtctccgcactcaactttgctgccaggtccaaggaggtgatcaatcggccttttaccaatgagagcctgcagcctcatgccttgggacctgttaagctgtctcagaaagaattgcttggtccaccagaggcaaagagagcccgaggccctgaggaagaggagatcgggagccctgagcccatggcagctccagcctctgcctcccagaaactcagccccctacagaagctaagcagcatggacccggccatgctggagcgcctcctcagcttggaccgtctgcttgcctcccaggggagccagggggcccctctgttgagtaccccaaagcgagagcggatggtgctaatgaagacagtggaagagaaggacctagagattgagaggcttaagacgaagcaaaaagaactggaggccaagatgttggcccagaaggctgaggaaaaggagaaccattgtcccacaatgctccggcccctttcacatcgcacagtcacaggggcaaagcccctgaaaaaggctgtggtgatgcccctacagctaattcaggagcaggcagcatccccaaatgccgagatccacatcctgaagaataaaggccggaagagaaagggtgctaatattaccactgggtactga

SEQ ID NO: 171852 - DNA, 2495 bp, Artificial Sequence
  derived and/or modified sequence
gagtgtggggtcgcgagccggtcgccccgcctggctcctgccttctccctgtttcctgctctccccttgggtcagtagactcgggtctccggtccaggctcttggcttgaaccccgcgcactttttctttgtgagcttcggtttcttcgtctgtgaaacgggggtcatggcctcatccctggagatcacctgaataagcaagagaagagtggcggacgctctagccacgaggacgagaagaagggagccggaggcgtgtattgggaagggttctgtgtgggacatggtgtttgggtgcagagacatccctgagagatgcaagaggacgggctgaggaacagacccggctgctgctgggtttgagttggcagcgtaagatgctctgcgattacaggaaaacgaaataaaagactaaaatttcctttcactctagcatggaagtgaatgctattttagggttggaaaggctgttaggacacccaaaatcttgtatgagctggtcgctgtcggctaagcaagattggagctactcgtcgtccacctccagctcgcgtaagggtggctgtgcgactgcggccatttgtggatggaacagcgggagcaagtgatcccccctgtgtgcggggcatggacagctgctctctagagattgctaactggaggaaccaccaggagactctcaaataccagtttgatgccttctatggggagaggagtactcagcaggacatctatgcaggttcagtgcagcccatcctaaggcacttgctggaagggcagaatgccagtgtgcttgcctatggacccacaggagctgggaagacgcacacaatgctgggcagcccagagcaacctggggtgatcccgcgggctctcatggacctcctgcagctcacaagggaggagggtgccgagggccggccatgggccctttctgtcaccatgtcttacctagagatctaccaggagaaggtattagacctcctggaccctgcttcgggagacctggtaatccgagaagactgccgggggaatatcctgattccgggtctctcccagaagcccatcagtagctttgctgattttgagcggcacttcctgccagccagtcgaaatcggactgtaggagccacccggctcaaccagcgctcctcccgcagtcatgctgtgctcctggtcaaggtggaccagcgggaacgtttggccccatttcgccagcgagagggaaaactctacctgattgacttggctgggtcagaggacaaccggcgcacaggcaacaagggccttcggctaaaagagagtggagccatcaacacctccctgtttgtcctgggcaaagtggtagatgcgctgaatcagggcctccctcgtgtaccttatcgggacagcaagctcactcgcctattgcaggactctctgggtggctcagcccacagtatccttattgccaacattgcccctgagagacgcttctacctagacacagtctccgcactcaactttgctgccaggtccaaggaggtgatcaatcggccttttaccaatgagagcctgcagcctcatgccttgggacctgttaagctgtctcagaaagaattgcttggtccaccagaggcaaagagagcccgaggccctgaggaagaggagatcgggagccctgagcccatggcagctccagcctctgcctcccagaaactcagccccctacagaagctaagcagcatggacccggccatgctggagcgcctcctcagcttggaccgtctgcttgcctcccaggggagccagggggcccctctgttgagtaccccaaagcgagagcggatggtgctaatgaagacagtggaagagaaggacctagagattgagaggcttaagacgaagcaaaaagaactggaggccaagatgttggcccagaaggctgaggaaaaggagaaccattgtcccacaatgctccggcccctttcacatcgcacagtcacaggggcaaagcccctgaaaaaggctgtggtgatgcccctacagctaattcaggagcaggcagcatccccaaatgccgagatccacatcctgaagaataaaggccggaagagaaagctggagtccctggatgccctagagcctgaggagaaggctgaggactgctgggagctacagatcagcccggagctactggctcatgggcgccaaaaaatactggatctgctgaacgaaggctcagcccgagatctccgcagtcttcagcgcattggcccgaagaaggcccagctaatcgtgggctggcgggagctccacggccccttcagccaggtggaggacctggaacgcgtggagggcataacggggaaacagatggagtccttcctgaaggcaaacatcctgggtctcgccgccggccagcgctgtggcgcctcctgaccgtcgtctcctcactccgccttttcaaatttttgtataaccccgtgttgtgtaaatacagtttttgctccggt

SEQ ID NO: 171853 - DNA, 2505 bp, Artificial Sequence
  derived and/or modified sequence
gggaattcgaatgggagaggcgggcccaaggagggagtggaatggccgcgggcggctcgacgcagcagaggcgacgcgagatggcggcagcttcagcggcggcgatctcaggtacttgagcccggcctgggcaaggcgggtaccgacgtctggagtttagtgggagttatgtgtcggagtgtggtccaggctctgcgggttgtcgcggagaggcggccatggcgcaggggcggggagagggggacggtgagagtgtggggtcgcgagccggtcgccccgcctggctcctgccttctccctgtttcctgctctccccttgggtcagtagactcgggtctccggtccaggctcttggcttgaaccccgcgcactttttctttgtgagcttcggtttcttcgtctgtgaaacgggggtcatggcctcatccctggagatcacctgaataagcaagagaagagtggcggacgctctagccacgaggacgagaagaagggagccggaggagctggtcgctgtcggctaagcaagattggagctactcgtcgtccacctccagctcgcgtaagggtggctgtgcgactgcggccatttgtggatggaacagcgggagcaagtgatcccccctgtgtgcggggcatggacagctgctctctagagattgctaactggaggaaccaccaggagactctcaaataccagtttgatgccttctatggggagaggagtactcagcaggacatctatgcaggttcagtgcagcccatcctaaggcacttgctggaagggcagaatgccagtgtgcttgcctatggacccacaggagctgggaagacgcacacaatgctgggcagcccagagcaacctggggtgatcccgcgggctctcatggacctcctgcagctcacaagggaggagggtgccgagggccggccatgggccctttctgtcaccatgtcttacctagagatctaccaggagaaggtattagacctcctggaccctgcttcgggagacctggtaatccgagaagactgccgggggaatatcctgattccgggtctctcccagaagcccatcagtagctttgctgattttgagcggcacttcctgccagccagtcgaaatcggactgtaggagccacccggctcaaccagcgctcctcccgcagtcatgctgtgctcctggtcaaggtggaccagcgggaacgtttggccccatttcgccagcgagagggaaaactctacctgattgacttggctgggtcagaggacaaccggcgcacaggcaacaagggccttcggctaaaagagagtggagccatcaacacctccctgtttgtcctgggcaaagtggtagatgcgctgaatcagggcctccctcgtgtaccttatcgggacagcaagctcactcgcctattgcaggactctctgggtggctcagcccacagtatccttattgccaacattgcccctgagagacgcttctacctagacacagtctccgcactcaactttgctgccaggtccaaggaggtgatcaatcggccttttaccaatgagagcctgcagcctcatgccttgggacctgttaagctgtctcagaaagaattgcttggtccaccagaggcaaagagagcccgaggccctgaggaagaggagatcgggagccctgagcccatggcagctccagcctctgcctcccagaaactcagccccctacagaagctaagcagcatggacccggccatgctggagcgcctcctcagcttggaccgtctgcttgcctcccaggggagccagggggcccctctgttgagtaccccaaagcgagagcggatggtgctaatgaagacagtggaagagaaggacctagagattgagaggcttaagacgaagcaaaaagaactggaggccaagatgttggcccagaaggctgaggaaaaggagaaccattgtcccacaatgctccggcccctttcacatcgcacagtcacaggggcaaagcccctgaaaaaggctgtggtgatgcccctacagctaattcaggagcaggcagcatccccaaatgccgagatccacatcctgaagaataaaggccggaagagaaagctggagtccctggatgccctagagcctgaggagaaggctgaggactgctgggagctacagatcagcccggagctactggctcatgggcgccaaaaaatactggatctgctgaacgaaggctcagcccgagatctccgcagtcttcagcgcattggcccgaagaaggcccagctaatcgtgggctggcgggagctccacggccccttcagccaggtggaggacctggaacgcgtggagggcataacggggaaacagatggagtccttcctgaaggcaaacatcctgggtctcgccgccggccagcgctgtggcgcctcctgaccgtcgtctcctcactccgccttttcaaatttttgtataaccccgtgttgtgtaaatacagtttttgctccggt

SEQ ID NO: 171854 - DNA, 1998 bp, Artificial Sequence
  derived and/or modified sequence
atggctgctgggggcagcacccagcagaggagaagagagatggccgccgccagcgctgctgccatctctggagctggccgctgccgcctgagcaagattggagccaccaggaggcctcctccagcccgggtgcgggtggccgtgcggctgcggccctttgtggatggaacagctggggccagtgaccccccctgtgtgcggggcatggacagctgcagcctggagatcgccaactggaggaaccaccaggagaccctgaagtaccagtttgatgccttctacggggagaggagcacccagcaggacatctatgccggctctgtgcagcccatcctgcggcacctgctggagggccagaatgcctctgtgctggcctacggccccactggagctgggaagacccacaccatgctgggcagccctgagcagcccggggtcatcccccgggccctgatggacctgctgcagctgacccgggaggagggcgctgagggccggccctgggccctgtctgtgaccatgagctacctggagatctaccaggagaaggtgctggacctgctggaccctgccagcggggacctggtgatccgggaggactgccggggcaacatcctgatccctggcctgagccagaagcccatcagcagctttgctgactttgagcggcacttcctgcctgccagcaggaacagaacagtgggcgccacccggctgaaccagaggagcagccgcagccatgctgtgctgctggtgaaggtggaccagcgggagcggctggcccccttccggcagcgggagggcaagctgtacctgattgacctggccggcagcgaggacaacagaagaacaggcaacaagggcctgcggctgaaggagagcggggccatcaacaccagcctgtttgtgctgggcaaggtggtggatgccctgaaccagggcctgccccgggtgccctacagagacagcaagctgacccggctgctgcaggacagcctgggcggcagcgcccacagcatcctgattgccaacatcgcccctgagcggcgcttctacctggacacagtgtctgccctgaactttgctgcccggagcaaggaggtgatcaaccggcccttcaccaatgaaagcctgcagccccacgccctgggccctgtgaagctgagccagaaggagctgctgggccccccagaggccaagagggcccggggccctgaggaggaggagatcggcagccctgagcccatggccgccccagccagcgccagccagaagctgagccccctgcagaagctgagctccatggaccctgccatgctggagcggctgctgagcctggaccggctgctggccagccagggcagccagggcgcccccctgctgagcacccccaagcgggagaggatggtgctgatgaagacagtggaggagaaggacctggagattgaaaggctgaagaccaagcagaaggagctggaggccaagatgctggcccagaaggccgaggagaaggagaaccactgccccaccatgctgcggcccctgagccacaggacagtgactggagccaagcccctgaagaaggctgtggtgatgcccctgcagctgatccaggagcaggccgccagccccaatgctgagatccacatcctgaagaacaagggcaggaagaggaagctggagagcctggatgccctggagcctgaggagaaggccgaggactgctgggagctgcagatcagccctgagctgctggcccacggccggcagaagatcctggacctgctgaatgaaggcagcgcccgggacctgcggagcctgcagagaattggccccaagaaggcccagctgattgtgggctggagggagctgcacggccccttcagccaggtggaggacctggagcgggtggagggcatcaccgggaagcagatggagagcttcctgaaggccaacatcctgggcctggccgccggccagagatgtggggccagctag

SEQ ID NO: 171855 - DNA, 1998 bp, Artificial Sequence
  derived and/or modified sequence
atggccgccggcggcagcacccagcagcggcggcgggagatggccgcagcaagtgcggctgccatctccggcgctgggcggtgccgtctatcgaaaataggagccacccggcgccccccgccagctagagtccgggtagccgttaggcttcggcctttcgtggacggtactgcaggggcaagcgaccccccctgcgtccgcggaatggatagctgttctttagagatcgcaaactggcgcaaccaccaggagacactgaaataccagttcgacgctttttacggcgaaagatccacacagcaggatatttatgcagggtcggttcagccaatcctccggcacctgttggagggtcagaacgcctcggttctggcctacggaccaactggcgctggtaagacgcatacaatgctcggctcccccgagcagcctggagtcattccccgcgccctcatggacctcctccagctgacacgggaagagggcgccgagggacgaccctgggctctttcagtgacaatgagttacttggagatttaccaggagaaagtattggacttgctggatccggcatcaggtgatctcgtcatcagagaggattgtagggggaacatcctgattcccggactgtcccaaaagccaatatcatcctttgcagactttgagaggcactttttgccagctagccgcaatcgcaccgttggagccactcggctaaatcagcggtccagtcgcagccatgcagtcttgctcgtgaaagtggaccagcgcgagcgactcgcaccattccggcagagagagggcaagctatacctcatcgacctggcagggagtgaagacaaccgcagaaccggcaataaagggctgcggcttaaagagtccggtgccattaataccagcctgttcgtgctgggcaaagtggtggatgcgcttaatcaaggactgcctagagtaccataccgggacagtaaactgactagactgctccaggattcactgggcggttccgcccactctatcctaatcgcaaacatcgctcctgaacgaaggttttatctggataccgtgtcagcgttgaattttgcggctagatcgaaagaggtgattaatcggcccttcactaatgaatccctccaaccgcacgccctggggcccgttaagctcagtcagaaggaactgctggggcctcccgaggcgaaaagggccaggggaccggaagaagaggaaattggatccccagaaccgatggctgccccagcttcggcatcccagaagctctcgcccctccaaaagttgagctcaatggacccagccatgttggagcgattgctatccctagatcggctgttggctagtcagggctcccagggggcccctctgctgtctaccccaaagagagaaagaatggttctgatgaagaccgtggaggagaaagacctcgaaattgagagactcaagacaaaacagaaagaactggaagccaagatgcttgcccaaaaagcggaagaaaaagagaaccattgtcccacgatgctgaggcctctgagccataggacggttacaggcgccaagcctcttaagaaggccgtagttatgccacttcagctgattcaggaacaggccgcttctcctaatgccgagatccacattctgaaaaataaaggccgtaagcgcaaattggagtccttggacgcgctggagcctgaggaaaaagctgaagactgctgggagttgcagatttcaccggaattactagctcatggccggcagaaaatccttgacctgcttaacgaaggcagcgccagggacctccggtcactacagcgcatcgggcccaagaaggcccagctgatagtcggatggagggaattacacggtcccttcagccaagtagaggatttggagagggttgagggtataactggaaagcagatggaaagctttctgaaggccaacattttgggcctagctgccggacagaggtgcggcgccagttag

SEQ ID NO: 171856 - DNA, 1998 bp, Artificial Sequence
  derived and/or modified sequence
atggcggcaggcggaagcacccagcagcgacgtcgggagatggctgccgcttccgctgctgccatctcgggggcagggaggtgccgcctatctaaaattggcgcaacccggaggccacctcccgcaagagttcgggtagcggtgaggttgcggccattcgtagatggaaccgccggtgcctctgaccctccatgcgttcgcggtatggatagttgctccctggagatcgcaaactggaggaaccatcaggagaccttaaaatatcaattcgacgctttttacggggagaggagtactcaacaagacatttatgccggttctgtacagccaattctccgccacttactcgaaggccagaatgcctccgtcctggcttacggaccaacgggcgcaggcaagactcataccatgctgggaagccctgagcagcctggcgtgatacccagggcactgatggatctgttgcagctgactcgggaggagggcgctgaggggagaccctgggctctatctgtgacaatgtcttatttagagatataccaggaaaaagtgctggatctcttagaccctgcttcgggcgatttagtgatcagagaagattgcagaggcaacatcctaataccaggactgagtcagaagcctatctcatcctttgcagacttcgagcgccacttcttaccggcatcccgtaatcggactgttggcgctacacgtctgaatcagcggtcttctcgaagccatgccgtgctgttggtgaaggtggatcagcgtgaaaggctcgctccatttcggcagagagagggtaaactctacctgatcgatctcgccggatcagaggacaatcgtagaactggcaacaaaggcctacgattgaaggaaagtggcgcaatcaatacttcactgttcgtccttggaaaagtcgtggacgccctgaaccagggacttccacgcgtgccctaccgggattccaagcttacccgccttctgcaggactctcttggcggatccgctcactcaatcctgatcgcgaacatcgcccctgaacggaggttctacctggatacggtctccgctctgaactttgccgcaagatctaaagaagtgattaatcgaccctttacaaacgaaagcctgcagccacatgctctgggccctgtaaagctgagccaaaaggaactgctcggtccaccagaagcgaaacgcgcacggggtccagaggaagaggagatcgggtcgcccgagcccatggccgctccggcatccgcttctcagaaattatcccctcttcagaagctcagctctatggaccccgcaatgctcgagaggttactgtccctggatcggctgctcgcctctcagggctcacagggcgctcctctcctctccacgccaaagagggaaagaatggtactcatgaagacagtggaagagaaggacctcgaaattgaacgcttgaagaccaaacaaaaggagctggaggcaaaaatgctggcccagaaagccgaagaaaaggaaaatcattgtccgacaatgcttcgtcccctttcccaccgaaccgtcacgggggctaagcctctcaaaaaagctgtggtgatgcctctgcagttgatccaggaacaggccgcttctccgaatgcggagattcacatccttaagaacaaggggcgaaaacgcaagctcgagtcattggatgccctggagccagaggagaaagccgaggattgttgggagcttcagatctcccctgaattgcttgcccatggacgacagaaaattttagacctcctgaacgaaggctccgcccgagacttgagaagcttgcagcgcattggacccaaaaaggcccagctgatcgtcggatggagagagcttcatgggccattctcccaggttgaggatctcgagagggttgagggcatcaccggtaaacagatggaatccttcctaaaagcaaacatacttggcctggccgcagggcagcgatgtggggcttcttag

SEQ ID NO: 171857 - DNA, 1998 bp, Artificial Sequence
  derived and/or modified sequence
atggccgcaggtgggtctacccagcagagaagacgagaaatggccgctgcttctgcagccgcaatttccggcgcagggcgctgccgactgtcaaaaatcggagccacgcgaaggcccccccctgcccgtgtgcgagtagcggtcaggttacgccccttcgtggacggaaccgcaggggccagtgatccgccttgtgtgagaggcatggactcatgctcattagagatcgctaattggcgaaaccaccaggagaccctgaagtaccagttcgatgcattttacggcgaacgtagcacacagcaggatatctacgctggaagcgttcagccaattctgcgtcatttgcttgagggccagaatgcaagcgttcttgcttacggccccacaggagcagggaagacacacaccatgctgggaagccccgagcagccaggggtaatccctcgggccctcatggatttgctgcagctcactcgcgaggaaggtgccgaaggtcgcccatgggcgttgtctgtgaccatgagctacctggagatctatcaagaaaaggtccttgacctgctagaccccgcgagcggcgatcttgtgatcagggaggactgcaggggcaacatattgattcctggcctttcccagaagccgatttcctctttcgctgattttgaacgacattttctgcccgcctctaggaatcgcaccgtaggcgccactcggctgaatcagcgctcgtcccgatctcacgccgttctgttagtgaaagtggatcagcgcgaacgcttagcgccattccggcagcgcgagggaaagctgtaccttatcgacctggctggatctgaggacaaccggagaactgggaataaaggccttaggcttaaagaaagcggagcaataaatacctccctgttcgtgctgggcaaagtggtcgacgccctaaatcagggacttcctcgcgtaccatacagagatagcaaactaacaaggctgctgcaggactctctcggtggcagcgcgcactccatcctcatcgccaacatcgcaccagagagacggttttacctcgatacagtctctgcacttaatttcgccgcccggtccaaggaggtaatcaatcgacccttcactaacgagtccctgcagccacacgcactcggtccagtcaagctgagtcagaaggagctgctgggaccgcccgaagcgaaaagagcccgaggcccagaggaagaagaaattggctctcctgaacctatggccgcccccgccagcgcatcacagaagctgtcacccctccagaaactttccagcatggatcctgcgatgctggagcgcctgctctcactagacaggttgctcgcctcacaagggtcccagggagcccctttgctgtcaactcccaagagggagcgcatggtactcatgaaaacagttgaggagaaggaccttgagatcgagcggctgaagacaaagcagaaagaattagaggcaaaaatgcttgcccagaaggctgaagaaaaagaaaatcactgcccaacaatgcttagacccctgagtcatcgcaccgttaccggagcaaaacccctgaagaaagcggtggtgatgcctctgcagctgatccaggagcaggccgcaagtccgaacgctgagattcacattctaaaaaataagggccgcaagaggaagttggaatctctcgatgccttagaacctgaagagaaagctgaggattgctgggagctgcagatatcccctgaacttttagcccacgggcggcaaaagattttggatctactgaacgaaggctcagccagagatctgcggtcacttcaaagaattggacccaaaaaggcccagttaatcgttggttggcgagaactccacggcccgttttcgcaggtggaagacctcgaacgggtggaaggaatcacaggcaaacagatggaatcgttccttaaggctaacattctgggccttgcggccggccagcgttgcggggcgtcgtag

SEQ ID NO: 171858 - DNA, 1998 bp, Artificial Sequence
  derived and/or modified sequence
atggccgctggaggatctacacagcaacgacgacgtgagatggccgccgccagtgcagctgcaatatccggcgccgggcgctgtcgactttccaagataggagccactcggaggcctccacccgccagggtcagagtggccgtgagactcaggcccttcgtcgacggaacggcaggtgctagcgacccaccttgcgtccggggtatggactcttgtagtttggaaattgcgaattggaggaaccatcaagagacactcaaataccagtttgacgctttctacggcgaacgaagcacgcagcaagatatctatgccggctcggtccagcctattctacgtcaccttcttgaaggacagaatgcctccgtgctcgcatacgggccaacgggcgccgggaaaacacacacaatgctggggagtcccgaacagccaggcgtcataccccgcgccctaatggatcttctccagcttacacgagaggaaggcgccgaaggaagaccttgggccttgagtgtcaccatgtcatacttggagatttaccaagagaaggtgctcgatttgttagaccctgcctctggagatctggtgattagagaggattgtcgggggaacattttaatccctggactatcccagaaacctatctcaagtttcgctgatttcgagagacactttctgcctgcgtctaggaatcgcaccgtgggcgctacacggctcaatcaacggagttctagaagtcacgccgtgctgcttgtgaaagttgatcagagagaacgccttgcgcccttcagacaacgcgagggaaagctctatttgattgacctagctggaagcgaagacaatcggaggaccggaaataagggcctgagacttaaagaaagcggagccatcaatacaagtctgtttgtgcttggtaaagttgtcgatgcgctgaatcaaggacttcccagggtgccataccgcgattcaaaactaacacggctgctacaggatagcctcggcggaagtgcccactctatcttaatagcgaatatcgctccagagcggagattctacctcgataccgtgtcagcactcaatttcgcagcccgctccaaagaggtaatcaatcgtcctttcaccaatgagtcgttacagccacacgccctgggtcctgttaagctgtcccagaaagaactcctcggcccccctgaagcgaagcgcgcacggggcccagaagaggaagagatcggttccccagagcctatggccgcacctgcaagtgcttcacaaaaattgtcccctcttcagaaattaagttctatggatcctgcaatgctggaacgattgctgagcctggaccgactgctcgcttcccaaggcagccagggcgcccccttactctccacccccaagcgcgagagaatggtgctgatgaagacagttgaggagaaagaccttgaaattgaaaggctgaaaacaaagcagaaggagctcgaagctaagatgctggcccagaaggctgaggagaaggaaaatcattgccccacgatgttgaggccgctatctcaccgaacagtgacaggtgctaagcctctgaaaaaagccgtggtcatgcccttacagttgatccaggaacaagccgccagtcccaacgccgaaatccacatcctcaagaacaaaggacgcaaacgcaaactggagtcactggacgctctagaacccgaagagaaggctgaggattgttgggagttacagatctcgcctgagttgctggctcacgggaggcagaagatcttagacttacttaacgaaggcagcgcccgcgatctgcgctccttgcagcgaatcggaccaaaaaaagcccagctcatcgtgggttggagagagcttcatgggcccttctcccaggttgaggacttagaaagagtggaaggaattacaggaaaacagatggagtcctttctgaaagctaacattcttggactagcagctggacagagatgtggggcgtcctag

SEQ ID NO: 171859 - DNA, 1998 bp, Artificial Sequence
  derived and/or modified sequence
atggccgccggcggcagcacccagcagagaagaagagagatggccgccgccagcgccgccgccatcagcggcgccggcagatgcagactgagcaagatcggcgccaccagaagacccccccccgccagagtgagagtggccgtgagactgagacccttcgtggacggcaccgccggcgccagcgaccccccctgcgtgagaggcatggacagctgcagcctggagatcgccaactggagaaaccaccaggagaccctgaagtaccagttcgacgccttctacggcgagagaagcacccagcaggacatctacgccggcagcgtgcagcccatcctgagacacctgctggagggccagaacgccagcgtgctggcctacggccccaccggcgccggcaagacccacaccatgctgggcagccccgagcagcccggcgtgatccccagagccctgatggacctgctgcagctgaccagagaggagggcgccgagggcagaccctgggccctgagcgtgaccatgagctacctggagatctaccaggagaaggtgctggacctgctggaccccgccagcggcgacctggtgatcagagaggactgcagaggcaacatcctgatccccggcctgagccagaagcccatcagcagcttcgccgacttcgagagacacttcctgcccgccagcagaaacagaaccgtgggcgccaccagactgaaccagagaagcagcagaagccacgccgtgctgctggtgaaggtggaccagagagagagactggcccccttcagacagagagagggcaagctgtacctgatcgacctggccggcagcgaggacaacagaagaaccggcaacaagggcctgagactgaaggagagcggcgccatcaacaccagcctgttcgtgctgggcaaggtggtggacgccctgaaccagggcctgcccagagtgccctacagagacagcaagctgaccagactgctgcaggacagcctgggcggcagcgcccacagcatcctgatcgccaacatcgcccccgagagaagattctacctggacaccgtgagcgccctgaacttcgccgccagaagcaaggaggtgatcaacagacccttcaccaacgagagcctgcagccccacgccctgggccccgtgaagctgagccagaaggagctgctgggcccccccgaggccaagagagccagaggccccgaggaggaggagatcggcagccccgagcccatggccgcccccgccagcgccagccagaagctgagccccctgcagaagctgagcagcatggaccccgccatgctggagagactgctgagcctggacagactgctggccagccagggcagccagggcgcccccctgctgagcacccccaagagagagagaatggtgctgatgaagaccgtggaggagaaggacctggagatcgagagactgaagaccaagcagaaggagctggaggccaagatgctggcccagaaggccgaggagaaggagaaccactgccccaccatgctgagacccctgagccacagaaccgtgaccggcgccaagcccctgaagaaggccgtggtgatgcccctgcagctgatccaggagcaggccgccagccccaacgccgagatccacatcctgaagaacaagggcagaaagagaaagctggagagcctggacgccctggagcccgaggagaaggccgaggactgctgggagctgcagatcagccccgagctgctggcccacggcagacagaagatcctggacctgctgaacgagggcagcgccagagacctgagaagcctgcagagaatcggccccaagaaggcccagctgatcgtgggctggagagagctgcacggccccttcagccaggtggaggacctggagagagtggagggcatcaccggcaagcagatggagagcttcctgaaggccaacatcctgggcctggccgccggccagagatgcggcgccagctag

SEQ ID NO: 171860 - protein, 499 aa, Artificial Sequence
  derived and/or modified sequence
MADLANEEKPAIAPPVFVFQKDKGQKRSAGGSSPEGGEDSDREDGNYCPPVKRERTSSLTQFPPSQSEERSSGFRLKPPTLIHGQAPSAGLPSQKPKEQQRSVLRPAVLQAPQPKALSQTVPSSGTNGVSLPADCTGAVPAASPDTAAWRSPSEAADEVCALEEKEPQKNESSNASEEEACEKKDPATQQAFVFGQNLRDRVKLINESVDEADMENAGHPSADTPTATNYFLQYISSSLENSTNSADASSNKFVFGQNMSERVLSPPKLNEVSSDANRENAAAESGSESSSQEATPEKESLAESAAAYTKATARKCLLEKVEVITGEEAESNVLQMQCKLFVFDKTSQSWVERGRGLLRLNDMASTDDGTLQSRLVMRTQGSLRLILNTKLWAQMQIDKASEKSIRITAMDTEDQGVKVFLISASSKDTGQLYAALHHRILALRSRVEQEQEAKMPAPEPGAAPSNEEDDSDDDDVLAPSGATAAGAGDEGDGQTTGST

SEQ ID NO: 171861 - protein, 397 aa, Artificial Sequence
  derived and/or modified sequence
ADVTKAEKPAIAPPVFVFQKDKGQKRSAGGSSPEGGEDSDREDGNYCPPVKRERTSSLTQFPPSQSEERSSGFRLKPPTLIHGQAPSAGLPSQKPKEQQRSVLRPAVLQAPQPKALSQTVPSSGTNGVSLPADCTGAVPAASPDTAAWRSPSEAADEVCALEEKEPQKNESSNASEEEACEKKDPATQQAFVFGQNLRDRVKLINESVDEADMENAGHPSADTPTATNYFLQYISSSLENSTNSADASSNKFVFGQNMSERVLSPPKLNEVSSDANRENAAAESGSESSSQEATPEKESLAESAAAYTKATARKCLLEKVEVITGEEAESNVLQMQCKLFVFDKTSQSWWLLRHPHPSHPAVGPCLCGEQPALCPCPGLPNYRPGTPAQLGGLLVRV

SEQ ID NO: 171862 - protein, 439 aa, Artificial Sequence
  derived and/or modified sequence
MADLANEEERSSGFRLKPPTLIHGQAPSAGLPSQKPKEQQRSVLRPAVLQAPQPKALSQTVPSSGTNGVSLPADCTGAVPAASPDTAAWRSPSEAADEVCALEEKEPQKNESSNASEEEACEKKDPATQQAFVFGQNLRDRVKLINESVDEADMENAGHPSADTPTATNYFLQYISSSLENSTNSADASSNKFVFGQNMSERVLSPPKLNEVSSDANRENAAAESGSESSSQEATPEKESLAESAAAYTKATARKCLLEKVEVITGEEAESNVLQMQCKLFVFDKTSQSWVERGRGLLRLNDMASTDDGTLQSRLVMRTQGSLRLILNTKLWAQMQIDKASEKSIRITAMDTEDQGVKVFLISASSKDTGQLYAALHHRILALRSRVEQEQEAKMPAPEPGAAPSNEEDDSDDDDVLAPSGATAAGAGDEGDGQTTGST

SEQ ID NO: 171863 - DNA, 1500 bp, Artificial Sequence
  derived and/or modified sequence
atggccgatctagccaatgaggagaaacctgcaatcgctccacccgttttcgttttccagaaagataaggggcaaaagcggagcgcgggcggatcctcaccagagggaggagaggatagcgaccgtgaggacggcaactattgtccacccgtgaaacgcgaacggacctcatccctaacgcagttcccacccagccaatcagaagagagatcgagcggattcagactgaaaccacccactctgattcacggacaagctccctccgccggattaccctctcagaagcctaaggaacagcagcgcagcgtgctgcggcctgcagtccttcaggctccccagccaaaagctctgagtcaaacagtccccagctcgggcaccaatggggtgagcctgccagccgattgcactggtgccgtgccggccgcgtctcccgataccgcagcttggcgaagcccttcagaggctgctgatgaagtctgtgcactcgaagaaaaggaaccgcagaaaaatgaatcatccaacgccagcgaagaagaagcctgcgagaaaaaggacccggccactcagcaggcttttgtcttcggtcagaatctgagagatcgtgtgaagctgatcaatgaatccgtggatgaagccgatatggaaaatgcagggcaccctagcgccgacacgcctactgcaaccaattattttttacagtacatcagcagcagtctcgagaactctacaaatagcgccgatgcttcttcgaataagtttgtgttcgggcagaacatgtcagaaagagtgttgagccccccaaagctgaatgaggtctcaagcgacgctaaccgggagaacgccgccgccgaatctggctcggaaagctcctctcaggaagccaccccagagaaggaaagcctggccgaatccgcagccgcttacaccaaggcaactgcgagaaaatgtctgcttgaaaaggtcgaagtcattacaggtgaggaagcggagtccaatgtcctgcaaatgcagtgcaagctcttcgtgttcgataaaacttcacagtcttgggtagagagggggcggggccttctgaggctgaacgatatggcttctactgatgacggcacacttcagtctagattagtgatgagaactcaggggagcttaaggctaatattgaacacgaaactctgggcacagatgcaaattgataaagccagcgagaaatctattcgtattaccgctatggacactgaagatcaaggcgtgaaagttttcttgatttccgcaagctcaaaagatacaggacagttatatgccgccctgcaccaccggatactggctctaagatctagggtggaacaggaacaggaggctaagatgcccgcacctgagcctggtgcagccccttccaacgaggaggatgacagtgatgacgatgatgtcttagccccatctggtgcgactgccgcaggcgcaggtgacgaaggggatggccagacaacaggctctacctag

SEQ ID NO: 171864 - DNA, 1194 bp, Artificial Sequence
  derived and/or modified sequence
gctgacgtcaccaaagcagagaaacctgctatagcccccccggtattcgtgttccagaaggacaaaggacagaaacgatcggctggcgggtcaagtcccgaaggcggtgaagattctgatcgggaggatgggaattactgccctccggtgaaacgcgagagaacttcctctctgacccagtttccaccttcacaatcggaggaaagatcgtccggctttcggctgaaacctccgacactgattcacggacaggctccctccgcaggtctgcctagtcagaagcccaaagaacaacagcgcagcgttcttcgcccagctgtgcttcaggccccacagcctaaagctctgagccagactgtgccttcctcaggaacgaacggagtgtcactgcccgccgactgtactggcgctgttccagctgctagtccagatacggctgcatggcgctctccctcggaagctgccgacgaggtgtgtgccttggaagagaaagagcctcaaaaaaacgaaagctccaatgcctctgaagaagaggcttgcgagaagaaggatcccgcaacacagcaagctttcgtatttggacaaaatctgagggaccgggtgaagcttatcaacgaaagcgtggacgaagcagatatggagaacgccggacacccttccgctgacacaccaaccgctaccaattactttctccagtatataagctcctcgcttgagaactctaccaatagcgccgacgccagctccaacaaatttgtatttggacaaaatatgtcagaaagagttttgtcccccccgaagcttaacgaagtgtccagcgacgcgaatagagaaaacgccgccgcagagtccggaagtgagtcctccagccaggaggccacacccgaaaaggaatccctcgccgagtcagctgcagcctataccaaggccactgcgagaaagtgccttttggagaaggtggaggttatcacaggtgaggaggcggaaagcaatgtcctgcagatgcagtgcaagctgttcgtgtttgacaagacatctcagtcttggtggctcttacggcatccacacccaagccaccccgccgtcggtccctgtctatgtggtgagcaacccgctctgtgtccctgtccaggcttgccaaactaccgtccaggcacccctgctcagctgggcggtttgttggtgagggtgtag

SEQ ID NO: 171865 - DNA, 1320 bp, Artificial Sequence
  derived and/or modified sequence
atggccgacctggccaatgaggaggaacggagcagtgggtttaggctgaagcccccaacccttatacatggtcaagccccctctgctggactgccgagccagaagccgaaggagcagcagaggtccgtccttaggcctgccgttctgcaggcaccccagccaaaagccctgtcacaaactgtgcctagcagcggcacaaacggggtgagcctgccagctgactgtaccggtgcggtgccagcagcgtccccggacaccgcagcttggcgctccccgagcgaagctgctgatgaagtgtgtgcccttgaggagaaagaaccacagaaaaatgagtccagcaatgcgtctgaagaggaagcatgcgaaaaaaaggatccagccacccagcaggcttttgttttcgggcagaacctgagggatcgggtgaagctcatcaacgagagcgtggatgaagctgacatggagaacgctggtcaccctagcgcagatactccgactgccacaaattattttctgcaatacatttcatcgagcctggagaacagcaccaactcagccgatgccagcagcaataaatttgttttcggccagaatatgtccgaacgtgtactaagtccacccaagctaaatgaagtcagttccgacgcaaatcgtgagaacgcggctgctgagagcggctcagagagcagctcacaggaggctactccggagaaggagagcttagccgagagtgccgccgcctacaccaaggcaaccgctaggaagtgcttgctggagaaggtcgaggtgattaccggagaggaagcagagagcaacgtgttgcagatgcagtgtaagctgtttgtctttgacaagacgtctcagtcttgggtggaacgaggacgcggattgctcagactgaatgacatggcaagcactgatgatggaacgttacagagtcgcctggtcatgaggacacagggcagcctgaggctgatcctcaacacgaagctatgggcgcagatgcagatcgacaaagcgtctgaaaaatcaatcagaatcacggccatggatactgaggaccaaggcgtcaaagttttcctgatctctgccagcagcaaggatacaggccaattgtatgcagccctgcaccacaggattttagctttacggtcaagggttgagcaggaacaagaagcaaaaatgccagcaccggagcctggagccgcccctagcaacgaagaagacgatagcgacgacgatgacgtcctggccccatctggagccactgcggcgggagcgggcgatgagggggatggccaaaccactggatccacttag

SEQ ID NO: 171866 - DNA, 1500 bp, Artificial Sequence
  derived and/or modified sequence
atggctgacctggccaatgaggagaagccagccatcgcccctcctgtgtttgtgttccagaaggacaagggccagaagaggtctgctgggggcagcagccctgagggcggggaggacagcgacagagaagatggcaactactgcccccctgtgaagcgggagaggaccagcagcctgacccagtttcctcccagccagagcgaggagaggagcagcggcttccggctgaagccacccaccctcatccacggccaggcccccagcgctggcctgcccagccagaagcccaaggagcagcagaggtctgtgctgcggcctgctgtgctgcaggccccccagcccaaggccctgagccagacagtgcccagcagcggcaccaatggagtgtccctgcctgctgactgcaccggggctgtgcctgctgccagcccagacacagctgcctggaggagccccagcgaggccgcagatgaggtgtgtgccctggaggagaaggagccccagaagaatgaaagcagcaatgccagcgaggaggaggcctgtgagaagaaggaccctgccacccagcaggcctttgtgtttggccagaacctgcgggacagagtgaagctgatcaatgaatctgtggatgaggccgacatggagaatgccggccaccccagcgctgacacccccacagccaccaactacttcctgcagtacatcagcagcagcctggagaacagcaccaacagcgcagatgccagcagcaacaagtttgtgtttggccagaacatgtctgagcgggtgctgagcccccccaagctgaatgaggtgtccagtgatgccaacagagaaaatgctgctgctgagagcggcagcgagagcagcagccaggaggccaccccagagaaggagagcctggccgagagcgctgctgcctacaccaaggccacagccaggaagtgcctgctggagaaggtggaggtgatcactggagaggaggccgagagcaatgtgctgcagatgcagtgcaagctgtttgtgtttgacaagaccagccagagctgggtggagcggggccggggcctgctgcggctgaatgacatggccagcacagatgatggcaccctgcagagccggctggtgatgaggacccagggcagcctgcggctcatcctgaacaccaagctgtgggcccagatgcagattgacaaggccagcgagaagagcatccgcatcacagccatggacacagaggaccagggcgtgaaggtgttcctgatcagcgccagcagcaaggacaccggccagctgtatgctgccctgcaccaccgcatcctggccctgcggagccgggtggagcaggagcaggaggccaagatgcctgcccctgagcccggggccgcccccagcaatgaggaggatgacagtgatgatgatgatgtgctggcccccagcggggccacagctgctggagctggagatgaaggagatggccagaccaccggcagcacctag

SEQ ID NO: 171867 - DNA, 1194 bp, Artificial Sequence
  derived and/or modified sequence
gctgatgtgaccaaggccgagaagccagccatcgcccctcctgtgtttgtgttccagaaggacaagggccagaagaggtctgctgggggcagcagccctgagggcggagaagattctgaccgggaggatggcaactactgcccccctgtgaagcgggagaggaccagcagcctgacccagttcccccccagccagagcgaggagaggagcagcggcttccggctgaagccacccaccctcatccacggccaggcccccagcgctggcctgcccagccagaagcccaaggagcagcagaggtctgtgctgcggcctgctgtgctgcaggccccccagcccaaggccctgagccagacagtgcccagcagcggcaccaacggggtgtccctgcctgctgactgcacaggagctgtgcctgctgccagcccagacacagctgcctggaggagccccagcgaggccgcagatgaggtgtgtgccctggaggagaaggagccccagaagaatgaaagcagcaatgccagcgaggaggaggcctgtgagaagaaggaccctgccacccagcaggcctttgtgtttggccagaacctgcgggacagagtgaagctgatcaatgaatctgtggatgaagctgacatggagaatgccggccaccccagcgctgacacccccacagccaccaactacttcctgcagtacatcagcagcagcctggagaacagcaccaacagcgcagatgccagcagcaacaagtttgtgtttggccagaacatgtctgagcgggtgctgagcccccccaagctgaatgaggtgtccagtgatgccaaccgggagaatgctgctgctgagagcggcagcgagagcagcagccaggaggccaccccagagaaggagagcctggccgagagcgctgctgcctacaccaaggccacagccaggaagtgcctgctggagaaggtggaggtgatcaccggggaggaggccgagagcaatgtgctgcagatgcagtgcaagctgtttgtgtttgacaagaccagccagagctggtggctgctgcggcacccccaccccagccaccctgctgtgggcccctgcctgtgtggggagcagcctgccctgtgcccctgccccggcctgcccaactaccggcccggcaccccagcccagctgggcggcctgctggtgcgggtgtag

SEQ ID NO: 171868 - DNA, 1320 bp, Artificial Sequence
  derived and/or modified sequence
atggctgacctggccaatgaggaggagaggagcagcggcttccggctgaagccacccaccctcatccacggccaggcccccagcgctggcctgcccagccagaagcccaaggagcagcagaggtctgtgctgcggcctgctgtgctgcaggccccccagcccaaggccctgagccagacagtgcccagcagcggcaccaatggagtgtccctgcctgctgactgcaccggggctgtgcctgctgccagcccagacacagctgcctggaggagccccagcgaggccgcagatgaggtgtgtgccctggaggagaaggagccccagaagaatgaaagcagcaatgccagcgaggaggaggcctgtgagaagaaggaccctgccacccagcaggcctttgtgtttggccagaacctgcgggacagagtgaagctgatcaatgaatctgtggatgaggccgacatggagaatgccggccaccccagcgctgacacccccacagccaccaactacttcctgcagtacatcagcagcagcctggagaacagcaccaacagcgcagatgccagcagcaacaagtttgtgtttggccagaacatgtctgagcgggtgctgagcccccccaagctgaatgaggtgtccagtgatgccaacagagaaaatgctgctgctgagagcggcagcgagagcagcagccaggaggccaccccagagaaggagagcctggccgagagcgctgctgcctacaccaaggccacagccaggaagtgcctgctggagaaggtggaggtgatcactggagaggaggccgagagcaatgtgctgcagatgcagtgcaagctgtttgtgtttgacaagaccagccagagctgggtggagcggggccggggcctgctgcggctgaatgacatggccagcacagatgatggcaccctgcagagccggctggtgatgaggacccagggcagcctgcggctcatcctgaacaccaagctgtgggcccagatgcagattgacaaggccagcgagaagagcatccgcatcacagccatggacacagaggaccagggcgtgaaggtgttcctgatcagcgccagcagcaaggacaccggccagctgtatgctgccctgcaccaccgcatcctggccctgcggagccgggtggagcaggagcaggaggccaagatgcctgcccctgagcccggggccgcccccagcaatgaggaggatgacagtgatgatgatgatgtgctggcccccagcggggccacagctgctggagctggagatgaaggagatggccagaccaccggcagcacctag

SEQ ID NO: 171869 - DNA, 1500 bp, Artificial Sequence
  derived and/or modified sequence
atggccgacctggccaacgaggagaagcccgccatcgccccccccgtcttcgtgttccagaaagataagggacagaaaaggagcgcgggcggttcatccccggaaggtggggaagactctgatcgcgaagacgggaactactgtccccccgttaagcgagagagaaccagcagccttacgcagtttccaccctcacagtctgaggagaggtcttccggattccggctgaagccacctaccctcattcacggacaagccccctccgctggattaccatctcagaaaccaaaagagcagcagaggtccgtcctaaggcccgccgttctgcaggctcctcagcctaaagcactttcacagactgtgccgagctccggcacaaatggagtgtcactgccagcggactgcaccggcgcggtccctgctgccagccctgatactgccgcttggcgctctccttctgaagccgccgacgaggtgtgtgctctggaggagaaggaacctcagaagaacgagagctccaacgcttctgaggaggaagcttgcgaaaagaaggaccccgccactcaacaggccttcgtgtttgggcaaaaccttagagaccgagtcaaactgataaatgagtcagtggatgaagcagacatggaaaacgctggccatccatctgctgacactcccacggccaccaattatttcctccagtacatcagttcaagcctcgaaaattctacaaactccgcagacgcctcctccaacaagttcgtgtttggacaaaatatgagcgaaagggtcctgagtccaccgaagctgaatgaagtgtcttctgacgcaaaccgtgagaatgccgctgccgagagcgggagtgaaagtagcagccaggaagccacacccgagaaagaatcattggccgagagtgcggctgcctatactaaggccacggctcgtaagtgcctgctggaaaaggtggaagtgatcacaggggaggaagccgaatccaacgtgctccagatgcagtgcaagctgtttgtgttcgacaaaactagccagtcttgggtggaacggggcagaggcttgttgcggctcaacgatatggcctcaactgacgatgggacattacaatcccgcctggtgatgaggacacagggaagcctcaggctgattctcaacaccaaactctgggcacagatgcagattgacaaagcaagcgagaagtccatacggatcaccgccatggacacagaggatcaaggggtcaaagtcttcctgatcagcgccagttcgaaggatacagggcaactgtacgctgctctgcaccataggatcctagccttgagaagtagagtagaacaggagcaggaagccaagatgcctgctcctgagcccggcgccgctccatccaacgaggaggatgattctgatgacgacgacgtgctcgctcccagcggcgctacggcagcaggagctggagacgagggtgatgggcagactacaggatcaacttag

SEQ ID NO: 171870 - DNA, 1194 bp, Artificial Sequence
  derived and/or modified sequence
gccgacgtgaccaaggccgagaagcccgccatcgccccccccgtgttcgtttttcagaaggataagggtcagaagcggtcagccggcggatcctctcctgaggggggggaggactcagatcgagaggatgggaactactgtccaccagtcaagcgtgagcggacctcctccctgacacagtttcccccttcccagtccgaggaaaggtcctcgggttttcgccttaaacccccaaccttaatccatggccaggctccttcggctggtttaccctcccagaaaccaaaggagcagcagcggagcgtgctgcgccctgccgtgctccaggctccacaacccaaagctctgtcacaaacggtgccttcttctggcaccaacggggtgagtttgccagccgactgtacaggcgcagtgccagcggccagcccagacacagctgcctggcgttctccttccgaggctgccgatgaggtctgtgcgctagaggaaaaggagccacagaagaacgagtcttctaacgcaagtgaggaagaagcttgcgagaaaaaagacccggccactcagcaggcttttgtgtttgggcaaaatctgagagatcgcgtcaagttaatcaatgaatcagtggacgaagcagatatggagaatgcagggcacccttccgctgatactcccaccgcaactaattattttctgcagtacataagcagcagtctagaaaattccaccaatagcgctgatgcttcttctaataagtttgttttcggccagaatatgagcgagagggtgcttagtcccccgaagttgaacgaggtgagctcagatgccaaccgtgaaaatgctgccgcagaaagcggctcagaatcctcgtcacaggaggccactccagagaaagagtccctggccgaatcggccgccgcctacacaaaggccactgcccgtaaatgtctgttggagaaggtcgaagtgattaccggcgaggaagccgagtccaacgtccttcaaatgcaatgtaagctgttcgtgtttgataaaactagccaaagctggtggctgctgaggcatccacacccctctcaccctgccgttggtccttgtctttgcggcgaacagccggccctttgtccgtgcccaggcttgcccaattaccgacccggtaccccggctcaattgggcggtctcctggtgcgggtctag

SEQ ID NO: 171871 - DNA, 1320 bp, Artificial Sequence
  derived and/or modified sequence
atggccgacctggccaacgaggaggagcggagcagcggcttccggttgaaaccgcccacgttgatacacggccaggctcccagcgcaggactccctagtcagaaacctaaggagcagcagagaagcgtacttaggccagcagtgcttcaggcaccccagccaaaggctcttagtcaaactgtgccttcctcaggtaccaatggcgtgagtctgcccgctgactgcaccggtgcggtccctgccgcgagcccagacaccgcagcatggagatcaccaagcgaggcggccgatgaagtttgcgccctggaggagaaggaaccacaaaaaaacgagtctagcaacgccagcgaagaagaggcctgcgagaaaaaggaccctgcaacccaacaagctttcgtgtttggtcaaaacctgcgtgacagggtaaagctcataaatgaatcagttgatgaggccgacatggaaaatgccgggcacccttcagcagacacccctacggctaccaactactttctgcaatacattagcagctctcttgaaaactctaccaactccgctgacgcttcctcaaacaagttcgtgtttggccaaaacatgagcgagagggttttaagcccacccaaactgaacgaggtgtccagcgatgcgaatcgagaaaatgcggctgctgaatccggctccgagtcttctagtcaggaggctactcctgagaaggagagtctagcggagtcagccgcagcctatacaaaagccaccgccagaaagtgtctgttggaaaaggtggaagtgatcacaggagaggaggccgagtctaacgtcctgcagatgcagtgcaaacttttcgtcttcgacaagacaagtcagagctgggttgaacgggggcggggtctgctgagactaaacgacatggcctccacggacgatggcactttgcagtctaggttagtgatgcggactcaggggagtctccggttgattctgaataccaagctgtgggcgcagatgcaaatcgacaaagcttctgaaaaaagcatacgcattactgctatggacactgaagaccagggggtgaaagtcttcttgatcagcgcaagcagcaaggacacaggacaactctacgcggctcttcatcatcgcattcttgccctgagatcccgcgtcgagcaggagcaggaggcaaagatgcccgcccccgagccgggcgctgctccgtcaaatgaagaggatgactctgacgatgatgacgtcttggccccatcgggggccaccgccgccggcgccggtgatgaaggtgacgggcagaccacaggtagcacctag

SEQ ID NO: 171872 - DNA, 1500 bp, Artificial Sequence
  derived and/or modified sequence
atggctgatctggccaacgaagaaaagcccgctatcgcccctccagtcttcgtgttccagaaggataagggacagaagcgaagcgcgggagggtccagtcctgaaggcggagaggacagcgacagggaggacgggaattattgccctcctgtgaagagggagaggacctcaagcctcacacagttccccccaagccagagcgaagaacggtcaagtggattccgacttaaaccgcctacactaattcacggacaagcaccatctgccggactcccaagccaaaagccaaaagagcagcaacgctccgtgctgagaccagcagttctgcaggccccacagcccaaggctctatctcaaaccgtcccttcaagcggcacgaacggagtgtctctgccagctgactgcaccggtgcagttcctgctgcctctcctgacacggctgcatggcggagtccatccgaggcagccgacgaggtgtgtgctctggaggaaaaggaacctcagaaaaatgagagcagcaatgcatctgaggaagaagcctgcgagaaaaaggaccctgctacccagcaggccttcgtgttcgggcaaaacctgcgggaccgagtgaaactcattaacgagagcgttgacgaagcagacatggaaaacgccggacacccaagtgccgatactccgacggctacaaactatttcctgcagtacatttcatcttcactggagaattctacgaatagcgcagatgcctcctccaataagttcgtgttcggtcagaatatgtctgaaagggtgctgagcccaccaaaattgaacgaagtgtcgagcgacgcaaatcgcgaaaacgctgccgcagaaagtgggagcgaaagctctagccaagaggctaccccggagaaagagagtctcgccgaatcggctgcagcctacacaaaggccaccgcacgaaagtgccttctggagaaagtcgaagtgatcacaggtgaagaggccgagtcgaatgtcctccagatgcagtgtaagcttttcgttttcgataaaaccagccagagttgggtagaacgtggacgcggacttctgcgactgaacgatatggcctccacagatgatggaaccctacagtcccgcctcgtgatgaggacccagggtagcctgagacttattctgaataccaagctgtgggctcagatgcagattgataaggccagcgagaaatcgattcggattactgcaatggacaccgaggaccagggagtgaaggtgttcctgatcagcgcctcctccaaggatacggggcagctatatgctgccctccaccataggattctagctttgagatcacgggtcgagcaggaacaagaagcaaagatgccagcgcctgagccaggtgccgcacctagcaacgaagaggacgactctgatgatgacgacgtgttagccccaagcggcgcaacagctgcaggggctggagatgagggagatggccaaactaccgggtccacgtag

SEQ ID NO: 171873 - DNA, 1194 bp, Artificial Sequence
  derived and/or modified sequence
gctgacgtgactaaggccgaaaagcctgccattgcccctcctgtcttcgtcttccagaaagataaaggtcaaaaaaggagcgctggaggaagctcaccagaaggaggtgaagactctgacagagaagacggtaactactgtcccccagtgaagagggagcgaacgtcatcactgacacagtttccaccgtcccagagtgaggagcgttcctcaggctttaggctcaagccgccaacactgattcacggacaggccccaagtgctggcctgccatcacagaaaccaaaagagcaacagcggtctgtgcttcggcctgcagtcctgcaagcccctcagcctaaagccctgtctcagacggtcccgtcgtccgggacaaatggcgtgtccctgccagcagattgtaccggtgcggtgccagcggctagtcctgatactgccgcatggcggagtccaagcgaagcagcggatgaagtatgcgccctcgaagaaaaggaaccacaaaaaaatgagagctcaaacgcttctgaggaggaggcatgtgaaaagaaagaccccgcaacccaacaagctttcgtgtttggtcagaatctcagagatagggtgaaactgattaacgagtctgtggatgaggctgatatggagaacgcaggacatccttcggcagacacgcccactgcaactaactacttccttcagtatattagttccagccttgaaaattcaaccaacagcgccgacgccagttcgaacaagttcgtctttgggcaaaatatgtctgagagagtcctgagtccgcctaagcttaacgaagtgtcttccgacgctaatcgggagaatgcagctgccgaatcaggatccgagagctcaagccaggaggccacccccgaaaaggagtccttagccgagtccgctgctgcgtacactaaggccaccgctagaaaatgtctgctggagaaagttgaagtaattactggtgaggaagcggaatctaatgtgctgcaaatgcaatgcaaactgttcgtgttcgacaaaacaagccaaagctggtggctcctacgacaccctcatccatcacatcctgctgtgggcccttgcctgtgtggggagcagcctgccctgtgcccatgtcctgggctgcctaattaccgtccagggacgcccgcacagctgggcggattgctcgttagggtgtag

SEQ ID NO: 171874 - DNA, 1320 bp, Artificial Sequence
  derived and/or modified sequence
atggctgacctggccaatgaggaggaaaggtcgtcaggcttccgacttaaaccacctactttgattcacggccaagcaccttcagccggtctaccttctcaaaagcccaaagaacaacaaagaagtgtgctgaggcctgcagtccttcaagcaccccagccaaaagctctcagccagacagtgccctctagcggtacgaacggagtatcactgcccgctgactgtaccggagccgtccccgcagccagtcccgataccgctgcttggcgtagcccgagtgaggcagccgatgaggtgtgtgccctggaagagaaggaacctcagaaaaatgagagttctaacgcctcagaggaagaagcgtgtgagaagaaagatcccgcaactcagcaggcctttgtatttggacagaatctgagagaccgggtgaaacttatcaatgaatctgttgacgaggccgacatggaaaacgcaggccacccctccgccgacacacctactgcgactaattactttttgcagtatatttcaagtagcctagaaaactcaaccaatagtgctgacgcgagcagcaacaaatttgtcttcggccagaatatgtctgagagggtgctgtcccccccaaaattgaatgaagtctcatcagatgccaacagggaaaatgctgcggctgaatctggcagtgagtcttccagccaggaggcgactcctgaaaaggaatctctggccgaatccgctgctgcgtatacaaaggctactgccagaaaatgtctcttagagaaagtggaagtgatcactggtgaagaggcggagtccaatgtgcttcaaatgcaatgtaaactgttcgtgttcgacaaaacttcccagtcctgggtagaacgtggccgaggcttgctgcgactgaacgacatggcttctacggatgatggcaccttgcagtcccgccttgtaatgaggacccagggttcactcaggctgattctgaacacgaagctatgggcccaaatgcagatagacaaagcgagcgaaaagagcattcgcataacggccatggataccgaggaccaaggagtgaaagtttttttgatctcggcgtcatccaaagacaccgggcaactctacgccgctcttcaccatcgcatcttagcgttgaggagtagggtggagcaggaacaagaggcaaaaatgccagcacccgagcccggtgccgctccttctaatgaggaagatgacagtgatgacgacgatgtactcgccccttccggcgcaacggccgctggagccggagatgaaggggacgggcagacaacgggttctacgtag

SEQ ID NO: 171875 - DNA, 1500 bp, Artificial Sequence
  derived and/or modified sequence
atggccgacctggccaatgaagaaaagcccgcaatcgcgccacctgtctttgtgtttcagaaggacaaagggcaaaagcgaagtgctggggggagctcacctgagggaggcgaagattctgatcgggaggacggcaactattgtccgcctgtaaagcgagagcgaacgagtagtttaacccagtttcctcccagccaatccgaagaacgctcttctggatttagattaaaaccccctactttgatccatggtcaggctcctagcgccggtctaccctcgcaaaaaccaaaagagcaacagcgcagtgtcttgcgtccagccgtcttgcaagcgcctcagcctaaggcactgagccagaccgtgcctagctctgggactaatggcgtgtcactaccagccgactgcacaggcgccgtgcccgccgcttcgcctgatactgccgcttggcggagtccttccgaggcagccgacgaggtctgtgcgcttgaagagaaggaacctcaaaagaacgagtcttcgaacgccagtgaggaggaagcttgtgaaaaaaaagatccagcgactcagcaggcatttgtgttcgggcaaaatctgagagacagagttaagcttattaatgaatccgtagacgaggcagacatggaaaatgccggacatccatccgccgatacaccaacagccaccaattatttcctacagtatatctcctcatcactggagaactcaaccaacagcgcagatgcttcaagtaacaaatttgtttttggccagaatatgtctgagagggtactaagccctcctaagctgaatgaggtgagctctgacgcaaatcgggagaatgctgcggcagaatctggatcagaatccagctcacaagaagcgacgcctgagaaggaatctctggctgaaagcgcagctgcgtataccaaggctaccgcacgtaagtgtctactagagaaggtcgaagtgattaccggcgaggaagcggaaagcaatgtccttcagatgcagtgtaagctgtttgtgtttgacaagacaagccagagttgggttgaacggggaaggggtctcctgagactcaacgacatggcctccactgacgatggcaccttgcagagtcgattggtcatgcgcacccaaggaagtctgcgcttgattctgaacactaaactgtgggcacaaatgcagatcgacaaagcatcagagaaatccattagaattacagccatggacacagaggaccagggtgtgaaagtgttcttaatttccgcctcctctaaagataccggacagttatacgctgccttacaccacaggatcctcgccctgaggtcgagagttgagcaggagcaagaagctaagatgccagcccccgaaccaggggcagctccctcgaacgaggaggacgattctgatgacgacgatgtgttagccccctcaggcgccaccgcagccggcgcgggtgatgaaggagatggccagacaacaggctcgacgtag

SEQ ID NO: 171876 - DNA, 1500 bp, Artificial Sequence
  derived and/or modified sequence
atggccgatctagcaaatgaggagaaaccagccatagcaccgcccgtgtttgtgtttcaaaaagataagggacagaaacggagcgccggaggcagttcacccgaaggtggtgaggactcagatcgtgaggacggaaattattgcccccccgtaaaacgcgaaagaaccagctcactgacccagtttcctccaagtcagagtgaagagcgtagctccggatttagacttaagcccccaacccttatccatggacaggccccaagcgcaggtctaccaagtcagaagccaaaggagcagcagaggtccgtgctgagaccggcagtcctgcaagccccacagcccaaggccctctcgcagaccgtgccctccagcggcacaaacggcgtgtccttacccgcagattgcaccggtgcggtccctgccgccagccctgatacagctgcttggcgatctcccagtgaagcagcagacgaagtgtgtgcccttgaggagaaggaaccacagaagaacgagtcctctaatgcctccgaggaagaagcgtgcgaaaagaaagacccagctacacagcaggcattcgtgttcggccagaacctcagagatagagtaaagctgataaacgagagcgtggatgaggcagatatggagaatgctggccacccgagtgcggacactccaactgcaacaaactatttccttcagtacatttcatcgtctctcgaaaattcgacgaacagtgccgatgcctcttcaaataaatttgtgtttggacaaaatatgagcgagagagtcttgagtcctcccaaactgaacgaagtcagctcggatgcaaatcgagaaaacgctgccgcagagtctgggtctgaatcaagtagtcaggaagccacccccgagaaggagtcactagccgaatccgccgcggcttatacaaaagctactgcaagaaaatgcttgttggagaaagtagaggtgattacaggagaagaggctgaaagtaatgtgctccagatgcaatgtaaattgttcgtgtttgacaaaacatcccagagctgggtcgaacgtggcagaggccttcttaggctgaatgatatggcctcaacagacgatggaaccctccagtccagactcgtgatgcggactcaaggcagtcttaggctgatactcaacacaaaactgtgggcccagatgcagattgataaggcctccgaaaaatcaatcagaatcactgccatggacactgaagaccaaggcgtgaaggtcttcctgatttcagcatctagcaaagataccggacagctgtatgcagcccttcaccaccggatcctcgcccttagatctagagtcgaacaagagcaggaggctaagatgcccgccccagaacccggagctgccccatcaaatgaggaggatgattccgacgatgatgatgtgctggcacccagtggagcaacggccgccggagcgggagacgaaggtgatggacaaacaactgggtctacgtag

SEQ ID NO: 171877 - DNA, 3194 bp, Artificial Sequence
  derived and/or modified sequence
agatggctcgtgcgcaggtgcgtgctaggagcgcggctcgtcagggcaggctgctctgcagggcaggcgatccggggctcgcctccgcgcggcattcagcgcgcaggcgcgagctggccgcctcacacggagtcggcttgttaagtgcgcacgcgcgggagtttctggcagaaagcaggcgagcctgggccggcgcggggccttgtgggagggcttaaggaagtaaaatggcggacctggcgaacgaagaaaagcctgccattgctccgcccgtctttgtgtttcagaaggataaaggacaaaagaggtcagctggcggctccagtcctgaaggcggagaagattctgacagagaagatggaaattactgccctcctgtcaagcgagaaagaacatcctctttaacccagttcccaccctcacagtcagaggaaaggagcagtggcttccggttgaagccaccaacgctgatccacggccaagcccccagcgcaggtctgccaagccagaagcccaaggagcagcagcggagcgtgcttcgcccggcagtgttacaagctccgcagccaaaggcgctgtcccagactgtccccagcagtggcaccaacggggtcagcctcccagcagactgcacgggggcagtgcccgcagcatcccctgacactgctgcatggagaagtccttccgaagctgccgatgaggtgtgtgcacttgaggagaaagagccccagaaaaatgagtccagcaatgcctctgaagaggaagcctgtgagaaaaaagaccccgccacacagcaagcctttgtatttgggcagaacttgagggacagagttaagctgataaatgagagcgtggacgaagccgacatggagaatgctggacaccccagcgcagacacgccaaccgcaacgaactatttcctccagtatatcagttccagtttagagaactcaaccaatagtgccgacgcctccagcaacaaatttgtatttggccagaacatgagcgagcgagttttgagccccccaaaattaaacgaggtcagttcagatgccaacagggaaaatgcagctgccgagtcagggtctgagtcctcgtcccaggaggccacccctgagaaagagtccctggctgagtcggcagccgcctacaccaaggcaacagcgcggaagtgtttgttggaaaaagtggaagtcatcaccggggaggaggcggagagcaatgtgttacagatgcagtgcaagctgtttgtctttgacaagacctcacagtcctgggtggagagaggccgggggctgctcagactcaatgacatggcgtccaccgatgacggcacactacagtcccgactagtgatgcggacccaggggagcctgcgactgatcctcaacaccaagctgtgggcccagatgcagatcgacaaggccagcgagaagagcattcgcatcacagccatggacaccgaggaccagggcgtgaaggtcttcctgatctcggccagctccaaggacacaggtcagttgtatgcagccctgcaccaccgcatcctggccctgcgcagccgcgtggagcaggagcaggaggccaagatgcccgcgcctgagcctggggcagccccatccaacgaggaggacgacagcgacgatgacgatgtcctggctccttcaggggccaccgcagctggtgctggtgacgaaggggacgggcagacgaccgggagcacatagcggccgggagcccggctgcacaccaggctgctgctttgtccgtctatccacccgcccacccgcccccaccccaccggcagcgtccaggtgcggggccgggaaccacacaccccactgggccggccacagtctggacccgcacgtcctgttcaaaagcagactcgggaactgcctgaatgtggtttgggacacgagacctcatcatattgatgagcgaacaaacaagaacatttcctccctcccctcctttgaattgaaatggcacattaagacttgtcacggcttctcactgggactggagacctcgttccttcaccccgcgtgtcgccagcctctgggtccagccagagcccctggcttctccgccacccacacccttcccaccctgctgtggggccctgcctttgtggggagcagccagccctctgcccctgcccagggctccccaactataggcctgggacccccgcccagcttggggggctgctcgtacgagtgtagacactgggcccattggacgtgctgttaactactatcttcatttcccacttcccctctctgattgggggtgtatattttacatctttttttctttttattttcgaaggctttgttttggtttcttaggttaagatgctctcgagcgttgagcaggcacagctctgtcgaggtccctgtcccccacctgtggttctggcctctgaggttgggggactacttgtttcccaccccaggttcctccaggccaagtcatggggtgatgaggagttggggccctgtctgtcctaggcctggagagtgcctgtctgggaaaaggtcactggacctggaagggtccccagggtcccctgactcccgtctccatctgtcacgtggttcaccatcatcaggcaccaggcgcaaactgcttcccgctgttggccatcccttccccagccacaggtgtccctgcccccaggacagtccagggccaggggcttctgtgagaggcagagggggaccctcaccaaatcttggtggaagagcccaggggctggtcccagaacaggcagtctcacaagcacgcagcacactggagtggacgcctgtgcccacccgagcctggagcatggccaagagccagcttgcaccacccacctgggaggccgaggaggaggtcccctgggcacagggcctctttgggacttcagaggaaatctcccagtcccactctcggagggttaagagaaggcctcctgcagctgtgccgtccacacctctaggtcgccagagccctggcccccagcccccagcaagcctgagcccgggaagaaccagaggccctcccgagagacccagtcacacgtctctgctttaagccttagccagctagtgacgagtacaacgagataacgcccatgtgttttggaacatttatgtaagattgtcatatgaaatgtatttgggaactacattaaacttttaact

SEQ ID NO: 171878 - DNA, 1194 bp, Artificial Sequence
  derived and/or modified sequence
gcagatgtgactaaagcagaaaagcctgccattgctccgcccgtctttgtgtttcagaaggataaaggacaaaagaggtcagctggcggctccagtcctgaaggcggagaagattctgacagagaagatggaaattactgccctcctgtcaagcgagaaagaacatcctctttaacccagttcccaccctcacagtcagaggaaaggagcagtggcttccggttgaagccaccaacgctgatccacggccaagcccccagcgcaggtctgccaagccagaagcccaaggagcagcagcggagcgtgcttcgcccggcagtgttacaagctccgcagccaaaggcgctgtcccagactgtccccagcagtggcaccaacggggtcagcctcccagcagactgcacgggggcagtgcccgcagcatcccctgacactgctgcatggagaagtccttccgaagctgccgatgaggtgtgtgcacttgaggagaaagagccccagaaaaatgagtccagcaatgcctctgaagaggaagcctgtgagaaaaaagaccccgccacacagcaagcctttgtatttgggcagaacttgagggacagagttaagctgataaatgagagcgtggacgaagccgacatggagaatgctggacaccccagcgcagacacgccaaccgcaacgaactatttcctccagtatatcagttccagtttagagaactcaaccaatagtgccgacgcctccagcaacaaatttgtatttggccagaacatgagcgagcgagttttgagccccccaaaattaaacgaggtcagttcagatgccaacagggaaaatgcagctgccgagtcagggtctgagtcctcgtcccaggaggccacccctgagaaagagtccctggctgagtcggcagccgcctacaccaaggcaacagcgcggaagtgtttgttggaaaaagtggaagtcatcaccggggaggaggcggagagcaatgtgttacagatgcagtgcaagctgtttgtctttgacaagacctcacagtcctggtggcttctccgccacccacacccttcccaccctgctgtggggccctgcctttgtggggagcagccagccctctgcccctgcccagggctccccaactataggcctgggacccccgcccagcttggggggctgctcgtacgagtgtag

SEQ ID NO: 171879 - DNA, 1670 bp, Artificial Sequence
  derived and/or modified sequence
agaaagcaggcgagcctgggccggcgcggggccttgtgggagggcttaaggaagtaaaatggcggacctggcgaacgaagaggaaaggagcagtggcttccggttgaagccaccaacgctgatccacggccaagcccccagcgcaggtctgccaagccagaagcccaaggagcagcagcggagcgtgcttcgcccggcagtgttacaagctccgcagccaaaggcgctgtcccagactgtccccagcagtggcaccaacggggtcagcctcccagcagactgcacgggggcagtgcccgcagcatcccctgacactgctgcatggagaagtccttccgaagctgccgatgaggtgtgtgcacttgaggagaaagagccccagaaaaatgagtccagcaatgcctctgaagaggaagcctgtgagaaaaaagaccccgccacacagcaagcctttgtatttgggcagaacttgagggacagagttaagctgataaatgagagcgtggacgaagccgacatggagaatgctggacaccccagcgcagacacgccaaccgcaacgaactatttcctccagtatatcagttccagtttagagaactcaaccaatagtgccgacgcctccagcaacaaatttgtatttggccagaacatgagcgagcgagttttgagccccccaaaattaaacgaggtcagttcagatgccaacagggaaaatgcagctgccgagtcagggtctgagtcctcgtcccaggaggccacccctgagaaagagtccctggctgagtcggcagccgcctacaccaaggcaacagcgcggaagtgtttgttggaaaaagtggaagtcatcaccggggaggaggcggagagcaatgtgttacagatgcagtgcaagctgtttgtctttgacaagacctcacagtcctgggtggagagaggccgggggctgctcagactcaatgacatggcgtccaccgatgacggcacactacagtcccgactagtgatgcggacccaggggagcctgcgactgatcctcaacaccaagctgtgggcccagatgcagatcgacaaggccagcgagaagagcattcgcatcacagccatggacaccgaggaccagggcgtgaaggtcttcctgatctcggccagctccaaggacacaggtcagttgtatgcagccctgcaccaccgcatcctggccctgcgcagccgcgtggagcaggagcaggaggccaagatgcccgcgcctgagcctggggcagccccatccaacgaggaggacgacagcgacgatgacgatgtcctggctccttcaggggccaccgcagctggtgctggtgacgaaggggacgggcagacgaccgggagcacatagcggccgggagcccggctgcacaccaggctgctgctttgtccgtctatccacccgcccacccgcccccaccccaccggcagcgtccaggtgcggggccgggaaccacacaccccactgggccggccacagtctggacccgcacgtcctgttcaaaagcagactcgggaactgcctgaatgtggtttgggacacgagacctcatcatattgatgagcgaacaaacaagaacatttcctccctcccctcctttgaattgaaatggcacattaagacttgtcacggcttctcactg

SEQ ID NO: 171880 - DNA, 1500 bp, Artificial Sequence
  derived and/or modified sequence
atggccgacctggccaacgaggagaagcccgccatcgccccccccgtgttcgtgttccagaaggacaagggccagaagagaagcgccggcggcagcagccccgagggcggcgaggacagcgacagagaggacggcaactactgcccccccgtgaagagagagagaaccagcagcctgacccagttcccccccagccagagcgaggagagaagcagcggcttcagactgaagccccccaccctgatccacggccaggcccccagcgccggcctgcccagccagaagcccaaggagcagcagagaagcgtgctgagacccgccgtgctgcaggccccccagcccaaggccctgagccagaccgtgcccagcagcggcaccaacggcgtgagcctgcccgccgactgcaccggcgccgtgcccgccgccagccccgacaccgccgcctggagaagccccagcgaggccgccgacgaggtgtgcgccctggaggagaaggagccccagaagaacgagagcagcaacgccagcgaggaggaggcctgcgagaagaaggaccccgccacccagcaggccttcgtgttcggccagaacctgagagacagagtgaagctgatcaacgagagcgtggacgaggccgacatggagaacgccggccaccccagcgccgacacccccaccgccaccaactacttcctgcagtacatcagcagcagcctggagaacagcaccaacagcgccgacgccagcagcaacaagttcgtgttcggccagaacatgagcgagagagtgctgagcccccccaagctgaacgaggtgagcagcgacgccaacagagagaacgccgccgccgagagcggcagcgagagcagcagccaggaggccacccccgagaaggagagcctggccgagagcgccgccgcctacaccaaggccaccgccagaaagtgcctgctggagaaggtggaggtgatcaccggcgaggaggccgagagcaacgtgctgcagatgcagtgcaagctgttcgtgttcgacaagaccagccagagctgggtggagagaggcagaggcctgctgagactgaacgacatggccagcaccgacgacggcaccctgcagagcagactggtgatgagaacccagggcagcctgagactgatcctgaacaccaagctgtgggcccagatgcagatcgacaaggccagcgagaagagcatcagaatcaccgccatggacaccgaggaccagggcgtgaaggtgttcctgatcagcgccagcagcaaggacaccggccagctgtacgccgccctgcaccacagaatcctggccctgagaagcagagtggagcaggagcaggaggccaagatgcccgcccccgagcccggcgccgcccccagcaacgaggaggacgacagcgacgacgacgacgtgctggcccccagcggcgccaccgccgccggcgccggcgacgagggcgacggccagaccaccggcagcacctag

SEQ ID NO: 171881 - DNA, 1194 bp, Artificial Sequence
  derived and/or modified sequence
gccgacgtgaccaaggccgagaagcccgccatcgccccccccgtgttcgtgttccagaaggacaagggccagaagagaagcgccggcggcagcagccccgagggcggcgaggacagcgacagagaggacggcaactactgcccccccgtgaagagagagagaaccagcagcctgacccagttcccccccagccagagcgaggagagaagcagcggcttcagactgaagccccccaccctgatccacggccaggcccccagcgccggcctgcccagccagaagcccaaggagcagcagagaagcgtgctgagacccgccgtgctgcaggccccccagcccaaggccctgagccagaccgtgcccagcagcggcaccaacggcgtgagcctgcccgccgactgcaccggcgccgtgcccgccgccagccccgacaccgccgcctggagaagccccagcgaggccgccgacgaggtgtgcgccctggaggagaaggagccccagaagaacgagagcagcaacgccagcgaggaggaggcctgcgagaagaaggaccccgccacccagcaggccttcgtgttcggccagaacctgagagacagagtgaagctgatcaacgagagcgtggacgaggccgacatggagaacgccggccaccccagcgccgacacccccaccgccaccaactacttcctgcagtacatcagcagcagcctggagaacagcaccaacagcgccgacgccagcagcaacaagttcgtgttcggccagaacatgagcgagagagtgctgagcccccccaagctgaacgaggtgagcagcgacgccaacagagagaacgccgccgccgagagcggcagcgagagcagcagccaggaggccacccccgagaaggagagcctggccgagagcgccgccgcctacaccaaggccaccgccagaaagtgcctgctggagaaggtggaggtgatcaccggcgaggaggccgagagcaacgtgctgcagatgcagtgcaagctgttcgtgttcgacaagaccagccagagctggtggctgctgagacacccccaccccagccaccccgccgtgggcccctgcctgtgcggcgagcagcccgccctgtgcccctgccccggcctgcccaactacagacccggcacccccgcccagctgggcggcctgctggtgagagtgtag

SEQ ID NO: 171882 - DNA, 1320 bp, Artificial Sequence
  derived and/or modified sequence
atggccgacctggccaacgaggaggagagaagcagcggcttcagactgaagccccccaccctgatccacggccaggcccccagcgccggcctgcccagccagaagcccaaggagcagcagagaagcgtgctgagacccgccgtgctgcaggccccccagcccaaggccctgagccagaccgtgcccagcagcggcaccaacggcgtgagcctgcccgccgactgcaccggcgccgtgcccgccgccagccccgacaccgccgcctggagaagccccagcgaggccgccgacgaggtgtgcgccctggaggagaaggagccccagaagaacgagagcagcaacgccagcgaggaggaggcctgcgagaagaaggaccccgccacccagcaggccttcgtgttcggccagaacctgagagacagagtgaagctgatcaacgagagcgtggacgaggccgacatggagaacgccggccaccccagcgccgacacccccaccgccaccaactacttcctgcagtacatcagcagcagcctggagaacagcaccaacagcgccgacgccagcagcaacaagttcgtgttcggccagaacatgagcgagagagtgctgagcccccccaagctgaacgaggtgagcagcgacgccaacagagagaacgccgccgccgagagcggcagcgagagcagcagccaggaggccacccccgagaaggagagcctggccgagagcgccgccgcctacaccaaggccaccgccagaaagtgcctgctggagaaggtggaggtgatcaccggcgaggaggccgagagcaacgtgctgcagatgcagtgcaagctgttcgtgttcgacaagaccagccagagctgggtggagagaggcagaggcctgctgagactgaacgacatggccagcaccgacgacggcaccctgcagagcagactggtgatgagaacccagggcagcctgagactgatcctgaacaccaagctgtgggcccagatgcagatcgacaaggccagcgagaagagcatcagaatcaccgccatggacaccgaggaccagggcgtgaaggtgttcctgatcagcgccagcagcaaggacaccggccagctgtacgccgccctgcaccacagaatcctggccctgagaagcagagtggagcaggagcaggaggccaagatgcccgcccccgagcccggcgccgcccccagcaacgaggaggacgacagcgacgacgacgacgtgctggcccccagcggcgccaccgccgccggcgccggcgacgagggcgacggccagaccaccggcagcacctag

SEQ ID NO: 171883 - protein, 567 aa, Artificial Sequence
  derived and/or modified sequence
MADLANEEKPAIAPPVFVFQKDKGQKSPAEQKNLSDSGEEPRGEAEAPHHGTGHPESAGEHALEPPAPAGASASTPPPPAPEAQLPPFPRELAGRSAGGSSPEGGEDSDREDGNYCPPVKRERTSSLTQFPPSQSEERSSGFRLKPPTLIHGQAPSAGLPSQKPKEQQRSVLRPAVLQAPQPKALSQTVPSSGTNGVSLPADCTGAVPAASPDTAAWRSPSEAADEVCALEEKEPQKNESSNASEEEACEKKDPATQQAFVFGQNLRDRVKLINESVDEADMENAGHPSADTPTATNYFLQYISSSLENSTNSADASSNKFVFGQNMSERVLSPPKLNEVSSDANRENAAAESGSESSSQEATPEKESLAESAAAYTKATARKCLLEKVEVITGEEAESNVLQMQCKLFVFDKTSQSWVERGRGLLRLNDMASTDDGTLQSRLVMRTQGSLRLILNTKLWAQMQIDKASEKSIRITAMDTEDQGVKVFLISASSKDTGQLYAALHHRILALRSRVEQEQEAKMPAPEPGAAPSNEEDDSDDDDVLAPSGATAAGAGDEGDGQTTGST

SEQ ID NO: 171884 - DNA, 1704 bp, Artificial Sequence
  derived and/or modified sequence
atggccgacctggctaatgaagaaaagcccgcgatcgctcccccagttttcgttttccagaaggataagggtcagaagagcccagccgagcagaagaatttgtccgactcaggggaagaaccccggggagaggctgaagctccacaccacggcacaggccatcccgaatctgccggagagcatgcgctcgagcccccagctccagccggcgcatctgccagtacaccaccccctcctgccccagaggcacaactgcccccattcccaagggagcttgctggtcggagcgccgggggatcttctccagaaggcggggaagacagcgatcgggaggacggcaattactgtcccccagtgaagcgcgaaagaacttcgtccctcacacagttcccgccttcacagagcgaggaaagatcctccggatttaggttgaagccccctacacttattcacggacaggccccaagcgcaggcttgccgagccaaaaaccaaaggagcagcagcgctccgtcttgagaccagccgtgcttcaggctcctcagccgaaggccctgtcacagacggtgccttcatctggtacaaatggtgtatctttaccagccgattgtaccggtgctgtccccgccgcctcgcccgacacagcagcatggcgctcgccctccgaggccgccgatgaagtctgcgccttggaggagaaagagccacaaaaaaacgagtcttctaacgcttccgaagaagaggcatgtgaaaagaaggatcccgccactcaacaggcctttgtcttcggacaaaatctgagggatcgcgtcaagctgatcaacgaatccgtagatgaagcagatatggagaatgccggacacccgagtgcagacacccccaccgctactaactattttcttcagtacatttcgtcaagcctggaaaacagcacaaactccgctgatgcatcttcaaacaagtttgtgttcgggcagaacatgagcgaacgagtgctttcccccccaaagctgaacgaggtctcctccgacgctaatcgcgagaatgccgctgcagagtctggaagcgaatccagttcacaggaagccacgcctgagaaagaaagtcttgccgaatctgcagcagcgtatacaaaggcgacagcacgaaagtgtttgctggagaaagtggaggtgataacaggggaagaggctgagagcaatgtgctgcagatgcagtgtaaattgttcgtgttcgacaagacttcgcagtcttgggtggaacgcggacggggcctgctgagactgaatgacatggcttccacggacgacggtacactacagagccggttagtgatgcgcacccaggggagtctgcggctcattttgaatacaaagctgtgggcacaaatgcagattgacaaggccagcgaaaaatcgatccggatcactgccatggacaccgaggatcagggggtcaaagtgtttctcatcagtgcgtcatctaaggacaccggtcaactgtacgctgccctacatcatcggatcctggctctgcgcagcagggtggaacaggagcaggaagcgaagatgccagcccctgagccaggggccgcacccagcaacgaggaggatgattctgatgacgacgacgtcctcgcgccaagtggcgccactgcagccggggccggcgacgaaggcgacggccagacaacaggaagcacatag

SEQ ID NO: 171885 - DNA, 1704 bp, Artificial Sequence
  derived and/or modified sequence
atggctgacctggccaatgaggagaagccagccatcgcccctcctgtgtttgtgttccagaaggacaagggccagaagagccctgctgagcagaagaacctgagtgacagcggggaggagcccagaggagaggccgaggccccccaccacggcaccggccaccctgagagcgctggggagcacgccctggagcccccagccccagctggggccagcgccagcaccccacctcctccagcccctgaggcccagctgccccccttcccccgggagctggccggccgctctgctgggggcagcagccctgagggcggggaggacagcgacagagaagatggcaactactgcccccctgtgaagcgggagaggaccagcagcctgacccagtttcctcccagccagagcgaggagaggagcagcggcttccggctgaagccacccaccctcatccacggccaggcccccagcgctggcctgcccagccagaagcccaaggagcagcagaggtctgtgctgcggcctgctgtgctgcaggccccccagcccaaggccctgagccagacagtgcccagcagcggcaccaatggagtgtccctgcctgctgactgcaccggggctgtgcctgctgccagcccagacacagctgcctggaggagccccagcgaggccgcagatgaggtgtgtgccctggaggagaaggagccccagaagaatgaaagcagcaatgccagcgaggaggaggcctgtgagaagaaggaccctgccacccagcaggcctttgtgtttggccagaacctgcgggacagagtgaagctgatcaatgaatctgtggatgaggccgacatggagaatgccggccaccccagcgctgacacccccacagccaccaactacttcctgcagtacatcagcagcagcctggagaacagcaccaacagcgcagatgccagcagcaacaagtttgtgtttggccagaacatgtctgagcgggtgctgagcccccccaagctgaatgaggtgtccagtgatgccaacagagaaaatgctgctgctgagagcggcagcgagagcagcagccaggaggccaccccagagaaggagagcctggccgagagcgctgctgcctacaccaaggccacagccaggaagtgcctgctggagaaggtggaggtgatcactggagaggaggccgagagcaatgtgctgcagatgcagtgcaagctgtttgtgtttgacaagaccagccagagctgggtggagcggggccggggcctgctgcggctgaatgacatggccagcacagatgatggcaccctgcagagccggctggtgatgaggacccagggcagcctgcggctcatcctgaacaccaagctgtgggcccagatgcagattgacaaggccagcgagaagagcatccgcatcacagccatggacacagaggaccagggcgtgaaggtgttcctgatcagcgccagcagcaaggacaccggccagctgtatgctgccctgcaccaccgcatcctggccctgcggagccgggtggagcaggagcaggaggccaagatgcctgcccctgagcccggggccgcccccagcaatgaggaggatgacagtgatgatgatgatgtgctggcccccagcggggccacagctgctggagctggagatgaaggagatggccagaccaccggcagcacctag

SEQ ID NO: 171886 - DNA, 1704 bp, Artificial Sequence
  derived and/or modified sequence
atggccgacctggccaacgaggagaagcccgccatcgccccccccgtcttcgtgtttcagaaagataaggggcagaaatcccccgccgagcagaaaaacctgtccgattcgggagaagagcctcggggtgaagccgaggcacctcaccatggaaccggtcatccagagtctgctggggagcatgcactggaacctcctgctccagccggcgccagtgcatctactcccccaccacctgctcctgaggctcaattgccaccttttcctagggaactagctggtcgctctgccggcggcagcagtcctgaagggggagaagattctgacagagaagacggtaactactgtcctcccgtgaagagagagaggacctccagcttaacccaattccctccttcacagtcagaagagcgctcgagcgggtttcggcttaaacctccgacgcttatacatgggcaggccccttctgccggcctgccatcacagaaaccaaaggagcaacagaggtccgtactcaggcccgcagtgctccaggccccacagccaaaggctctgtcgcagaccgttcctagcagcggcactaacggtgtaagtttgccagcagattgtaccggagccgtaccagcggcctcaccagataccgccgcatggcgcagtcccagcgaggcagccgacgaggtctgcgcacttgaagagaaggagcctcagaagaacgaaagcagcaacgcttctgaggaggaggcttgcgaaaagaaggatcctgctacccaacaggcatttgtctttggccaaaatttgcgcgaccgggtgaaactgatcaatgagagcgtcgacgaggcggacatggagaacgcaggacacccatccgctgacaccccgaccgccaccaattatttcctgcagtatatttcaagctctctggagaactccactaactccgccgacgccagcagcaataaatttgtgtttggacaaaatatgagtgagcgcgtgctgtctccgcccaaattgaacgaagttagttctgacgccaacagggaaaacgcagccgctgaatcaggctccgagagttcatcccaggaggctaccccagaaaaggaaagtctcgcggagtccgctgctgcttatacaaaagctacagcgcgcaaatgtctcctagaaaaggtggaagtgatcactggagaggaggccgagtcaaatgtgttgcagatgcaatgtaagttgtttgtcttcgacaagacatcccaatcatgggtcgaacgcggtaggggcttattgcggctgaacgacatggcctctactgatgatggcacactccagagtaggctggtcatgcgcacccaagggagcttgaggctgatcctgaatactaagttgtgggctcaaatgcagatagacaaggcttccgaaaagtcaattagaattacggcaatggataccgaggatcagggagtgaaagtatttctaataagcgcatcttctaaagacacaggtcagctgtatgccgcgttgcaccaccgaatcctcgccctgcggagcagagtggagcaagagcaagaagccaaaatgcccgctccagagcccggcgcagctccctccaatgaagaagatgatagtgacgacgatgacgtgcttgcaccctccggagctaccgcagcaggagcaggtgacgaaggcgatggccagacgacgggatcaacctag

SEQ ID NO: 171887 - DNA, 1704 bp, Artificial Sequence
  derived and/or modified sequence
atggctgacctggccaacgaagaaaagcctgccatcgccccaccagtctttgtttttcagaaggataagggccaaaagagcccggctgaacagaagaacctgagcgacagcggtgaggagccgaggggggaggcagaggctccacaccatggcacaggtcatccagagagcgcaggcgaacatgccttggagcctcctgccccagcgggagccagtgcatccacccccccacctcctgcccctgaagctcagctccctccgttccccagggagctcgctggccgatcagccggtggtagcagccccgaggggggtgaggatagtgaccgtgaggatgggaattattgtccaccagtcaagagagaaagaacctcttccctgactcagttccctccttcccaatctgaggagagaagttctgggttccggctgaagcctcctaccttaattcatgggcaggccccatcagcgggactgccctctcagaaacctaaagagcagcagcggtccgtgctgaggcccgcagtgttgcaggctccccagcccaaggctttgagtcaaactgtgccatcttccggcactaatggggttagtcttccagctgactgcactggcgcagtgcctgctgctagtcccgataccgccgcatggagatccccttcagaggcagccgacgaggtgtgcgctttggaggaaaaagagccacaaaagaacgagtcatccaacgcctcggaggaggaagcgtgtgagaaaaaagatcctgctactcagcaggcttttgttttcggacagaatctaagagatcgtgtcaagttgattaacgagagtgtcgacgaagccgatatggagaacgccggtcatccctcggccgacaccccaactgcaacgaattactttcttcaatatataagcagtagtctagaaaactctaccaattcagcagacgcctcttcaaataagttcgtatttggtcagaacatgagcgagagggtcctctcgcccccaaaactgaacgaggttagttccgatgctaaccgcgaaaatgcggctgctgaatccgggagcgaatcgtctagccaggaagccacaccggagaaagagtccctggctgaaagcgccgcagcttacaccaaggctaccgcgagaaaatgtctgctcgaaaaagtggaggtcatcactggagaggaagcagaaagcaatgttttacagatgcagtgtaagttattcgtcttcgataagacatctcaatcatgggtggagcgagggagaggactgctgaggctgaatgatatggccagcaccgacgatggcaccttacagtccaggttagtaatgcgcactcaagggagcctgcggcttatcttgaataccaaattgtgggctcaaatgcagattgacaaagcgagcgagaagtctatcaggataacagccatggataccgaagaccagggggtgaaagtttttcttatatcagcttcatctaaggataccggacagctgtatgcagcactgcatcatagaatattggcgcttaggagtcgcgtggaacaggagcaggaggctaagatgcctgccccagagccaggagccgctcccagtaatgaagaagacgattctgatgatgatgatgtgcttgcgccatctggtgcaaccgccgcaggcgctggcgatgagggagacggccagaccactgggtctacctag

SEQ ID NO: 171888 - DNA, 3398 bp, Artificial Sequence
  derived and/or modified sequence
agatggctcgtgcgcaggtgcgtgctaggagcgcggctcgtcagggcaggctgctctgcagggcaggcgatccggggctcgcctccgcgcggcattcagcgcgcaggcgcgagctggccgcctcacacggagtcggcttgttaagtgcgcacgcgcgggagtttctggcagaaagcaggcgagcctgggccggcgcggggccttgtgggagggcttaaggaagtaaaatggcggacctggcgaacgaagaaaagcctgccattgctccgcccgtctttgtgtttcagaaggataaaggacaaaagtcccctgcagagcaaaaaaacttgtcggattcgggagaggagcctcggggggaggctgaggccccccaccatggcacgggtcaccccgagtcagctggcgagcatgccctagaacctcctgcccctgctggcgcctcagccagcactcctccgcctcccgctcctgaagcccagcttcctccttttccgcgagaactggcagggaggtcagctggcggctccagtcctgaaggcggagaagattctgacagagaagatggaaattactgccctcctgtcaagcgagaaagaacatcctctttaacccagttcccaccctcacagtcagaggaaaggagcagtggcttccggttgaagccaccaacgctgatccacggccaagcccccagcgcaggtctgccaagccagaagcccaaggagcagcagcggagcgtgcttcgcccggcagtgttacaagctccgcagccaaaggcgctgtcccagactgtccccagcagtggcaccaacggggtcagcctcccagcagactgcacgggggcagtgcccgcagcatcccctgacactgctgcatggagaagtccttccgaagctgccgatgaggtgtgtgcacttgaggagaaagagccccagaaaaatgagtccagcaatgcctctgaagaggaagcctgtgagaaaaaagaccccgccacacagcaagcctttgtatttgggcagaacttgagggacagagttaagctgataaatgagagcgtggacgaagccgacatggagaatgctggacaccccagcgcagacacgccaaccgcaacgaactatttcctccagtatatcagttccagtttagagaactcaaccaatagtgccgacgcctccagcaacaaatttgtatttggccagaacatgagcgagcgagttttgagccccccaaaattaaacgaggtcagttcagatgccaacagggaaaatgcagctgccgagtcagggtctgagtcctcgtcccaggaggccacccctgagaaagagtccctggctgagtcggcagccgcctacaccaaggcaacagcgcggaagtgtttgttggaaaaagtggaagtcatcaccggggaggaggcggagagcaatgtgttacagatgcagtgcaagctgtttgtctttgacaagacctcacagtcctgggtggagagaggccgggggctgctcagactcaatgacatggcgtccaccgatgacggcacactacagtcccgactagtgatgcggacccaggggagcctgcgactgatcctcaacaccaagctgtgggcccagatgcagatcgacaaggccagcgagaagagcattcgcatcacagccatggacaccgaggaccagggcgtgaaggtcttcctgatctcggccagctccaaggacacaggtcagttgtatgcagccctgcaccaccgcatcctggccctgcgcagccgcgtggagcaggagcaggaggccaagatgcccgcgcctgagcctggggcagccccatccaacgaggaggacgacagcgacgatgacgatgtcctggctccttcaggggccaccgcagctggtgctggtgacgaaggggacgggcagacgaccgggagcacatagcggccgggagcccggctgcacaccaggctgctgctttgtccgtctatccacccgcccacccgcccccaccccaccggcagcgtccaggtgcggggccgggaaccacacaccccactgggccggccacagtctggacccgcacgtcctgttcaaaagcagactcgggaactgcctgaatgtggtttgggacacgagacctcatcatattgatgagcgaacaaacaagaacatttcctccctcccctcctttgaattgaaatggcacattaagacttgtcacggcttctcactgggactggagacctcgttccttcaccccgcgtgtcgccagcctctgggtccagccagagcccctggcttctccgccacccacacccttcccaccctgctgtggggccctgcctttgtggggagcagccagccctctgcccctgcccagggctccccaactataggcctgggacccccgcccagcttggggggctgctcgtacgagtgtagacactgggcccattggacgtgctgttaactactatcttcatttcccacttcccctctctgattgggggtgtatattttacatctttttttctttttattttcgaaggctttgttttggtttcttaggttaagatgctctcgagcgttgagcaggcacagctctgtcgaggtccctgtcccccacctgtggttctggcctctgaggttgggggactacttgtttcccaccccaggttcctccaggccaagtcatggggtgatgaggagttggggccctgtctgtcctaggcctggagagtgcctgtctgggaaaaggtcactggacctggaagggtccccagggtcccctgactcccgtctccatctgtcacgtggttcaccatcatcaggcaccaggcgcaaactgcttcccgctgttggccatcccttccccagccacaggtgtccctgcccccaggacagtccagggccaggggcttctgtgagaggcagagggggaccctcaccaaatcttggtggaagagcccaggggctggtcccagaacaggcagtctcacaagcacgcagcacactggagtggacgcctgtgcccacccgagcctggagcatggccaagagccagcttgcaccacccacctgggaggccgaggaggaggtcccctgggcacagggcctctttgggacttcagaggaaatctcccagtcccactctcggagggttaagagaaggcctcctgcagctgtgccgtccacacctctaggtcgccagagccctggcccccagcccccagcaagcctgagcccgggaagaaccagaggccctcccgagagacccagtcacacgtctctgctttaagccttagccagctagtgacgagtacaacgagataacgcccatgtgttttggaacatttatgtaagattgtcatatgaaatgtatttgggaactacattaaacttttaact

SEQ ID NO: 171889 - DNA, 1704 bp, Artificial Sequence
  derived and/or modified sequence
atggccgacctggccaacgaggagaagcccgccatcgccccccccgtgttcgtgttccagaaggacaagggccagaagagccccgccgagcagaagaacctgagcgacagcggcgaggagcccagaggcgaggccgaggccccccaccacggcaccggccaccccgagagcgccggcgagcacgccctggagccccccgcccccgccggcgccagcgccagcaccccccccccccccgcccccgaggcccagctgccccccttccccagagagctggccggcagaagcgccggcggcagcagccccgagggcggcgaggacagcgacagagaggacggcaactactgcccccccgtgaagagagagagaaccagcagcctgacccagttcccccccagccagagcgaggagagaagcagcggcttcagactgaagccccccaccctgatccacggccaggcccccagcgccggcctgcccagccagaagcccaaggagcagcagagaagcgtgctgagacccgccgtgctgcaggccccccagcccaaggccctgagccagaccgtgcccagcagcggcaccaacggcgtgagcctgcccgccgactgcaccggcgccgtgcccgccgccagccccgacaccgccgcctggagaagccccagcgaggccgccgacgaggtgtgcgccctggaggagaaggagccccagaagaacgagagcagcaacgccagcgaggaggaggcctgcgagaagaaggaccccgccacccagcaggccttcgtgttcggccagaacctgagagacagagtgaagctgatcaacgagagcgtggacgaggccgacatggagaacgccggccaccccagcgccgacacccccaccgccaccaactacttcctgcagtacatcagcagcagcctggagaacagcaccaacagcgccgacgccagcagcaacaagttcgtgttcggccagaacatgagcgagagagtgctgagcccccccaagctgaacgaggtgagcagcgacgccaacagagagaacgccgccgccgagagcggcagcgagagcagcagccaggaggccacccccgagaaggagagcctggccgagagcgccgccgcctacaccaaggccaccgccagaaagtgcctgctggagaaggtggaggtgatcaccggcgaggaggccgagagcaacgtgctgcagatgcagtgcaagctgttcgtgttcgacaagaccagccagagctgggtggagagaggcagaggcctgctgagactgaacgacatggccagcaccgacgacggcaccctgcagagcagactggtgatgagaacccagggcagcctgagactgatcctgaacaccaagctgtgggcccagatgcagatcgacaaggccagcgagaagagcatcagaatcaccgccatggacaccgaggaccagggcgtgaaggtgttcctgatcagcgccagcagcaaggacaccggccagctgtacgccgccctgcaccacagaatcctggccctgagaagcagagtggagcaggagcaggaggccaagatgcccgcccccgagcccggcgccgcccccagcaacgaggaggacgacagcgacgacgacgacgtgctggcccccagcggcgccaccgccgccggcgccggcgacgagggcgacggccagaccaccggcagcacctag

SEQ ID NO: 171890 - protein, 894 aa, Artificial Sequence
  derived and/or modified sequence
MARQKKMGQSVLRAVFFLVLGLLGHSHGGFPNTISIGGLFMRNTVQEHSAFRFAVQLYNTNQNTTEKPFHLNYHVDHLDSSNSFSVTNAFCSQFSRGVYAIFGFYDQMSMNTLTSFCGALHTSFVTPSFPTDADVQFVIQMRPALKGAILSLLGHYKWEKFVYLYDTERGFSILQAIMEAAVQNNWQVTARSVGNIKDVQEFRRIIEEMDRRQEKRYLIDCEVERINTILEQVVILGKHSRGYHYMLANLGFTDILLERVMHGGANITGFQIVNNENPMVQQFIQRWVRLDEREFPEAKNAPLKYTSALTHDAILVIAEAFRYLRRQRVDVSRRGSAGDCLANPAVPWSQGIDIERALKMVQVQGMTGNIQFDTYGRRTNYTIDVYEMKVSGSRKAGYWNEYERFVPFSDQQISNDSASSENRTIVVTTILESPYVMYKKNHEQLEGNERYEGYCVDLAYEIAKHVRIKYKLSIVGDGKYGARDPETKIWNGMVGELVYGRADIAVAPLTITLVREEVIDFSKPFMSLGISIMIKKPQKSKPGVFSFLDPLAYEIWMCIVFAYIGVSVVLFLVSRFSPYEWHLEDNNEEPRDPQSPPDPPNEFGIFNSLWFSLGAFMQQGCDISPRSLSGRIVGGVWWFFTLIIISSYTANLAAFLTVERMVSPIESAEDLAKQTEIAYGTLDSGSTKEFFRRSKIAVYEKMWSYMKSAEPSVFTKTTADGVARVRKSKGKFAFLLESTMNEYIEQRKPCDTMKVGGNLDSKGYGVATPKGSALRTPVNLAVLKLSEQGILDKLKNKWWYDKGECGAKDSGSKDKTSALSLSNVAGVFYILVGGLGLAMMVALIEFCYKSRAESKRMKLTKNTQNFKPAPATNTQNYATYREGYNVYGTESVKI

SEQ ID NO: 171891 - protein, 662 aa, Artificial Sequence
  derived and/or modified sequence
MLQGGEESRLFGSLLWTLPWRGLFMRNTVQEHSAFRFAVQLYNTNQNTTEKPFHLNYHVDHLDSSNSFSVTNAFCSQFSRGVYAIFGFYDQMSMNTLTSFCGALHTSFVTPSFPTDADVQFVIQMRPALKGAILSLLGHYKWEKFVYLYDTERGFSILQAIMEAAVQNNWQVTARSVGNIKDVQEFRRIIEEMDRRQEKRYLIDCEVERINTILEQVVILGKHSRGYHYMLANLGFTDILLERVMHGGANITGFQIVNNENPMVQQFIQRWVRLDEREFPEAKNAPLKYTSALTHDAILVIAEAFRYLRRQRVDVSRRGSAGDCLANPAVPWSQGIDIERALKMVQVQGMTGNIQFDTYGRRTNYTIDVYEMKVSGSRKAGYWNEYERFVPFSDQQISNDSASSENRTIVVTTILESPYVMYKKNHEQLEGNERYEGYCVDLAYEIAKHVRIKYKLSIVGDGKYGARDPETKIWNGMVGELVYGRADIAVAPLTITLVREEVIDFSKPFMSLGISIMIKKPQKSKPGVFSFLDPLAYEIWMCIVFAYIGVSVVLFLVSRFSPYEWHLEDNNEEPRDPQSPPDPPNEFGIFNSLWFSLGAFMQQGCDISPRFVFVAYSMPHCILWSYSIHVHMVFIHLNSRFFSFNIPSNDRLSSSHCVCLCP

SEQ ID NO: 171892 - DNA, 2685 bp, Artificial Sequence
  derived and/or modified sequence
atggccagacagaagaagatgggtcagtccgttttgagggcagtattttttttagtattaggcctcttgggccacagtcacggaggctttccaaacactatatctattggaggcctgttcatgaggaacactgtacaggagcactctgcttttcgattcgccgtacagctctacaataccaaccagaatactaccgagaaaccattccacctgaactaccacgtcgatcatcttgattcatccaattctttttcagtgaccaacgctttttgtagccagttcagcaggggcgtttacgcaatcttcgggttttatgatcagatgtccatgaataccctgacaagcttctgcggcgctctgcacacgtccttcgtcactccttccttccctactgatgcggatgttcagtttgttatacaaatgagacctgccctcaaaggcgccattctctctcttctgggacattacaagtgggaaaagttcgtgtacctgtacgatacggagagaggattcagcattctgcaggcgattatggaggccgccgtgcagaataactggcaagtcacggcccgaagtgttgggaatatcaaggacgtgcaggaatttcgacggatcattgaggaaatggacagaagacaggagaaaaggtaccttatcgattgtgaggtggaacgcataaacacgatcctggaacaagtggtgatcctgggaaagcattccagaggataccattatatgttagctaatctgggcttcaccgatatccttttggagcgggtaatgcatgggggcgctaatatcacgggatttcaaatagtgaacaacgaaaaccctatggtgcagcagtttattcagagatgggttaggttagatgaacgggagtttcccgaagccaagaatgctccactgaaatatacttcagccctgacgcatgatgctatcctagtgattgccgaagcttttcggtacctacgccgtcagagagtggacgtaagcaggcgcggaagcgccggtgattgcctggccaaccccgctgtgccttggtcccaggggattgacatcgaacgggctctgaaaatggtacaggtgcagggtatgaccgggaatatccaattcgacacatacggtcgtaggactaattacacaattgacgtgtatgaaatgaaagtgtcgggctccagaaaggcaggttattggaacgagtatgagcggttcgtgccattttcagatcagcagatcagtaatgactcagcttcctccgagaataggaccatcgtggttactactatcttggagagtccctacgtaatgtacaaaaagaatcacgaacagctggagggcaacgagagatacgaaggctattgtgtagaccttgcatacgaaattgctaaacatgttcgtattaaatacaagttgtctatagtcggtgacggcaagtatggagccagggatccggagacaaaaatctggaacgggatggtgggagaactggtatacggaagagccgacattgctgtggccccactgacaatcactctcgtgagggaagaagtgatcgatttctcaaagcctttcatgtcgttgggaatatccatcatgattaaaaagccacaaaagagcaagcccggagtattcagtttccttgaccctctcgcatacgagatttggatgtgcatcgtgtttgcatacatcggcgtgtccgtggtcctgtttctggtgtcaagatttagcccctacgagtggcatttggaagacaataacgaagaaccacgcgaccctcagtctccaccagaccccccgaatgagtttgggatctttaactccttgtggttttccttaggagcattcatgcagcaggggtgtgatatctccccacgctctctctccggccgcatcgtggggggcgtttggtggttcttcaccctgattatcattagctcctacactgctaacctagctgccttcttaactgtcgagcgaatggtttctccaattgaatctgccgaagatcttgccaaacagaccgagatcgcctatggaaccttggacagcggatcaaccaaagaattttttcgcagaagtaaaattgccgtttatgaaaagatgtggagctacatgaagtcggctgagcccagtgtgtttacaaaaaccacagcagatggcgtcgcacgggtgaggaaatccaaagggaagtttgcttttctgctcgaatcaaccatgaatgaatatattgagcagaggaaaccctgcgatactatgaaggtgggagggaatctcgatagcaagggctatggcgtagctactccaaagggatccgcactcaggacacccgtgaaccttgctgtgctgaaactgtctgagcagggaattcttgacaagcttaaaaacaagtggtggtatgacaaaggggagtgcggagctaaggattcaggttccaaggataagacgtccgctctttcactatccaatgttgcgggggtattttatattctcgttggcggcttggggctggccatgatggtagcgctgattgagttttgttacaaaagtagggccgagagcaaaagaatgaaattgacaaagaacacccaaaattttaaaccagcccccgccactaatacacagaactatgcaacttatagggaggggtataatgtgtacggaacagaatccgtgaagatctag

SEQ ID NO: 171893 - DNA, 4942 bp, Artificial Sequence
  derived and/or modified sequence
tgacgactcctgagttgcgcccatgctcttgtcagcttcgttttaggcgtacatggccaggcagaagaaaatggggcaaagcgtgctccgggcggtcttctttttagtcctggggcttttgggtcattctcacggaggattccccaacaccatcagcataggtggacttttcatgagaaacacagtgcaggagcacagcgctttccgctttgccgtgcagttatacaacaccaaccagaacaccaccgagaagcccttccatttgaattaccacgtagatcacttggattcctccaatagtttttccgtgacaaatgctttctgctcccagttctcgagaggggtgtatgccatctttggattctatgaccagatgtcaatgaacaccctgacctccttctgtggggccctgcacacatcctttgttacgcctagcttccccactgacgcagatgtgcagtttgtcatccagatgcgcccagccttgaagggcgctattctgagtcttctgggtcattacaagtgggagaagtttgtgtacctctatgacacagaacgaggattttccatcctccaagcgattatggaagcagcagtgcaaaacaactggcaagtaacagcaaggtctgtgggaaacataaaggacgtccaagaattcaggcgcatcattgaagaaatggacaggaggcaggaaaagcgatacttgattgactgcgaagtcgaaaggattaacacaattttggaacaggttgtgatcctagggaaacactcaagaggttatcactacatgctcgctaacctgggttttactgatattttactggaaagagtcatgcatgggggagccaacattacaggtttccagattgtcaacaatgaaaaccctatggttcagcagttcatacagcgctgggtgaggctggatgaaagggaattccctgaagccaagaatgcaccactaaagtatacatctgcattgacacacgacgcaatactggtcatagcagaagctttccgctacctgaggaggcagcgagtagatgtgtcccggagaggaagtgctggagactgcttagcaaatcctgctgtgccctggagtcaaggaattgatattgagagagctctgaaaatggtgcaagtacaaggaatgactggaaatattcaatttgacacttatggacgtaggacaaattataccatcgatgtgtatgaaatgaaagtcagtggctctcgaaaagctggctactggaatgagtatgaaaggtttgtgcctttctcagatcagcaaatcagcaatgacagtgcatcctcagagaatcggaccatagtagtgactaccattctggaatcaccatatgtaatgtacaagaagaaccatgagcaactggaaggaaatgaacgatatgaaggctattgtgtagacctagcctatgaaatagccaaacatgtaaggatcaaatacaaattgtccatcgttggtgacgggaaatatggtgcaagggatccagagactaaaatatggaacggcatggttggggaacttgtctatgggagagctgatatagctgttgctccactcactataacattggtccgtgaagaagtcatagatttttcaaagccattcatgagcctgggcatctccatcatgataaagaagcctcagaaatcaaaaccaggcgtattctcatttctggatcccctggcttatgaaatctggatgtgcattgtctttgcttacattggagtcagcgtagttcttttcctagtcagcaggttcagtccttatgaatggcacttggaagacaacaatgaagaacctcgtgacccacaaagtcctcctgatcctccaaatgaatttggaatatttaacagtctttggttttccttgggtgcctttatgcagcaaggatgtgatatttctccaagatcactctccgggcgcattgttggaggggtttggtggttcttcaccctgatcataatttcttcctatactgccaatctcgctgctttcctgactgtggagaggatggtttctcccatagagagtgctgaagacttagctaaacagactgaaattgcatatgggaccctggactccggttcaacaaaagaatttttcagaagatccaaaattgctgtgtacgagaaaatgtggtcttacatgaaatcagcggagccatctgtgtttaccaaaacaacagcagacggagtggcccgagtgcgaaagtccaagggaaagttcgccttcctgctggagtcaaccatgaatgagtacattgagcagagaaaaccatgtgatacgatgaaagttggtggaaatctggattccaaaggctatggtgtggcaacccctaaaggctcagcattaagaacgcctgtaaaccttgcagtattgaaactcagtgaacaaggcatcttagacaagctgaaaaacaaatggtggtacgataagggggaatgtggagccaaggactccgggagtaaggacaagaccagcgctctgagcctgagcaatgtggcaggcgttttctatatacttgtcggaggtctggggctggccatgatggtggctttgatagaattctgttacaaatcacgggcagagtccaaacgcatgaaactcacaaagaacacccaaaactttaagcctgctcctgccaccaacactcagaattatgctacatacagagaaggctacaacgtgtatggaacagagagtgttaagatctagggatcccttcccactggaggcatgtgatgagaggaaatcaccgaaaacgtggctgcttcaaggatcctgagccagatttcactctccttggtgtcgggcatgacacgaatattgctgatggtgcaatgacctttcaataggaaaaactgatttttttttccttcagtgccttatggaacactctgagactcgcgacaatgcaaaccatcattgaaatctttttgctttgcttgaaaaaaaataattaaaataaaaaccaacaaaaatggacatgcaagattccagtatgcgaaaaaaaatcttattaagtcaattcaacaaaagccattctttgataccactgcagagtatataaacaccatgttctttaatacacacacacacacacacacacacacacacacacatttaaattccaattcagcaaagaggcccatctaagctaaaaaaattaattcttcctgattaaaaagaaaaaatctgtctcccagtgtttgggaagacggactggcatttcttctaggatctgctgaccagatgtttttggtatttcctgttggtggtgatgttctgtgcactctatttcctttcaatgttgctgaaatgtgtatatctttagaatgtaaatgcaacacttaagaaaattcaaacactttggaaaagggactaaacagtgatttctctgtgttcttgaaatggttttgtgaaaatgctttgataacttcccactcaaagaagagatttacagagctttcgaaattgactttgtgtgtagcaagggacggggcactatcaggatacctcttggtgctttcctaaaatggatcccggggctttccaaggagcctggaatttcagctcacagatctgtttttcttgcttcagtgtgcattttaagtcaatagagctgagtatctagcattgaggtgagggaaatgctgcctatactcccagatgtgtttagaatatctcagaaacaacactgtgtttagctcggctttctctgctaagtatgcctttcaagtgtacaccacggagacaggaccgcgttgcaaggcgggacagcaggttcagaccacagttctcagtctgactttactcttgctaggtctgtcctactagctgttgcctgctaccgcccatggctctccatcggactgcatgtgtccttttctagtttgcaaagactaaaatgcattcccaaacctactgctaatctgagggcctcagcatcacttccagatccttgcttggagcagtctctctattgactctctcagatcgctccactgctccatgggctatcaagtaactaactgcatacctgccgttggcatcatcagaacagtccgaagaaatagtctccactcactaattacctcctatataacgacgtatgcttcctgtagttcagtagtttgctctcatcgataacgtgcattgggaagtttccagactgcaaaaactaggagctcgcattcatttcccaagtgtgacccttagatgcttagttgactcgctgcatatttgctcttgtcttcagaaaagaaaggaagaagtatcgttccaacgaaatgtttccagaaaagtgtactataaactttcattccaaaaatggtgtcataagcaaacaactcacttgtcaaatttcaaatggtattgaacaaaaaaagaaagctgttgtgtttttgttttgttttgttttcatgaaactgtgattttcaacttatgaatgctataatgtcccagcgcgggaagctcacgctgtgtgaacatgaagttgtataaaacaaaccaaccaacctacacacaaatgttttcataggcactgtataaagaaaaatgtatgtttattaactcaaatcagtttttcagagaggaaacgtcactgagatgaagaggcgggtaaattggtttgttattttttaaaaaaaacttgcatgtttaaaaaaaagttgattgcttcaaatttctgctactaacttcaagctatgggagtttggcagtagtcacttgaggattttttttccaattcttttctttttgttgttaaagctgtacttcagtgaacagaaaaattgccaagcaaactaatggctataaaagcgtaatttgcatgtgtgggcataaactacagagcctcattgccatgaggtattgtacaaagttttaatacattttgtaaataaaattgtaaagaaagaa

SEQ ID NO: 171894 - DNA, 2685 bp, Artificial Sequence
  derived and/or modified sequence
atggcccggcagaagaagatgggccagagcgtgctgcgggctgtgttcttcctggtgctgggcctgctgggccacagccatggaggcttccccaacaccatcagcatcggcggcctcttcatgaggaacacagtgcaggagcacagcgccttccgctttgctgtgcagctgtacaacaccaaccagaacaccacagagaagcccttccacctgaactaccacgtggaccacctggacagcagcaacagcttctctgtgaccaatgccttctgcagccagttcagcagaggagtgtatgccatcttcggcttctatgaccagatgtccatgaacaccctgaccagcttctgtggggccctgcacaccagctttgtgacccccagcttccccacagatgctgatgtgcagtttgtgatccagatgaggcctgccctgaagggggccatcctgagcctgctgggccactacaagtgggagaagtttgtgtacctgtatgacacagagcggggcttcagcatcctgcaggccatcatggaggccgctgtgcagaacaactggcaggtgacagcccggtctgtgggcaacatcaaggatgtgcaggagttccgccgcatcatcgaggagatggaccggcggcaggagaagcgctacctgattgactgtgaggtggagcgcatcaacaccatcctggagcaggtggtgatcctgggcaagcacagccggggctaccactacatgctggccaacctgggcttcacagacatcctgctggagcgggtgatgcacggcggggccaacatcaccggcttccagatcgtgaacaatgaaaaccccatggtgcagcagttcatccagcgctgggtgcggctggatgagcgggagttccctgaggccaagaatgcccccctgaagtacaccagcgccctgacccatgatgccatcctggtgattgctgaggccttccgctacctgcggcggcagagggtggatgtgtccagaagaggcagcgctggggactgcctggccaacccagctgtgccctggagccagggcatcgacatcgagcgggccctgaagatggtgcaggtgcagggcatgactggaaacatccagtttgacacctatggaagaaggaccaactacaccattgatgtgtatgagatgaaggtgtctggcagcaggaaggccggctactggaatgaatatgaaagatttgtgcccttcagtgaccagcagatcagcaatgattctgccagcagtgaaaatagaaccatcgtggtgaccaccatcctggagagcccctacgtgatgtacaagaagaaccacgagcagctggagggcaatgaaagatatgagggctactgtgtggacctggcctatgagatcgccaagcacgtgcgcatcaagtacaagctgagcatcgtgggagatggcaagtacggggcccgggaccctgagaccaagatctggaatggcatggtgggggagctggtgtatggccgggctgacattgctgtggcccccctgaccatcaccctggtgcgggaggaggtgattgacttcagcaagcccttcatgagcctgggcatcagcatcatgatcaagaagccccagaagagcaagccaggagtcttctccttcctggaccccctggcctatgagatctggatgtgcatcgtgtttgcctacatcggcgtgtctgtggtgctcttcctggtgagccgcttcagcccctatgagtggcacctggaggacaacaatgaggagccccgggacccccagagccccccagaccccccaaatgaatttggcatcttcaacagcctgtggttcagcctgggcgccttcatgcagcagggctgtgacatcagccccaggagcctgagcggccgcatcgtgggcggcgtgtggtggttcttcaccctcatcatcatcagcagctacacagccaacctggccgccttcctgactgtggagaggatggtgagccccattgaatctgctgaggacctggccaagcagacagaaattgcctacggcaccctggacagcggcagcaccaaggagttcttccgccgcagcaagattgctgtgtatgagaagatgtggagctacatgaagtctgctgagcccagcgtcttcaccaagaccacagcagatggagtggcccgggtgaggaagagcaagggcaagtttgccttcctgctggagagcaccatgaatgagtacatcgagcagaggaagccctgtgacaccatgaaggtgggcggcaacctggacagcaagggctacggcgtggccacccccaagggcagcgccctgcggacccctgtgaacctggccgtgctgaagctgtctgagcagggcatcctggacaagctgaagaacaagtggtggtatgacaagggggagtgtggggccaaggacagcggcagcaaggacaagaccagcgccctgagcctgagcaatgtggccggggtcttctacatcctggtgggcggcctgggcctggccatgatggtggccctgattgagttctgctacaagagcagagctgagagcaagaggatgaagctgaccaagaacacccagaacttcaagccagccccagccaccaacacccagaactatgccacctaccgggagggctacaacgtgtatggaacagaatctgtgaagatctag

SEQ ID NO: 171895 - DNA, 2685 bp, Artificial Sequence
  derived and/or modified sequence
atggcccggcagaagaagatgggccagagcgtgctgcgggccgtgttcttcctcgtccttggcttattaggacattcccatggaggcttccccaacacaatctcgattgggggcctgttcatgaggaataccgttcaggaacattcggctttccgctttgccgtgcagctctataatactaatcagaatacaactgagaagccattccacctgaattatcatgttgatcatctggactcatctaattcattttcagtgacgaatgctttctgttctcagttctcacgtggagtatatgcaatatttggcttttacgatcagatgagtatgaatacccttacatctttttgtggcgctctgcacacatcgttcgtaacaccaagttttcctaccgatgctgacgtccaatttgtgatccagatgagaccggccctgaaaggggcaatcctgagccttctgggacactacaaatgggagaaatttgtctatctgtatgacaccgagaggggatttagtattctgcaagcaattatggaggcagctgtgcaaaataactggcaagtcacggccaggtcagtgggcaacatcaaagacgttcaagagtttcgccggatcatcgaagagatggacaggaggcaggaaaaacgctatctgatagattgtgaggtagaacgcatcaacacgatcctggaacaagtggtcattctgggcaaacactcacgcgggtaccactatatgctcgctaatctcggttttaccgatatactccttgaacgtgtgatgcatgggggcgccaatattactggcttccagattgttaacaatgaaaaccctatggtgcaacagttcattcagaggtgggtgaggcttgacgagcgagaatttcctgaggcaaaaaatgcccccctgaagtatacgagcgcactgacgcacgatgccattctcgttattgccgaggcctttagatacttaagacgacagcgggtggacgtgtcgcgacggggatcagctggagactgtctcgcaaaccccgcggtgccttggtcccaaggaattgacattgagcgcgctttgaagatggtgcaagtgcagggtatgaccgggaacatacaatttgatacttacgggcgccggacaaactacactatagacgtgtatgagatgaaagtcagcggctctaggaaggcaggctattggaacgaatacgagagattcgttccattcagcgaccagcagatcagtaacgattccgcctcttctgagaaccgcacgatcgtcgtgacgactatattagagagtccatacgtcatgtacaagaaaaatcatgagcaactggaaggcaatgagagatatgagggatactgcgtggatctggcctacgagattgccaagcacgttcgtatcaaatacaaattatctattgtgggggatggaaaatatggcgctagagaccccgaaaccaagatctggaatggaatggttggagaactggtgtacggaagggcagatattgccgtggcaccacttacgataacgctggtgcgtgaagaagtgattgacttctccaagccctttatgtccctggggatcagtatcatgattaagaaaccccagaaatccaaaccaggggttttctcctttctagatccactcgcatatgagatttggatgtgtattgtctttgcatatattggcgtgtctgtcgttctttttctcgtctctaggttcagcccctatgagtggcatctggaagataacaatgaagaaccacgggatccccaatctcctccagaccctcctaacgagttcgggatctttaactctttatggttctcattgggggcctttatgcagcagggctgtgacatatccccccgttctctctctggcagaatcgttggtggtgtgtggtggttcttcaccctgattattattagcagttacaccgccaacctggctgccttcctaacagtcgaaaggatggtcagtccaatagaatccgcggaggacttagctaaacagaccgaaattgcatacggcacactcgattccgggagtacaaaagagttcttccgccggtctaaaatcgctgtatacgaaaagatgtggagctatatgaagtccgccgagccatcagttttcacaaaaaccacagccgatggagtagcacgggtacggaagagcaaagggaagttcgccttcctgctggagtctacaatgaatgagtatatcgaacagagaaaaccatgcgacaccatgaaggtgggcggcaacttggactcaaaaggctacggggtggctacaccaaagggcagcgctctgaggactccagtgaatctggcggttctcaaactgtccgagcagggcatcttagacaaactcaagaacaaatggtggtacgacaagggcgagtgcggggctaaagattcaggcagtaaagataagacctccgcactctctctatctaatgtagcaggggttttctatattctggtcggcggattgggactggccatgatggttgcactgatcgagttctgctacaaatcgcgagccgagagtaagcgaatgaaactgaccaaaaacacacaaaatttcaaaccagccccagcgactaacacccagaactacgctacctaccgggaggggtataatgtttacggtactgaatccgtaaaaatctag

SEQ ID NO: 171896 - DNA, 2685 bp, Artificial Sequence
  derived and/or modified sequence
atggccaggcagaaaaagatgggccagtcggtgctgcgcgcagtgttttttctcgtgttgggacttctaggccatagccacggcggattcccaaacaccattagtatcgggggtctgttcatgcgtaacaccgtccaggaacattccgcttttcggtttgctgtacagctgtacaacaccaatcagaataccaccgagaagccattccacttgaactatcacgtggaccatctcgactccagcaacagttttagcgtcacgaatgccttctgctcgcagttctctcgcggtgtgtatgccatatttgggttctatgatcagatgtctatgaacacacttacttcgttctgtggcgctttacataccagtttcgtaacaccaagttttccaacggatgctgatgtgcaattcgtcattcagatgaggccagctctcaagggagctatcctctcattgcttgggcattacaaatgggagaaattcgtctacttgtatgacacagaacggggattttcaatcctgcaagccattatggaggcagctgttcagaataattggcaggtgactgccagaagcgtcgggaacatcaaagacgtccaggaattccggagaatcattgaagagatggatcggagacaggagaaacgttatctgattgactgtgaggtcgagagaattaacaccatcctggaacaggtggtcatcttgggcaaacactcaaggggatatcactatatgctggctaacctcggctttacggatatcctgctggaaagggtgatgcacgggggagccaacattacagggttccagattgtgaacaatgaaaatcctatggtccagcagttcatacagcgctgggttcgcttggatgaacgagaatttcccgaagccaaaaatgcaccactgaagtacacgtctgcactcacacatgacgcaatacttgtcatcgccgaggcgttcaggtacctgcggaggcaacgcgtcgacgttagcaggcgcggaagcgcaggcgactgcctcgcaaatccagcggttccctggtcacagggcattgacatcgagagagccttgaagatggtccaagtacaggggatgactgggaatatacagttcgacacatacggacggagaaccaactacacaatcgacgtatatgaaatgaaagtctccggcagtagaaaagcaggatactggaatgaatacgagaggttcgtgccattcagcgaccagcaaatctcgaacgactctgcttccagcgagaacaggacaattgtggtgacaactattctggaatctccatacgtcatgtataaaaagaatcacgagcagctggagggaaatgaaaggtatgaaggatattgcgtggatttggcctacgaaattgctaagcacgtcaggataaaatataaattgagcattgtgggtgatggaaagtatggcgctcgcgatccagaaactaagatatggaacggaatggtcggcgagctggtctacggaagagcagacatcgccgtcgccccactcaccatcactctggtcagagaggaagtgatagacttttctaaaccattcatgtcgctcggaatctccatcatgattaagaagcctcagaagtccaaaccaggagtgttcagtttcctcgatccccttgcctacgaaatctggatgtgtattgtcttcgcctacattggagtttccgtcgtcctcttcctcgtctctagattctccccatacgaatggcatctggaggacaacaatgaagagccccgtgaccctcagagtccccctgaccccccaaacgagttcggtatcttcaattccctgtggttttccctgggagccttcatgcagcaggggtgtgacattagccccagaagcctgagcggtaggatcgtgggcggagtatggtggttcttcaccctgatcatcatctcctcctacaccgcaaatcttgccgcattcctgacagtggagaggatggtaagtccaatagaaagcgctgaggacctagccaagcaaacagagatcgcttacggaacattagactctggctccacaaaggagtttttccggagaagtaagatcgcagtttacgagaaaatgtggtcttatatgaaatcagcagaaccctctgtcttcaccaaaaccaccgcagatggggtagcccgagtgcgcaagtctaagggcaagtttgccttcttgctggaatcaactatgaatgaatacattgagcaacggaaaccgtgcgacacaatgaaagtggggggaaacttagattccaaggggtacggagtggccactcccaaggggtcggccttaagaacgcctgtaaacctggcagttcttaagctctccgaacagggaatattagataagctcaaaaacaagtggtggtatgacaagggcgagtgtggggctaaagattcagggtctaaagataagacatcggctttgagcctctccaacgtcgcaggtgtcttctacatactggtcggcggattgggcctcgccatgatggttgcactgatcgaattctgctacaagagtcgcgcagagagcaaacggatgaaactgaccaagaacactcaaaacttcaagccagccccagctaccaatactcagaattacgccacataccgggagggctacaatgtgtatgggacagaatcagtcaaaatctag

SEQ ID NO: 171897 - DNA, 2685 bp, Artificial Sequence
  derived and/or modified sequence
atggccagacagaagaagatgggccagagcgtgctgagagccgtgttcttcctggtgctgggcctgctgggccacagccacggcggcttccccaacaccatcagcatcggcggcctgttcatgagaaacaccgtgcaggagcacagcgccttcagattcgccgtgcagctgtacaacaccaaccagaacaccaccgagaagcccttccacctgaactaccacgtggaccacctggacagcagcaacagcttcagcgtgaccaacgccttctgcagccagttcagcagaggcgtgtacgccatcttcggcttctacgaccagatgagcatgaacaccctgaccagcttctgcggcgccctgcacaccagcttcgtgacccccagcttccccaccgacgccgacgtgcagttcgtgatccagatgagacccgccctgaagggcgccatcctgagcctgctgggccactacaagtgggagaagttcgtgtacctgtacgacaccgagagaggcttcagcatcctgcaggccatcatggaggccgccgtgcagaacaactggcaggtgaccgccagaagcgtgggcaacatcaaggacgtgcaggagttcagaagaatcatcgaggagatggacagaagacaggagaagagatacctgatcgactgcgaggtggagagaatcaacaccatcctggagcaggtggtgatcctgggcaagcacagcagaggctaccactacatgctggccaacctgggcttcaccgacatcctgctggagagagtgatgcacggcggcgccaacatcaccggcttccagatcgtgaacaacgagaaccccatggtgcagcagttcatccagagatgggtgagactggacgagagagagttccccgaggccaagaacgcccccctgaagtacaccagcgccctgacccacgacgccatcctggtgatcgccgaggccttcagatacctgagaagacagagagtggacgtgagcagaagaggcagcgccggcgactgcctggccaaccccgccgtgccctggagccagggcatcgacatcgagagagccctgaagatggtgcaggtgcagggcatgaccggcaacatccagttcgacacctacggcagaagaaccaactacaccatcgacgtgtacgagatgaaggtgagcggcagcagaaaggccggctactggaacgagtacgagagattcgtgcccttcagcgaccagcagatcagcaacgacagcgccagcagcgagaacagaaccatcgtggtgaccaccatcctggagagcccctacgtgatgtacaagaagaaccacgagcagctggagggcaacgagagatacgagggctactgcgtggacctggcctacgagatcgccaagcacgtgagaatcaagtacaagctgagcatcgtgggcgacggcaagtacggcgccagagaccccgagaccaagatctggaacggcatggtgggcgagctggtgtacggcagagccgacatcgccgtggcccccctgaccatcaccctggtgagagaggaggtgatcgacttcagcaagcccttcatgagcctgggcatcagcatcatgatcaagaagccccagaagagcaagcccggcgtgttcagcttcctggaccccctggcctacgagatctggatgtgcatcgtgttcgcctacatcggcgtgagcgtggtgctgttcctggtgagcagattcagcccctacgagtggcacctggaggacaacaacgaggagcccagagacccccagagcccccccgacccccccaacgagttcggcatcttcaacagcctgtggttcagcctgggcgccttcatgcagcagggctgcgacatcagccccagaagcctgagcggcagaatcgtgggcggcgtgtggtggttcttcaccctgatcatcatcagcagctacaccgccaacctggccgccttcctgaccgtggagagaatggtgagccccatcgagagcgccgaggacctggccaagcagaccgagatcgcctacggcaccctggacagcggcagcaccaaggagttcttcagaagaagcaagatcgccgtgtacgagaagatgtggagctacatgaagagcgccgagcccagcgtgttcaccaagaccaccgccgacggcgtggccagagtgagaaagagcaagggcaagttcgccttcctgctggagagcaccatgaacgagtacatcgagcagagaaagccctgcgacaccatgaaggtgggcggcaacctggacagcaagggctacggcgtggccacccccaagggcagcgccctgagaacccccgtgaacctggccgtgctgaagctgagcgagcagggcatcctggacaagctgaagaacaagtggtggtacgacaagggcgagtgcggcgccaaggacagcggcagcaaggacaagaccagcgccctgagcctgagcaacgtggccggcgtgttctacatcctggtgggcggcctgggcctggccatgatggtggccctgatcgagttctgctacaagagcagagccgagagcaagagaatgaagctgaccaagaacacccagaacttcaagcccgcccccgccaccaacacccagaactacgccacctacagagagggctacaacgtgtacggcaccgagagcgtgaagatctag

SEQ ID NO: 171898 - protein, 938 aa, Artificial Sequence
  derived and/or modified sequence
MSTMRLLTLALLFSCSVARAACDPKIVNIGAVLSTRKHEQMFREAVNQANKRHGSWKIQLNATSVTHKPNAIQMALSVCEDLISSQVYAILVSHPPTPNDHFTPTPVSYTAGFYRIPVLGLTTRMSIYSDKSIHLSFLRTVPPYSHQSSVWFEMMRVYSWNHIILLVSDDHEGRAAQKRLETLLEERESKAEKVLQFDPGTKNVTALLMEAKELEARVIILSASEDDAATVYRAAAMLNMTGSGYVWLVGEREISGNALRYAPDGILGLQLINGKNESAHISDAVGVVAQAVHELLEKENITDPPRGCVGNTNIWKTGPLFKRVLMSSKYADGVTGRVEFNEDGDRKFANYSIMNLQNRKLVQVGIYNGTHVIPNDRKIIWPGGETEKPRGYQMSTRLKIVTIHQEPFVYVKPTLSDGTCKEEFTVNGDPVKKVICTGPNDTSPGSPRHTVPQCCYGFCIDLLIKLARTMNFTYEVHLVADGKFGTQERVNNSNKKEWNGMMGELLSGQADMIVAPLTINNERAQYIEFSKPFKYQGLTILVKKEIPRSTLDSFMQPFQSTLWLLVGLSVHVVAVMLYLLDRFSPFGRFKVNSEEEEEDALTLSSAMWFSWGVLLNSGIGEGAPRSFSARILGMVWAGFAMIIVASYTANLAAFLVLDRPEERITGINDPRLRNPSDKFIYATVKQSSVDIYFRRQVELSTMYRHMEKHNYESAAEAIQAVRDNKLHAFIWDSAVLEFEASQKCDLVTTGELFFRSGFGIGMRKDSPWKQNVSLSILKSHENGFMEDLDKTWVRYQECDSRSNAPATLTFENMAGVFMLVAGGIVAGIFLIFIEIAYKRHKDARRKQMQLAFAAVNVWRKNLQDRKSGRAEPDPKKKATFRAITSTLASSFKRRRSSKDTSTGGGRGALQNQKDTVLPRRAIEREEGQLQLCSRHRES

SEQ ID NO: 171899 - DNA, 2817 bp, Artificial Sequence
  derived and/or modified sequence
atgtctacgatgcggctcctgactctggccctgctcttctcgtgtagcgttgcccgggcagcatgtgacccaaaaatagtgaatatcggggctgtgctttccactagaaagcacgagcagatgtttagagaagccgtgaaccaggcaaacaagcgacacgggagctggaagatccagctcaatgcaacaagtgtgactcacaaacccaatgccatccagatggctctttctgtctgcgaggaccttatttctagccaggtctacgcaattttagtgagtcacccgcccacccccaacgatcactttaccccgacacccgtgtcctataccgcgggtttttatcggatcccagttctcggactgaccactaggatgtccatttattccgacaaatctatccacttatcgtttctgaggacggtgcccccatatagtcaccagtcctctgtgtggttcgaaatgatgcgtgtgtattcctggaaccacattattctgctggtgagtgacgatcatgaaggtagggctgcccagaagcgtctggagaccctccttgaagagagggagagcaaagccgaaaaagtactccagttcgaccccggcaccaagaacgtaaccgctctccttatggaagctaaagagctcgaggccagggttatcatcctaagcgcgtccgaggatgacgctgctactgtgtacagggccgctgctatgttaaacatgactggctctggatacgtgtggcttgtgggagagcgtgaaatcagtggcaatgccctcaggtacgctccagatgggattttaggcttacagcttatcaacggaaagaacgagtccgcacacatctccgatgcagtcggcgttgtagctcaggccgtgcacgagctcctggagaaggaaaatattacagacccccctcggggctgtgtgggtaacaccaatatctggaagacggggcccctttttaagcgggtcctgatgtcaagcaagtatgccgatggtgtcactggcagagtagagttcaacgaggacggagaccgaaaatttgctaactattccatcatgaaccttcagaacagaaaactcgtccaggtcggtatctacaacggtacacatgttattccaaacgacaggaaaatcatttggcccggcggtgaaaccgaaaagcccaggggatatcagatgagcacacgcctgaagattgtgacaatccaccaggagccatttgtgtacgttaagcccacactgtcagacgggacttgcaaagaggagttcactgttaacggggatccagtgaaaaaagttatctgtaccggaccaaatgacacttctcccggatctccaagacacactgttcctcagtgctgctacggattctgcatcgacctgctgattaaattagcacggacgatgaatttcacatatgaagtccatttggtcgctgacggtaaatttggtacccaggagcgcgtgaataactccaataagaaagaatggaatggaatgatgggtgagcttctgagtggccaggcagatatgattgtggccccgctaactatcaataacgaaagagctcagtatattgagttctccaagccttttaagtatcagggactaactatcctcgtgaaaaaggagatcccaaggtctacactggacagttttatgcagcctttccagtccacattgtggcttttggtggggctttcagtgcacgtggtagccgttatgctatacctgctagaccgtttctcaccctttggaagattcaaggttaattccgaggaggaagaagaagacgctttgaccctctcctctgccatgtggttttcctggggcgtcctcctcaattctggtatcggggaaggagcccctagatccttttcagcccgaatcttgggaatggtgtgggcaggatttgccatgatcatagtggcatcctacacagcaaatctcgccgcatttttagtgcttgacagaccggaggagcgaatcacagggattaacgatcccaggttgcggaacccgtctgataagttcatttacgccactgtgaaacaatcgtctgtcgacatttactttcgtagacaggtggagcttagtactatgtaccgccacatggaaaaacacaactacgagtcagccgccgaagccatccaagccgtgcgagataacaagctgcatgcttttatttgggacagcgcggtcctggagttcgaggcatcccagaagtgcgatctggttaccaccggggaactgttttttcgcagcggctttggcattggcatgcgcaaagattctccgtggaagcaaaacgtctctctctccatcctgaaaagtcacgaaaacggctttatggaagatctggataaaacctgggtcaggtatcaggagtgtgatagccgtagcaacgccccagccactcttaccttcgagaatatggcaggtgtgtttatgcttgtggcaggcggaatagtcgcaggcatttttctcattttcatcgaaattgcctataaacggcataaggatgccagaagaaagcagatgcaactggccttcgcggcagtcaatgtgtggcggaagaaccttcaggatagaaagtcaggacgcgcagaacccgaccccaagaaaaaggcaactttccgggctatcacatcaaccttggcatcttcgttcaagaggcgaaggtctagtaaggatactagtaccggggggggacgaggcgcactacagaatcaaaaagataccgttctccccagaagggccattgaaagggaggaagggcagctccagctgtgctctcgccatcgggagtcttag

SEQ ID NO: 171900 - DNA, 5142 bp, Artificial Sequence
  derived and/or modified sequence
ggtaaggctctggaaaagggggcgctgggagcgcattgcgagggggctggagagggagagaggagcggaagctgagggtgtgaaacggctggccccgaacacacctcgcggcgctccagtgattcctggtgtccgacctcagccccagtcagtgcgggtccagtttccaggctctcgcggaaggcctggctgagcacatgcggcagccacggtcaccctccctattcctcttagcccgaggaggggggtcccaagttacatggccacgcagatggggcctctccctcatttctgaaccttgtggggaggggaaccttgaagggagcgccccccagagccatggcttagggcctcccccacccctctggagctccagtctgcaagagtcaggagccgaaatatcgctgactgtgggtgacgactcttgcgcgcacacacacatacaagcgggcacgacgcgttcggtcctattaaaaggcacgcaagggtgcgggctgcacgcggtgacacggacccctctaacgtttccaaactgagctccctgcaggtccccgacagcacaggcccctgtcccaggacccctccaggcacgcgctcacacgcacacgcgcgctccccggctcacgcgcgctccgacacacacgctcacgcgaacgcaggcgcacgctctggcgcgggaggcgcccccttcgcctccgtgttgggaagcgggggcggcgggaggggcaggagacgttggccccgctcgcgtttctgcagctgctgcagtcgccgcagcgtccggaccggaaccagcgccgtccgcggagccgccgccgccgccgccgggccctttccaagccgggcgctcggagctgtgcccggccccgcttcagcaccgcggacagcgccggccgcgtggggctgagccccgagcccccgcgcacgcttcagcgccccttccctcggccgacgtcccgggaccgccgctccgggggagacgtggcgtccgcagcccgcggggccgggcgagcgcaggacggcccggaagccccgcgggggatgcgccgagggccccgcgttcgcgccgcgcagagccaggcccgcggcccgagcccatgagcaccatgcgcctgctgacgctcgccctgctgttctcctgctccgtcgcccgtgccgcgtgcgaccccaagatcgtcaacattggcgcggtgctgagcacgcggaagcacgagcagatgttccgcgaggccgtgaaccaggccaacaagcggcacggctcctggaagattcagctcaatgccacctccgtcacgcacaagcccaacgccatccagatggctctgtcggtgtgcgaggacctcatctccagccaggtctacgccatcctagttagccatccacctacccccaacgaccacttcactcccacccctgtctcctacacagccggcttctaccgcatacccgtgctggggctgaccacccgcatgtccatctactcggacaagagcatccacctgagcttcctgcgcaccgtgccgccctactcccaccagtccagcgtgtggtttgagatgatgcgtgtctacagctggaaccacatcatcctgctggtcagcgacgaccacgagggccgggcggctcagaaacgcctggagacgctgctggaggagcgtgagtccaaggcagagaaggtgctgcagtttgacccagggaccaagaacgtgacggccctgctgatggaggcgaaagagctggaggcccgggtcatcatcctttctgccagcgaggacgatgctgccactgtataccgcgcagccgcgatgctgaacatgacgggctccgggtacgtgtggctggtcggcgagcgcgagatctcggggaacgccctgcgctacgccccagacggcatcctcgggctgcagctcatcaacggcaagaacgagtcggcccacatcagcgacgccgtgggcgtggtggcccaggccgtgcacgagctcctcgagaaggagaacatcaccgacccgccgcggggctgcgtgggcaacaccaacatctggaagaccgggccgctcttcaagagagtgctgatgtcttccaagtatgcggatggggtgactggtcgcgtggagttcaatgaggatggggaccggaagttcgccaactacagcatcatgaacctgcagaaccgcaagctggtgcaagtgggcatctacaatggcacccacgtcatccctaatgacaggaagatcatctggccaggcggagagacagagaagcctcgagggtaccagatgtccaccagactgaagattgtgacgatccaccaggagcccttcgtgtacgtcaagcccacgctgagtgatgggacatgcaaggaggagttcacagtcaacggcgacccagtcaagaaggtgatctgcaccgggcccaacgacacgtcgccgggcagcccccgccacacggtgcctcagtgttgctacggcttttgcatcgacctgctcatcaagctggcacggaccatgaacttcacctacgaggtgcacctggtggcagatggcaagttcggcacacaggagcgggtgaacaacagcaacaagaaggagtggaatgggatgatgggcgagctgctcagcgggcaggcagacatgatcgtggcgccgctaaccataaacaacgagcgcgcgcagtacatcgagttttccaagcccttcaagtaccagggcctgactattctggtcaagaaggagattccccggagcacgctggactcgttcatgcagccgttccagagcacactgtggctgctggtggggctgtcggtgcacgtggtggccgtgatgctgtacctgctggaccgcttcagccccttcggccggttcaaggtgaacagcgaggaggaggaggaggacgcactgaccctgtcctcggccatgtggttctcctggggcgtcctgctcaactccggcatcggggaaggcgcccccagaagcttctcagcgcgcatcctgggcatggtgtgggccggctttgccatgatcatcgtggcctcctacaccgccaacctggcggccttcctggtgctggaccggccggaggagcgcatcacgggcatcaacgaccctcggctgaggaacccctcggacaagtttatctacgccacggtgaagcagagctccgtggatatctacttccggcgccaggtggagctgagcaccatgtaccggcatatggagaagcacaactacgagagtgcggcggaggccatccaggccgtgagagacaacaagctgcatgccttcatctgggactcggcggtgctggagttcgaggcctcgcagaagtgcgacctggtgacgactggagagctgtttttccgctcgggcttcggcataggcatgcgcaaagacagcccctggaagcagaacgtctccctgtccatcctcaagtcccacgagaatggcttcatggaagacctggacaagacgtgggttcggtatcaggaatgtgactcgcgcagcaacgcccctgcgacccttacttttgagaacatggccggggtcttcatgctggtagctgggggcatcgtggccgggatcttcctgattttcatcgagattgcctacaagcggcacaaggatgctcgccggaagcagatgcagctggcctttgccgccgttaacgtgtggcggaagaacctgcaggatagaaagagtggtagagcagagcctgaccctaaaaagaaagccacatttagggctatcacctccaccctggcttccagcttcaagaggcgtaggtcctccaaagacacgagcaccgggggtggacgcggcgctttgcaaaaccaaaaagacacagtgctgccgcgacgcgctattgagagggaggagggccagctgcagctgtgttcccgtcatagggagagctgagactccccgcccgccctcctctgccccctcccccgcagacagacagacagacggacgggacagcggcccggcccacgcagagccccggagcaccacggggtcgggggaggagcacccccagcctcccccaggctgcgcctgcccgcccgccggttggccggctggccggtccaccccgtcccggccccgcgcgtgcccccagcgtggggctaacgggcgccttgtctgtgtatttctattttgcagcagtaccatcccactgatatcacgggcccgctcaacctctcagatccctcggtcagcaccgtggtgtgaggcccccggaggcgcccacctgcccagttagcccggccaaggacactgatgggtcctgctgctcgggaaggcctgagggaagcccacccgccccagagactgcccaccctgggcctcccgtccgtccgcccgcccaccccgctgcctggcgggcagcccctgctggaccaaggtgcggaccggagcggctgaggacggggcagagctgagtcggctgggcagggccgcagggcgctccggcagaggcagggccctggggtctctgagcagtggggagcgggggctaactggccccaggcggaggggcttggagcagagacggcagccccatccttcccgcagcaccagcctgagccacagtggggcccatggccccagctggctgggtcgcccctcctcgggcgcctgcgctcctctgcagcctgagctccaccctcccctcttcttgcggcaccgcccacccacaccccgtctgccccttgaccccacacgccggggctggccctgccctcccccacggccgtccctgacttcccagctggcagcgcctcccgccgcctcgggccgcctcctccagactcgagagggctgagcccctcctctcctcgtccggcctgcagcccagaacgggcctccccgggggtccccggacgctggctcgggactgtcttcaaccctgccctgcaccttgggcacgggagagcgccacccgcccgcccccgccctcgctccgggtgcgtgaccggcccgccaccttgtacagaaccagcactcccagggcccgagcgcgtgccttccccgtgcggcccgtgcgcagccgcgctctgcccctccgtccccagggtgcaggcgcgcaccgcccaacccccacctcccggtgtatgcagtggtgatgcctaaaggaatgtcacgc

SEQ ID NO: 171901 - DNA, 2817 bp, Artificial Sequence
  derived and/or modified sequence
atgagcaccatgaggctgctgaccctggccctgctcttcagctgcagcgtggcccgggccgcctgtgaccccaagatcgtgaacattggagctgtgctgagcaccaggaagcatgagcagatgttccgggaggccgtgaaccaggccaacaagagacatggctcctggaagatccagctgaatgccacctctgtgacccacaagcccaatgccatccagatggccctgtctgtgtgtgaggacctgatcagcagccaggtgtatgccatcctggtgagccacccccccaccccaaatgaccacttcacccccacccctgtgtcctacacagctggcttctaccgcatccctgtgctgggcctgaccaccaggatgagcatctacagcgacaagagcatccacctgtccttcctgaggacagtgcccccctacagccaccagagctctgtgtggtttgagatgatgagggtgtacagctggaaccacatcatcctgctggtgtctgatgaccacgagggccgggccgcccagaagaggctggagaccctgctggaggagcgggagagcaaggccgagaaggtgctgcagtttgatcctggcaccaagaatgtgacagccctgctgatggaggccaaggagctggaggcccgggtcatcatcctgagcgcctctgaagatgatgctgccaccgtgtacagagctgctgccatgctgaacatgactggaagtggctacgtgtggctggtgggggagcgggagatctctggaaatgccctgcgctatgccccagatggcatcctgggcctgcagctgatcaatggcaagaatgaaagtgcccacatcagtgatgctgtgggcgtggtggcccaggccgtgcatgagctgctggagaaggagaacatcacagaccccccccggggctgtgtgggcaacaccaacatctggaagacaggccccctcttcaagagggtgctgatgagcagcaaatatgcagatggagtgacaggccgggtggagttcaatgaagatggagacaggaagtttgccaactacagcatcatgaacctgcagaacaggaagctggtgcaggtgggcatctacaacggcacccacgtgatccccaatgacaggaagatcatctggccaggaggagaaacagagaagccccggggctaccagatgagcacccggctgaagatcgtgaccatccaccaggagccctttgtgtatgtgaagcccaccctgagtgatggcacctgcaaggaggagttcaccgtgaatggagaccctgtgaagaaggtgatctgcaccggccccaatgacaccagccctggcagccccaggcacacagtgccccagtgctgctacggcttctgcatcgacctgctgatcaagctggcccggaccatgaacttcacctatgaggtgcacctggtggctgatggcaagtttggcacccaggagcgggtgaacaacagcaacaagaaggagtggaatggcatgatgggagagctgctgagcggccaggccgacatgattgtggcccccctgaccatcaacaatgaaagagcccagtacatcgagttcagcaagcccttcaagtaccagggcctgaccatcctggtgaagaaggagatccccaggagcaccctggacagcttcatgcagcccttccagagcaccctgtggctgctggtgggcctgtctgtgcacgtggtggccgtgatgctgtacctgctggaccgcttcagccccttcggccgcttcaaggtgaacagcgaggaggaggaggaggatgccctgaccctgagcagcgccatgtggttctcctggggcgtgctgctgaacagcggcattggagagggcgcccccaggagcttcagcgcccgcatcctgggcatggtgtgggccggctttgccatgatcatcgtggccagctacacagccaacctggccgccttcctggtgctggacaggcctgaggagcgcatcaccggcatcaatgacccccggctgaggaaccccagcgacaagttcatctatgccaccgtgaagcagagctctgtggacatctacttccggcggcaggtggagctgagcaccatgtaccgccacatggagaagcacaactatgaatctgctgctgaggccatccaggccgtgcgggacaacaagctgcacgccttcatctgggacagcgctgtgctggagtttgaggccagccagaagtgtgacctggtgaccactggagagctgttcttccgcagcggcttcggcatcggcatgaggaaggacagcccctggaagcagaatgtgtccctgagcatcctgaagagccatgaaaatggcttcatggaggacctggacaagacctgggtgcgctaccaggagtgtgacagccgcagcaatgccccagccaccctgacctttgagaacatggccggggtcttcatgctggtggccggcggcatcgtggccggcatcttcctgatcttcattgaaattgcctacaagaggcacaaggatgcccggaggaagcagatgcagctggcctttgctgctgtgaatgtgtggaggaagaacctgcaggacaggaagagcggccgggcagagccagaccccaagaagaaggccaccttccgggccatcaccagcaccctggccagcagcttcaagagaagaagaagcagcaaggacaccagcactggaggcggccgcggggccctgcagaaccagaaggacacagtgctgccccggcgggccatcgagcgggaggagggccagctgcagctgtgcagccgccaccgggagagctag

SEQ ID NO: 171902 - DNA, 2817 bp, Artificial Sequence
  derived and/or modified sequence
atgagcaccatgcggctgctgaccctggccctgctgttcagctgctctgtagcacgcgccgcctgtgatccgaagattgttaacattggagccgttctctctacccgcaaacacgaacagatgtttcgcgaagccgtgaatcaggctaataagaggcatggcagctggaagattcagctcaatgccacctctgtgactcataaacctaacgccatacaaatggcactgtctgtgtgtgaggatttgatttcgtcacaggtctatgccatcctcgtgagccaccccccaaccccgaatgaccatttcacacccactcccgtcagctacaccgctggattttatcggatccccgtgctgggactcaccacaaggatgagcatctatagtgacaaaagcatccacctcagtttcctaaggacagtgcccccatactcgcaccagtcatcagtctggttcgagatgatgagagtatattcgtggaaccacattattctattggtgtcggacgaccacgagggaagggccgcacagaagcggctcgagaccctgctggaagagagagagagtaaggccgaaaaagtacttcagtttgaccctgggaccaaaaacgtgacagcattgctaatggaagccaaggagctggaagcaagagtcattatcctctccgcgtcagaggacgacgcagccactgtgtatcgggcggcagcaatgctgaatatgaccggttccgggtacgtgtggctggtgggcgaaagggaaatcagcggcaacgccctcaggtatgccccagacggtatcctgggattgcagctcattaacgggaaaaatgagtctgcccacattagtgatgccgtcggcgtggtggcgcaagcagtgcacgagctgcttgagaaggaaaacattaccgatcccccccggggatgcgtggggaacaccaatatctggaaaacaggccctctctttaaacgtgtgctcatgagctccaaatatgccgatggggtgacgggccgagtggaatttaacgaggatggcgaccgcaagtttgctaattattccataatgaatctgcaaaatcggaagttagttcaggttggcatttataatggcacccacgtcatccccaacgatcgtaaaatcatctggcctgggggcgaaactgagaagcccagaggataccaaatgtccacgcggttgaagatcgtgaccatccaccaagagccgtttgtgtatgtaaagcccacactcagtgatggaacatgtaaggaggaatttactgtcaatggcgaccccgtgaaaaaggtaatctgtactggaccaaatgacacatcacctgggagtcctaggcacactgtaccacagtgctgctatggtttttgcattgacttacttataaaactggccaggaccatgaacttcacctacgaagtgcacctggttgctgatggcaaatttggcactcaagagagggtgaataactccaacaaaaaagagtggaacggtatgatgggggaattactgtctggacaggcagatatgattgtggctcccttgactatcaataacgaacgggcccaatacatagaattttcgaagccttttaagtaccagggcctgacgatactagtaaagaaagaaatccctcgcagcaccctggatagttttatgcagcccttccaatccacattatggctgctggtggggctgtcggtacatgtagtggccgtgatgctgtacctcctggataggttctccccatttggaagattcaaggtcaactcagaggaggaggaggaggacgccctgacactgagcagcgccatgtggttttcctggggggtgctgctgaattctgggataggcgagggagcgcccagatcttttagcgcgcgaattcttgggatggtgtgggcgggtttcgcaatgataattgtggcttcttataccgccaatctggccgcctttctcgtgctggatcgccccgaggagcggattaccggcatcaatgatcctcgacttcgcaacccatctgacaaatttatatacgcgaccgtgaaacagagctccgtcgatatctatttccgacgacaggtcgagcttagcacgatgtaccggcacatggaaaagcacaactacgagagcgctgcagaggccatccaggctgttcgcgataataagctgcatgcctttatctgggattccgctgttctggaattcgaagccagtcagaagtgcgatttggttacaacaggagaacttttttttagatccgggtttgggatagggatgcggaaggattctccctggaagcagaacgtgagcctctccatcttaaaatctcacgaaaatggcttcatggaggatctcgataagacgtgggtgaggtaccaagaatgtgacagccgctccaatgctcccgctactctgacatttgaaaatatggccggagtgttcatgctggtggccgggggaattgtcgccgggatcttccttatctttatcgagatagcttacaaacgccacaaagacgcccggcgcaaacagatgcagcttgccttcgctgccgtgaacgtctggagaaaaaatctacaagatcggaagtccgggcgagcagagccagatccaaagaaaaaagctaccttccgagctataaccagcacgctagccagcagctttaaaagaaggagaagctcaaaggatacctcaactggaggaggacggggtgctcttcagaatcaaaaagataccgtcttgccgaggagagccatcgaaagagaggagggtcaactgcagctgtgttccagacatagagagtcttag

SEQ ID NO: 171903 - DNA, 2817 bp, Artificial Sequence
  derived and/or modified sequence
atgtcaaccatgaggctgcttaccctggccctgttatttagctgctccgttgcgagagccgcttgcgacccaaagatagtcaacattggcgcagtcttgagcacccgcaagcacgagcaaatgtttcgcgaagcggtcaaccaagcaaacaagcgccatggatcttggaaaatacagttaaacgctactagcgtgactcacaagcctaacgccatacagatggcattatctgtgtgtgaagatctgataagttctcaagtgtatgcaattcttgtttctcacccccctacgccgaacgaccactttacgcccacaccagtgtcctacacagccggattctatagaattcccgtgctggggctgaccacaaggatgagcatttattccgataaatctatccatctcagcttcctgcggaccgtgcccccttatagtcatcagagcagcgtgtggtttgagatgatgcgggtgtactcatggaaccacattattctgctggtgtctgacgaccacgagggcagggcggctcagaagcgacttgagacattgttggaggagagagagtccaaagccgagaaggtgctgcagttcgacccaggaaccaaaaacgtgaccgcattattgatggaggcaaaggagcttgaggctcgagtgatcatcctatccgctagcgaggacgatgccgctaccgtgtacagagcagctgccatgctgaacatgaccggcagtggctacgtgtggttggtcggcgagcgggaaatatcaggcaatgccctacggtacgcccctgacgggatcctcggactgcagttaatcaatgggaagaatgagtcagcacacatcagcgacgctgtcggtgtcgtagctcaggccgtgcacgagttgctggagaaggagaatataaccgaccctcctcgaggctgtgtgggcaataccaacatatggaagacaggaccactattcaaacgggtcctaatgtcgagcaaatacgcggacggggtgaccgggagagtagaatttaacgaggatggagatagaaagtttgctaattattccattatgaatcttcagaaccgaaaactggtccaggtgggcatttacaatggcacacatgttatccctaacgataggaagatcatctggccaggtggggagaccgagaaacctagaggttaccagatgagcacccgcctgaagattgtcaccatacatcaggagcctttcgtgtacgtaaagcccacactgagcgatggtacctgcaaagaggaatttactgtgaatggggatcctgtcaagaaagtgatttgcactggcccaaacgataccagccccggaagtccaaggcatactgttccgcagtgttgttacggcttttgtatcgacttgcttatcaagctcgccagaaccatgaacttcacctatgaagtgcatctggtagccgacgggaaattcggtacccaggagcgcgtcaacaattccaataagaaagagtggaatggcatgatgggcgaactgctatccggacaggccgatatgatcgtggctccactgaccattaacaatgagcgcgctcagtatatcgaattcagcaagccgtttaaatatcagggactgactattctcgtcaaaaaggaaatacccagatccacactcgactcttttatgcagccttttcagtcgacactgtggctgctggtgggcctcagtgtccacgtcgttgccgtcatgctctacctcctcgatcggttcagccccttcggacgttttaaagtgaactccgaagaagaagaagaggacgccctgacgttatcaagcgcaatgtggttctcttggggcgtgctcttgaattccggaattggcgagggcgctccacgatccttttctgcccgtatcctgggcatggtgtgggctggtttcgcgatgattattgtcgcgagctacacggctaatcttgcggcatttctggtgctggatcgccctgaggaacgtattacagggatcaacgatccaaggctcaggaatccgagcgacaagttcatatacgcaacagttaagcagagctcagttgatatttatttcagaaggcaggtggagctgagcacgatgtataggcatatggaaaagcacaattacgaatccgccgcagaagcgatccaggcagtgcgagataacaagctgcacgctttcatttgggattccgctgttttagaattcgaggcatctcaaaaatgtgatcttgttactacaggcgaactgttttttcgcagtgggttcggaattggcatgcggaaagactcaccctggaaacaaaatgtaagtctgtcgattttgaaatcccacgaaaatgggtttatggaagatttggacaagacctgggttagatatcaagaatgcgattctaggtctaacgcccctgcaacactgaccttcgaaaatatggccggagtcttcatgcttgtggctggcggaatagtcgcaggcatatttctgatttttatcgagattgcctacaagcgtcataaggacgcccgacggaagcagatgcaattggcctttgctgcagtgaacgtgtggcgaaaaaacctgcaagaccgtaagagcggcagagcagagcctgatccaaagaagaaggccacttttagagctatcacctcaaccctcgcgtcatctttcaagagaagacggtcctcaaaggacacctcaactggcggaggacggggagctctgcagaatcaaaaggacaccgtactccccagaagggcaattgagagagaagagggccagctgcaactgtgctcccgacaccgggaaagctag

SEQ ID NO: 171904 - DNA, 2817 bp, Artificial Sequence
  derived and/or modified sequence
atgagcaccatgagactgctgaccctggccctgctgttcagctgcagcgtggccagagccgcctgcgaccccaagatcgtgaacatcggcgccgtgctgagcaccagaaagcacgagcagatgttcagagaggccgtgaaccaggccaacaagagacacggcagctggaagatccagctgaacgccaccagcgtgacccacaagcccaacgccatccagatggccctgagcgtgtgcgaggacctgatcagcagccaggtgtacgccatcctggtgagccacccccccacccccaacgaccacttcacccccacccccgtgagctacaccgccggcttctacagaatccccgtgctgggcctgaccaccagaatgagcatctacagcgacaagagcatccacctgagcttcctgagaaccgtgcccccctacagccaccagagcagcgtgtggttcgagatgatgagagtgtacagctggaaccacatcatcctgctggtgagcgacgaccacgagggcagagccgcccagaagagactggagaccctgctggaggagagagagagcaaggccgagaaggtgctgcagttcgaccccggcaccaagaacgtgaccgccctgctgatggaggccaaggagctggaggccagagtgatcatcctgagcgccagcgaggacgacgccgccaccgtgtacagagccgccgccatgctgaacatgaccggcagcggctacgtgtggctggtgggcgagagagagatcagcggcaacgccctgagatacgcccccgacggcatcctgggcctgcagctgatcaacggcaagaacgagagcgcccacatcagcgacgccgtgggcgtggtggcccaggccgtgcacgagctgctggagaaggagaacatcaccgacccccccagaggctgcgtgggcaacaccaacatctggaagaccggccccctgttcaagagagtgctgatgagcagcaagtacgccgacggcgtgaccggcagagtggagttcaacgaggacggcgacagaaagttcgccaactacagcatcatgaacctgcagaacagaaagctggtgcaggtgggcatctacaacggcacccacgtgatccccaacgacagaaagatcatctggcccggcggcgagaccgagaagcccagaggctaccagatgagcaccagactgaagatcgtgaccatccaccaggagcccttcgtgtacgtgaagcccaccctgagcgacggcacctgcaaggaggagttcaccgtgaacggcgaccccgtgaagaaggtgatctgcaccggccccaacgacaccagccccggcagccccagacacaccgtgccccagtgctgctacggcttctgcatcgacctgctgatcaagctggccagaaccatgaacttcacctacgaggtgcacctggtggccgacggcaagttcggcacccaggagagagtgaacaacagcaacaagaaggagtggaacggcatgatgggcgagctgctgagcggccaggccgacatgatcgtggcccccctgaccatcaacaacgagagagcccagtacatcgagttcagcaagcccttcaagtaccagggcctgaccatcctggtgaagaaggagatccccagaagcaccctggacagcttcatgcagcccttccagagcaccctgtggctgctggtgggcctgagcgtgcacgtggtggccgtgatgctgtacctgctggacagattcagccccttcggcagattcaaggtgaacagcgaggaggaggaggaggacgccctgaccctgagcagcgccatgtggttcagctggggcgtgctgctgaacagcggcatcggcgagggcgcccccagaagcttcagcgccagaatcctgggcatggtgtgggccggcttcgccatgatcatcgtggccagctacaccgccaacctggccgccttcctggtgctggacagacccgaggagagaatcaccggcatcaacgaccccagactgagaaaccccagcgacaagttcatctacgccaccgtgaagcagagcagcgtggacatctacttcagaagacaggtggagctgagcaccatgtacagacacatggagaagcacaactacgagagcgccgccgaggccatccaggccgtgagagacaacaagctgcacgccttcatctgggacagcgccgtgctggagttcgaggccagccagaagtgcgacctggtgaccaccggcgagctgttcttcagaagcggcttcggcatcggcatgagaaaggacagcccctggaagcagaacgtgagcctgagcatcctgaagagccacgagaacggcttcatggaggacctggacaagacctgggtgagataccaggagtgcgacagcagaagcaacgcccccgccaccctgaccttcgagaacatggccggcgtgttcatgctggtggccggcggcatcgtggccggcatcttcctgatcttcatcgagatcgcctacaagagacacaaggacgccagaagaaagcagatgcagctggccttcgccgccgtgaacgtgtggagaaagaacctgcaggacagaaagagcggcagagccgagcccgaccccaagaagaaggccaccttcagagccatcaccagcaccctggccagcagcttcaagagaagaagaagcagcaaggacaccagcaccggcggcggcagaggcgccctgcagaaccagaaggacaccgtgctgcccagaagagccatcgagagagaggagggccagctgcagctgtgcagcagacacagagagagctag

SEQ ID NO: 171905 - protein, 629 aa, Artificial Sequence
  derived and/or modified sequence
MEFSIKQSPLSVQSVVKCIKMKQAPEILGSANGKTPSCEVNRECSVFLSKAQLSSSLQEGVMQKFNGHDALPFIPADKLKDLTSRVFNGEPGAHDAKLRFESQEMKGIGTPPNTTPIKNGSPEIKLKITKTYMNGKPLFESSICGDSAADVSQSEENGQKPENKARRNRKRSIKYDSLLEQGLVEAALVSKISSPSDKKIPAKKESCPNTGRDKDHLLKYNVGDLVWSKVSGYPWWPCMVSADPLLHSYTKLKGQKKSARQYHVQFFGDAPERAWIFEKSLVAFEGEGQFEKLCQESAKQAPTKAEKIKLLKPISGKLRAQWEMGIVQAEEAASMSVEERKAKFTFLYVGDQLHLNPQVAKEAGIAAESLGEMAESSGVSEEAAENPKSVREECIPMKRRRRAKLCSSAETLESHPDIGKSTPQKTAEADPRRGVGSPPGRKKTTVSMPRSRKGDAASQFLVFCQKHRDEVVAEHPDASGEEIEELLRSQWSLLSEKQRARYNTKFALVAPVQAEEDSGNVNGKKRNHTKRIQDPTEDAEAEDTPRKRLRTDKHSLRKRDTITDKTARTSSYKAMEAASSLKSQAATKNLSDACKPLKKRNRASTAASSALGFSKSSSPSASLTENEVK

SEQ ID NO: 171906 - protein, 273 aa, Artificial Sequence
  derived and/or modified sequence
MEFSIKQSPLSVQSVVKCIKMKQAPEILGSANGKTPSCEVNRECSVFLSKAQLSSSLQEGVMQKFNGHDALPFIPADKLKDLTSRVFNGEPGAHDAKLRFESQEMKGIGTPPNTTPIKNGSPEIKLKITKTYMNGKPLFESSICGDSAADVSQSEENGQKPENKARRNRKRSIKYDSLLEQGLVEAALVSKISSPSDKKIPAKKESCPNTGRDKDHLLKYNVGDLVWSKVSGYPWWPCMVSADPLLHSYTKLKGIFKSKKFEHLKTSQIVLKD

SEQ ID NO: 171907 - protein, 37 aa, Artificial Sequence
  derived and/or modified sequence
MEFSIKQSPLSVQSVVKCIKMKQAPEILGSANGKTPS

SEQ ID NO: 171908 - protein, 392 aa, Artificial Sequence
  derived and/or modified sequence
MEFSIKQSPLSVQSVVKCIKMKQAPEILGSANGKTPSCEVNRECSVFLSKAQLSSSLQEGVMQKFNGHDALPFIPADKLKDLTSRVFNGEPGAHDAKLRFESQEMKGIGTPPNTTPIKNGSPEIKLKITKTYMNGKPLFESSICGDSAADVSQSEENGQKPENKARRNRKRSIKYDSLLEQGLVEAALVSKISSPSDKKIPAKKESCPNTGRDKDHLLKYNVGDLVWSKVSGYPWWPCMVSADPLLHSYTKLKGQKKSARQYHVQFFGDAPERAWIFEKSLVAFEGEGQFEKLCQESAKQAPTKAEKIKLLKPISGKLRAQWEMGIVQAEEAASMSVEERKAKFTFLYVGDQLHLNPQVAKEAGIAAESLGEMAESSGVSEEAAENPKSVRE

SEQ ID NO: 171909 - DNA, 1890 bp, Artificial Sequence
  derived and/or modified sequence
atggagttcagcatcaagcagagccccctgagcgtgcagagcgtggtgaagtgcatcaagatgaagcaggcccccgagatcctgggcagcgccaacggcaagacccccagctgcgaggtgaacagagagtgcagcgtgttcctgagcaaggcccagctgagcagcagcctgcaggagggcgtgatgcagaagttcaacggccacgacgccctgcccttcatccccgccgacaagctgaaggacctgaccagcagagtgttcaacggcgagcccggcgcccacgacgccaagctgagattcgagagccaggagatgaagggcatcggcaccccccccaacaccacccccatcaagaacggcagccccgagatcaagctgaagatcaccaagacctacatgaacggcaagcccctgttcgagagcagcatctgcggcgacagcgccgccgacgtgagccagagcgaggagaacggccagaagcccgagaacaaggccagaagaaacagaaagagaagcatcaagtacgacagcctgctggagcagggcctggtggaggccgccctggtgagcaagatcagcagccccagcgacaagaagatccccgccaagaaggagagctgccccaacaccggcagagacaaggaccacctgctgaagtacaacgtgggcgacctggtgtggagcaaggtgagcggctacccctggtggccctgcatggtgagcgccgaccccctgctgcacagctacaccaagctgaagggccagaagaagagcgccagacagtaccacgtgcagttcttcggcgacgcccccgagagagcctggatcttcgagaagagcctggtggccttcgagggcgagggccagttcgagaagctgtgccaggagagcgccaagcaggcccccaccaaggccgagaagatcaagctgctgaagcccatcagcggcaagctgagagcccagtgggagatgggcatcgtgcaggccgaggaggccgccagcatgagcgtggaggagagaaaggccaagttcaccttcctgtacgtgggcgaccagctgcacctgaacccccaggtggccaaggaggccggcatcgccgccgagagcctgggcgagatggccgagagcagcggcgtgagcgaggaggccgccgagaaccccaagagcgtgagagaggagtgcatccccatgaagagaagaagaagagccaagctgtgcagcagcgccgagaccctggagagccaccccgacatcggcaagagcaccccccagaagaccgccgaggccgaccccagaagaggcgtgggcagcccccccggcagaaagaagaccaccgtgagcatgcccagaagcagaaagggcgacgccgccagccagttcctggtgttctgccagaagcacagagacgaggtggtggccgagcaccccgacgccagcggcgaggagatcgaggagctgctgagaagccagtggagcctgctgagcgagaagcagagagccagatacaacaccaagttcgccctggtggcccccgtgcaggccgaggaggacagcggcaacgtgaacggcaagaagagaaaccacaccaagagaatccaggaccccaccgaggacgccgaggccgaggacacccccagaaagagactgagaaccgacaagcacagcctgagaaagagagacaccatcaccgacaagaccgccagaaccagcagctacaaggccatggaggccgccagcagcctgaagagccaggccgccaccaagaacctgagcgacgcctgcaagcccctgaagaagagaaacagagccagcaccgccgccagcagcgccctgggcttcagcaagagcagcagccccagcgccagcctgaccgagaacgaggtgaagtag

SEQ ID NO: 171910 - DNA, 822 bp, Artificial Sequence
  derived and/or modified sequence
atggagttcagcatcaagcagagccccctgagcgtgcagagcgtggtgaagtgcatcaagatgaagcaggcccccgagatcctgggcagcgccaacggcaagacccccagctgcgaggtgaacagagagtgcagcgtgttcctgagcaaggcccagctgagcagcagcctgcaggagggcgtgatgcagaagttcaacggccacgacgccctgcccttcatccccgccgacaagctgaaggacctgaccagcagagtgttcaacggcgagcccggcgcccacgacgccaagctgagattcgagagccaggagatgaagggcatcggcaccccccccaacaccacccccatcaagaacggcagccccgagatcaagctgaagatcaccaagacctacatgaacggcaagcccctgttcgagagcagcatctgcggcgacagcgccgccgacgtgagccagagcgaggagaacggccagaagcccgagaacaaggccagaagaaacagaaagagaagcatcaagtacgacagcctgctggagcagggcctggtggaggccgccctggtgagcaagatcagcagccccagcgacaagaagatccccgccaagaaggagagctgccccaacaccggcagagacaaggaccacctgctgaagtacaacgtgggcgacctggtgtggagcaaggtgagcggctacccctggtggccctgcatggtgagcgccgaccccctgctgcacagctacaccaagctgaagggcatcttcaagagcaagaagttcgagcacctgaagaccagccagatcgtgctgaaggactag

SEQ ID NO: 171911 - DNA, 1179 bp, Artificial Sequence
  derived and/or modified sequence
atggagttcagcatcaagcagagccccctgagcgtgcagagcgtggtgaagtgcatcaagatgaagcaggcccccgagatcctgggcagcgccaacggcaagacccccagctgcgaggtgaacagagagtgcagcgtgttcctgagcaaggcccagctgagcagcagcctgcaggagggcgtgatgcagaagttcaacggccacgacgccctgcccttcatccccgccgacaagctgaaggacctgaccagcagagtgttcaacggcgagcccggcgcccacgacgccaagctgagattcgagagccaggagatgaagggcatcggcaccccccccaacaccacccccatcaagaacggcagccccgagatcaagctgaagatcaccaagacctacatgaacggcaagcccctgttcgagagcagcatctgcggcgacagcgccgccgacgtgagccagagcgaggagaacggccagaagcccgagaacaaggccagaagaaacagaaagagaagcatcaagtacgacagcctgctggagcagggcctggtggaggccgccctggtgagcaagatcagcagccccagcgacaagaagatccccgccaagaaggagagctgccccaacaccggcagagacaaggaccacctgctgaagtacaacgtgggcgacctggtgtggagcaaggtgagcggctacccctggtggccctgcatggtgagcgccgaccccctgctgcacagctacaccaagctgaagggccagaagaagagcgccagacagtaccacgtgcagttcttcggcgacgcccccgagagagcctggatcttcgagaagagcctggtggccttcgagggcgagggccagttcgagaagctgtgccaggagagcgccaagcaggcccccaccaaggccgagaagatcaagctgctgaagcccatcagcggcaagctgagagcccagtgggagatgggcatcgtgcaggccgaggaggccgccagcatgagcgtggaggagagaaaggccaagttcaccttcctgtacgtgggcgaccagctgcacctgaacccccaggtggccaaggaggccggcatcgccgccgagagcctgggcgagatggccgagagcagcggcgtgagcgaggaggccgccgagaaccccaagagcgtgagagagtag

SEQ ID NO: 171912 - DNA, 600 bp, Artificial Sequence
  derived and/or modified sequence
atggagttcagcatcaagcagagccccctgagcgtgcagagcgtggtgaagtgcatcaagatgaagcaggcccccgagatcctgggcagcgccaacggcaagacccccagctgcgaggtgaacagagagtgcagcgtgttcctgagcaaggcccagctgagcagcagcctgcaggagggcgtgatgcagaagttcaacggccacgacgccctgcccttcatccccgccgacaagctgaaggacctgaccagcagagtgttcaacggcgagcccggcgcccacgacgccaagctgagattcgagagccaggagatgaagggcatcggcaccccccccaacaccacccccatcaagaacggcagccccgagatcaagctgaagatcaccaagacctacatgaacggcaagcccctgttcgagagcagcatctgcggcgacagcgccgccgacgtgagccagagcgaggagaacggccagaagcccgagaacaaggccagaagaaacagaaagagaagcatcaagtacgacagcctgctggagcagggcctggtggaggccgccctggtgagcaagatcagcagccccagcgacaagaagtag

SEQ ID NO: 171913 - DNA, 1890 bp, Artificial Sequence
  derived and/or modified sequence
atggagttcagcataaagcagagcccgctttccgtccaaagtgttgtcaagtgcatcaaaatgaaacaggccccagagattcttggtagtgctaatggaaagacgccctcttgcgaggttaatagagaatgcagcgtcttcctttctaaggctcagctgagtagttctctccaggaaggcgtgatgcagaagttcaacggacacgatgctctgccttttatccctgccgacaaacttaaagacttaaccagccgagttttcaatggtgaaccaggagctcacgacgcaaagctgagattcgaaagccaagagatgaaagggatcggcacgccgcccaatacaacgccaatcaaaaacggctcgcccgaaatcaagttaaagatcactaagacctatatgaacggaaagcctctgttcgaatcttccatctgtggtgactcggcagctgacgtctcacagagtgaggaaaacggccagaaaccagagaacaaagctcgccgcaacagaaaacgatcgattaaatacgacagcctattggagcagggcctggtcgaagccgctttggtgagcaagatctcttcacctagcgataagaaaatcccggcgaaaaaagaaagctgtccaaatacagggcgtgataaagatcacctgctgaaatacaatgtaggtgacctagtgtggtccaaggtttccggttacccgtggtggccgtgcatggtgagtgccgatcccctgctgcacagctacactaaattgaaaggtcagaagaaatccgctcgacagtaccacgtgcagttcttcggtgatgctcccgaacgcgcgtggatcttcgaaaagtctctggtcgccttcgaaggtgagggccagttcgagaaactctgtcaggagtccgctaaacaagccccaacaaaagctgaaaaaataaaattgctcaagcccatttctggcaagctgagagctcagtgggaaatgggcatcgtgcaggctgaggaggctgcatctatgtcagtggaggagagaaaagccaagttcacatttctgtacgtgggcgatcagcttcacctgaacccccaggtcgctaaagaagcagggattgccgcagagtcgcttggtgaaatggccgagtcttctggtgtgtccgaggaagccgctgagaaccccaaatctgttagggaagagtgcattcccatgaagaggagacgacgggccaaactttgcagtagtgcggaaacgttggaatcccatcccgacattgggaaatctactcctcagaagaccgcagaagccgatcctcggcggggtgtcggcagcccccccggtcgaaaaaagaccaccgtatcaatgccacgttcccgcaagggagatgctgcctctcagttcctggtcttttgtcagaagcacagggatgaagttgttgccgagcacccggacgccagcggagaggagatagaggaactactgcgcagtcagtggagcctgctgtccgagaaacagagggctcggtacaacacaaagtttgccctcgtggctcctgtgcaggccgaggaggactctgggaatgttaacggaaagaagaggaaccataccaaaagaatacaggatcctactgaggatgcagaagcagaggacacacccaggaagagactgcgtactgataagcactcactgaggaaaagagacacaataacagataaaacagctagaaccagctcctacaaagccatggaggccgcctccagtcttaagtcccaggcagctaccaaaaacctgtccgacgcttgcaagcctctcaagaaaaggaatcgcgcctcgaccgccgccagcagcgcactcggcttttcaaaatccagcagcccgtccgcaagcctaacggagaacgaggtcaagtag

SEQ ID NO: 171914 - DNA, 822 bp, Artificial Sequence
  derived and/or modified sequence
atggaattctctataaagcagtcccctttatccgtgcagagtgtagtgaagtgtattaagatgaagcaggctcccgagattttgggatccgccaatggcaaaacaccgtcatgcgaagtcaatcgagagtgttcggttttcctgtcaaaggctcaacttagttcctcacttcaggagggtgtgatgcagaaatttaatggtcatgacgccctgccttttattcctgcagacaagctcaaagatctcacttctagggtttttaatggcgaaccaggggcccatgacgcaaaactgaggttcgagtcgcaggaaatgaagggtatcggcacccccccgaacaccacgcccatcaagaatgggtccccagagattaagctgaagatcacgaaaacctacatgaatggcaaaccgctcttcgaatcgtctatttgcggtgatagtgccgccgacgtcagtcagagtgaggagaatgggcagaagcccgagaataaagcaaggcgcaatcgaaagagaagcattaagtacgacagcttactagaacagggccttgttgaggccgcccttgtaagcaaaatatcttcccctagtgataagaagattcccgcgaaaaaggagagttgtcccaacacaggacgtgataaggatcatctccttaaatacaatgtcggtgacctggtatggtccaaagtgagtggttacccctggtggccttgcatggtttccgcggaccccctgttgcactcgtatacaaagctcaaaggaatcttcaagtcaaagaagtttgagcatctgaagacatcccagatagtactgaaggactag

SEQ ID NO: 171915 - DNA, 1179 bp, Artificial Sequence
  derived and/or modified sequence
atggaatttagcatcaagcagtctcccttgagtgtgcaaagtgttgtaaaatgcattaagatgaagcaagcccccgagatcctgggctcagctaatggaaagaccccgagctgtgaggtcaatcgcgaatgcagtgtgttcttgagtaaggcacagctgagctcttcactgcaggagggtgtgatgcagaaattcaacggtcacgatgccttgccattcatcccagccgacaagctgaaggatctgacaagcagagtattcaacggcgagcccggcgcacacgacgcaaaactgaggttcgaaagtcaggagatgaaaggcataggcacaccaccaaatacaacacccatcaagaacggaagccccgagatcaaattgaaaattacaaagacttatatgaatggcaagccactattcgaatccagcatttgcggggactctgcagcagatgtctcacagagcgaggagaacggccaaaagcctgagaataaggcccggcggaatcggaagaggtcaataaagtacgattcactgctcgaacagggccttgtggaagccgcactggtctctaagatcagttccccatctgacaagaagattcctgctaaaaaggagagctgccctaatactggtcgggataaggaccacttgcttaaatataacgtcggggatttggtatggtcgaaggtgtccggatacccttggtggccctgtatggtgtctgctgacccgctactgcattcatacacaaagctaaaagggcaaaagaagtcagctcgacagtatcatgtccagttctttggtgacgccccagagcgggcctggatatttgagaaatccctggtggcattcgaaggcgagggccagttcgagaaactctgtcaggagtccgccaaacaggctccaacgaaagccgagaaaattaagctgctgaaaccaatatccggcaaattgagggcacaatgggagatgggcatcgtgcaggctgaggaagctgctagcatgagtgtggaggagcgaaaggcaaagttcaccttcctttacgtcggagatcagctccatctgaacccgcaggtggcaaaggaggcgggcattgccgcagagtcactcggcgaaatggctgagagtagtggcgtgtccgaagaggccgccgagaatccaaaatctgttagggaatag

SEQ ID NO: 171916 - DNA, 1890 bp, Artificial Sequence
  derived and/or modified sequence
atggaattttctattaagcagagccctttatcagtccagtcagttgtgaagtgcatcaaaatgaaacaggcacccgagatcttaggaagcgctaatggaaaaactccgtcatgcgaagtgaacagggagtgcagtgtgtttctgtctaaggcccagctttcttcatctctccaggagggggtgatgcaaaagttcaacggacatgacgccctgcccttcattcccgcagataagctgaaggatctcaccagccgcgtgttcaacggggagccgggggcacacgatgcgaaactgcgcttcgaatcacaggagatgaaaggcatcgggacccctccaaacacaacccctattaaaaacggctcaccggaaattaaactgaagattacgaagacatacatgaatggcaagccgctttttgagtcctctatctgcggcgattccgccgccgatgttagccaatccgaagagaatgggcagaaaccagagaataaagccaggcgtaacagaaaacgctcaataaagtacgactcactcctggagcaaggattggtcgaggccgcgcttgtgtctaagatctccagccctagcgacaagaagatccctgcgaagaaagagtcttgcccaaataccggacgcgacaaggaccaccttcttaaatacaatgtgggcgacttggtgtggtcgaaagtgtctgggtatccatggtggccctgcatggtctctgcggacccactgctgcacagctataccaaactgaagggtcagaagaaatctgccaggcaataccatgtgcagttctttggcgatgcccccgaaagagcgtggattttcgagaagtccctggtggcgtttgaaggcgaagggcaattcgagaagctgtgccaggagtccgcaaaacaggccccaactaaagctgaaaaaattaagctcttgaaaccaatctccgggaagctgagagcccagtgggaaatgggtatagtgcaggcggaggaagcagccagcatgagcgtggaggagaggaaggccaaatttacattcctgtacgttggcgaccagctgcatctgaacccacaagtagccaaggaagccggcatcgcggcagagagcctcggtgaaatggccgagtccagcggcgtcagtgaggaggctgccgagaatcccaagagtgtgcgagaagagtgcatcccaatgaagaggcggcgacgtgcaaaactttgttcttctgctgagactctggagtctcatcctgacatcgggaaatccacaccacagaaaacagccgaggcagatccccggcggggggtaggctcccctccaggtcgcaagaagactacagtgtcaatgccacgctcccggaagggagatgccgcctcgcaattcttggtgttctgtcaaaagcatagagacgaagtggtggcggaacaccccgatgcctctggtgaggaaattgaggagctcctgagaagccagtggtcccttttatcggagaaacagagggcgaggtacaacaccaaattcgccctcgtcgcccccgttcaggcagaggaggattctggtaatgtgaatggcaaaaagaggaatcacaccaaacgaattcaggacccaacggaagatgccgaagccgaagacacaccgcgcaaaagactccggaccgataagcattcactccgcaagcgggatacgatcaccgataaaacagcccgcacaagctcctataaagccatggaagccgcttcatctctgaagagtcaagccgctacgaaaaatctgtccgatgcctgcaaacctttaaagaagcgtaatagggcatccacagccgcctcaagcgcccttggattctccaaaagctcatctccaagcgccagtctgacggagaatgaagttaagtag

SEQ ID NO: 171917 - DNA, 600 bp, Artificial Sequence
  derived and/or modified sequence
atggaattctctattaagcagtctcccctgagcgtgcagagcgtcgtcaagtgcatcaaaatgaaacaagcaccagagattctgggcagcgcgaatgggaaaactccctcttgcgaagtgaaccgggaatgttccgtgttcctgtctaaggcacagctttctagctcactacaggagggggtgatgcagaagtttaatgggcacgacgccctgccattcatcccagccgataagctgaaggacctgacttctagagttttcaatggagagcccggcgcccacgatgctaaacttagatttgaatcacaagaaatgaagggcattggaacccctcccaatactactcccattaagaatggcagccccgaaataaagctcaagattaccaagacctatatgaatggaaagccgttgttcgagagctctatttgtggtgattccgccgccgacgtgagtcagtccgaagagaacgggcagaagccggaaaacaaggcccgcaggaaccgaaagagatctattaagtatgattccctgctggaacagggccttgtggaagcggctctagtttctaaaatttcctctccttccgataagaagtag

SEQ ID NO: 171918 - DNA, 1890 bp, Artificial Sequence
  derived and/or modified sequence
atggagttcagcatcaagcagagccccctgtctgtgcagagcgtggtgaagtgcatcaagatgaagcaggcccctgagatcctgggcagcgccaacgggaagacccccagctgtgaggtgaacagagaatgttctgtgttcctgagcaaggcccagctgagcagcagcctgcaggagggcgtgatgcagaagttcaacggccatgatgccctgcccttcatcccagctgacaagctgaaggacctgaccagcagggtcttcaacggggagcccggggcccatgatgccaagctgcgctttgagagccaggagatgaagggcatcggcaccccacccaacaccacccccatcaagaatggcagccctgagatcaagctgaagatcaccaagacctacatgaatggcaagcccctgtttgagagcagcatctgtggggacagcgctgctgatgtgtcccagagcgaggagaatggccagaagccagagaacaaggcccggaggaacaggaagaggagcatcaagtatgacagcctgctggagcagggcctggtggaggccgccctggtgtccaagatcagcagccccagcgacaagaagatcccagccaagaaggagagctgccccaacacaggccgggacaaggaccacctgctgaagtacaacgtgggggacctggtgtggagcaaggtgtctggctacccctggtggccctgcatggtgtctgctgaccccctgctgcacagctacaccaagctgaagggccagaagaagagcgcccggcagtaccacgtgcagttctttggagatgcccctgagcgggcctggatctttgagaagagcctggtggcctttgaaggagagggccagtttgagaagctgtgccaggagagcgccaagcaggcccccaccaaggccgagaagatcaagctgctgaagcccatcagcggcaagctgcgggcccagtgggagatgggcatcgtgcaggccgaggaggccgcctccatgtctgtggaggagaggaaggccaagttcaccttcctgtatgtgggggaccagctgcacctgaacccccaggtggccaaggaggccggcattgctgctgagagcctgggggagatggccgagagcagtggagtgtctgaggaggccgctgagaaccccaagtctgtgcgggaggagtgcatccccatgaagagaagaagaagagccaagctgtgcagcagcgctgagaccctggagagccacccagacatcggcaagagcaccccccagaagacagctgaggccgacccccggcggggcgtgggcagccccccaggcaggaagaagaccaccgtgtccatgcccaggagcaggaaaggagatgctgccagccagttcctggtgttctgccagaagcacagagatgaggtggtggccgagcacccagatgccagcggggaggagattgaggagctgctgcggagccagtggagcctgctgtctgagaagcagagggcccgctacaacaccaagtttgccctggtggcccctgtgcaggccgaggaggacagcggaaatgtgaatggcaagaagaggaaccacaccaagaggatccaggaccccacagaagatgctgaggccgaggacacccccaggaagaggctgaggacagacaagcacagcctgaggaagagggacaccatcacagacaagacagcccggaccagcagctacaaggccatggaggccgccagcagcctgaagagccaggccgccaccaagaacctgagtgatgcctgcaagcccctgaagaagaggaacagagccagcacagctgccagcagcgccctgggcttcagcaagagcagcagccccagcgccagcctgacagaaaatgaggtgaagtag

SEQ ID NO: 171919 - DNA, 822 bp, Artificial Sequence
  derived and/or modified sequence
atggagttcagcatcaagcagagccccctgtctgtgcagagcgtggtgaagtgcatcaagatgaagcaggcccctgagatcctgggcagcgccaacgggaagacccccagctgtgaggtgaacagagaatgttctgtgttcctgagcaaggcccagctgagcagcagcctgcaggagggcgtgatgcagaagttcaacggccatgatgccctgcccttcatcccagctgacaagctgaaggacctgaccagcagggtcttcaacggggagcccggggcccatgatgccaagctgcgctttgagagccaggagatgaagggcatcggcaccccacccaacaccacccccatcaagaatggcagccctgagatcaagctgaagatcaccaagacctacatgaatggcaagcccctgtttgagagcagcatctgtggggacagcgctgctgatgtgtcccagagcgaggagaatggccagaagccagagaacaaggcccggaggaacaggaagaggagcatcaagtatgacagcctgctggagcagggcctggtggaggccgccctggtgtccaagatcagcagccccagcgacaagaagatcccagccaagaaggagagctgccccaacacaggccgggacaaggaccacctgctgaagtacaacgtgggggacctggtgtggagcaaggtgtctggctacccctggtggccctgcatggtgtctgctgaccccctgctgcacagctacaccaagctgaagggcatcttcaagagcaagaagtttgagcacctgaagaccagccagatcgtgctgaaggactag

SEQ ID NO: 171920 - DNA, 1179 bp, Artificial Sequence
  derived and/or modified sequence
atggagttcagcatcaagcagagccccctgtctgtgcagagcgtggtgaagtgcatcaagatgaagcaggcccctgagatcctgggcagcgccaacgggaagacccccagctgtgaggtgaacagagaatgttctgtgttcctgagcaaggcccagctgagcagcagcctgcaggagggcgtgatgcagaagttcaacggccatgatgccctgcccttcatcccagctgacaagctgaaggacctgaccagcagggtcttcaacggggagcccggggcccatgatgccaagctgcgctttgagagccaggagatgaagggcatcggcaccccacccaacaccacccccatcaagaatggcagccctgagatcaagctgaagatcaccaagacctacatgaatggcaagcccctgtttgagagcagcatctgtggggacagcgctgctgatgtgtcccagagcgaggagaatggccagaagccagagaacaaggcccggaggaacaggaagaggagcatcaagtatgacagcctgctggagcagggcctggtggaggccgccctggtgtccaagatcagcagccccagcgacaagaagatcccagccaagaaggagagctgccccaacacaggccgggacaaggaccacctgctgaagtacaacgtgggggacctggtgtggagcaaggtgtctggctacccctggtggccctgcatggtgtctgctgaccccctgctgcacagctacaccaagctgaagggccagaagaagagcgcccggcagtaccacgtgcagttctttggagatgcccctgagcgggcctggatctttgagaagagcctggtggcctttgaaggagagggccagtttgagaagctgtgccaggagagcgccaagcaggcccccaccaaggccgagaagatcaagctgctgaagcccatcagcggcaagctgcgggcccagtgggagatgggcatcgtgcaggccgaggaggccgcctccatgtctgtggaggagaggaaggccaagttcaccttcctgtatgtgggggaccagctgcacctgaacccccaggtggccaaggaggccggcattgctgctgagagcctgggggagatggccgagagcagtggagtgtctgaggaggccgctgagaaccccaagtctgtgcgggagtag

SEQ ID NO: 171921 - DNA, 600 bp, Artificial Sequence
  derived and/or modified sequence
atggagttcagcatcaagcagagccccctgtctgtgcagagcgtggtgaagtgcatcaagatgaagcaggcccctgagatcctgggcagcgccaacgggaagacccccagctgtgaggtgaacagagaatgttctgtgttcctgagcaaggcccagctgagcagcagcctgcaggagggcgtgatgcagaagttcaacggccatgatgccctgcccttcatcccagctgacaagctgaaggacctgaccagcagggtcttcaacggggagcccggggcccatgatgccaagctgcgctttgagagccaggagatgaagggcatcggcaccccacccaacaccacccccatcaagaatggcagccctgagatcaagctgaagatcaccaagacctacatgaatggcaagcccctgtttgagagcagcatctgtggggacagcgctgctgatgtgtcccagagcgaggagaatggccagaagccagagaacaaggcccggaggaacaggaagaggagcatcaagtatgacagcctgctggagcagggcctggtggaggccgccctggtgtccaagatcagcagccccagcgacaagaagtag

SEQ ID NO: 171922 - DNA, 1890 bp, Artificial Sequence
  derived and/or modified sequence
atggagttcagcatcaagcagagccccctgagcgtgcagagcgtggtgaagtgtatcaaaatgaagcaagcgcccgaaatcctaggcagtgccaacggcaagacaccatcctgtgaagtgaatcgcgagtgcagtgtatttttgagtaaggctcagctttcgagctcactgcaggagggagtcatgcaaaaatttaatgggcatgacgctctcccctttataccagcagacaagttaaaagaccttactagtagagtgtttaatggagaacctggggctcacgatgcaaagcttaggtttgagtcgcaagaaatgaagggcatcggaaccccaccaaacaccacccctatcaaaaatggtagtcccgagatcaagctgaaaatcactaaaacatatatgaacggcaagcctctgttcgagtcatccatttgtggagattctgcggccgacgttagccaatccgaggagaatggtcagaaacctgagaataaggctcgtaggaataggaaacgctccatcaagtacgattccctcctggagcaggggctcgtcgaggccgcccttgttagtaagatctccagcccctccgacaagaagataccagccaaaaaggagtcctgtcccaataccggacgggacaaagatcatttgctgaagtacaacgtcggtgacctggtctggagtaaagttagcggttacccctggtggccttgcatggtctctgccgatccgctgcttcactcttacacaaaactcaaaggacagaaaaaatccgctcggcagtaccacgttcagtttttcggcgacgcaccagagagagcctggattttcgagaaaagcctggtcgccttcgagggggaggggcagttcgagaagctgtgtcaggagtccgctaaacaagctccaacaaaggccgagaaaatcaagctcctgaaacctatctcgggtaaactgagggcccagtgggaaatgggcatcgtccaggccgaagaggccgccagcatgtctgttgaagaaaggaaagctaagttcacattcctgtatgttggggatcagctgcacctcaaccctcaagtcgccaaggaggctggcatcgcagccgaatctttgggagaaatggctgaatcatccggggtttctgaagaagcagccgagaacccaaaatctgtcagagaagagtgcatcccaatgaagcgccggagaagggctaagctgtgttccagtgccgaaactttggagtctcaccccgacattggaaaatctactccccaaaagacggctgaggctgatccccgccggggggtaggtagtcctcccggtcgcaaaaaaacgactgtgtcaatgccaagatctagaaagggcgacgccgctagccagtttctggttttttgtcaaaaacatcgggatgaggttgtggcagagcacccagatgcctctggagaagagatcgaggagctccttagatcccagtggtcacttctgtcggagaaacagcgggctcgctacaatactaaatttgctctggtcgcccccgtgcaagccgaggaggactcaggcaatgtcaacggaaagaagaggaatcacaccaagagaatacaggaccctaccgaagatgcggaggcagaggacactccccgcaagagactgcgcaccgacaaacattcgctcagaaaacgcgacactataacagacaaaactgcccggacctcttcctacaaagcaatggaggcagccagctccttgaaatctcaggctgcaaccaagaatttgtccgatgcgtgtaagcccctgaagaaacgaaacagggcaagtaccgccgcgtcgagcgccctgggcttttccaaatcttctagccctagcgcttcactgacggagaatgaggtcaagtag

SEQ ID NO: 171923 - DNA, 822 bp, Artificial Sequence
  derived and/or modified sequence
atggagttcagcatcaagcagagccccctgagcgtgcagagcgtggtcaaatgcatcaaaatgaagcaggcaccggaaatcctcggtagcgctaacggcaagaccccctcctgcgaggtgaatagggaatgcagcgtttttctgagcaaagcccagctgtccagttctttgcaggagggagttatgcaaaagttcaacggacatgacgccctgcccttcatacctgccgacaagctcaaggatttaacaagcagagtatttaatggggagcccggcgctcacgatgccaaactgcgcttcgagtcgcaggaaatgaagggtataggtactccccccaacactactccaataaaaaatgggtctcccgaaatcaaactgaagattaccaagacttacatgaatgggaaacccctgttcgaatcctcaatctgcggagacagtgcagcggacgtttcccaaagtgaggagaatggccagaagccagagaataaggctcgacggaaccggaaacgaagcattaagtatgatagtctgcttgagcagggcctggtcgaagccgcgctggtgagcaagatctctagtccctctgataagaagatcccggccaaaaaggaaagttgccccaatacgggccgcgataaggatcatttattgaagtacaacgtgggtgacctggtgtggtcaaaggtctccggctatccctggtggccatgtatggtctccgccgatccgctcctgcactcctacacaaagctcaaagggatatttaaaagtaagaagttcgaacatctgaagacttcccagattgttctgaaagattag

SEQ ID NO: 171924 - DNA, 1179 bp, Artificial Sequence
  derived and/or modified sequence
atggagttcagcatcaagcagagccccctgagcgtgcagagcgtggtcaagtgcattaagatgaagcaggcaccggagatcctgggcagcgctaacggtaagaccccttcttgcgaggtgaatcgtgaatgctctgtgttcttgtcaaaagcacagctatccagcagtctgcaggaaggggtaatgcagaagttcaatgggcacgacgccctacctttcattcccgctgataaattgaaggatcttacttcacgcgtattcaacggagagcccggggctcatgacgcaaagctgcgcttcgagtctcaagaaatgaagggcatcggaaccccaccgaatacaactcccatcaaaaatggttcacctgagatcaagttaaagatcaccaaaacctacatgaacgggaagcctctgttcgaatcctctatctgtggcgattccgccgctgatgtatcacagtccgaagaaaatggccagaagcctgaaaacaaggcccggcgaaataggaaaagaagcatcaaatatgatagcctgttggaacaagggttagtggaagctgccctcgtgagcaaaatctccagccctagcgataagaagatcccggccaagaaagagtcatgtcctaatactggtcgcgataaggaccacctcctcaaatataacgtcggtgatcttgtgtggagcaaggtctcaggttacccttggtggccatgcatggtctcggctgatccattgctgcactcctatacaaaactcaaaggccagaagaagtctgctaggcagtatcacgtacagttttttggcgatgcccctgaaagggcctggattttcgaaaagtctctggttgccttcgagggtgagggccagttcgagaaactctgccaggagagtgccaagcaagctcccacaaaggccgaaaagataaaactcctgaagccgatcagtggaaaactgagagctcaatgggagatggggatcgtccaggccgaagaggcagcgtcaatgtcagtggaggaacgtaaggctaagttcacttttctgtatgtcggcgaccagcttcatctcaatccacaagtggccaaggaggcaggcattgcagctgagagcctcggagaaatggccgagtcaagtggggtctccgaagaggcagcagagaaccctaagagcgtccgggagtag

SEQ ID NO: 171925 - DNA, 1890 bp, Artificial Sequence
  derived and/or modified sequence
atggagttcagcatcaagcagagccccctgagcgtgcagagcgtggtcaagtgtataaagatgaagcaggcccctgagattctgggaagtgctaacggcaaaacaccgagctgcgaagtgaacagagagtgttccgtcttccttagtaaagcccagctgtcaagctctttacaggagggcgtgatgcagaaatttaatggacacgacgcgttgccctttattcccgccgataaactcaaagatctcacctcccgggtcttcaatggtgagcctggagcgcacgatgccaagctgagattcgagtcgcaggagatgaaaggaattggaacacctcccaacacaactccaatcaagaatgggtcacccgagatcaagctgaagatcactaagacctacatgaacggcaagcccttgttcgaatcttctatctgcggcgattcggccgctgacgtgtcccagtctgaagagaacggccagaagcccgagaataaggcccgccgaaaccgcaagcgctcaatcaagtacgattctcttctagaacaaggtctggtggaagcagctctcgtgtctaaaatctcaagcccatcagacaagaagatcccggcgaaaaaagaatcatgccctaacaccggccgggacaaagatcacctgctgaagtacaatgtcggtgatcttgtctggagcaaagtctccgggtatccgtggtggccatgtatggtttccgctgacccccttttacacagttacacgaaactgaagggccagaaaaaatctgcaagacagtaccacgtgcagttcttcggggacgcgccggagagggcatggattttcgagaaatcactggtggctttcgagggtgaaggacagtttgagaagttgtgtcaagaaagcgcaaagcaggcacctaccaaggcggagaaaatcaagctcttaaaacctatcagcggaaagttacgcgcccaatgggagatgggcatagtacaagccgaagaggccgctagtatgagtgtcgaagagagaaaggctaagtttacattcctgtatgttggggatcaactgcatctgaatcctcaggtggctaaggaggcagggatcgccgcagaaagtctgggcgagatggcagagagctccggtgtgagcgaggaggcggccgagaacccaaaatcggtccgggaggagtgcattcctatgaagaggagacggagagccaagttgtgcagcagtgcggagacactggagtcccaccccgacatcggaaagagcaccccccagaagacagcagaagctgatcctcgaagaggtgtgggctcacctcccggtagaaaaaagacaactgtgtccatgcctcgaagcagaaagggagacgccgcgtcacagtttttggtgttctgccaaaaacatcgggatgaggtagtcgcggagcatcccgatgcctcaggcgaggagattgaggagctcctccgctcacaatggagcctgctgtctgagaagcagcgagcccgctacaacaccaagtttgcccttgtggcccctgttcaggctgaggaggattcaggaaacgtcaatggaaaaaagcggaaccatacaaaacgcatccaggaccctactgaggacgctgaggcagaagacaccccgcggaagcggctgcgaactgacaaacatagcctgcgaaaacgcgacacgataaccgataagacagctcgtacctcctcttacaaagcaatggaggccgcaagctcactcaagtcccaggcggctacaaagaatctatctgacgcatgcaaacccctgaaaaaacgcaatcgggcatctactgcggcctcctccgctctaggattctctaaatcatcttcgcctagcgcctctctcacagaaaatgaggttaaatag

SEQ ID NO: 171926 - DNA, 600 bp, Artificial Sequence
  derived and/or modified sequence
atggagttcagcatcaagcagagccccctgagcgtgcagagcgtggtgaaatgtatcaagatgaaacaagcgcccgaaattctcgggtctgccaatgggaagacccctagttgcgaggtgaatcgggaatgtagcgtatttctctctaaggcccaactgagtagcagtcttcaggagggggtgatgcaaaagtttaatggccacgatgccctgcctttcatacctgccgataagctcaaggacctgacatcacgggtgtttaacggagagcctggggcacatgatgcaaagctgcggtttgagagccaggaaatgaaaggcatcggcacgccgcctaacaccacccccattaagaacggttctccagagatcaaattgaagatcacgaaaacatatatgaacggcaagccacttttcgaaagtagcatctgcggagactccgccgctgacgtctcccagtccgaggaaaacggccagaagcccgagaacaaagcaaggagaaatcgaaagcgcagcataaaatacgacagtctgctggagcagggacttgtggaggcagcacttgtgagcaagatcagttctccctccgataagaaatag

SEQ ID NO: 171927 - DNA, 1890 bp, Artificial Sequence
  derived and/or modified sequence
atggagttctccattaagcagtctccgttatccgtgcagtctgttgttaaatgcataaagatgaagcaggcaccggaaatcctgggcagtgcaaatggaaagacgccatcttgcgaagtgaaccgcgagtgctccgtctttctatctaaggcccagctgtcttcatcactgcaggagggcgtcatgcagaagttcaatgggcacgacgcactgccatttataccggctgacaagcttaaagacctaacatccagggtgttcaacggggagcctggtgcacatgatgctaaattacgattcgaatcacaggaaatgaaaggcatcggaactccacctaacacaacccccattaagaatggttcaccggaaatcaagctcaagataacaaaaacatatatgaatggcaaacctctttttgaatcatctatctgtggcgattccgcagcagatgtgtcacagtcagaagagaatggccaaaagcctgaaaacaaggctaggcgcaatagaaagcgcagcataaagtacgattcattacttgaacagggcttagtagaggctgctttagtgtccaaaatatcctctccgtcagacaagaaaatcccagcaaagaaggaaagctgccccaatacgggccgagacaaggaccatttgctgaaatacaatgtcggagaccttgtatggtctaaggtgtctggatacccatggtggccgtgcatggtttctgccgatccattgcttcactcgtataccaagctgaaggggcagaagaaatcagcgaggcagtaccatgttcagttctttggcgacgcacccgagagggcctggattttcgaaaagtcgctggtggctttcgaaggcgaagggcagttcgagaaactatgtcaggagagcgctaagcaggccccaacgaaggccgagaagataaaattgctgaaacccattagcggcaagctcagggcgcagtgggagatgggaatcgtacaggctgaggaagccgctagcatgtcagtggaggagcgtaaggcaaaatttacttttctgtatgtgggcgatcagttgcaccttaacccacaggtggccaaagaagcagggatagcggctgaaagtcttggagagatggcagagtcatcgggggtgtcagaggaagctgccgaaaatccaaagagtgtccgggaggagtgtatccccatgaagcggaggcggagagccaaactgtgttcatctgctgaaactctggaaagtcatcctgatatcgggaaatcaacgccacaaaaaaccgcagaagctgatccgaggcggggtgttggaagtccaccaggccgtaaaaagacgacggtcagcatgcccaggagcaggaagggagacgcggcttctcagttcttggtgttttgccaaaagcaccgcgacgaggtggtagcagaacatcccgacgcctccggcgaagaaattgaggaacttctgaggtcacagtggagcctgttgtctgaaaagcagagagcccgatacaacactaagttcgccctagttgccccagtgcaggccgaggaggatagtggaaacgtcaacggcaaaaaacggaaccacacgaaacgcatacaagaccctactgaggacgctgaagcggaagacactcctcggaagcgacttcggaccgacaaacacagtctgcgtaaaagggataccatcacagataagactgctaggacgtcatcctataaagccatggaggccgcatcgtctctgaaatcccaggccgcaaccaaaaacctcagtgacgcttgcaagccactcaagaagcggaatagggcaagcaccgcagcttcctccgcattgggcttctccaagagcagctctccctccgcaagtctgactgagaatgaagtcaagtag

SEQ ID NO: 171928 - DNA, 822 bp, Artificial Sequence
  derived and/or modified sequence
atggaattcagcattaaacagtcccctctttcagtgcagtcagtggtgaagtgcataaagatgaaacaggctcccgaaattctgggctctgcaaacggcaaaaccccaagttgtgaggtcaatcgggaatgttccgtattcttgtccaaggcccagctgtctagcagtttgcaggaaggagtgatgcagaaattcaatggccatgacgcgttacccttcatccccgcagataagctgaaagacttgacctcacgagtgttcaacggcgagccaggagcccacgatgccaaactaagatttgagtcacaggaaatgaaaggaatcggaacgccccctaataccacaccaattaagaatggaagcccggaaataaaattgaagatcaccaaaacatacatgaatggaaagccgctgttcgaatctagcatttgcggggatagtgcagctgatgtgtcacagagtgaagaaaatggtcaaaaaccagaaaacaaggcccgacgaaaccgaaaacgctcaattaaatacgactctctgttggagcaggggctcgtcgaggccgctctggtctctaaaatcagttccccgagcgacaagaaaatccccgcaaagaaggaatcctgccccaataccggtagggacaaagatcatctgctgaaatacaacgtcggagatttagtctggtctaaggtctccggatacccgtggtggccctgtatggtgtccgcagaccccttgttgcactcttacactaagctgaaaggtatttttaaaagcaagaaattcgagcatctgaaaacatcccagatcgtgctgaaggactag

SEQ ID NO: 171929 - DNA, 1179 bp, Artificial Sequence
  derived and/or modified sequence
atggaattcagcatcaagcagtcccctttgtccgtgcaatccgtagtaaagtgcattaaaatgaagcaagccccagaaatcctgggttctgccaatggcaaaacgccttcatgcgaagtcaatcgcgaatgttctgtcttcctgtcgaaggcccaactgtcctctagcctgcaggaaggggtgatgcagaaattcaatggccatgatgccctgccattcattccagccgacaagctgaaagacctaacgagtcgtgtgttcaacggagagcctggtgcccatgacgcaaagttgcgtttcgagtctcaagaaatgaaaggtatcggcacaccccctaacaccacgccgattaagaacgggagccctgagatcaaactgaagatcactaaaacatacatgaatgggaaacctctgttcgaaagctcaatctgcggcgactcagcggcagacgtgagccaatcagaagaaaatggacagaagccagaaaacaaagcaaggagaaacaggaaaagaagcatcaagtatgacagcttgctagagcaggggctggtggaggctgccctcgtgtccaaaatctcttctccatcagataagaaaattccggcaaagaaggagtcctgtccaaatacaggcagggataaggaccacttgctgaaatacaatgtgggtgacctggtgtggtccaaggtgtcaggctacccttggtggccctgcatggtgagtgcagaccccctgctgcactcgtacactaagctcaaaggccagaagaagtccgcacgccagtatcacgtgcagttttttggagacgctccagagagggcgtggatcttcgaaaagagccttgtggccttcgagggcgagggccaatttgaaaagttgtgccaggagtctgccaagcaggccccaacgaaggcggagaagatcaagttgttgaagccgattagcggaaagttacgcgctcaatgggagatgggtatcgtccaggcggaagaggctgcctcaatgagcgtggaggagaggaaagccaagttcacatttttgtacgtcggcgaccagcttcatctgaacccacaggttgccaaagaagctggaatcgccgctgagtccttaggggagatggccgagtcctcaggggtaagtgaagaagccgctgaaaaccccaaatcagtgcgcgaatag

SEQ ID NO: 171930 - DNA, 1890 bp, Artificial Sequence
  derived and/or modified sequence
atggagttcagcatcaagcaaagccccctcagtgtgcagagcgtagtcaaatgcattaaaatgaaacaagcgcctgaaattctaggtagcgcaaacggcaagactccctcgtgtgaagtaaaccgtgagtgttccgtgttcctgtccaaggctcagttgagttcttccctgcaggagggtgtcatgcagaaatttaacggtcatgacgcactgccattcatccccgcagataagcttaaggacttgaccagcagagtgttcaatggcgagccaggcgctcacgacgcaaagctgcgctttgagtcacaagagatgaaaggcatcggtacaccgcctaacacaactcccattaagaacggcagtccagaaatcaagctgaagatcacaaagacctatatgaacggcaagcccctcttcgagagtagtatctgcggcgacagtgccgctgacgtgagtcaatctgaagagaacggccagaaacctgagaacaaagccagacgcaacagaaagcgtagtataaaatatgattcactgctggagcaggggttggtggaagctgctcttgtgtcaaagatcagcagcccatcagacaagaagattcccgctaaaaaggagagttgtccaaacactggtcgggacaaagaccacctgctgaaatacaacgtcggggatctggtctggtcaaaggtgtctggttacccttggtggccctgtatggtgagcgctgatcctctgcttcacagctacaccaaattaaaaggacaaaaaaaatctgccagacaataccatgtgcaattctttggggacgcaccagaaagggcctggatctttgagaagtcgctggtcgcatttgagggagagggacagttcgagaagctctgtcaggaaagcgctaagcaagctcctactaaagcggagaaaatcaaactgttgaagcccatcagtgggaaactacgggcacagtgggaaatgggtattgttcaggctgaagaagccgcttcgatgtctgtagaagaacgcaaggccaaattcactttcttgtacgttggcgaccaactgcacctcaacccccaggtggccaaagaggctgggatcgccgcagaaagcctgggggagatggctgaatcctccggcgtgagtgaggaagccgctgaaaatccaaaatctgtgagagaggagtgtatccctatgaaaaggcggagacgggctaaactgtgttcttcagcggagacactggaatctcaccctgacatcggaaagagcactccacagaaaacagctgaggctgatccccgacggggagtagggtcacccccagggaggaagaagacaacagtgtctatgcctcgctcccgtaagggtgatgccgcaagccaattcctggtgttctgtcaaaagcacagggatgaagtggttgcggaacatccggacgccagcggcgaggaaatagaggagctgctgagatcacagtggtcactgctgtcagaaaagcagagggccaggtataatacaaagtttgcccttgttgctcccgtccaggccgaggaggattccggtaacgttaacggcaaaaagagaaatcacacaaagcgcattcaggatccaactgaagacgctgaggctgaggacacacccaggaaacgattgcggacagacaaacacagcctgagaaaacgcgataccattaccgataagactgcacgcacctcttcctataaggcaatggaggcggcatccagtcttaagagccaggccgcaaccaaaaatctctcagacgcctgcaaaccactgaagaagagaaatcgcgctagtactgccgcaagttctgccctgggtttttcaaaatcttcgtcaccctcagcctctctcacagaaaatgaggtgaaatag

SEQ ID NO: 171931 - DNA, 600 bp, Artificial Sequence
  derived and/or modified sequence
atggaatttagcattaaacagagccccctgagtgtacagagcgtggtgaagtgcattaaaatgaaacaggcacctgagatccttggctccgccaatggaaaaacacctagctgcgaggtgaaccgagagtgcagcgtctttttgagcaaggcccaactcagttctagcttgcaggagggcgttatgcagaaatttaacggtcatgatgctctcccatttatccccgctgacaagctcaaggatctaacaagcagggttttcaacggcgagcccggagctcacgatgcgaagttacgcttcgagagccaagaaatgaaaggaattggcacccccccaaatacaactcctataaagaacgggtcacccgagatcaagttaaagataaccaagacatacatgaacggcaaacctttgttcgaatcctctatctgcggggactcggccgcagatgtctcacagagtgaagaaaacgggcagaagcctgagaacaaggccaggcgcaacaggaagcgtagcatcaagtatgacagtctgttagaacaagggctcgtcgaagccgcactagtgtccaagatcagttccccaagcgataagaaatag

SEQ ID NO: 171932 - DNA, 5109 bp, Artificial Sequence
  derived and/or modified sequence
gcatgagccaccgtgcctgtcctagaaccactggtaactcttaactgagacaagatttcgccatgttgcccaggctggtctcgaacttctgagctcaagcgatctacctgcctcgtcctcccaaagtgttggaattgcaggtgtgagccactgcacccggcccttgcctcatgtttgaatgataatttacctgggcataaaattctggacacttgtggtggcacgagctgtctgcttttctgtggagactgcgggttgcagacaccagcagccccctattgctgcacgtcaggtgtcctccacctcagtactgtggacatctcgggccgcatagccctgttgcgcgggcatcctgtgcgttgcaggagatgcagcagcatccatgaccgcaacccatcagagtgttctaagaacggaagcatctgggctggatggaatttagcatcaagcagagtcccctttctgttcagagtgttgtaaagtgcataaagatgaagcaggcaccagaaatcctcggcagtgccaacgggaagactccgagctgcgaggtgaaccgcgagtgttctgtgttcctcagcaaagcccagctctccagtagcctgcaggagggggtcatgcagaagtttaacggccacgacgccctgccctttattccagccgacaagctgaaagatcttacttcccgggtgtttaatggagaacccggcgcacacgatgccaaactgcgttttgagtcccaggaaatgaaagggattgggacaccccctaacactacccctatcaaaaatggctctccagaaattaagctgaaaatcaccaaaacatacatgaatgggaagcctctctttgaatcttccatttgtggtgacagtgctgctgatgtgtctcagtcagaagaaaatggacaaaaaccagaaaacaaggcgagaaggaacaggaagaggagcataaaatatgactccttgctggagcagggccttgtcgaagcagctcttgtgtctaagatctcaagtccttcagataaaaagattccagctaagaaagagtcttgtccaaacactggaagagacaaagaccacctgttgaaatacaacgttggtgatttggtgtggtccaaagtgtcgggttacccttggtggccttgcatggtttctgcagatccactccttcacagctataccaaacttaaaggtcagaaaaagagtgcacgccagtatcacgtacagttctttggtgacgccccagaaagagcttggatatttgagaagagcctcgtagcttttgaaggagaaggacagtttgaaaaattatgccaggaaagtgccaagcaggcacccacgaaagctgagaaaattaagctattgaaaccaatttcagggaaattgagggcccagtgggaaatgggcattgttcaagcagaagaagctgcaagcatgtcagtggaggagcggaaagccaagttcacctttctctatgtgggggaccagcttcatctcaaccctcaagtagccaaggaggctggcattgctgcagagtctttgggagaaatggcagaatcctcaggagtcagtgaagaagctgctgaaaaccccaagtctgtgagagaagagtgcattcccatgaagagaaggcggagggccaaactgtgtagctctgcagagaccctggagagtcaccccgacatagggaagagtactcctcaaaagacggcagaggctgaccccagaagaggagtagggtctcctcctgggaggaagaagaccacagtctccatgccacgaagcaggaagggagatgcagcatcccagtttttggtcttctgtcaaaaacacagggatgaggtggtagctgagcacccagatgcttcaggtgaggagattgaagagctgctcaggtcacagtggagtctgctgagtgagaagcagagagcacgctacaacaccaagtttgccctggtggcccctgtccaggctgaagaagactctggtaatgtaaatgggaaaaaaagaaaccacacaaagaggatacaggaccctacagaagatgctgaagctgaggacacacccaggaaaagactcaggacggacaagcacagtcttcggaagagagacacaatcactgacaaaacggccagaacaagctcttacaaggccatggaggcagcctcctcgctcaagagccaggcagcaacgaaaaatctgtctgatgcatgtaaaccactgaagaagcgaaatcgggcttccacggcagcatcttcagctcttgggtttagcaaaagttcatctccttctgcatccttaactgagaatgaggtaaaataataataataacgataaccatggcattggtatgaaggccatttagctgcccacgctgcagtgtgagtaatgctcagacttcataagcgcagcattggtgctcactgccagtgcagatgttttagggcctcttggctaactcagattcatgaaatggacaaacagtgcactatgttagtttatttgagcactttttatacacacgcacacagtgtctgtgtacatgtacagatatacttcagtcttgatgcagtttcatagttcttaaaatctgtctgaagaatgttgtgttctgtgtagccctcacactgtaagagttcacatggaagtaagtctgcgttggttctgaaagggcacagtgtcagttgagctgacatatactgggtggggtggaaggcgactcacacaccacacctgattcctgttgcttccagacctaggctcatggaggaagccaaagatttctttgttctcatgcatttcatggctttggtcctttaaattctggcacatttttagttacttgagtgttgaggtgagtcagaactaccattgtaatatgactcctgtgttctggacttgcagagtacatgatagcaaaataaagccatttggggctgctgcctgccatcattgtaacatgacacttagactttattatcaaacctaaattttttgccgttgccaaaaacaacaaatagccacagaacgtaggtgtgacacttttttgttcggaggtagttttggtttcctgatttttagggattaccttcatagagctttggagttttaatttcttgttatttggttctccgtgatgctgtttttctcattgtagacatgggtcctgtttttgtcatgtttatgaggagatgataactgggggcccttttggaacagggtagtgaggcaagggttggacaggccccttactcttgctgagtcagaaggcggcacttctggccaggtctctgccatggtccccaggaaggatggggtgtgcctcagttgtttccactcattagaggagtgtaggccttccagtgcaggaaggtcagggacctaggcaacctgggcggggctcatagagctctgcggcttgccactctgaatcctcagcgaccactcctccgagtgggattttctgcagggactcaaaccaactcagtggtggtcgagacctgttcacggatggtgggactggggctgctttacagtttgatacgtgtagataattaagcattttgtgatgtttggacacactggagaaaaggcagtaagaattatttactgaaacatctaggagcttactgaaatatgaaaaggcaaattttatacaaattatttttcctttttcctttctttcttgtccaagttcaggttaaaatcttagaaaattaaatgaaaggtcatttacagttccaaagaagaatattaaacatttttcacttaagttgagatttttgctttaaagagcttttaatgagtttttctgttatcataattttggtccggttattcacttgagttgttgcttatactgttgtcaggtacagtagagagaacatggagcctgctgagatcttctctgttattcctgatcctaagtcatgtatatcgaaggctttgatttagagtaatgcatgaggccagtgtagcggggtcgaggcctgcccatgagtcaggggagctcagtctccctggcctaggcagttgtcctgaccttgagaagacatagatgaagcattttatcatcattagacttaaattttaattcttcagaatgtcagaagttgataggttgttaaatacatttatataatacattaaatatgtgaaattaatacaccttcctacattttgaaggtgatgcatagatcccatagtgtgcatcatgttccttatatgaaaacgtttaaattactgggtcttttccattaaactacttttgtatggcttagataaatcttccattagtgttcatttttatagaattatgctgttaaaactactttaggtgaacaaataaacttgtctattatatattaacgcgactgaactacagtaaatgtttgtgatgtttccaatgctgaatgcctgttagcatatgaggcaaagtgtagtgttataaaaaacagcctgttgactgctgggcccgattctgatatgagttaggtgaccatgagaattgctgtttgaggtccacactgacacacacccattgggtcacaccccctttgcatgtttgtatttcctccctttcatcacatttgtttgaaataaggtacttttatagggttggtatttcagaacactttaggtcatgttgtagtttaaattcttcttgaaaaaggtatatgtgataaataaaaatttttattggaataattattacatggtactacatcaccctgaggaagagaataaattaaaattacacacttgcatgacaaaggcctgtgaaggaattaatgtgatttaagtgttttgtaacttcattttttattcctttagtagagcaaattcttatttttttcgccttcactggtaacagcttttgtgggagcccacaccagtcaagttggatttgaacccagctgctctgtactgcacttagaatgatgtaatattccaggatgctgctgcaggtggcgtatcatcgtacacactcagtgacatttctatcacaatcattttatggaagatgtgtgataatctgtttttactggtattaataaacacatacaatgaagaaaacagataacaaattttaagaccaaggtaagataac

SEQ ID NO: 171933 - DNA, 1316 bp, Artificial Sequence
  derived and/or modified sequence
tggtcttgaactcctgaccttgtgatccgctcgcctcagcctcccaaagtgctgggattacaggcatgagccaccgtgcctgtcctagaaccactggtaactcttaactgagacaagatttcgccatgttgcccaggctggtctcgaacttctgagctcaagcgatctacctgcctcgtcctcccaaagtgttggaattgcaggtgtgagccactgcacccggcccttgcctcatgtttgaatgataatttacctgggcataaaattctggacacttgtggtggcacgagctgtctgcttttctgtggagactgcgggttgcagacaccagcagccccctattgctgcacgtcaggtgtcctccacctcagtactgtggacatctcgggccgcatagccctgttgcgcgggcatcctgtgcgttgcaggagatgcagcagcatccatgaccgcaacccatcagagtgttctaagaacggaagcatctgggctggatggaatttagcatcaagcagagtcccctttctgttcagagtgttgtaaagtgcataaagatgaagcaggcaccagaaatcctcggcagtgccaacgggaagactccgagctgcgaggtgaaccgcgagtgttctgtgttcctcagcaaagcccagctctccagtagcctgcaggagggggtcatgcagaagtttaacggccacgacgccctgccctttattccagccgacaagctgaaagatcttacttcccgggtgtttaatggagaacccggcgcacacgatgccaaactgcgttttgagtcccaggaaatgaaagggattgggacaccccctaacactacccctatcaaaaatggctctccagaaattaagctgaaaatcaccaaaacatacatgaatgggaagcctctctttgaatcttccatttgtggtgacagtgctgctgatgtgtctcagtcagaagaaaatggacaaaaaccagaaaacaaggcgagaaggaacaggaagaggagcataaaatatgactccttgctggagcagggccttgtcgaagcagctcttgtgtctaagatctcaagtccttcagataaaaagattccagctaagaaagagtcttgtccaaacactggaagagacaaagaccacctgttgaaatacaacgttggtgatttggtgtggtccaaagtgtcgggttacccttggtggccttgcatggtttctgcagatccactccttcacagctataccaaacttaaaggtattttcaaatcaaagaagtttgaacacttaaaaacaagtcaaattgtactgaaagattaa

SEQ ID NO: 171934 - DNA, 528 bp, Artificial Sequence
  derived and/or modified sequence
gccgccgccgccgccccctccccgcctgggccctaccgccgcacggccccggccccctcccagcctgccgctccggagagccgcccgccgaggatgcgacgcaccgcagagatgggtctcgccatcaccatgttgcccagtctggtctccaactcctgggctcaagcgatcctcctgccttggtctcccaaagtgctgggattacagagacaagatttcgccatgttgcccaggctggtctcgaacttctgagctcaagcgatctacctgcctcgtcctcccaaagtgttggaattgcaggtgtgagccactgcacccggcccttgcctcatgtttgaatgataatttacctgggcataaaattctggacacttgtggtggcacgagtgttctaagaacggaagcatctgggctggatggaatttagcatcaagcagagtcccctttctgttcagagtgttgtaaagtgcataaagatgaagcaggcaccagaaatcctcggcagtgccaacgggaagactccgagct

SEQ ID NO: 171935 - DNA, 1212 bp, Artificial Sequence
  derived and/or modified sequence
accatagtgttctaagaacggaagcatctgggctggatggaatttagcatcaagcagagtcccctttctgttcagagtgttgtaaagtgcataaagatgaagcaggcaccagaaatcctcggcagtgccaacgggaagactccgagctgcgaggtgaaccgcgagtgttctgtgttcctcagcaaagcccagctctccagtagcctgcaggagggggtcatgcagaagtttaacggccacgacgccctgccctttattccagccgacaagctgaaagatcttacttcccgggtgtttaatggagaacccggcgcacacgatgccaaactgcgttttgagtcccaggaaatgaaagggattgggacaccccctaacactacccctatcaaaaatggctctccagaaattaagctgaaaatcaccaaaacatacatgaatgggaagcctctctttgaatcttccatttgtggtgacagtgctgctgatgtgtctcagtcagaagaaaatggacaaaaaccagaaaacaaggcgagaaggaacaggaagaggagcataaaatatgactccttgctggagcagggccttgtcgaagcagctcttgtgtctaagatctcaagtccttcagataaaaagattccagctaagaaagagtcttgtccaaacactggaagagacaaagaccacctgttgaaatacaacgttggtgatttggtgtggtccaaagtgtcgggttacccttggtggccttgcatggtttctgcagatccactccttcacagctataccaaacttaaaggtcagaaaaagagtgcacgccagtatcacgtacagttctttggtgacgccccagaaagagcttggatatttgagaagagcctcgtagcttttgaaggagaaggacagtttgaaaaattatgccaggaaagtgccaagcaggcacccacgaaagctgagaaaattaagctattgaaaccaatttcagggaaattgagggcccagtgggaaatgggcattgttcaagcagaagaagctgcaagcatgtcagtggaggagcggaaagccaagttcacctttctctatgtgggggaccagcttcatctcaaccctcaagtagccaaggaggctggcattgctgcagagtctttgggagaaatggcagaatcctcaggagtcagtgaagaagctgctgaaaaccccaagtctgtgagagaa

SEQ ID NO: 171936 - DNA, 3964 bp, Artificial Sequence
  derived and/or modified sequence
gggccctaccgccgcacggccccggccccctcccagcctgccgctccggagagccgcccgccgaggatgcgacgcaccgcagtgttctaagaacggaagcatctgggctggatggaatttagcatcaagcagagtcccctttctgttcagagtgttgtaaagtgcataaagatgaagcaggcaccagaaatcctcggcagtgccaacgggaagactccgagctgcgaggtgaaccgcgagtgttctgtgttcctcagcaaagcccagctctccagtagcctgcaggagggggtcatgcagaagtttaacggccacgacgccctgccctttattccagccgacaagctgaaagatcttacttcccgggtgtttaatggagaacccggcgcacacgatgccaaactgcgttttgagtcccaggaaatgaaagggattgggacaccccctaacactacccctatcaaaaatggctctccagaaattaagctgaaaatcaccaaaacatacatgaatgggaagcctctctttgaatcttccatttgtggtgacagtgctgctgatgtgtctcagtcagaagaaaatggacaaaaaccagaaaacaaggcgagaaggaacaggaagaggagcataaaatatgactccttgctggagcagggccttgtcgaagcagctcttgtgtctaagatctcaagtccttcagataaaaagattccagctaagaaagagtcttgtccaaacactggaagagacaaagaccacctgttgaaatacaacgttggtgatttggtgtggtccaaagtgtcgggttacccttggtggccttgcatggtttctgcagatccactccttcacagctataccaaacttaaaggtcagaaaaagagtgcacgccagtatcacgtacagttctttggtgacgccccagaaagagcttggatatttgagaagagcctcgtagcttttgaaggagaaggacagtttgaaaaattatgccaggaaagtgccaagcaggcacccacgaaagctgagaaaattaagctattgaaaccaatttcagggaaattgagggcccagtgggaaatgggcattgttcaagcagaagaagctgcaagcatgtcagtggaggagcggaaagccaagttcacctttctctatgtgggggaccagcttcatctcaaccctcaagtagccaaggaggctggcattgctgcagagtctttgggagaaatggcagaatcctcaggagtcagtgaagaagctgctgaaaaccccaagtctgtgagagaagagtgcattcccatgaagagaaggcggagggccaaactgtgtagctctgcagagaccctggagagtcaccccgacatagggaagagtactcctcaaaagacggcagaggctgaccccagaagaggagtagggtctcctcctgggaggaagaagaccacagtctccatgccacgaagcaggaagggagatgcagcatcccagtttttggtcttctgtcaaaaacacagggatgaggtggtagctgagcacccagatgcttcaggtgaggagattgaagagctgctcaggtcacagtggagtctgctgagtgagaagcagagagcacgctacaacaccaagtttgccctggtggcccctgtccaggctgaagaagactctggtaatgtaaatgggaaaaaaagaaaccacacaaagaggatacaggaccctacagaagatgctgaagctgaggacacacccaggaaaagactcaggacggacaagcacagtcttcggaagagagacacaatcactgacaaaacggccagaacaagctcttacaaggccatggaggcagcctcctcgctcaagagccaggcagcaacgaaaaatctgtctgatgcatgtaaaccactgaagaagcgaaatcgggcttccacggcagcatcttcagctcttgggtttagcaaaagttcatctccttctgcatccttaactgagaatgaggtaaaataataataataacgataaccatggcattggtatgaaggccatttagctgcccacgctgcagtgtgagtaatgctcagacttcataagcgcagcattggtgctcactgccagtgcagatgttttagggcctcttggctaactcagattcatgaaatggacaaacagtgcactatgttagtttatttgagcactttttatacacacgcacacagtgtctgtgtacatgtacagatatacttcagtcttgatgcagtttcatagttcttaaaatctgtctgaagaatgttgtgttctgtgtagccctcacactgtaagagttcacatggaagtaagtctgcgttggttctgaaagggcacagtgtcagttgagctgacatatactgggtggggtggaaggcgactcacacaccacacctgattcctgttgcttccagacctaggctcatggaggaagccaaagatttctttgttctcatgcatttcatggctttggtcctttaaattctggcacatttttagttacttgagtgttgaggtgagtcagaactaccattgtaatatgactcctgtgttctggacttgcagagtacatgatagcaaaataaagccatttggggctgctgcctgccatcattgtaacatgacacttagactttattatcaaacctaaattttttgccgttgccaaaaacaacaaatagccacagaacgtaggtgtgacacttttttgttcggaggtagttttggtttcctgatttttagggattaccttcatagagctttggagttttaatttcttgttatttggttctccgtgatgctgtttttctcattgtagacatgggtcctgtttttgtcatgtttatgaggagatgataactgggggcccttttggaacagggtagtgaggcaagggttggacaggccccttactcttgctgagtcagaaggcggcacttctggccaggtctctgccatggtccccaggaaggatggggtgtgcctcagttgtttccactcattagaggagtgtaggccttccagtgcaggaaggtcagggacctaggcaacctgggcggggctcatagagctctgcggcttgccactctgaatcctcagcgaccactcctccgagtgggattttctgcagggactcaaaccaactcagtggtggtcgagacctgttcacggatggtgggactggggctgctttacagtttgatacgtgtagataattaagcattttgtgatgtttggacacactggagaaaaggcagtaagaattatttactgaaacatctaggagcttactgaaatatgaaaaggcaaattttatacaaattatttttcctttttcctttctttcttgtccaagttcaggttaaaatcttagaaaattaaatgaaaggtcatttacagttccaaagaagaatattaaacatttttcacttaagttgagatttttgctttaaagagcttttaatgagtttttctgttatcataattttggtccggttattcacttgagttgttgcttatactgttgtcaggtacagtagagagaacatggagcctgctgagatcttctctgttattcctgatcctaagtcatgtatatcgaaggctttgatttagagtaatgcatgaggccagtgtagcggggtcgaggcctgcccatgagtcaggggagctcagtctccctggcctaggcagttgtcctgaccttgagaagacatagatgaagcattttatcatcattagacttaaattttaattcttcagaatgtcagaagttgataggttgttaaatacatttatataatacattaaatatgtgaaattaatacaccttcctacattttgaaggtgatgcatagatcccatagtgtgcatcatgttccttatatgaaaacgtttaaattactgggtcttttccattaaactacttttgtatggcttagataaa

SEQ ID NO: 171937 - DNA, 816 bp, Artificial Sequence
  derived and/or modified sequence
ggtcttgctcccttgcgcaggcgagagtacagtggcacgatcatagctcactgtagcctccaactcctgggctcaagcagtcctcctacttcaggctaccaaagtgctgggattacaggtgtgagcgtgagccactacacctggctaatttttgttggctgtttttaatctaccacacttttatagcaagtgttctaagaacggaagcatctgggctggatggaatttagcatcaagcagagtcccctttctgttcagagtgttgtaaagtgcataaagatgaagcaggcaccagaaatcctcggcagtgccaacgggaagactccgagctgcgaggtgaaccgcgagtgttctgtgttcctcagcaaagcccagctctccagtagcctgcaggagggggtcatgcagaagtttaacggccacgacgccctgccctttattccagccgacaagctgaaagatcttacttcccgggtgtttaatggagaacccggcgcacacgatgccaaactgcgttttgagtcccaggaaatgaaagggattgggacaccccctaacactacccctatcaaaaatggctctccagaaattaagctgaaaatcaccaaaacatacatgaatgggaagcctctctttgaatcttccatttgtggtgacagtgctgctgatgtgtctcagtcagaagaaaatggacaaaaaccagaaaacaaggcgagaaggaacaggaagaggagcataaaatatgactccttgctggagcagggccttgtcgaagcagctcttgtgtctaagatctcaagtccttcagataaaaag

SEQ ID NO: 171938 - protein, 148 aa, Artificial Sequence
  derived and/or modified sequence
MAAFTKLSIEPAFTPGPNIELQKDSDCCSCQEKWVGYRCNCYFISSEQKTWNESRHLCASQKSSLLQLQNTDELDFMSSSQQFYWIGLSYSEEHTAWLWENGSALSQYLFPSFETFNTKNCIAYNPNGNALDESCEDKNRYICKQQLI

SEQ ID NO: 171939 - DNA, 447 bp, Artificial Sequence
  derived and/or modified sequence
atggctgcattcacaaaactgtcaatcgagccagcatttacaccaggacctaacatcgagcttcagaaggactcagactgctgttcctgccaagagaaatgggtaggctaccgatgtaactgctactttatctcaagcgagcagaaaacctggaatgagtctagacacttatgcgccagtcagaaatctagcctgctgcagctccagaacactgacgaactggattttatgagctcttcccaacaattctactggatcggtcttagctacagtgaagagcacacagcttggctgtgggagaatggttcagctttatcgcagtatctgtttccatctttcgagaccttcaacactaaaaactgtatcgcttacaaccctaatggtaacgcactggacgagagctgtgaggacaaaaatagatatatatgcaagcagcagctcatctag

SEQ ID NO: 171940 - DNA, 420 bp, Artificial Sequence
  derived and/or modified sequence
atggctgcatttaccaaactgagtatagagcctgcatttacccctggacctaacattgagcttcaaaaagatagcgattgctgcagttgccaggaaaaatgggtaggctatcgatgtaactgctacttcatcagcagcgagcaaaagacatggaatgaatcacgccatctgtgcgcaagtcaaaaatctagtctgctccaactgcagaacaccgacgaactggatttcatgtccagttctcagcagttttattggatcggactgtcctatagcgaggagcatactgcatggctgtgggagaatggctccgccctttctcagtacctctttccttcattcgaaacgtttaatacgaagaattgcattgcttacaatcctaacggtaacgccttagatgagtcttgtgaggacaaaaattag

SEQ ID NO: 171941 - DNA, 3165 bp, Artificial Sequence
  derived and/or modified sequence
ctgtattgtggttcctggaacacttcagaggcttgtgattctactgcttcttattcacactataatacatgtctcaccaatagatgattcaagaacatcatttaaatacacaatttttcattctctatttttgctaaatttcttcatactcaactttcagattctttaatctccagctcagcttcaacaattcaacgctgttctttctgaaaaagtacacatcgtgccttctctacttcgctcttggaacataatttctcatggcagcttttactaaactgagtattgagccagcatttactccaggacccaacatagaactccagaaagactctgactgctgttcttgccaagaaaaatgggttgggtaccggtgcaactgttacttcatttccagtgaacagaaaacttggaacgaaagtcggcatctctgtgcttctcagaaatccagcctgcttcagcttcaaaacacagatgaactggattttatgagctccagtcaacaattttactggattggactctcttacagtgaggagcacaccgcctggttgtgggagaatggctctgcactctcccagtatctatttccatcatttgaaacttttaatacaaagaactgcatagcgtataatccaaatggaaatgctttagatgaatcctgtgaagataaaaatcgttatatctgtaagcaacagctcatttaaatgtttcttggggcagagaaggtggagagtaaagacccaacattactaacaatgatacagttgcatgttatattattactaattgtctacttctggagtctataaaatgtttttaaacagtgtcatatacaattgtcatgtatgtgaaacaatgtgttttaaaattgatgaaattcgttcacctacatttgagaattataaaattaacataaagaattttgtattttcatttaatgtatatatttaatgttaaattcaatgtagttttattacacatttatgtaattttatttacattcttgctaattctcagcagaaatttaaataagatttaattcacatcaaataaaatttagaaaataaaatttaactcacactgcccaggctggagcatagtggcaagatcatagctcattgcaagctcaagtgatcctcctgactcagcctcccaagtagctaggactgcaggcaccatgtcactatgcccgactaatttttaatttttaattttttgtcaagacaaggtcttgctatgttgcccaggctggtcttgaactcctggcctcaagggattctcccaccttggattcccaaagtgctgggattataggtgtgaaccaccatccctggccctcttcacattcttgtatgaagattgatttgggaaaaatgcatttcaggtaactgacaaaagatataggatgaaaaataatatctttcaaatgtttaatttgaactaagagagcttatgcattgcactttctggagatttgtaatgttttggttttgttgtccatgtgactacaaaataatatattttttaattaaaaaatttaaaataatacaggcaagcatgtaatgattatcaatatttttttccaccaactatcctatacccctgacctcctttcattaggcattatcttctgttttgattttaacacttagagtggttttctctgttatgaatcaaagctgatctattttcatcatttttgtgatgaaaaaattaattttgattgacttaggatggaaggatttggactgggtgtggtggtttatgcctgtaatcgcagcactttgggaggccaaggcgggtggatcacttgaggtcaggagtttgagaccagcctggccaacatggtgaaaccctgtctctactaaaaatacaaaaattggctgggtgtggtagtgcacacctgtaatcccagctatttgggaggctgagtcgagaggatcgcttgaacctaggaggtggaggttgcagtgagtcgagattgcaccactgcactccagcctgggtgacagagccagactcctctccaaaaaaaaaaaaaaaaaaaaaagatgaaaggatttggaaccttaattgcatctgaaaaactgcctcacctttgttatttagtgtactccaaccacggagtaacatcccatcataatcccaaatcctactcaaacaaaaggggaagggattatgcaggtgtacactaggccactggtgtaccaattagaaaccactttagagttatgcctactgtacccacataatcctaaaaatatgttacaactgctacttcatagtttatgccacttattttattttttacttttattatttttttttctgagacacggtttcattcccattgcccaggctgtagtgcaatgatgcaatcatggttcactgcagcttcaacttcccaggctcaagggatcctcccacctcagccttctgagtacttgggactcaggtgcgagccatcatgctcagctaattttttgtatcatttgtagaaatggggttttgtattgttgcccaggctgatcttgaactcctggggtcaaggattctgcccgccttggcctcctaaagggctggaattacaggcataagccactgtgcccggccagtttatataatttaaacactgccttttggttccttgattcccatatgctaggacaagtaattattattttattttattttactttaagttctgggttacatgtgcagaacctgcaggtttgttacataggtatacatgttccaaggtggtttgctgcacctattgacccatcatctaggttttaagtcccacatgcattaggtatttgtcctaatgctcttcctccccttgccccccaccccccgacaggccttggtctgtgatgttcacctccctgtgtccatgtgttctcattgttcaactcccacttattagtaagaacatgtggtgtttggttttctgttcctgtgttagtttgctgagaatgatggtttccagcttcatccatgtcgctgcaaaggacatgaactcattctttttatggctgcatagtattccatggtgtatatgtgccatattttctttatccagtctatcactgatgggcatttgggttggttccaagtctttgctatggtaaatagtgctgcaataaacatacgtgtgca

SEQ ID NO: 171942 - DNA, 749 bp, Artificial Sequence
  derived and/or modified sequence
gccagcccagaaaggggctcccacagtgcagtgggggggctgaagggctcctcaaatgccaccaaagtgggagcccaggcaggggaggtgccgagagcaagcgagggctctgaggactgccagcatgctgtcacttctcagcaggctggattggatttggcacttctttactgaagattctttaatctccagctcagcttcaacaattcaacgctgttctttctgaaaaagtacacatcgtgccttctctacttcgctcttggaacataatttctcatggcagcttttactaaactgagtattgagccagcatttactccaggacccaacatagaactccagaaagactctgactgctgttcttgccaagaaaaatgggttgggtaccggtgcaactgttacttcatttccagtgaacagaaaacttggaacgaaagtcggcatctctgtgcttctcagaaatccagcctgcttcagcttcaaaacacagatgaactggattttatgagctccagtcaacaattttactggattggactctcttacagtgaggagcacaccgcctggttgtgggagaatggctctgcactctcccagtatctatttccatcatttgaaacttttaatacaaagaactgcatagcgtataatccaaatggaaatgctttagatgaatcctgtgaagataaaaatcgttatatctgtaagcaacagctcatttaaatgtttcttggggcagagaaggtgga

SEQ ID NO: 171943 - DNA, 447 bp, Artificial Sequence
  derived and/or modified sequence
atggccgccttcaccaagctgagcattgaaccagccttcaccccaggccccaacatcgagctgcagaaggacagcgactgctgcagctgccaggagaagtgggtgggctaccgctgcaactgctacttcatcagcagcgagcagaagacctggaatgaaagccgccacctgtgtgccagccagaagagcagcctgctgcagctgcagaacacagatgagctggacttcatgagcagcagccagcagttctactggattggcctgagctacagcgaggagcacacagcctggctgtgggagaatggaagtgccctgagccagtacctgttccccagctttgagaccttcaacaccaagaactgcatcgcctacaaccccaatggaaatgccctggatgagagctgtgaggacaagaaccgctacatctgcaagcagcagctgatctag

SEQ ID NO: 171944 - DNA, 420 bp, Artificial Sequence
  derived and/or modified sequence
atggccgccttcaccaagctgagcattgaaccagccttcaccccaggccccaacatcgagctgcagaaggacagcgactgctgcagctgccaggagaagtgggtgggctaccgctgcaactgctacttcatcagcagcgagcagaagacctggaatgaaagccgccacctgtgtgccagccagaagagcagcctgctgcagctgcagaacacagatgagctggacttcatgagcagcagccagcagttctactggattggcctgagctacagcgaggagcacacagcctggctgtgggagaatggaagtgccctgagccagtacctgttccccagctttgagaccttcaacaccaagaactgcatcgcctacaaccccaatggaaatgccctggatgagagctgtgaggacaagaactag

SEQ ID NO: 171945 - DNA, 447 bp, Artificial Sequence
  derived and/or modified sequence
atggccgccttcaccaagctgagcatcgagcccgccttcacccccggacccaatatagaacttcagaaggactccgactgctgcagctgtcaggagaagtgggtgggatacaggtgtaattgttatttcatttcttccgagcagaaaacttggaacgaaagccgacatctctgcgccagtcaaaagagtagccttttgcagctgcaaaataccgacgaactggattttatgtcatcatcccaacagttttattggataggcctcagctacagcgaggaacataccgcctggttgtgggaaaatggcagcgccctttcgcagtatttgttcccaagtttcgagacttttaacacaaaaaactgtatagcttataatccgaatggaaatgctctggatgaatcctgcgaggacaagaaccggtatatatgcaaacagcaactgatctag

SEQ ID NO: 171946 - DNA, 420 bp, Artificial Sequence
  derived and/or modified sequence
atggccgccttcaccaagctgagcatcgagcccgccttcacccccgggccaaatatcgagttgcaaaaggatagcgactgttgttcttgtcaggagaagtgggttgggtatcgatgcaactgctattttatctctagcgaacagaagacgtggaacgaatcacgccacctatgtgcgtcccagaagtcctctctcctgcagctccagaacacagacgagcttgactttatgtccagtagtcaacagttctactggattgggctgagctacagcgaggaacataccgcctggttgtgggaaaatggcagcgccctttcacagtatttatttccgtctttcgaaacctttaacacgaaaaactgcatcgcttataatcccaatggtaacgcccttgacgagagctgtgaagacaagaattag

SEQ ID NO: 171947 - DNA, 447 bp, Artificial Sequence
  derived and/or modified sequence
atggcagcctttacaaagctttctatagaacctgcctttaccccgggtcccaatatcgagctgcaaaaggattccgattgttgctcctgccaggaaaagtgggttggataccgctgtaattgttatttcatctcctccgagcagaagacctggaatgaatccagacacctgtgcgcctcacagaaaagtagtctcttgcagttgcagaatacagacgaattggatttcatgtcgtcatcacaacaattctactggattggactctcctactcagaagaacacaccgcctggctctgggaaaacgggtccgccctaagccagtacctgtttccctcattcgaaaccttcaacacgaaaaactgcatcgcatataaccctaacggcaacgccctcgacgaatcttgtgaggacaagaaccgctatatctgcaagcagcaactcatctag

SEQ ID NO: 171948 - DNA, 420 bp, Artificial Sequence
  derived and/or modified sequence
atggccgcatttacgaagctatctatcgaacccgcattcactcccggtcccaacatcgagctgcagaaggatagcgattgttgtagctgtcaggaaaagtgggtgggctatcgctgtaattgctactttatttctagcgagcaaaagacctggaacgagtctaggcatctgtgtgcatcccaaaagagcagccttttgcagcttcaaaacactgacgagctggactttatgagctccagccaacagttctactggatcgggctgtcttacagcgaagagcatacagcatggctgtgggaaaacgggtccgcactttcgcagtacctcttcccatcttttgaaacttttaacactaaaaattgtatcgcctacaatcctaatggcaacgcgctggatgagtcctgcgaggacaaaaattag

SEQ ID NO: 171949 - DNA, 447 bp, Artificial Sequence
  derived and/or modified sequence
atggccgccttcaccaagctgagcatcgagcccgccttcacccccggccccaacatcgagctgcagaaggacagcgactgctgcagctgccaggagaagtgggtgggctacagatgcaactgctacttcatcagcagcgagcagaagacctggaacgagagcagacacctgtgcgccagccagaagagcagcctgctgcagctgcagaacaccgacgagctggacttcatgagcagcagccagcagttctactggatcggcctgagctacagcgaggagcacaccgcctggctgtgggagaacggcagcgccctgagccagtacctgttccccagcttcgagaccttcaacaccaagaactgcatcgcctacaaccccaacggcaacgccctggacgagagctgcgaggacaagaacagatacatctgcaagcagcagctgatctag

SEQ ID NO: 171950 - DNA, 420 bp, Artificial Sequence
  derived and/or modified sequence
atggccgccttcaccaagctgagcatcgagcccgccttcacccccggccccaacatcgagctgcagaaggacagcgactgctgcagctgccaggagaagtgggtgggctacagatgcaactgctacttcatcagcagcgagcagaagacctggaacgagagcagacacctgtgcgccagccagaagagcagcctgctgcagctgcagaacaccgacgagctggacttcatgagcagcagccagcagttctactggatcggcctgagctacagcgaggagcacaccgcctggctgtgggagaacggcagcgccctgagccagtacctgttccccagcttcgagaccttcaacaccaagaactgcatcgcctacaaccccaacggcaacgccctggacgagagctgcgaggacaagaactag

SEQ ID NO: 171951 - protein, 1755 aa, Artificial Sequence
  derived and/or modified sequence
METRSSKTRRSLASRTNECQGTMWAPTSPPAGSSSPSQPTWKSSLYSSLAYSEAFHYSFAARPRRLTQLALAQRPEPQLLRLRPSSLRTQDISHLLTGVFRNLYSAEVIGDEVSASLIKARGSENERHEEFVDQLQQIRELYKQRLDEFEMLERHITQAQARAIAENERVMSQAGVQDLESLVRLPPVKSVSRWCIDSELLRKHHLISPEDYYTDTVPFHSAPKGISLPGCSKLTFSCEKRSVQKKELNKKLEDSCRKKLAEFEDELDHTVDSLTWNLTPKAKERTREPLKKASQPRNKNWMNHLRVPQRELDRLLLARMESRNHFLKNPRFFPPNTRYGGKSLVFPPKKPAPIGEFQSTEPEQSCADTPVFLAKPPIGFFTDYEIGPVYEMVIALQNTTTTSRYLRVLPPSTPYFALGLGMFPGKGGMVAPGMTCQYIVQFFPDCLGDFDDFILVETQSAHTLLIPLQARRPPPVLTLSPVLDCGYCLIGGVKMTRFICKNVGFSVGRFCIMPKTSWPPLSFKAIATVGFVEQPPFGILPSVFELAPGHAILVEVLFSPKSLGKAEQTFIIMCDNCQIKELVTIGIGQLIALDLIYISGEKSQPDPGELTDLTAQHFIRFEPENLRSTARKQLIIRNATHVELAFYWQIMKPNLQPLMPGETFSMDSIKCYPDKETAFSIMPRKGVLSPHTDHEFILSFSPHELRDFHSVLQMVLEEVPEPVSSEAESLGHSSYSVDDVIVLEIEVKGSVEPFQVLLEPYALIIPGENYIGINVKKAFKMWNNSKSPIRYLWGKISDCHIIEVEPGTGVIEPSEVGDFELNFTGGVPGPTSQDLLCEIEDSPSPVVLHIEAVFKGPALIINVSALQFGLLRLGQKATNSIQIRNVSQLPATWRMKESPVSLQERPEDVSPFDIEPSSGQLHSLGECRVDITLEALHCQHLETVLELEVENGAWSYLPVYAEVQKPHVYLQSSQVEVRNLYLGVPTKTTITLINGTLLPTQFHWGKLLGHQAEFCMVTVSPKHGLLGPSEECQLKLELTAHTQEELTHLALPCHVSGMKKPLVLGISGKPQGLQVAITISKESSDCSTEQWPGHPKELRLDFGSAVPLRTRVTRQLILTNRSPIRTRFSLKFEYFGSPQNSLSKKTSLPNMPPALLKTVRMQEHLAKREQLDFMESMLSHGKGAAFFPHFSQGMLGPYQQLCIDITGCANMWGEYWDNLICTVGDLLPEVIPVHMAAVGCPISSLRTTSYTIDQAQKEPAMRFGTQVSGGDTVTRTLRLNNSSPCDIRLDWETYVPEDKEDRLVELLVFYGPPFPLRDQAGNELVCPDTPEGGCLLWSPGPSSSSEFSHETDSSVEGSSSASNRVAQKLISVILQAHEGVPSGHLYCISPKQVVVPAGGSSTIYISFTPMVLSPEILHKVECTGYALGFMSLDSKVEREIPGKRHRLQDFAVGPLKLDLHSYVRPAQLSVELDYGGSMEFQCQASDLIPEQPCSGVLSELVTTHHLKLTNTTEIPHYFRLMVSRPFSVSQDGASQDHRAPGPGQKQECEEETASADKQLVLQAQENMLVNVSFSLSLELLSYQKLPADQTLPGVDIQQSASGEREMVFTQNLLLEYTNQTTQVVPLRAVVAVPELQLSTSWVDFGTCFVSQQRVREVYLMNLSGCRSYWTMLMGQQEPAKAAVAFRVSPNSGLLEARSANAPPTSIALQVFFTARSSELYESTMVVEGVLGEKSCTLRLRGQGSYDERYMLPHQP

SEQ ID NO: 171952 - DNA, 5268 bp, Artificial Sequence
  derived and/or modified sequence
atggagaccagaagcagcaagaccagaagaagcctggccagcagaaccaacgagtgccagggcaccatgtgggcccccaccagcccccccgccggcagcagcagccccagccagcccacctggaagagcagcctgtacagcagcctggcctacagcgaggccttccactacagcttcgccgccagacccagaagactgacccagctggccctggcccagagacccgagccccagctgctgagactgagacccagcagcctgagaacccaggacatcagccacctgctgaccggcgtgttcagaaacctgtacagcgccgaggtgatcggcgacgaggtgagcgccagcctgatcaaggccagaggcagcgagaacgagagacacgaggagttcgtggaccagctgcagcagatcagagagctgtacaagcagagactggacgagttcgagatgctggagagacacatcacccaggcccaggccagagccatcgccgagaacgagagagtgatgagccaggccggcgtgcaggacctggagagcctggtgagactgccccccgtgaagagcgtgagcagatggtgcatcgacagcgagctgctgagaaagcaccacctgatcagccccgaggactactacaccgacaccgtgcccttccacagcgcccccaagggcatcagcctgcccggctgcagcaagctgaccttcagctgcgagaagagaagcgtgcagaagaaggagctgaacaagaagctggaggacagctgcagaaagaagctggccgagttcgaggacgagctggaccacaccgtggacagcctgacctggaacctgacccccaaggccaaggagagaaccagagagcccctgaagaaggccagccagcccagaaacaagaactggatgaaccacctgagagtgccccagagagagctggacagactgctgctggccagaatggagagcagaaaccacttcctgaagaaccccagattcttcccccccaacaccagatacggcggcaagagcctggtgttcccccccaagaagcccgcccccatcggcgagttccagagcaccgagcccgagcagagctgcgccgacacccccgtgttcctggccaagccccccatcggcttcttcaccgactacgagatcggccccgtgtacgagatggtgatcgccctgcagaacaccaccaccaccagcagatacctgagagtgctgccccccagcaccccctacttcgccctgggcctgggcatgttccccggcaagggcggcatggtggcccccggcatgacctgccagtacatcgtgcagttcttccccgactgcctgggcgacttcgacgacttcatcctggtggagacccagagcgcccacaccctgctgatccccctgcaggccagaagacccccccccgtgctgaccctgagccccgtgctggactgcggctactgcctgatcggcggcgtgaagatgaccagattcatctgcaagaacgtgggcttcagcgtgggcagattctgcatcatgcccaagaccagctggccccccctgagcttcaaggccatcgccaccgtgggcttcgtggagcagccccccttcggcatcctgcccagcgtgttcgagctggcccccggccacgccatcctggtggaggtgctgttcagccccaagagcctgggcaaggccgagcagaccttcatcatcatgtgcgacaactgccagatcaaggagctggtgaccatcggcatcggccagctgatcgccctggacctgatctacatcagcggcgagaagagccagcccgaccccggcgagctgaccgacctgaccgcccagcacttcatcagattcgagcccgagaacctgagaagcaccgccagaaagcagctgatcatcagaaacgccacccacgtggagctggccttctactggcagatcatgaagcccaacctgcagcccctgatgcccggcgagaccttcagcatggacagcatcaagtgctaccccgacaaggagaccgccttcagcatcatgcccagaaagggcgtgctgagcccccacaccgaccacgagttcatcctgagcttcagcccccacgagctgagagacttccacagcgtgctgcagatggtgctggaggaggtgcccgagcccgtgagcagcgaggccgagagcctgggccacagcagctacagcgtggacgacgtgatcgtgctggagatcgaggtgaagggcagcgtggagcccttccaggtgctgctggagccctacgccctgatcatccccggcgagaactacatcggcatcaacgtgaagaaggccttcaagatgtggaacaacagcaagagccccatcagatacctgtggggcaagatcagcgactgccacatcatcgaggtggagcccggcaccggcgtgatcgagcccagcgaggtgggcgacttcgagctgaacttcaccggcggcgtgcccggccccaccagccaggacctgctgtgcgagatcgaggacagccccagccccgtggtgctgcacatcgaggccgtgttcaagggccccgccctgatcatcaacgtgagcgccctgcagttcggcctgctgagactgggccagaaggccaccaacagcatccagatcagaaacgtgagccagctgcccgccacctggagaatgaaggagagccccgtgagcctgcaggagagacccgaggacgtgagccccttcgacatcgagcccagcagcggccagctgcacagcctgggcgagtgcagagtggacatcaccctggaggccctgcactgccagcacctggagaccgtgctggagctggaggtggagaacggcgcctggagctacctgcccgtgtacgccgaggtgcagaagccccacgtgtacctgcagagcagccaggtggaggtgagaaacctgtacctgggcgtgcccaccaagaccaccatcaccctgatcaacggcaccctgctgcccacccagttccactggggcaagctgctgggccaccaggccgagttctgcatggtgaccgtgagccccaagcacggcctgctgggccccagcgaggagtgccagctgaagctggagctgaccgcccacacccaggaggagctgacccacctggccctgccctgccacgtgagcggcatgaagaagcccctggtgctgggcatcagcggcaagccccagggcctgcaggtggccatcaccatcagcaaggagagcagcgactgcagcaccgagcagtggcccggccaccccaaggagctgagactggacttcggcagcgccgtgcccctgagaaccagagtgaccagacagctgatcctgaccaacagaagccccatcagaaccagattcagcctgaagttcgagtacttcggcagcccccagaacagcctgagcaagaagaccagcctgcccaacatgccccccgccctgctgaagaccgtgagaatgcaggagcacctggccaagagagagcagctggacttcatggagagcatgctgagccacggcaagggcgccgccttcttcccccacttcagccagggcatgctgggcccctaccagcagctgtgcatcgacatcaccggctgcgccaacatgtggggcgagtactgggacaacctgatctgcaccgtgggcgacctgctgcccgaggtgatccccgtgcacatggccgccgtgggctgccccatcagcagcctgagaaccaccagctacaccatcgaccaggcccagaaggagcccgccatgagattcggcacccaggtgagcggcggcgacaccgtgaccagaaccctgagactgaacaacagcagcccctgcgacatcagactggactgggagacctacgtgcccgaggacaaggaggacagactggtggagctgctggtgttctacggcccccccttccccctgagagaccaggccggcaacgagctggtgtgccccgacacccccgagggcggctgcctgctgtggagccccggccccagcagcagcagcgagttcagccacgagaccgacagcagcgtggagggcagcagcagcgccagcaacagagtggcccagaagctgatcagcgtgatcctgcaggcccacgagggcgtgcccagcggccacctgtactgcatcagccccaagcaggtggtggtgcccgccggcggcagcagcaccatctacatcagcttcacccccatggtgctgagccccgagatcctgcacaaggtggagtgcaccggctacgccctgggcttcatgagcctggacagcaaggtggagagagagatccccggcaagagacacagactgcaggacttcgccgtgggccccctgaagctggacctgcacagctacgtgagacccgcccagctgagcgtggagctggactacggcggcagcatggagttccagtgccaggccagcgacctgatccccgagcagccctgcagcggcgtgctgagcgagctggtgaccacccaccacctgaagctgaccaacaccaccgagatcccccactacttcagactgatggtgagcagacccttcagcgtgagccaggacggcgccagccaggaccacagagcccccggccccggccagaagcaggagtgcgaggaggagaccgccagcgccgacaagcagctggtgctgcaggcccaggagaacatgctggtgaacgtgagcttcagcctgagcctggagctgctgagctaccagaagctgcccgccgaccagaccctgcccggcgtggacatccagcagagcgccagcggcgagagagagatggtgttcacccagaacctgctgctggagtacaccaaccagaccacccaggtggtgcccctgagagccgtggtggccgtgcccgagctgcagctgagcaccagctgggtggacttcggcacctgcttcgtgagccagcagagagtgagagaggtgtacctgatgaacctgagcggctgcagaagctactggaccatgctgatgggccagcaggagcccgccaaggccgccgtggccttcagagtgagccccaacagcggcctgctggaggccagaagcgccaacgccccccccaccagcatcgccctgcaggtgttcttcaccgccagaagcagcgagctgtacgagagcaccatggtggtggagggcgtgctgggcgagaagagctgcaccctgagactgagaggccagggcagctacgacgagagatacatgctgccccaccagccctag

SEQ ID NO: 171953 - DNA, 6426 bp, Artificial Sequence
  derived and/or modified sequence
gttagcggcgtctcggttgccatggagaccaggagctccaaaacgcggaggtctttagcgtcccggaccaacgagtgccaggggacaatgtgggcgccaacttcgccaccagccgggtccagcagccccagccagcccacctggaagtcctccttgtattcctccctcgcctactctgaggccttccactacagcttcgcagcccggccccgccgcctcacgcagcttgcgctggcgcagcgtcccgagcctcagctgcttcgtctgcgcccctcctcgctgcgcacccaagatatctcgcacttgctcaccggcgtcttccgcaacttgtactcagccgaggtcatcggcgacgaagtgagcgcaagcttgatcaaggcccgcggcagcgagaatgagcgccacgaggagttcgtggaccagctgcagcagattcgggagctctataagcagcggctggatgagtttgaaatgttggagagacatatcactcaggcccaagcacgggctattgcggaaaatgagcgggtcatgagccaggctggagtacaggacctcgagagccttgtcaggttgcctccagtgaagagtgtctccagatggtgtatagacagcgagttgctacggaaacatcatttgatctccccagaagattactacaccgatacagtgccgtttcactctgcacctaaaggcatctccctacctggatgttcaaaactgacatttagctgtgagaagcgttccgtccagaagaaagagctgaacaagaagcttgaagattcatgcaggaagaagcttgctgagttcgaagatgagttagaccacactgtggacagcctgacatggaatttaactcctaaggccaaagaaaggaccagagaacctctcaagaaagcaagtcaaccaaggaataaaaactggatgaaccacttacgtgtgccacagagagagctagacagacttctgcttgccagaatggagagtcggaaccacttcctaaaaaatccccgtttttttcctcctaacactcgatatggaggcaagtctcttgtttttcctccaaagaagccagcaccgataggagaattccagagtacagagccagaacagagttgtgctgatactccagtgtttctagctaagccaccaattgggtttttcacagattatgaaattggtccagtttatgagatggtaattgcgctgcagaacaccaccacgaccagccgctacctgcgagtcctcccgccttccacgccatacttcgctctgggactggggatgttcccaggaaaaggtggaatggtggctcctggaatgacctgccagtacattgtccagttttttcccgactgccttggggattttgatgattttattttagtggagacccagtcagcccacacacttctgatccccctgcaggcccggaggccgccccccgtgctgacattgtcaccggtgttggactgtggttactgcctcattgggggagtcaagatgaccagattcatctgcaaaaatgtgggtttcagtgttggcaggttctgcattatgcccaaaacaagctggccaccactaagtttcaaggccattgcaaccgtcggctttgttgaacaacctccttttggaatcctgccttcggtgtttgagctggccccgggacatgctatattagtggaggtcttgttttccccaaagagcctaggaaaggcagagcagaccttcatcatcatgtgcgacaactgccagataaaggagctggtgaccataggaattgggcagctgattgctttggatctgatctatatttctggtgaaaaaagccagccagaccctggagagctcacagacttaacagcccagcacttcatacgatttgagcctgaaaaccttcggtccacggctaggaagcagctgattattagaaatgctacgcacgtggagctggccttctactggcagatcatgaagcccaacctgcagcccctcatgcctggagaaaccttcagcatggacagcatcaagtgctaccccgacaaggagactgccttctccatcatgcccagaaagggggttctaagcccccacacagaccacgagttcatcctgagcttttctcctcatgagctgagggattttcacagtgtgctccagatggtgctagaggaagtcccagagcctgtaagttcagaagcggagagcctggggcactcctcctactctgtggatgatgtgattgtcctggaaatcgaggtgaaaggctcagtagaacctttccaggttctcttagagccatatgccctcatcatcccaggggagaactacattgggataaatgtgaagaaggcttttaagatgtggaacaacagcaagtcacccatcagatacctgtgggggaagatcagcgactgccacatcattgaagtggagcccggcacaggggtcatagagcccagtgaggtcggggattttgagttgaactttactgggggtgtccctggccccacaagccaggacctgctgtgtgaaatcgaagactcgccctcgccagtggtgttacacattgaggctgtctttaaggggcctgccctcatcatcaacgtctcagcccttcagtttggtctgctccgcctggggcagaaagccacaaactccatccagatccggaacgtcagccagctcccagccacatggcgcatgaaggagagcccagtctccctccaggaaaggcctgaggatgtgtctcccttcgacattgagccttcgagtggccagcttcactctctgggggagtgcagggtggacatcaccttggaggccctgcactgccagcatctggagaccgtcctggagctggaggtggaaaatggtgcctggagctaccttcctgtgtatgctgaggtacagaagccccatgtgtacctacagagcagccaggtggaggttagaaatctctacctgggtgtgcccacgaagacaaccatcacacttatcaatggcacgctcctgcctacccagttccactggggcaagctcctcggacaccaagcagaattctgcatggtgacagtctcccccaaacatggcctgctgggcccaagtgaggagtgccagctcaagttggagttgactgctcatacccaggaagagctgacccatctggccctcccttgtcacgtgtcaggcatgaagaagccactggttctaggcatttctgggaagccccagggactgcaagtggccattaccatctctaaggagagctctgattgcagcacagagcagtggccaggccacccaaaggagctccgcctggactttggctcagcggtgccactgaggacccgtgtgactcgccagctcattctcaccaatcgctccccaatacggacccgtttctccctcaagtttgagtatttcgggagcccccaaaacagcctgagcaaaaagaccagccttcccaacatgcctcctgccctgctaaagacagtgcggatgcaagagcacctggccaagcgagagcagctggattttatggagagcatgctatcccacgggaaaggagctgctttcttccctcacttttcccagggcatgctggggccctaccagcagctgtgcattgacatcacaggctgtgccaacatgtggggcgagtactgggacaacctcatctgcacggtgggagacctgctgccggaagtcatcccagtgcacatggcagcggtgggctgccccatcagctccctgaggaccacctcctacactattgaccaggcccagaaggaaccagccatgaggttcggcacccaggtctccggaggagacacagttacccgaacccttcgcctgaataactccagcccctgtgacatccgcctggattgggagacctatgttccagaagacaaggaagaccggctggtggagctgctggtgttttatgggccacctttcccgctgcgggaccaagccgggaatgagcttgtgtgccctgatacccctgagggtggctgcctcctctggtccccaggcccctccagttcatcggaattcagccatgaaactgactcatcagttgagggcagctccagtgccagcaatagggtggcacagaagctcatctcagtcatcctgcaggcacatgagggggtgccctccggccacctgtactgtatcagccccaagcaggtggtggtccctgctgggggcagcagtaccatctacatctccttcacccctatggtgctcagccctgagatcctgcacaaggtggagtgtactggctacgccctgggtttcatgagcttggacagcaaggtggaaagggagattccagggaagaggcatcgcctgcaggactttgcggtgggacccctgaaactggacctgcatagctacgtgaggcctgcacagctaagtgtggagctggactacggcggcagtatggaattccagtgccaggccagtgacctcattcccgagcagccctgctctggggtgctgagtgagctggtgaccacccaccacctgaagctgaccaacactacagagatcccacactacttccggcttatggtctccaggcccttctccgtttctcaagatggggcgagccaggaccacagagctcctggccctggccagaagcaggagtgtgaggaggagacagcctcagcggacaagcagctggtgctccaagcacaggagaacatgctggtgaacgtgtccttctcactctccctggagctgctctcctatcagaagctcccagctgaccagacactgcctggggtggacattcagcagagtgcgagtggagagagagagatggtgtttactcagaacctgctcctggagtacaccaaccagaccactcaggtggtgcccctgcgggctgtggtggccgtgcctgagctgcagctctccaccagctgggtggactttgggacctgctttgtgagccagcagcgagtccgggaggtctacctgatgaacctgagcgggtgccgaagctactggactatgctgatgggccagcaggagccagccaaggccgctgtggccttcagggtctccccaaacagtgggctgctagaagcacgatccgccaatgcacccccaacctccatcgccttgcaggttttcttcactgccaggagtagtgagctgtacgagtccacgatggtggtggaaggtgtgctcggtgagaagtcctgcaccctgcggctccggggccaaggctcctatgatgagagatacatgttgcctcaccagccctgaggctccgccccagccctcagccccaggccccagctggagaaaaaacattgcccagggattaggagcagctcttcagcacaaagacacagacttggggacctggggacctctgggcagctcctggaatggaagaacccccttccacaatggtctcagcctaggccctcatgatatgtcctcagagctaacataaaggacaggccacaccacagcagagaccaccacattgagatcactactcagtgcatagcgaagaccagtatggcaaaattagtcttggaaaaaaaccacagccactaagataaattcatgcacttttactatgcccattgcacttctcatccatggatttgccttgccttaagaattaaccatggccttgtggcctgggtgacccaggctgcttttatcttgcacagctaaagagggtctgatgggtggctcaacaccccacccactcctataccatgtcatcagtgttcacattttccaaatgagttgaagtgccttgatctgtccactgccaccaccaccagtgctgagttttcccatgtggttttgcttttgtggtgttactgccttgctgctagagcagcaggactgtctgcgtagcgcctccagcctgggacctcactcagttcccagggtattcaaagacggcagcggctcccattccagtcccgatgcacatggacaccactccgtatgccctgtgaaaacaaaacttaattggctgggcaaaggcacccaccaaattacctccagaccaggctgacccagaaggacgtcatggacaagtaggatgcaaaaccatcagaccagatctgtgggcaagcggtaccctggcctcccacttgggcacacacacggtgacagatgcccactgcaggctagtatccctttcaaggctggcccttaaggaaaacagggatcatgcccctacatcctaagttcagggtgtttctgtgtgcatgttcccctccccagggatcgatcataatcccaaaagacacaatcccaaacacaatcatcccaaatgttgaaatcctggaagaacaaaatccctaaagtctaaaatcctgaaaatcacaatcctaaaagatcaaaatcctgaaaatataattctggaaaaaataa

SEQ ID NO: 171954 - DNA, 5268 bp, Artificial Sequence
  derived and/or modified sequence
atggaaactcgcagtagtaaaacaaggcgctccctggcttcaagaaccaatgagtgccaaggcactatgtgggccccgacttctcctccggctggctcctctagcccaagtcaacctacatggaagtcttctctgtactcgagcttagcttattcggaggccttccattattctttcgcggcccggcccagaaggctgacccaactggcgttggcacaacggcccgaacctcaactcttacggctgaggcctagctcgctgcgaacacaggatatatctcacctgctgactggggtctttagaaatctgtattctgccgaagtgatcggggacgaggtgtctgctagtttgattaaagctaggggcagcgaaaacgagaggcacgaggagtttgtagatcagctgcagcaaataagagagctgtacaaacaacgcctggatgagttcgagatgctggaacggcacatcacccaggcccaggcccgtgctatcgcagagaacgagcgggtcatgtcccaggctggtgtgcaggatctcgagtctctggtgcggctgcccccagtgaagtcagtttctagatggtgtatcgattcagagctgcttagaaaacatcacctgatatctcctgaggattattacaccgacacggtacctttccattcagctcccaagggaattagcctccctgggtgtagcaagctcacgttctcctgcgagaagaggtcagtacaaaagaaggagcttaacaaaaagcttgaggattcctgtaggaaaaagctagctgagtttgaggatgagctcgatcatacagtggattccttgacctggaaccttactccaaaagcaaaggaacgcactcgggaacctctgaaaaaggctagccagccaaggaataagaactggatgaaccatttgagagtaccacagcgcgaactggaccgactactgctcgcccgcatggagtcacgcaaccactttctgaagaacccacgcttttttccaccaaacacccgatatggaggcaaatcacttgtcttcccgccaaagaagccagcacccatcggagagttccagtcaactgagcccgagcagtcgtgtgccgatactccagtctttttggccaagccaccgattggtttctttactgactacgaaatcggcccggtgtacgaaatggtgattgctctacaaaacaccactacaacatctaggtacctgcgggtgctgccaccatcgaccccctatttcgccctgggtttaggaatgttccccggaaaaggtggtatggtggccccgggaatgacatgccaatatatcgttcaattttttccagattgcctgggcgattttgacgactttatactggttgaaacgcagtctgcccacacactcctgatacctctgcaggccagaaggcctccgccagtcctgactctatcacccgttttggattgcgggtactgccttattggcggggtcaagatgactcgcttcatctgtaaaaatgtcgggttttcagtgggaagattctgcataatgcccaagacttcctggcctccactgtcattcaaggcgattgctactgttggatttgtagagcagcccccatttggcatcttgccgtctgtgtttgaactcgctcccgggcacgctattctggtagaggtgcttttttcacctaaaagcttgggaaaggctgagcagacttttattatcatgtgcgacaattgccagattaaagaactcgtcacaattggcatcgggcagctgattgctttggacctcatctacatttcaggagaaaaatcccaacctgacccaggcgaactgacagatctgaccgcccagcatttcatccgcttcgagcctgagaacttacgcagtacagcacgcaaacagctgataattaggaacgccacacacgtagaactcgctttttactggcagattatgaaaccaaacttacaacctttgatgccaggagaaacatttagtatggactctataaagtgctaccccgacaaagagacagcctttagcataatgccccggaagggcgtcctgagccctcacaccgaccatgagttcatcctgagcttttctcctcacgagctgagagattttcacagcgtcctccagatggtactggaggaagttcccgagccagtgagttccgaggccgagtctttgggacacagcagctatagcgtcgacgacgttatcgtgctcgagatagaggtgaaggggtccgtagagcctttccaggtcctgttggagccgtacgctctgatcatccccggcgaaaactatatcggcatcaatgtgaagaaggcctttaaaatgtggaacaacagcaaatcccccatccgttatttatggggcaaaatctccgactgccacattatagaggtagagcccggaacaggtgtgattgaaccttcagaggtcggtgacttcgaacttaacttcacgggcggggtaccaggcccaacctctcaggatttactctgcgagattgaggattcgccatcccccgtcgtgctccatattgaagccgtcttcaagggacccgccttaataattaacgtgtctgccttgcagtttggattactccgcctgggccaaaaagcaacgaactccatccagattaggaacgtatctcagttacctgctacgtggcggatgaaagaaagcccagtgtctctgcaggaaagaccagaagacgtcagccccttcgatattgaaccgagctctggccagttacactctcttggagaatgtcgggtggatatcacacttgaagccctacactgtcagcacctcgaaactgtcctggagctggaagtggagaacggggcttggtcctacctccccgtatacgcagaagtacagaagccccacgtttatctccagtcaagccaggttgaggtacggaatctttatctgggagtgcccacaaaaaccactatcacgctgattaatggcacattattgcctacccagtttcattgggggaaactcctggggcaccaggccgagttttgcatggtcaccgtgtctccaaagcacggactcctaggaccatcagaggaatgtcagctgaaactggagttgaccgctcatactcaggaggaattgactcatttggctctgccctgccatgtttccggcatgaagaagcccttggtgcttggtatcagtgggaaaccccaaggattacaggtggcaatcacaatctccaaagagtcctcagactgttcaaccgaacaatggcccgggcatccaaaggagctgaggctagattttggctctgctgttcctctgaggactcgcgttactcgtcagttgattctcaccaataggtctcccatcaggacaaggttctccctgaaatttgaatattttggtagtcctcagaattctctctctaaaaaaacttccctgcccaatatgcctcccgcactgcttaaaaccgtgcggatgcaggagcatttagcgaaacgcgaacagctagacttcatggaaagcatgctttcgcacggcaagggggcggccttttttcctcacttctcccaaggcatgttaggaccttatcaacagttgtgtattgatattaccgggtgcgcgaatatgtggggagaatattgggacaaccttatatgcaccgtaggcgatctgctcccggaagtcatccctgttcatatggccgcagttggatgcccaatttcctctctgcgaaccactagctatactatcgatcaggcccagaaggagccggcaatgcggttcggtacacaggtgtccgggggagacactgtgactagaacgttacggctgaacaacagttcaccttgcgatatcaggctggattgggaaacctacgtccctgaagacaaggaagacagactggtcgaacttctggtgttttatggccccccatttcccctacgggaccaggctggtaacgagctggtttgccccgacacacctgagggagggtgcctgctttggtctcctgggcctagtagtagttccgaattcagtcatgagacggattcctcggtggagggctcaagctccgcctcgaatcgggtggcgcagaagttaatctccgttattctgcaggctcatgagggagttccatccggccacctctactgtatttctccaaagcaggtagtggttccagctggtggaagttcaacaatctacataagctttaccccaatggtgttgtctccggagattcttcataaagtggagtgtaccgggtacgcactcggctttatgagcctggacagcaaggttgagagggagatccccggcaaacggcacaggctgcaggatttcgcagttggcccactgaagctggacctccacagctatgttcggcccgctcagctgtctgtcgagctggactatggcggctccatggaatttcaatgtcaagcctcagatttaattccagagcagccctgctctggcgtgctcagtgagctcgtgactactcaccacctcaagttaacgaatactactgagataccccactactttcggctgatggtcagtcgccctttctcggtcagccaggacggagctagccaggaccacagagcccccggaccagggcagaaacaagaatgtgaagaggaaactgcctcagccgataagcagctagtgctgcaggcccaggaaaacatgctcgttaacgtgagcttctcactcagtctcgagctgttaagctatcagaaactgcccgcagaccagacactccctggagtggacattcagcagtcagcctctggagaacgggagatggtttttactcagaacttgcttctagagtatactaatcagacgactcaggtggtgccccttcgggcggtagtcgcagtccccgagctgcagttgagcacctcgtgggtcgattttggaacatgtttcgtgtcacagcagagggtacgagaggtgtacctgatgaatctgtccggttgccgttcctactggacgatgctcatggggcagcaggagcctgctaaagctgccgtggccttccgcgttagtccaaattccggcttgctggaagcacgctccgcaaatgccccaccgacgtctatcgcattgcaggtttttttcactgcccgcagtagtgaattgtacgagtctactatggtagtagagggcgttctgggggaaaaatcctgtacactaaggctaaggggccagggttcatatgatgagaggtacatgctgcctcaccagccctag

SEQ ID NO: 171955 - DNA, 5268 bp, Artificial Sequence
  derived and/or modified sequence
atggagaccaggagcagcaagaccaggaggagcctggccagcaggaccaatgaatgccagggcaccatgtgggcccccaccagccccccagctggcagcagcagccccagccagcccacctggaagagcagcctgtacagcagcctggcctacagcgaggccttccactacagctttgctgcccggccccggcggctgacccagctggccctggcccagaggcctgagccccagctgctgcggctgcggcccagcagcctgcggacccaggacatcagccacctgctgactggagtcttcaggaacctgtacagcgctgaggtgattggagatgaggtgtctgccagcctcatcaaggcccggggctctgaaaatgaaagacatgaggagtttgtggaccagctgcagcagatccgggagctgtacaagcagaggctggatgaatttgagatgctggagcggcacatcacccaggcccaggcccgggccatcgccgagaatgaaagagtgatgagccaggccggcgtgcaggacctggagagcctggtgcggctgccccctgtgaagtctgtgagccgctggtgcatcgacagcgagctgctgaggaagcaccacctgatcagccctgaggactactacacagacacagtgcccttccacagcgcccccaagggcatcagcctgcccggctgcagcaagctgaccttcagctgtgagaagaggtctgtgcagaagaaggagctgaacaagaagctggaggacagctgcaggaagaagctggccgagtttgaagatgagctggaccacacagtggacagcctgacctggaacctgacccccaaggccaaggagaggacccgggagcccctgaagaaggccagccagcccaggaacaagaactggatgaaccacctgcgggtgccccagcgggagctggaccggctgctgctggccaggatggagagcaggaaccacttcctgaagaacccccgcttcttcccccccaacaccaggtatggaggcaagagcctggtgtttcctcccaagaagccagcccccatcggggagttccagagcacagagcctgagcagagctgtgccgacacccctgtgttcctggccaagccacccatcggcttcttcacagattatgagatcggccctgtgtatgagatggtgattgccctgcagaacaccaccaccaccagccgctacctgcgggtgctgccccccagcaccccctactttgccctgggcctgggcatgtttcctgggaagggcggcatggtggcccctggcatgacctgccagtacatcgtgcagttcttcccagactgcctgggggactttgatgacttcatcctggtggagacccagagcgcccacaccctgctgatccccctgcaggcccggcggcccccacctgtgctgaccctgagccctgtgctggactgtggctactgcctgattggaggagtgaagatgacccgcttcatctgcaagaatgtgggcttctctgtgggccgcttctgcatcatgcccaagacctcctggccacccctgtccttcaaggccatcgccaccgtgggctttgtggagcagcccccatttggcatcctgcccagcgtgtttgagctggcccctggccacgccatcctggtggaggtgctcttcagccccaagagcctgggcaaggccgagcagaccttcatcatcatgtgtgacaactgccagatcaaggagctggtgaccatcggcatcggccagctgattgccctggacctgatctacatctctggagagaagagccagcctgaccctggagagctgacagacctgacagcccagcacttcatccgctttgagcctgagaacctgcggagcacagccaggaagcagctgatcatcagaaatgccacccacgtggagctggccttctactggcagatcatgaagcccaacctgcagcccctgatgcctggagagaccttctccatggacagcatcaagtgctacccagacaaggagacagccttcagcatcatgcccaggaaaggagtgctgagcccccacacagaccacgagttcatcctgtccttcagcccccatgagctgcgggacttccacagcgtgctgcagatggtgctggaggaggtgcctgagcctgtgtcctctgaggccgagagcctgggccacagcagctacagcgtggatgatgtgattgtgctggagattgaggtgaagggctctgtggagcccttccaggtgctgctggagccctatgccctgatcatccctggagagaactacatcggcatcaacgtgaagaaggccttcaagatgtggaacaacagcaagagccccatccgctacctgtggggcaagatcagtgactgccacatcatcgaggtggagcccggcaccggggtgattgagcccagcgaggtgggggactttgagctgaacttcaccggcggcgtgcccggccccaccagccaggacctgctgtgtgaaattgaggacagccccagccctgtggtgctgcacatcgaggccgtgttcaagggccctgccctgatcatcaacgtgtctgccctgcagtttggcctgctgcggctgggccagaaggccaccaacagcatccagatcagaaatgtgtcccagctgcctgccacctggaggatgaaggagagccctgtgtccctgcaggagaggccagaagatgtgagcccctttgacatcgagcccagcagcggccagctgcacagcctgggggagtgccgggtggacatcaccctggaggccctgcactgccagcacctggagaccgtgctggagctggaggtggagaatggagcctggagctacctgcctgtgtatgcagaggtgcagaagccccacgtgtacctgcagagcagccaggtggaggtgaggaacctgtacctgggcgtgcccaccaagaccaccatcaccctcatcaatggcaccctgctgcccacccagttccactggggcaagctgctgggccaccaggccgagttctgcatggtgacagtgagccccaagcacggcctgctgggccccagcgaggagtgccagctgaagctggagctgacagcccacacccaggaggagctgacccacctggccctgccctgccacgtgtctggcatgaagaagcccctggtgctgggcatcagcggcaagccccagggcctgcaggtggccatcaccatcagcaaggagagcagtgactgcagcacagagcagtggccaggccaccccaaggagctgcggctggactttggcagcgctgtgcccctgcggaccagggtgacccggcagctgatcctgaccaacagaagccccatccgcacccgcttcagcctgaagtttgagtacttcggcagcccccagaacagcctgagcaagaagaccagcctgcccaacatgcccccagccctgctgaagacagtgaggatgcaggagcacctggccaagcgggagcagctggacttcatggagagcatgctgagccacggcaagggggccgccttcttcccccacttcagccagggcatgctgggcccctaccagcagctgtgcatcgacatcaccggctgtgccaacatgtggggcgagtactgggacaacctgatctgcaccgtgggggacctgctgcctgaggtgattcctgtgcacatggctgctgtgggctgccccatcagcagcctgcggaccaccagctacaccatcgaccaggcccagaaggagcccgccatgagatttggcacccaggtgtctggaggagacacagtgaccaggaccctgcggctgaacaacagcagcccctgtgacatccggctggactgggagacctacgtgcctgaggacaaggaggaccggctggtggagctgctggtgttctacggcccccccttccccctgcgggaccaggccggaaatgagctggtgtgcccagacaccccagagggcggctgcctgctgtggagccctggccccagcagcagcagcgagttcagccatgaaacagacagctctgtggagggcagcagcagcgccagcaacagagtggcccagaagctgatcagcgtcatcctgcaggcccatgaaggagtgcccagcggccacctgtactgcatcagccccaagcaggtggtggtgcctgctgggggcagcagcaccatctacatctccttcacccccatggtgctgagccctgagatcctgcacaaggtggagtgcaccggctacgccctgggcttcatgagcctggacagcaaggtggagcgggagatccctgggaagaggcaccggctgcaggactttgctgtgggccccctgaagctggacctgcacagctatgtgcggcctgcccagctgtctgtggagctggactatggaggctccatggagttccagtgccaggccagtgacctgatccctgagcagccctgcagcggcgtgctgtctgagctggtgaccacccaccacctgaagctgaccaacaccacagagatcccccactacttccggctgatggtgtcccggcccttctctgtgtcccaggatggagccagccaggaccaccgggcccctggccctggccagaagcaggagtgtgaggaggagacagccagcgctgacaagcagctggtgctgcaggcccaggagaacatgctggtgaatgtgtccttcagcctgagcctggagctgctgagctaccagaagctgcctgctgaccagaccctgcccggggtggacatccagcagagcgccagcggggagcgggagatggtgttcacccagaacctgctgctggagtacaccaaccagaccacccaggtggtgcccctgcgggctgtggtggccgtgcctgagctgcagctgagcacctcctgggtggactttggcacctgctttgtgtcccagcagagggtgcgggaggtgtacctgatgaacctgagcggctgccgcagctactggaccatgctgatgggccagcaggagcccgccaaggctgctgtggccttccgggtgagccccaacagcggcctgctggaggcccggagcgccaatgccccacccaccagcatcgccctgcaggtgttcttcaccgcccggagcagcgagctgtatgagagcaccatggtggtggagggcgtgctgggggagaagagctgcaccctgcggctgcggggccagggcagctatgatgagcgctacatgctgccccaccagccctag

SEQ ID NO: 171956 - DNA, 5268 bp, Artificial Sequence
  derived and/or modified sequence
atggagacccggagcagcaagacccggcggagcctggccagccggacaaacgaatgtcaaggaaccatgtgggcgcccaccagccctcctgcagggagcagcagtccttcgcagcccacttggaagtcgagcctgtatagcagtctcgcttacagcgaggcttttcactatagttttgccgcacgccctcgccggctgactcaactggctctggctcaaaggcctgagccacaacttttgcgtctgcgccccagctctttacgtacacaagacatcagccacttacttacaggcgtctttcgaaatctgtacagcgcagaagtaatcggagacgaggtgtcagcctccctgatcaaggcacgaggttccgaaaacgagaggcacgaggaatttgtggatcaattacagcaaatcagggagctgtacaagcagcgcctcgacgagtttgagatgctggaacgacacattacacaggctcaggccagagctattgcagagaacgagcgcgtcatgagccaggccggagttcaggatctcgaatccttagttaggctgcccccagtgaaaagcgtgagtcgctggtgtatcgattcagaactgttacgcaagcatcacttaatcagccccgaagattactacaccgacaccgtgccgttccattccgctcccaagggcatttccctgccaggatgttcaaaactgacttttagttgtgaaaaacgctccgtgcagaagaaggagcttaacaagaaattagaggattcctgtcggaagaagttggccgagtttgaagatgagctcgaccacacagtggactcgttgacatggaatctgactccgaaagctaaagaacgaacccgggagcccctgaagaaggcttcgcagcctaggaacaagaattggatgaatcatctacgggtgccccagagggagctggataggttacttctagccagaatggagtcccgaaatcattttctgaaaaatccgcgttttttccctcccaatacccgttacggcggcaaatcactcgtgttccctccaaaaaagcccgcccccataggggaattccaatccactgagcctgagcagtcctgcgccgataccccggtctttctggccaaacctccaatcggcttctttaccgactatgagattggaccagtgtacgaaatggtgattgcgcttcagaacaccaccacaacttctcggtaccttcgcgtactaccaccttcaactccatattttgctctgggtctcggtatgtttccaggcaagggcgggatggtagcacctggcatgacctgccagtatatagtgcagttttttccagattgcttaggcgacttcgatgactttattctggtcgagacccagtcagcgcatacacttctaatccctctgcaagctcgacggccaccccccgtgctcacactgtcaccggtgttggactgtggatactgcttgatcgggggggtcaagatgacccgatttatctgtaaaaatgtcggcttcagtgttggcagattttgcatcatgccaaaaacctcctggccaccactgtcgttcaaggccatcgccaccgtcggcttcgtcgagcagccaccttttgggattctgccttctgtgttcgaactggcccctgggcatgctatcctggtggaagtactgttttcccctaagtccctgggaaaagccgaacaaaccttcatcataatgtgcgataattgccagatcaaagagctcgtgacgattggcataggccagctgatagctctggacctcatttatatcagcggagaaaagagtcagccagacccgggcgagttgaccgacctaactgcacaacactttatccggttcgaacctgaaaacctgcgcagcaccgcccgtaaacaactgattataagaaacgccacgcacgtggagctcgcattttattggcagatcatgaagcctaacttacaacctctgatgccaggggaaacattctccatggattcaatcaaatgttatccagataaagagacggcattctcgataatgcccaggaagggagtgctctcgccccatacagaccatgaattcatattgtccttctcgccccacgaattacgcgatttccattctgtccttcaaatggtgctggaggaagttccagagcccgtgagtagtgaagctgaatccctcgggcactcctcatacagcgtggatgatgtgatagtgctcgagattgaggtgaaaggctcggtggagccctttcaggtcctgctcgaaccatacgctctgatcatccccggtgagaactatatcgggataaacgtcaagaaggctttcaaaatgtggaacaatagtaagtcacccatcaggtatctgtggggtaaaattagcgactgccatattatcgaagtggagcctggaaccggagtgattgagccgagcgaggtgggagactttgagctgaactttacaggcggcgtgccaggtcctaccagccaggacctgctatgcgaaatcgaggactccccctctcctgtcgtgctgcacatcgaagcggtgtttaaaggccccgcactgatcatcaatgtctcagctctccagtttggccttcttaggctgggtcagaaagctaccaactccatacagatacggaacgtgagccagctgcccgcgacttggcggatgaaggaaagtccagtgagccttcaggagcgaccagaagacgtgtctcctttcgatattgagccaagcagtggccagttgcattccctcggagagtgtagggtcgacatcactctggaagcactccactgtcaacacctcgaaaccgtacttgagttagaggtcgaaaacggagcttggtcatacttgccagtgtacgctgaggttcagaagccccacgtgtatctgcagtcatcacaggtcgaggtcagaaacctttacctgggggtgccaacaaaaactaccatcactttgatcaatgggacgctgctgcctacccaattccactggggcaaactgctcgggcaccaggccgagttctgtatggttacagtatctccaaaacacgggctgctcggcccctccgaggagtgtcagctcaaattggaactgaccgctcacacccaggaagagctgacccacctggccttaccctgccacgtgtcgggtatgaagaaaccactggtcctgggaatcagcggcaagccccagggcttgcaggtggccattacgataagcaaagaatcctcagattgctctacagaacagtggccagggcatcctaaggaactgcgcctggactttgggagcgccgtacctcttcggacgagggttacacgccagcttatcctcactaatcgatccccaatacgtacgcggttcagtctgaaatttgaatattttggttctccacaaaactccttgtcaaagaagaccagtctcccaaacatgcccccagccctgctcaagacagtccggatgcaagagcaccttgctaaacgggagcaactggattttatggagtctatgcttagccacggaaagggcgccgccttttttccccatttcagccaggggatgttgggtccttatcagcagctgtgcatagacatcactggctgcgctaatatgtggggtgagtactgggacaaccttatatgcacagtcggggaccttctgccagaagtgatcccagtccacatggcagctgttggctgcccaatttcatccctgagaactacaagctacacaattgatcaggcccagaaagagcccgctatgcgcttcggcacacaggtctctggaggcgataccgtaacccgaacgctgagactgaataacagctcgccttgcgacattaggctggactgggagacctatgttcctgaggataaggaggatcggctggtcgaacttctagttttttacggccccccattcccattgagagaccaagctggcaacgagttggtgtgtccagacacacctgaggggggatgcctcttatggtctcctgggccaagttcaagtagtgaattctcacacgaaacagacagctcagtggaaggctcttcttcagcttccaacagggttgctcaaaagctgatatcagtgatcctccaggcacatgagggcgtaccctccggacacttatactgcatctcaccaaaacaggtggtggtgcctgctggaggctcctccaccatctatattagctttactcctatggtgttgagcccagagattctccataaagttgagtgcacaggttatgccctgggattcatgtcattagacagtaaagtcgaaagggaaatcccaggcaagcgtcaccggctgcaggatttcgctgttggcccactcaaactcgacttgcactcctatgtgagacctgcccagctgtctgtggagcttgattacggaggaagcatggaatttcagtgccaggcgagtgacctgattcccgaacaaccctgtagtggtgtccttagtgagctcgtgactacccaccaccttaaactcactaatacgactgagataccacattacttccggctaatggtgtcaaggcctttttctgtgagtcaggatggggcgagccaggatcaccgggcgcctggccccggccagaagcaggaatgcgaggaggaaacggcatccgcagacaaacagctggtgctgcaagcccaggagaatatgttagtcaatgtgtctttctcattgagcctggagttgttgtcttaccagaagctgccagcagatcaaactctgcccggcgtcgacatacagcaaagcgcctctggggagcgggagatggtgtttactcagaatctactactggaatatacaaaccagacaactcaggtggttccactgagggccgtggttgcagtcccggaactgcaactgtccacgtcatgggtcgacttcggaacctgcttcgtgagccaacagagggtgagggaggtctatctcatgaatttgagcggctgccgctcttactggacaatgctgatgggacaacaggagcccgcgaaggccgccgttgccttccgcgtttcgccaaacagcggactgctggaggcaagatctgctaatgcaccacccacgtcaatagcgctccaggtgtttttcaccgccaggagctctgagctttatgagtctaccatggttgtggagggggtgttgggggaaaagtcttgcaccctgcggctgagaggacaagggtcctacgacgagcggtatatgctgcctcaccagccttag

SEQ ID NO: 171957 - DNA, 5267 bp, Artificial Sequence
  derived and/or modified sequence
atggagactcgctctagcaagacccgcagatctctggcctcccggacgaatgaatgtcagggaaccatgtgggcccctaccagtccacccgctggctcttctagccccagtcagccaacctggaagtctagcctctactcgagtctggcttattctgaagcattccattattccttcgccgctcgccctcgtaggttgacccagttggcactggctcaaaggccagagccacagctcctgcgcctgcgcccttcatcgcttcggactcaagatatcagccacctgctcactggagtgttccgcaatttgtacagtgctgaggtgattggcgacgaagtgagtgccagcctcatcaaagccaggggcagcgaaaacgaacggcacgaggaatttgtggaccagctgcagcagattcgggaactctacaagcaacgcctggatgagtttgaaatgctggaacgccatatcacacaggcccaagctcgggctatagcagagaacgaaagggtgatgtcccaggcaggagtgcaggatctggaatcactagtgcggctccctcccgttaaaagcgtgtcacggtggtgcatcgactccgagctgctaaggaagcaccacctgatctctccagaagactactacacggacactgtgccgttccattctgcccctaagggcatatctcttcctggatgttccaaactgacctttagctgcgaaaaacggtctgtgcagaagaaagagctgaacaaaaaattagaagacagttgccgtaaaaaactggctgaattcgaggacgaattggatcacaccgttgacagtttaacctggaacctaactcccaaggccaaggaaaggaccagggagccactcaagaaggcttcacaaccgaggaataaaaactggatgaaccaccttagagtgccccaacgagagttggaccggcttctgctggccagaatggagtcaagaaatcacttcctgaaaaatcccaggttcttcccccctaacactcgctacggtgggaaatccttagttttcccaccaaagaaaccagcccctatcggggagttccaatctacggagcccgaacagtcatgtgccgacacaccggtctttctggcgaaaccgcctattgggttttttactgactatgaaataggccctgtgtacgaaatggtcatagctctgcagaacacgaccactaccagccgatatttacgtgtcttaccaccctccactccttactttgctctgggtctgggtatgtttcccggaaaaggcggaatggtcgcgccaggtatgacctgccagtatatcgtccagttttttcccgattgtcttggcgacttcgatgattttattctggtggaaacccaaagtgcgcatacgctgctgatccccttgcaggctaggaggcctcctcccgtcttgaccctgagtcccgtgttagattgcggatattgcctgataggaggcgtgaaaatgacccgcttcatttgcaagaatgtcggatttagcgtgggtcggttctgcattatgcctaaaaccagctggcctcctctcagctttaaagcaatcgcaacagttggctttgtggaacagcctcctttcggaatcttgcccagcgtttttgagctcgctccaggccacgccatcttggtagaggtcttgttcagcccaaaatctctcggtaaagctgaacagacattcatcattatgtgcgacaactgccaaatcaaagaactcgtgaccatcggcatcggccagttaattgctttggatctcatctacatcagtggtgagaagtcgcagcctgatcctggagagttaacggaccttacagctcagcactttatccgatttgagcccgaaaacttgcggtccacagccagaaaacaactgattatcagaaatgcaactcacgtggaactcgctttttactggcagatcatgaaaccaaatctgcagcctcttatgccaggggagacattctcaatggactccataaagtgttaccctgataaggagactgcattttcgatcatgcccaggaagggcgtgctttcccctcataccgatcatgaatttatactatctttttcgccccatgagttaagggacttccactccgtcctccagatggtattagaggaggtgccggagcctgtctcatcagaggcagaaagcctcgggcattctagctatagtgtggacgacgtgatcgtacttgaaattgaagtcaagggcagtgtcgaacctttccaggtcttgcttgagccatacgcacttatcatcccaggagagaactacatcggaatcaatgtcaagaaagcctttaagatgtggaacaacagcaagtctccaatccgatatctgtggggaaaaataagtgactgccacattatcgaggtcgagccaggcaccggcgtgattgaaccgtccgaagtcggggacttcgagctcaacttcaccggcggtgtcccaggtccaacatcccaggatcttctctgcgagattgaggattctccctcccccgtagtcctgcatatcgaggctgttttcaaaggcccagccttgattattaacgtgagtgcgctccagtttggactgttgagacttggtcaaaaagccacaaatagtattcagattcgcaacgtttcccagctccccgctacttggagaatgaaagagagccctgtgagtctgcaagagcgcccagaagacgtgtcaccattcgacatagagccatcaagcggtcagttacactccctcggcgagtgccgcgtggacattacactggaggcactacactgtcagcatctggagaccgtcctggagctcgaagtggagaacggagcgtggtcctacttgcccgtgtacgccgaagtccaaaaacctcacgtgtacctccaatcaagtcaagtcgaagtacgcaacctctatctgggcgttcccaccaaaacaacaatcacattgattaacggtacactcttacctacacagttccattggggaaaactgttgggccaccaggctgaattctgcatggtgaccgtgtcccctaagcatggccttctgggaccaagtgaggaatgccagctaaagctcgagctcacagcacatacccaagaagagctcacccacctggctctgccatgccatgtgagtggaatgaagaagccattggtcctgggcatctcaggaaagcctcaggggctgcaggtggcgattacaatctccaaggaatctagtgattgcagcaccgaacagtggcctggccatccaaaagagctcagattagattttggttcggccgtgccactcaggactcgggtcactcgacagctgatcctgaccaacagatctcctatcaggacacggttctctctgaagttcgaatatttcggatctccccagaacagcctgtctaaaaagaccagcctgcccaatatgccacccgctttattgaagactgtgcgaatgcaagaacatctggctaaacgggaacaactggatttcatggaaagcatgttgagtcacgggaaaggcgctgcttttttcccccattttagccagggtatgctcgggccttatcagcagctgtgtatcgacattaccgggtgtgccaatatgtggggagaatactgggacaatcttatatgcactgtgggcgatctactacccgaggtcatcccagtgcacatggcggctgtgggatgccctatttcgagcttaaggacaacgagctacaccatcgatcaagcacagaaagaacccgcaatgcgctttggaacccaggttagtggcggtgataccgtgacacgcaccttgcggctcaataattccagcccatgcgacattcgactcgattgggagacctacgtgcctgaggacaaggaagatagactcgtcgagctgctggttttttacggcccaccttttcctctgcgagaccaagctggtaacgagcttgtatgcccagacacacccgaaggagggtgtctcttgtggagcccgggaccgagcagctcttccgagttttctcatgaaaccgacagctctgttgaggggtcctcttcagcctcaaaccgcgttgctcaaaagttgatctccgtgattcttcaggcacatgagggagtgccaagtggccatttatactgcatttctcctaagcaagtcgtcgtgcctgccggagggtcctctaccatatatataagctttacccccatggtccttagcccggaaatcctgcacaaagttgaatgcaccggttatgccctcggtttcatgagcctggactccaaagtcgaaagagagattcccggaaaacggcaccggctacaggactttgcagtcgggcctctgaagctggatttacacagctacgtcagacctgctcagttaagcgttgagctggattatgggggttcaatggaatttcagtgccaagccagcgacctcatcccggagcaaccttgctccggggttttatccgagctggtgaccacccatcacttaaagctcacgaacacaaccgagatacctcactattttagactcatggtctctagaccgtttagcgttagccaggatggcgcatcccaggatcatagggccccaggcccaggtcaaaagcaggagtgtgaggaagaaactgcaagtgccgacaagcagctcgtactgcaggctcaagaaaatatgctggtgaatgtgtctttttcactgagccttgagttgcttagctaccagaaactgccggctgaccagacactgcccggagtggacatccagcagtcggctagtggggagcgggagatggtcttcacacagaatctgctgctggagtataccaatcagacaacacaagtggtgcctctgcgggcagtggttgcagtgccagagctgcaactgtcaaccagttgggtggatttcggtacatgctttgtttcccagcaacgggtcagagaggtgtatctgatgaacctatcgggctgcaggtcttactggacaatgctcatgggccaacaggagccagccaaggcggctgtggcgttcagggtaagccccaactccggcttactagaggccaggtcagccaacgcgcctccgactagtattgctctgcaggtcttctttaccgcacgcagttcggagctgtatgagtctaccatggtggtggagggcgttctcggtgagaaaagctgtacactccggcttcgcggacaaggcagctatgatgagaggtacatgctcccccatcaaccata

SEQ ID NO: 171958 - protein, 1778 aa, Artificial Sequence
  derived and/or modified sequence
METRSSKTRRSLASRTNECQGTMWAPTSPPAGSSSPSQPTWKSSLYSSLAYSEAFHYSFAARPRRLTQLALAQRPEPQLLRLRPSSLRTQDISHLLTGVFRNLYSAEVIGDEVSASLIKARGSENERHEEFVDQLQQIRELYKQRLDEFEMLERHITQAQARAIAENERVMSQAGVQDLESLVRLPPVKSVSRWCIDSELLRKHHLISPEDYYTDTVPFHSAPKGISLPGCSKLTFSCEKRSVQKKELNKKLEDSCRKKLAEFEDELDHTVDSLTWNLTPKAKERTREPLKKASQPRNKNWMNHLRVPQRELDRLLLARMESRNHFLKNPRFFPPNTRYGGKSLVFPPKKPAPIGEFQSTEPEQSCADTPVFLAKPPIGFFTDYEIGPVYEMVIALQNTTTTSRYLRVLPPSTPYFALGLGMFPGKGGMVAPGMTCQYIVQFFPDCLGDFDDFILVETQSAHTLLIPLQARRPPPVLTLSPVLDCGYCLIGGVKMTRFICKNVGFSVGRFCIMPKTSWPPLSFKAIATVGFVEQPPFGILPSVFELAPGHAILVEVLFSPKSLGKAEQTFIIMCDNCQIKELVTIGIGQLIALDLIYISGEKSQPDPGELTDLTAQHFIRFEPENLRSTARKQLIIRNATHVELAFYWQIMKPNLQPLMPGETFSMDSIKCYPDKETAFSIMPRKGVLSPHTDHEFILSFSPHELRDFHSVLQMVLEEVPEPVSSEAESLGHSSYSVDDVIVLEIEVKGSVEPFQVLLEPYALIIPGENYIGINVKKAFKMWNNSKSPIRYLWGKISDCHIIEVEPGTGVIEPSEVGDFELNFTGGVPGPTSQDLLCEIEDSPSPVVLHIEAVFKGPALIINVSALQFGLLRLGQKATNSIQIRNVSQLPATWRMKESPVSLQERPEDVSPFDIEPSSGQLHSLGECRVDITLEALHCQHLETVLELEVENGAWSYLPVYAEVQKPHVYLQSSQVEVRNLYLGVPTKTTITLINGTLLPTQFHWGKLLGHQAEFCMVTVSPKHGLLGPSEECQLKLELTAHTQEELTHLALPCHVSGMKKPLVLGISGKPQGLQVAITISKESSDCSTEQWPGHPKELRLDFGSAVPLRTRVTRQLILTNRSPIRTRFSLKFEYFGSPQNSLSKKTSLPNMPPALLKTVRMQEHLAKREQLDFMESMLSHGKGAAFFPHFSQGMLGPYQQLCIDITGCANMWGEYWDNLICTVGDLLPEVIPVHMAAVGCPISSLRTTSYTIDQAQKEPAMRFGTQVSGGDTVTRTLRLNNSSPCDIRLDWETYVPEDKEDRLVELLVFYGPPFPLRDQAGNELVCPDTPEGGCLLWSPGPSSSSEFSHETDSSVEGSSSASNRVAQKLISVILQAHEGVPSGHLYCISPKQVVVPAGGSSTIYISFTPMVLSPEILHKVECTGYALGFMSLDSKVEREIPGKRHRLQDFAVGPLKLDLHSYVRPAQLSVELDYGGSMEFQCQASDLIPEQPCSGVLSELVTTHHLKLTNTTEIPHYFRLMVSRPFSVSQDGASQDHRAPGPGQKQECEEETASADKQLVLQAQENMLVNVSFSLSLELLSYQKLPADQTLPGVDIQQSASGEREMVFTQNLLLEYTNQTTQVVPLRAVVAVPELQLSTSWVDFGTCFVSQQRVREVYLMNLSGCRSYWTMLMGVVSCTSPRWWWKVCSVRSPAPCGSGAKAPMMRDTCCLTSPEAPPQPSAPGPSWRKNIAQGLGAALQHKDTDLGTWGPLGSSWNGRTPFHNGLSLGPHDMSSELT

SEQ ID NO: 171959 - DNA, 5337 bp, Artificial Sequence
  derived and/or modified sequence
atggagaccagaagcagcaagaccagaagaagcctggccagcagaaccaacgagtgccagggcaccatgtgggcccccaccagcccccccgccggcagcagcagccccagccagcccacctggaagagcagcctgtacagcagcctggcctacagcgaggccttccactacagcttcgccgccagacccagaagactgacccagctggccctggcccagagacccgagccccagctgctgagactgagacccagcagcctgagaacccaggacatcagccacctgctgaccggcgtgttcagaaacctgtacagcgccgaggtgatcggcgacgaggtgagcgccagcctgatcaaggccagaggcagcgagaacgagagacacgaggagttcgtggaccagctgcagcagatcagagagctgtacaagcagagactggacgagttcgagatgctggagagacacatcacccaggcccaggccagagccatcgccgagaacgagagagtgatgagccaggccggcgtgcaggacctggagagcctggtgagactgccccccgtgaagagcgtgagcagatggtgcatcgacagcgagctgctgagaaagcaccacctgatcagccccgaggactactacaccgacaccgtgcccttccacagcgcccccaagggcatcagcctgcccggctgcagcaagctgaccttcagctgcgagaagagaagcgtgcagaagaaggagctgaacaagaagctggaggacagctgcagaaagaagctggccgagttcgaggacgagctggaccacaccgtggacagcctgacctggaacctgacccccaaggccaaggagagaaccagagagcccctgaagaaggccagccagcccagaaacaagaactggatgaaccacctgagagtgccccagagagagctggacagactgctgctggccagaatggagagcagaaaccacttcctgaagaaccccagattcttcccccccaacaccagatacggcggcaagagcctggtgttcccccccaagaagcccgcccccatcggcgagttccagagcaccgagcccgagcagagctgcgccgacacccccgtgttcctggccaagccccccatcggcttcttcaccgactacgagatcggccccgtgtacgagatggtgatcgccctgcagaacaccaccaccaccagcagatacctgagagtgctgccccccagcaccccctacttcgccctgggcctgggcatgttccccggcaagggcggcatggtggcccccggcatgacctgccagtacatcgtgcagttcttccccgactgcctgggcgacttcgacgacttcatcctggtggagacccagagcgcccacaccctgctgatccccctgcaggccagaagacccccccccgtgctgaccctgagccccgtgctggactgcggctactgcctgatcggcggcgtgaagatgaccagattcatctgcaagaacgtgggcttcagcgtgggcagattctgcatcatgcccaagaccagctggccccccctgagcttcaaggccatcgccaccgtgggcttcgtggagcagccccccttcggcatcctgcccagcgtgttcgagctggcccccggccacgccatcctggtggaggtgctgttcagccccaagagcctgggcaaggccgagcagaccttcatcatcatgtgcgacaactgccagatcaaggagctggtgaccatcggcatcggccagctgatcgccctggacctgatctacatcagcggcgagaagagccagcccgaccccggcgagctgaccgacctgaccgcccagcacttcatcagattcgagcccgagaacctgagaagcaccgccagaaagcagctgatcatcagaaacgccacccacgtggagctggccttctactggcagatcatgaagcccaacctgcagcccctgatgcccggcgagaccttcagcatggacagcatcaagtgctaccccgacaaggagaccgccttcagcatcatgcccagaaagggcgtgctgagcccccacaccgaccacgagttcatcctgagcttcagcccccacgagctgagagacttccacagcgtgctgcagatggtgctggaggaggtgcccgagcccgtgagcagcgaggccgagagcctgggccacagcagctacagcgtggacgacgtgatcgtgctggagatcgaggtgaagggcagcgtggagcccttccaggtgctgctggagccctacgccctgatcatccccggcgagaactacatcggcatcaacgtgaagaaggccttcaagatgtggaacaacagcaagagccccatcagatacctgtggggcaagatcagcgactgccacatcatcgaggtggagcccggcaccggcgtgatcgagcccagcgaggtgggcgacttcgagctgaacttcaccggcggcgtgcccggccccaccagccaggacctgctgtgcgagatcgaggacagccccagccccgtggtgctgcacatcgaggccgtgttcaagggccccgccctgatcatcaacgtgagcgccctgcagttcggcctgctgagactgggccagaaggccaccaacagcatccagatcagaaacgtgagccagctgcccgccacctggagaatgaaggagagccccgtgagcctgcaggagagacccgaggacgtgagccccttcgacatcgagcccagcagcggccagctgcacagcctgggcgagtgcagagtggacatcaccctggaggccctgcactgccagcacctggagaccgtgctggagctggaggtggagaacggcgcctggagctacctgcccgtgtacgccgaggtgcagaagccccacgtgtacctgcagagcagccaggtggaggtgagaaacctgtacctgggcgtgcccaccaagaccaccatcaccctgatcaacggcaccctgctgcccacccagttccactggggcaagctgctgggccaccaggccgagttctgcatggtgaccgtgagccccaagcacggcctgctgggccccagcgaggagtgccagctgaagctggagctgaccgcccacacccaggaggagctgacccacctggccctgccctgccacgtgagcggcatgaagaagcccctggtgctgggcatcagcggcaagccccagggcctgcaggtggccatcaccatcagcaaggagagcagcgactgcagcaccgagcagtggcccggccaccccaaggagctgagactggacttcggcagcgccgtgcccctgagaaccagagtgaccagacagctgatcctgaccaacagaagccccatcagaaccagattcagcctgaagttcgagtacttcggcagcccccagaacagcctgagcaagaagaccagcctgcccaacatgccccccgccctgctgaagaccgtgagaatgcaggagcacctggccaagagagagcagctggacttcatggagagcatgctgagccacggcaagggcgccgccttcttcccccacttcagccagggcatgctgggcccctaccagcagctgtgcatcgacatcaccggctgcgccaacatgtggggcgagtactgggacaacctgatctgcaccgtgggcgacctgctgcccgaggtgatccccgtgcacatggccgccgtgggctgccccatcagcagcctgagaaccaccagctacaccatcgaccaggcccagaaggagcccgccatgagattcggcacccaggtgagcggcggcgacaccgtgaccagaaccctgagactgaacaacagcagcccctgcgacatcagactggactgggagacctacgtgcccgaggacaaggaggacagactggtggagctgctggtgttctacggcccccccttccccctgagagaccaggccggcaacgagctggtgtgccccgacacccccgagggcggctgcctgctgtggagccccggccccagcagcagcagcgagttcagccacgagaccgacagcagcgtggagggcagcagcagcgccagcaacagagtggcccagaagctgatcagcgtgatcctgcaggcccacgagggcgtgcccagcggccacctgtactgcatcagccccaagcaggtggtggtgcccgccggcggcagcagcaccatctacatcagcttcacccccatggtgctgagccccgagatcctgcacaaggtggagtgcaccggctacgccctgggcttcatgagcctggacagcaaggtggagagagagatccccggcaagagacacagactgcaggacttcgccgtgggccccctgaagctggacctgcacagctacgtgagacccgcccagctgagcgtggagctggactacggcggcagcatggagttccagtgccaggccagcgacctgatccccgagcagccctgcagcggcgtgctgagcgagctggtgaccacccaccacctgaagctgaccaacaccaccgagatcccccactacttcagactgatggtgagcagacccttcagcgtgagccaggacggcgccagccaggaccacagagcccccggccccggccagaagcaggagtgcgaggaggagaccgccagcgccgacaagcagctggtgctgcaggcccaggagaacatgctggtgaacgtgagcttcagcctgagcctggagctgctgagctaccagaagctgcccgccgaccagaccctgcccggcgtggacatccagcagagcgccagcggcgagagagagatggtgttcacccagaacctgctgctggagtacaccaaccagaccacccaggtggtgcccctgagagccgtggtggccgtgcccgagctgcagctgagcaccagctgggtggacttcggcacctgcttcgtgagccagcagagagtgagagaggtgtacctgatgaacctgagcggctgcagaagctactggaccatgctgatgggcgtggtgagctgcaccagccccagatggtggtggaaggtgtgcagcgtgagaagccccgccccctgcggcagcggcgccaaggcccccatgatgagagacacctgctgcctgaccagccccgaggcccccccccagcccagcgcccccggccccagctggagaaagaacatcgcccagggcctgggcgccgccctgcagcacaaggacaccgacctgggcacctggggccccctgggcagcagctggaacggcagaacccccttccacaacggcctgagcctgggcccccacgacatgagcagcgagctgacctag

SEQ ID NO: 171960 - DNA, 5491 bp, Artificial Sequence
  derived and/or modified sequence
gttagcggcgtctcggttgccatggagaccaggagctccaaaacgcggaggtctttagcgtcccggaccaacgagtgccaggggacaatgtgggcgccaacttcgccaccagccgggtccagcagccccagccagcccacctggaagtcctccttgtattcctccctcgcctactctgaggccttccactacagcttcgcagcccggccccgccgcctcacgcagcttgcgctggcgcagcgtcccgagcctcagctgcttcgtctgcgcccctcctcgctgcgcacccaagatatctcgcacttgctcaccggcgtcttccgcaacttgtactcagccgaggtcatcggcgacgaagtgagcgcaagcttgatcaaggcccgcggcagcgagaatgagcgccacgaggagttcgtggaccagctgcagcagattcgggagctctataagcagcggctggatgagtttgaaatgttggagagacatatcactcaggcccaagcacgggctattgcggaaaatgagcgggtcatgagccaggctggagtacaggacctcgagagccttgtcaggttgcctccagtgaagagtgtctccagatggtgtatagacagcgagttgctacggaaacatcatttgatctccccagaagattactacaccgatacagtgccgtttcactctgcacctaaaggcatctccctacctggatgttcaaaactgacatttagctgtgagaagcgttccgtccagaagaaagagctgaacaagaagcttgaagattcatgcaggaagaagcttgctgagttcgaagatgagttagaccacactgtggacagcctgacatggaatttaactcctaaggccaaagaaaggaccagagaacctctcaagaaagcaagtcaaccaaggaataaaaactggatgaaccacttacgtgtgccacagagagagctagacagacttctgcttgccagaatggagagtcggaaccacttcctaaaaaatccccgtttttttcctcctaacactcgatatggaggcaagtctcttgtttttcctccaaagaagccagcaccgataggagaattccagagtacagagccagaacagagttgtgctgatactccagtgtttctagctaagccaccaattgggtttttcacagattatgaaattggtccagtttatgagatggtaattgcgctgcagaacaccaccacgaccagccgctacctgcgagtcctcccgccttccacgccatacttcgctctgggactggggatgttcccaggaaaaggtggaatggtggctcctggaatgacctgccagtacattgtccagttttttcccgactgccttggggattttgatgattttattttagtggagacccagtcagcccacacacttctgatccccctgcaggcccggaggccgccccccgtgctgacattgtcaccggtgttggactgtggttactgcctcattgggggagtcaagatgaccagattcatctgcaaaaatgtgggtttcagtgttggcaggttctgcattatgcccaaaacaagctggccaccactaagtttcaaggccattgcaaccgtcggctttgttgaacaacctccttttggaatcctgccttcggtgtttgagctggccccgggacatgctatattagtggaggtcttgttttccccaaagagcctaggaaaggcagagcagaccttcatcatcatgtgcgacaactgccagataaaggagctggtgaccataggaattgggcagctgattgctttggatctgatctatatttctggtgaaaaaagccagccagaccctggagagctcacagacttaacagcccagcacttcatacgatttgagcctgaaaaccttcggtccacggctaggaagcagctgattattagaaatgctacgcacgtggagctggccttctactggcagatcatgaagcccaacctgcagcccctcatgcctggagaaaccttcagcatggacagcatcaagtgctaccccgacaaggagactgccttctccatcatgcccagaaagggggttctaagcccccacacagaccacgagttcatcctgagcttttctcctcatgagctgagggattttcacagtgtgctccagatggtgctagaggaagtcccagagcctgtaagttcagaagcggagagcctggggcactcctcctactctgtggatgatgtgattgtcctggaaatcgaggtgaaaggctcagtagaacctttccaggttctcttagagccatatgccctcatcatcccaggggagaactacattgggataaatgtgaagaaggcttttaagatgtggaacaacagcaagtcacccatcagatacctgtgggggaagatcagcgactgccacatcattgaagtggagcccggcacaggggtcatagagcccagtgaggtcggggattttgagttgaactttactgggggtgtccctggccccacaagccaggacctgctgtgtgaaatcgaagactcgccctcgccagtggtgttacacattgaggctgtctttaaggggcctgccctcatcatcaacgtctcagcccttcagtttggtctgctccgcctggggcagaaagccacaaactccatccagatccggaacgtcagccagctcccagccacatggcgcatgaaggagagcccagtctccctccaggaaaggcctgaggatgtgtctcccttcgacattgagccttcgagtggccagcttcactctctgggggagtgcagggtggacatcaccttggaggccctgcactgccagcatctggagaccgtcctggagctggaggtggaaaatggtgcctggagctaccttcctgtgtatgctgaggtacagaagccccatgtgtacctacagagcagccaggtggaggttagaaatctctacctgggtgtgcccacgaagacaaccatcacacttatcaatggcacgctcctgcctacccagttccactggggcaagctcctcggacaccaagcagaattctgcatggtgacagtctcccccaaacatggcctgctgggcccaagtgaggagtgccagctcaagttggagttgactgctcatacccaggaagagctgacccatctggccctcccttgtcacgtgtcaggcatgaagaagccactggttctaggcatttctgggaagccccagggactgcaagtggccattaccatctctaaggagagctctgattgcagcacagagcagtggccaggccacccaaaggagctccgcctggactttggctcagcggtgccactgaggacccgtgtgactcgccagctcattctcaccaatcgctccccaatacggacccgtttctccctcaagtttgagtatttcgggagcccccaaaacagcctgagcaaaaagaccagccttcccaacatgcctcctgccctgctaaagacagtgcggatgcaagagcacctggccaagcgagagcagctggattttatggagagcatgctatcccacgggaaaggagctgctttcttccctcacttttcccagggcatgctggggccctaccagcagctgtgcattgacatcacaggctgtgccaacatgtggggcgagtactgggacaacctcatctgcacggtgggagacctgctgccggaagtcatcccagtgcacatggcagcggtgggctgccccatcagctccctgaggaccacctcctacactattgaccaggcccagaaggaaccagccatgaggttcggcacccaggtctccggaggagacacagttacccgaacccttcgcctgaataactccagcccctgtgacatccgcctggattgggagacctatgttccagaagacaaggaagaccggctggtggagctgctggtgttttatgggccacctttcccgctgcgggaccaagccgggaatgagcttgtgtgccctgatacccctgagggtggctgcctcctctggtccccaggcccctccagttcatcggaattcagccatgaaactgactcatcagttgagggcagctccagtgccagcaatagggtggcacagaagctcatctcagtcatcctgcaggcacatgagggggtgccctccggccacctgtactgtatcagccccaagcaggtggtggtccctgctgggggcagcagtaccatctacatctccttcacccctatggtgctcagccctgagatcctgcacaaggtggagtgtactggctacgccctgggtttcatgagcttggacagcaaggtggaaagggagattccagggaagaggcatcgcctgcaggactttgcggtgggacccctgaaactggacctgcatagctacgtgaggcctgcacagctaagtgtggagctggactacggcggcagtatggaattccagtgccaggccagtgacctcattcccgagcagccctgctctggggtgctgagtgagctggtgaccacccaccacctgaagctgaccaacactacagagatcccacactacttccggcttatggtctccaggcccttctccgtttctcaagatggggcgagccaggaccacagagctcctggccctggccagaagcaggagtgtgaggaggagacagcctcagcggacaagcagctggtgctccaagcacaggagaacatgctggtgaacgtgtccttctcactctccctggagctgctctcctatcagaagctcccagctgaccagacactgcctggggtggacattcagcagagtgcgagtggagagagagagatggtgtttactcagaacctgctcctggagtacaccaaccagaccactcaggtggtgcccctgcgggctgtggtggccgtgcctgagctgcagctctccaccagctgggtggactttgggacctgctttgtgagccagcagcgagtccgggaggtctacctgatgaacctgagcgggtgccgaagctactggactatgctgatgggagtagtgagctgtacgagtccacgatggtggtggaaggtgtgctcggtgagaagtcctgcaccctgcggctccggggccaaggctcctatgatgagagatacatgttgcctcaccagccctgaggctccgccccagccctcagccccaggccccagctggagaaaaaacattgcccagggattaggagcagctcttcagcacaaagacacagacttggggacctggggacctctgggcagctcctggaatggaagaacccccttccacaatggtctcagcctaggccctcatgatatgtcctcagagctaacataaaggacaggccacaccacagcagagaccaccacattgagatcactactcagtgcatagcgaagaccagtatggcaaaattagtcttggaaaaaaaccacagccactaagataaattcatgcacttttactatgc

SEQ ID NO: 171961 - DNA, 5337 bp, Artificial Sequence
  derived and/or modified sequence
atggagacccggtcctccaagacccggcgctcgctggcctctaggacaaacgaatgtcagggaacaatgtgggcgcctacctcaccacctgctggctccagtagcccctctcagcccacatggaagagttctctgtactcctctctagcttattccgaagcctttcactactcttttgctgctagacctcggcgcctaactcagctcgctctcgcgcagagacccgagccccaactgttgcgccttagaccaagttctctacggacacaagatatttcccacctgctgacaggagtgtttagaaacttgtacagtgccgaggtgattggtgacgaagtcagcgcctctctgataaaagccaggggcagcgagaacgagcgtcacgaggagtttgtagaccagctgcagcagattagagagctgtacaaacaaaggctagatgagttcgagatgcttgaacgccatatcacccaggcacaggcacgggccatcgcagagaacgagagagttatgagccaggctggggtgcaggatctggagtccctggtgcgcctgccaccagtgaagtctgtatcacggtggtgtattgattccgagctgttgcggaagcatcacctgataagccctgaagattattacaccgataccgtgccgttccattcagctccaaaaggcatctccctgcctggatgctccaaactcacattcagctgtgagaaaaggtccgtgcagaagaaagagctgaacaaaaagctagaagattcttgtaggaagaagctcgccgagtttgaagatgaactagatcacaccgtcgatagcctgacatggaacctcacaccaaaagctaaggaaaggacccgcgagccccttaagaaagcctcccagccacggaacaaaaactggatgaaccatctcagggtacctcaacgtgaactggatcgcctgctcttggcccgaatggagagtagaaaccacttcttgaaaaacccacggtttttcccccctaatacccgctatgggggtaaaagcctagtttttcccccgaagaaacccgcacctatcggcgagttccagtctacagaacctgagcagagctgtgccgatacaccagtttttctcgcaaaacccccgatcgggttttttaccgattatgagatagggcccgtgtacgagatggtcatcgctcttcagaatactacgacaacctccagatacctgcgggtgcttcctccttctaccccttatttcgcgttaggattaggtatgttcccaggaaaaggtggaatggtggccccgggcatgacctgtcaatatattgtacagttttttcccgattgtctgggcgacttcgacgactttattctggtagagactcagtcggctcacacactcctcataccgctgcaggctagaagaccgccaccagtacttactttgtcacctgtactcgattgcggctactgccttattggaggcgttaagatgacaagattcatttgcaagaatgtgggtttcagcgttggccgattctgcatcatgcccaaaacttcatggccgccactatccttcaaagccatcgcaactgtcggcttcgttgagcagccaccctttggcatccttcccagcgtcttcgaacttgcgcccgggcatgcaatcctcgtggaagtattgttcagcccaaagtctttaggtaaggccgagcagacgttcataataatgtgtgataattgtcagatcaaggagcttgttacgatcggcatcgggcagctgatcgccctcgatcttatttacattagtggggaaaaatcacagcccgaccctggagagctgaccgacctcactgctcaacatttcatccgcttcgaacctgaaaaccttaggtcaacggctcgaaaacaattgatcattcgcaatgctacacatgtggagctcgccttttactggcagatcatgaagccaaacttacaaccactgatgccaggagagactttctcaatggacagtataaagtgctatccagacaaagaaaccgcctttagtatcatgccacgcaagggagtgctgagtccccatactgatcacgaattcattctcagctttagcccccatgaactgagagacttccattcagtccttcagatggtgctggaagaagtgcccgagcccgtctcttctgaggcagaatccctcgggcacagttcgtacagcgtagacgatgtaattgtgctggaaatcgaagtcaaaggttcagtcgaaccattccaggtgttattagagccgtacgctctcattattcctggcgagaattatatcggaattaacgtgaagaaagcctttaagatgtggaataatagtaagtcacctatccgatacctgtgggggaaaatcagtgactgccacatcatagaggtggagcccgggacaggtgtgatagaaccttcggaggtgggtgattttgaactgaactttacgggcggtgtgccaggacctacctctcaagatctgctttgcgagattgaggatagcccgtcacccgtggtcctgcacatcgaagccgtgttcaaaggtcctgcccttatcatcaatgtctcagccctgcagtttggtcttttgcgcctgggccaaaaagcaacaaacagtatacagattaggaacgttagtcagcttcctgccacctggcgcatgaaagagtctccggtgtccctgcaggagcgacctgaggatgttagtcccttcgatatcgaaccctctagcggccaactccactccttgggggaatgccgcgtggatataacgctggaagcccttcactgtcaacacctggagacagttttggaactggaggttgaaaatggggcttggtcttatctacctgtctatgccgaagttcaaaagccacacgtgtaccttcaaagttctcaagttgaggtgaggaatctgtacttgggcgtgcctactaagaccacaatcaccctgattaatggcactttgctccctacccagttccactggggaaagctgctgggacatcaggcagaattctgtatggtgactgtgtctccgaaacacggactactcgggcccagtgaagagtgccagctgaagctcgagttgactgcccacactcaggaagagcttacccacctggcattaccctgtcatgtgtcaggcatgaagaaaccactcgtattgggaatcagcggaaaacctcagggccttcaggtggcaataacgataagtaaagagtcatccgattgcagcacagagcaatggccagggcatcccaaggagctgcggcttgacttcgggagcgcagtgcctctgaggacgcgagtgactagacagctgattctgacaaataggagtcctattcggaccaggtttagtctaaagttcgagtattttgggagtccacaaaattccctcagtaaaaagacctcactgccaaatatgcctcctgcgctgctcaagacagtgcgcatgcaagaacacctggcgaaacgagagcaactcgattttatggagtctatgctgtcacacgggaaaggcgctgccttcttcccccacttctcccagggcatgctcgggccgtaccagcagctctgcatcgacatcaccgggtgcgcgaacatgtggggtgagtactgggataatctgatctgtacagttggcgacctgctgcctgaagtcatccccgtacacatggccgccgtaggctgtcccatcagctccctgcgaacaaccagctacaccatcgatcaggcccagaaagaaccagctatgagattcggaacccaggtcagcggcggtgataccgtcaccagaaccctccgactgaacaacagttcaccttgcgacattcgcctggattgggagacatacgtaccagaggacaaggaagataggctggtggagttactggtgttctatggccccccttttcccctgcgggaccaagccgggaatgagctggtttgcccagacacgcctgagggcgggtgtctgctgtggtcaccagggcccagctcttcaagcgagttctctcatgagaccgatagctcagtcgagggctcaagcagcgcgtcaaatcgcgtggcccagaaattaatcagcgttattctgcaagctcacgaaggcgtaccttccgggcatctgtactgtatttcccccaagcaggtggtagtgccagcaggaggtagcagtactatctacatcagcttcacacctatggtgctgtccccagagatcctgcacaaggtggagtgcaccggctatgccctcggatttatgtctctcgattcaaaggtggaaagagaaatccccggcaagcgccacagactgcaggactttgccgtcgggcccctcaagcttgatcttcacagctacgtgcgcccagcccagctcagtgtagagctggactatggtggaagcatggagttccagtgccaagccagtgatctgataccggagcagccatgttcaggcgtgttaagcgagcttgtcactacgcaccatctcaagctaaccaatacaactgagattcctcactatttcaggctgatggtgtcccggccattcagtgtgtctcaggacggggctagccaggaccacagggcaccaggacccggacagaagcaggagtgcgaagaagagaccgcctccgctgataagcagttggtacttcaggcgcaagagaatatgctcgttaatgtgtccttttcactttcactggagttactcagttatcagaagcttccagccgatcaaacactgcctggcgtagatattcagcagtcggcttccggcgaacgggagatggtcttcacgcaaaaccttttgttagaatatacgaatcagaccacgcaggttgtgccattgcgagccgttgtcgccgtccccgaactgcagctgtccacatcctgggtggacttcggcacgtgctttgtgtctcagcagagagtgagagaagtctacctgatgaacctgagcggatgtaggtcatattggaccatgctcatgggggtcgtgagctgtacaagcccaagatggtggtggaaagtgtgttccgtccgtagcccggcaccctgtggcagtggcgcgaaggcccccatgatgagagacacctgctgtctgacaagtccagaggccccccctcagcctagtgcgcctgggccctcttggcggaaaaacatagcccagggcctcggcgccgccctgcagcacaaggataccgacttggggacttggggcccactggggtcatcctggaatggaagaacccccttccataacggtctgtctctgggccctcacgacatgtctagtgagctgacttag

SEQ ID NO: 171962 - DNA, 5337 bp, Artificial Sequence
  derived and/or modified sequence
atggagaccaggagcagcaagaccaggaggagcctggccagcaggaccaatgaatgccagggcaccatgtgggcccccaccagccccccagctggcagcagcagccccagccagcccacctggaagagcagcctgtacagcagcctggcctacagcgaggccttccactacagctttgctgcccggccccggcggctgacccagctggccctggcccagaggcctgagccccagctgctgcggctgcggcccagcagcctgcggacccaggacatcagccacctgctgactggagtcttcaggaacctgtacagcgctgaggtgattggagatgaggtgtctgccagcctcatcaaggcccggggctctgaaaatgaaagacatgaggagtttgtggaccagctgcagcagatccgggagctgtacaagcagaggctggatgaatttgagatgctggagcggcacatcacccaggcccaggcccgggccatcgccgagaatgaaagagtgatgagccaggccggcgtgcaggacctggagagcctggtgcggctgccccctgtgaagtctgtgagccgctggtgcatcgacagcgagctgctgaggaagcaccacctgatcagccctgaggactactacacagacacagtgcccttccacagcgcccccaagggcatcagcctgcccggctgcagcaagctgaccttcagctgtgagaagaggtctgtgcagaagaaggagctgaacaagaagctggaggacagctgcaggaagaagctggccgagtttgaagatgagctggaccacacagtggacagcctgacctggaacctgacccccaaggccaaggagaggacccgggagcccctgaagaaggccagccagcccaggaacaagaactggatgaaccacctgcgggtgccccagcgggagctggaccggctgctgctggccaggatggagagcaggaaccacttcctgaagaacccccgcttcttcccccccaacaccaggtatggaggcaagagcctggtgtttcctcccaagaagccagcccccatcggggagttccagagcacagagcctgagcagagctgtgccgacacccctgtgttcctggccaagccacccatcggcttcttcacagattatgagatcggccctgtgtatgagatggtgattgccctgcagaacaccaccaccaccagccgctacctgcgggtgctgccccccagcaccccctactttgccctgggcctgggcatgtttcctgggaagggcggcatggtggcccctggcatgacctgccagtacatcgtgcagttcttcccagactgcctgggggactttgatgacttcatcctggtggagacccagagcgcccacaccctgctgatccccctgcaggcccggcggcccccacctgtgctgaccctgagccctgtgctggactgtggctactgcctgattggaggagtgaagatgacccgcttcatctgcaagaatgtgggcttctctgtgggccgcttctgcatcatgcccaagacctcctggccacccctgtccttcaaggccatcgccaccgtgggctttgtggagcagcccccatttggcatcctgcccagcgtgtttgagctggcccctggccacgccatcctggtggaggtgctcttcagccccaagagcctgggcaaggccgagcagaccttcatcatcatgtgtgacaactgccagatcaaggagctggtgaccatcggcatcggccagctgattgccctggacctgatctacatctctggagagaagagccagcctgaccctggagagctgacagacctgacagcccagcacttcatccgctttgagcctgagaacctgcggagcacagccaggaagcagctgatcatcagaaatgccacccacgtggagctggccttctactggcagatcatgaagcccaacctgcagcccctgatgcctggagagaccttctccatggacagcatcaagtgctacccagacaaggagacagccttcagcatcatgcccaggaaaggagtgctgagcccccacacagaccacgagttcatcctgtccttcagcccccatgagctgcgggacttccacagcgtgctgcagatggtgctggaggaggtgcctgagcctgtgtcctctgaggccgagagcctgggccacagcagctacagcgtggatgatgtgattgtgctggagattgaggtgaagggctctgtggagcccttccaggtgctgctggagccctatgccctgatcatccctggagagaactacatcggcatcaacgtgaagaaggccttcaagatgtggaacaacagcaagagccccatccgctacctgtggggcaagatcagtgactgccacatcatcgaggtggagcccggcaccggggtgattgagcccagcgaggtgggggactttgagctgaacttcaccggcggcgtgcccggccccaccagccaggacctgctgtgtgaaattgaggacagccccagccctgtggtgctgcacatcgaggccgtgttcaagggccctgccctgatcatcaacgtgtctgccctgcagtttggcctgctgcggctgggccagaaggccaccaacagcatccagatcagaaatgtgtcccagctgcctgccacctggaggatgaaggagagccctgtgtccctgcaggagaggccagaagatgtgagcccctttgacatcgagcccagcagcggccagctgcacagcctgggggagtgccgggtggacatcaccctggaggccctgcactgccagcacctggagaccgtgctggagctggaggtggagaatggagcctggagctacctgcctgtgtatgcagaggtgcagaagccccacgtgtacctgcagagcagccaggtggaggtgaggaacctgtacctgggcgtgcccaccaagaccaccatcaccctcatcaatggcaccctgctgcccacccagttccactggggcaagctgctgggccaccaggccgagttctgcatggtgacagtgagccccaagcacggcctgctgggccccagcgaggagtgccagctgaagctggagctgacagcccacacccaggaggagctgacccacctggccctgccctgccacgtgtctggcatgaagaagcccctggtgctgggcatcagcggcaagccccagggcctgcaggtggccatcaccatcagcaaggagagcagtgactgcagcacagagcagtggccaggccaccccaaggagctgcggctggactttggcagcgctgtgcccctgcggaccagggtgacccggcagctgatcctgaccaacagaagccccatccgcacccgcttcagcctgaagtttgagtacttcggcagcccccagaacagcctgagcaagaagaccagcctgcccaacatgcccccagccctgctgaagacagtgaggatgcaggagcacctggccaagcgggagcagctggacttcatggagagcatgctgagccacggcaagggggccgccttcttcccccacttcagccagggcatgctgggcccctaccagcagctgtgcatcgacatcaccggctgtgccaacatgtggggcgagtactgggacaacctgatctgcaccgtgggggacctgctgcctgaggtgattcctgtgcacatggctgctgtgggctgccccatcagcagcctgcggaccaccagctacaccatcgaccaggcccagaaggagcccgccatgagatttggcacccaggtgtctggaggagacacagtgaccaggaccctgcggctgaacaacagcagcccctgtgacatccggctggactgggagacctacgtgcctgaggacaaggaggaccggctggtggagctgctggtgttctacggcccccccttccccctgcgggaccaggccggaaatgagctggtgtgcccagacaccccagagggcggctgcctgctgtggagccctggccccagcagcagcagcgagttcagccatgaaacagacagctctgtggagggcagcagcagcgccagcaacagagtggcccagaagctgatcagcgtcatcctgcaggcccatgaaggagtgcccagcggccacctgtactgcatcagccccaagcaggtggtggtgcctgctgggggcagcagcaccatctacatctccttcacccccatggtgctgagccctgagatcctgcacaaggtggagtgcaccggctacgccctgggcttcatgagcctggacagcaaggtggagcgggagatccctgggaagaggcaccggctgcaggactttgctgtgggccccctgaagctggacctgcacagctatgtgcggcctgcccagctgtctgtggagctggactatggaggctccatggagttccagtgccaggccagtgacctgatccctgagcagccctgcagcggcgtgctgtctgagctggtgaccacccaccacctgaagctgaccaacaccacagagatcccccactacttccggctgatggtgtcccggcccttctctgtgtcccaggatggagccagccaggaccaccgggcccctggccctggccagaagcaggagtgtgaggaggagacagccagcgctgacaagcagctggtgctgcaggcccaggagaacatgctggtgaatgtgtccttcagcctgagcctggagctgctgagctaccagaagctgcctgctgaccagaccctgcccggggtggacatccagcagagcgccagcggggagcgggagatggtgttcacccagaacctgctgctggagtacaccaaccagaccacccaggtggtgcccctgcgggctgtggtggccgtgcctgagctgcagctgagcacctcctgggtggactttggcacctgctttgtgtcccagcagagggtgcgggaggtgtacctgatgaacctgagcggctgccgcagctactggaccatgctgatgggcgtggtgtcctgcaccagcccccgctggtggtggaaggtgtgcagcgtgcgcagccctgccccctgtggcagcggggccaaggcccccatgatgagggacacctgctgcctgaccagccctgaggccccaccccagcccagcgcccctggccccagctggaggaagaacatcgcccagggcctgggcgccgccctgcagcacaaggacacagacctgggcacctggggccccctgggcagctcctggaatggaagaacacccttccacaacggcctgagcctgggcccccatgacatgagcagcgagctgacctag

SEQ ID NO: 171963 - DNA, 5337 bp, Artificial Sequence
  derived and/or modified sequence
atggagacccggagcagcaagacccggcggagcctggccagccggacgaatgagtgtcaaggcacaatgtgggctccaaccagtccccctgccggatcctcttcaccctcacagcccacctggaagtcttctctgtactcatcactggcatactcagaggcttttcattacagtttcgcagccaggccaaggagactcacccaattagccctggcgcaaagaccagaaccccagttgttacggctgcggcctagttccttgcggacacaggatatttcccacctgcttactggagttttccgcaatctttattctgccgaggttataggcgatgaagtctcagcgagcctaatcaaggcccgcggcagcgaaaatgaaagacacgaggagttcgtggatcagcttcagcagattcgagaactctacaaacaaagattagatgagtttgagatgttggagaggcatatcacacaggctcaggccagagccattgccgaaaatgaacgtgtgatgtctcaggcaggggtacaggacctcgaatccctggttcgactgcctcccgtgaagagcgtgtcccgttggtgtatcgactcagagcttctcaggaaacatcacttgatatcccctgaagattattacactgacactgtgccctttcacagcgccccaaagggcatctcactgcccggttgctccaaattaaccttctcctgtgaaaaacgatcagtgcagaaaaaggaactcaacaaaaagctggaggactcctgtcggaaaaagttagccgagttcgaagatgaactggatcataccgtggactctcttacttggaatctgacgcctaaggccaaggagagaacgagggagccactcaaaaaggcctcccagcctcgaaacaagaactggatgaaccacctgagggttccccagcgtgagttggaccggctgctgcttgcacgtatggagtcacggaatcattttcttaaaaatcctcggtttttcccgccgaatacccggtatgggggcaagtctcttgtgttcccaccaaagaagcctgcccctataggcgagttccaatcaacagaaccagaacagtcttgtgctgacaccccagtctttctggcaaagccccctattggcttttttaccgactacgagatcgggcccgtgtatgaaatggtaattgcattgcagaataccaccaccacaagccggtaccttcgagtgttgccacctagtactccttatttcgcgctgggcctcggtatgtttccaggcaagggcggtatggtcgccccaggaatgacttgccagtatattgttcagttttttcccgactgtttgggggacttcgatgatttcattttggtagaaactcaaagcgcgcacacgcttcttattccccttcaggcgcggcgaccacccccggtgctaactctctcaccagtgttggactgcggctattgtctgatcggtggggtgaaaatgaccagattcatctgtaagaacgtgggttttagcgttggccggttttgcatcatgcctaaaactagctggcctcccttgtctttcaaagcaatagctaccgtgggcttcgtggaacagcccccctttggcattctgccctcagtttttgaacttgcccctggccatgccatcctggtcgaagtccttttttcccccaagtcactggggaaggccgagcagacttttatcatcatgtgtgacaactgtcagattaaggagctagtgactatcggtattgggcaactgatagccctggaccttatttacatctccggcgagaagagtcagccggatccaggcgagctgacagacttgactgcccagcactttatccgcttcgaacctgagaatctcagaagtactgcacggaaacaacttattatccggaacgcgactcatgtggaactggccttctactggcagatcatgaaaccaaatctccagccattaatgccgggagagaccttctccatggacagtattaagtgttatcctgataaggagactgccttctccataatgccccgcaaaggagtcttgtccccacacactgatcatgagtttatcctgtccttctccccacacgaattgagagattttcacagcgtgctgcagatggtcctggaggaggttccggagccagtgagctcagaagccgaaagcctaggccacagctcatacagtgtcgacgatgtgattgtgctcgaaattgaagtcaagggatcagtggagccgtttcaggtgcttctggaaccctatgctctcattattcccggagagaactacatcggcatcaatgtaaagaaagccttcaaaatgtggaataatagtaagtcacccatacgctatctttggggaaaaatttctgattgccacattattgaagtggaacctggaaccggggttattgagccaagcgaagtgggggattttgagctcaacttcacaggaggggtcccaggtccaacctcacaggatctgctatgtgaaatagaggattctccaagccccgtcgttctgcacatcgaggccgtgttcaaggggccagccctgattatcaacgtgtcggccctgcaatttggtctcttacgactcgggcagaaggcaacgaattcaatccagattcgcaacgtgtcccagttgcctgctacttggagaatgaaggagagtccagtgtccttgcaggaacggcctgaagatgtgagcccatttgacattgagccctcaagcggacagctgcactctctgggtgaatgcagagtagacataactctggaggccctgcattgtcagcacctggaaaccgtgctcgaactggaggtcgaaaatggagcctggtcttacctgcctgtgtatgctgaggtgcaaaagcctcacgtgtacctacagtcatcacaagtggaggtaaggaacctgtatttgggggttcccacgaagaccacaatcacactaataaatggtaccctgctgccaacccagttccactggggtaagctcctcggtcaccaggccgagttctgcatggtgacagtgtccccaaagcatggcttgttaggaccaagcgaagagtgtcagctgaagcttgagctgacagcccacacccaggaggagctcacacacttggcccttccctgtcacgtgtccggcatgaaaaaaccccttgtgcttggaatatccggtaagccacagggtctgcaggtggctattaccatatcgaaggaaagcagcgattgctctactgagcagtggccgggccaccccaaggagctccgccttgattttggaagcgccgtgccacttcggactcgcgtgactaggcagctcattctgactaataggtcaccaatccggacacggtttagcctgaagtttgagtacttcggatccccccagaattcgctcagtaagaagaccagcctacccaatatgccccctgcgcttctgaagactgtgcggatgcaggagcatctggcaaaaagggagcagcttgatttcatggagtcgatgctatctcacggaaaaggggctgccttcttcccgcatttcagccagggaatgttaggcccatatcagcaactgtgcatcgatatcactggatgtgctaacatgtggggagagtactgggacaacctgatctgcaccgtaggcgacctgctgccagaagtcatacctgttcatatggccgctgttggctgcccaatttcttccctcaggacaacaagctacacaatcgaccaggctcagaaggaacctgccatgcgcttcggcacgcaggtcagcggcggcgataccgttactaggacattacgccttaacaattcttccccttgtgacattagattagattgggagacttatgttcctgaagataaagaagataggctggtggagctcttagtgttctacggtccacctttcccccttcgagaccaggccgggaatgaactggtttgccccgacacgcccgagggaggttgcctattatggtcacctggccccagcagctcaagcgagttttcccatgaaacggacagctcagtcgagggctcttcatccgcttcaaaccgggtggctcaaaagctgattagtgtgatactccaggctcacgagggagtcccatccggtcacctgtactgcatctcacctaagcaagtggtcgttcctgcaggtggctccagcaccatttacatcagttttacaccaatggtgttaagccctgaaatccttcacaaagtggaatgtacaggctacgcactggggtttatgtcgctcgattctaaagtagaaagggagattcctggcaaacggcatcggttgcaggacttcgcagttggccccctgaagctagatctgcattcttacgtaagacccgcccagctctctgtggagctcgattatgggggaagcatggagttccagtgtcaagcttccgatcttatccccgaacagccttgtagcggcgttctttctgagttagtgactacccaccatctgaaattgaccaataccacagagatccctcactacttccgtcttatggtaagccgcccattcagcgtcagccaggatggggcctcccaggaccatagggccccgggcccggggcagaagcaggagtgcgaagaggagacagcaagcgctgataagcagctcgtgctccaggcccaggagaatatgttagtgaacgtcagctttagtctgtctctcgagctgctgtcatatcagaaacttcctgcagaccaaaccttgcccggagtggacattcagcagtccgcaagtggcgaaagagagatggtctttacccaaaacctactgctggaatacactaatcagacgactcaggtcgtacccttgcgtgccgtggttgctgtcccggagctgcagctctccacctcatgggtggattttggcacctgcttcgtgtctcagcagcgcgtgcgggaggtctacctcatgaatctcagtggatgccgctcctactggactatgctcatgggggtagtgagttgcacctcacctcgttggtggtggaaggtgtgtagtgtgcgttcacccgcaccctgtggaagcggcgccaaggctcccatgatgcgggatacttgctgtttgacatcccctgaggctcccccccagccttctgcacccggtcctagctggcgcaaaaatatcgcccaagggcttggtgccgctctgcaacacaaagataccgaccttggtacttggggaccactgggcagtagttggaacggacggacgccttttcataatggcctctctctcggacctcatgacatgagctcagagctgacctag

SEQ ID NO: 171964 - DNA, 5336 bp, Artificial Sequence
  derived and/or modified sequence
atggagacacgatccagtaagacacgcaggtcactcgccagtaggactaacgagtgtcagggcaccatgtgggcgccaacaagtcctcccgcaggcagttccagtcctagccagcccacttggaaaagctctctctactccagcctggcttactccgaagcttttcactactctttcgcggctcggcctagacgcctaacccagctggccctggcccagagacccgaaccacagctgttacgactgcgcccttccagcctcaggacgcaggacatcagccatttactgaccggcgtgtttcggaacctctattccgccgaagtcatcggagatgaggtctccgcgtcattaatcaaagcgagaggatcggagaacgaaagacatgaagaatttgtggatcagctgcagcaaatacgcgaattatataaacagcgtctggatgagtttgaaatgttggagcgccatatcactcaggctcaggcgagggcaattgctgaaaatgaaagggtcatgtcccaggctggcgtgcaggatttagaatcactagttagactccccccagtgaaatccgtgtcacgctggtgtatcgactcagaacttttgcgaaaacatcacctcattagcccggaagattactacactgatacagttccttttcactctgcccctaaagggatctctctgcccggatgcagcaagctgaccttcagctgtgagaagaggtccgtccagaaaaaggagttgaataagaagctggaggatagctgcaggaaaaagctggcggaattcgaagacgaactggaccataccgtggacagccttacttggaacctgacaccgaaagccaaagaacggacacgcgaacccttgaaaaaggcgtcccagccaagaaataagaactggatgaaccacctccgggtgcctcagcgtgaattggaccgcttattactcgccagaatggagtcaagaaatcactttttgaaaaaccctcggttctttccacccaacacgagatacggaggaaagtcattagtgtttccgcctaagaaacctgcccctattggtgagtttcagtccaccgaacctgagcagagctgcgccgacacaccagtttttctggctaagcctccaataggcttttttacagactacgagattggccctgtttacgaaatggtcatagccttacaaaatacaactacaacgtcccgatacttacgggtgctacccccaagcacgccctactttgccctggggctcgggatgttcccagggaaagggggaatggtggcgcctggcatgacttgccagtacattgtgcagttcttccccgactgtctgggtgactttgacgactttattttagtggagacccagagcgcacacacacttctgattccattacaggctcgtcggcctcctccagtcctcaccctgtcccctgttctcgactgcgggtattgcctcatcggtggcgtgaagatgactagatttatctgcaaaaacgttggctttagtgtaggcagattctgtatcatgcccaaaacctcatggccccctctttcttttaaggcaatagccaccgtgggctttgtggagcagccacccttcggtattttgccgagcgttttcgagttagctcctgggcacgccattctggtcgaggtcctctttagccccaaatcacttggcaaagccgaacagactttcatcattatgtgtgataactgtcaaataaaggagctggtgacaatcgggatcggacaattaattgccctggatctgatatatatctcaggcgaaaaatctcagccagatcctggggagctcactgatctaactgcccagcattttatcaggtttgagcctgaaaacctcaggtcaacagctcggaagcaactcatcataagaaatgctacccacgtggagttggcgttctactggcagatcatgaagcctaacctgcaaccactgatgcctggtgaaaccttctccatggattctattaaatgttacccagataaagaaacagccttttcaataatgccgagaaagggtgtgctgtccccccacaccgatcacgagtttatactgtccttttcacctcatgagctaagggactttcatagcgtgctccagatggttctcgaggaggtcccagagccggtatcctccgaagccgaaagtctcgggcactcctcttactctgtggacgacgtgattgtactcgagatagaggtcaaaggtagtgtggagccttttcaggtcctgctggagccttacgccctcatcatccccggtgaaaattacattggcattaacgtgaaaaaagctttcaagatgtggaataattccaagtcccccattagatatctgtggggcaagatcagtgactgccatattattgaggtggagcctggcaccggggtcattgagccttcggaggtgggggattttgagctcaattttactgggggagttccgggaccaacgagtcaagacttgctctgcgagattgaagattctccttcccccgtggtcctccatattgaggcagtctttaaaggccctgccttgatcatcaacgtgagcgcactgcaattcggattgttgagacttggccagaaagcgactaattctattcagattagaaacgtttcccagttgccagccacgtggaggatgaaagagtcccccgtgtcgctccaagaacggcctgaagatgtcagccctttcgatattgagccatcctcggggcagctccactcccttggggaatgccgggtggacataaccctcgaggccttgcactgtcaacatctcgaaacagtgcttgaacttgaggttgagaatggtgcatggtcctaccttcctgtgtatgccgaggtacagaaaccccatgtctacttacagtcttcccaagtggaggtcagaaacttgtatctgggcgtgccaactaagacgactatcaccttgataaacggcactttgctccccacccagtttcactggggaaagctgttgggccatcaagccgagttctgcatggtcaccgtgtctccaaagcatggcctcttgggcccaagcgaagagtgccaactgaagctggaactaacagcacacacccaggaagaactgacccacctggccctgccatgtcatgtgagcggtatgaaaaagcctctggtcctgggtatctcaggcaagcctcagggactgcaggttgcaattaccatatcaaaagaatcctcagattgcagcacagagcaatggccaggccacccgaaggaactgagactggacttcggatccgctgtacccctgaggacacgcgtcaccaggcagcttattttgacaaacagaagtcctattcggacgagattttcacttaagttcgagtattttgggagcccacagaacagcctcagtaagaaaacgagtctgcccaacatgccaccggctctcctgaagaccgtgcggatgcaggagcacctcgccaaacgcgaacagctggattttatggagtcgatgctgtcccacggtaaaggcgctgccttcttcccgcatttcagccagggtatgttagggccttatcagcagctgtgcattgatatcacggggtgtgccaacatgtggggtgaatactgggataaccttatttgtaccgtgggcgatttactgcctgaagtaatccccgtgcatatggccgcagtgggctgtccaatcagtagcctgcgaacaacctcctatactatcgatcaggcccagaaggaacccgcaatgagattcggtacccaagtatctggaggcgatacagtaacgagaacactgaggttgaataactcatccccgtgtgatatacgcctcgactgggagacatatgtcccggaagacaaggaggaccggctagttgagctactggttttttatggtcctccgtttcccctgcgcgatcaggcgggaaatgagctggtgtgccctgacacgcccgaaggcggatgtctattgtggtcacctggcccttcctcttcatccgagttttcccacgaaacggactccagtgtggagggctcctcctctgcttctaatagggttgctcagaagctgattagtgtgatcttgcaggcacatgagggggtcccgtccgggcatctgtactgtatttctcctaagcaggttgtcgtgccggcaggcggaagctccaccatttacatcagtttcacgcccatggtcctgagccccgagattcttcacaaagtcgaatgtactggctacgcgcttgggtttatgtccttagattctaaagtggaacgcgaaattccaggtaaacgccatcggttacaggactttgccgttggacccctcaagttggatcttcattcatatgtgcgcccagcacagctgtccgtggagctggattacggtggcagcatggagttccagtgtcaggcgtccgacctcattcccgagcagccctgttctggcgttttgtcagaattggtaaccacgcatcatctcaagctcacgaacaccactgaaattcctcactactttcggctcatggtctcgcggccttttagcgtgtctcaagatggcgcttcgcaggaccatcgggcacccggacccggtcagaaacaggaatgtgaggaagagacagcttccgcagacaagcagctcgttttgcaggcccaagagaatatgctggtgaatgtctctttcagtctctccttggagcttctatcctatcagaagctcccagcagatcagactctgccaggcgtggacatacagcagtctgccagcggagaaagggagatggtgtttacacagaacctgttgctcgagtatactaatcaaaccacgcaagttgtgccactgagggctgtcgttgctgtacccgagctgcagctgagtacgagctgggtcgatttcggcacttgctttgtgtctcagcagagagtacgtgaggtatatctgatgaacctgagcgggtgtcgcagttactggactatgctgatgggagtcgtctcgtgcaccagcccacggtggtggtggaaggtgtgttcggtacggtcacctgcaccatgtggttccggggcaaaagccccaatgatgagggacacttgctgcctcacaagccccgaggctcccccacagccgtctgcccctggtccgtcctggcgcaaaaatattgcccagggtctcggcgcagcccttcagcataaagacaccgatcttggaacttggggtcccctcggatcctcctggaatggtaggactcctttccacaatggattgtcactggggcctcacgacatgtccagtgaactgacgta

SEQ ID NO: 171965 - protein, 239 aa, Artificial Sequence
  derived and/or modified sequence
MPLLLLGETEPLKLERDCRSPVDPWAAASPDLALACLCHCQDLSSGAFPDRGVLGGVLFPTVEMVIKVFVATSSGSIAIRKKQQEVVGFLEANKIDFKELDIAGDEDNRRWMRENVPGEKKPQNGIPLPPQIFNEEQYCGDFDSFFSAKEENIIYSFLGLAPPPDSKGSEKAEEGGETEAQKEGSEDVGNLPEAQEKNEEEGETATEETEEIAMEGAEGEAEEEEETAEGEEPGEDEDS

SEQ ID NO: 171966 - protein, 423 aa, Artificial Sequence
  derived and/or modified sequence
MAICQFFLQGRCRFGDRCWNEHPGARGAGGGRQQPQQQPSGNNRRGWNTTSQRYSNVIQPSSFSKSTPWGGSRDQEKPYFSSFDSGASTNRKEGFGLSENPFASLSPDEQKDEKKLLEGIVKDMEVWESSGQWMFSVYSPVKKKPNISGFTDISPEELRLEYHNFLTSNNLQSYLNSVQRLINQWRNRVNELKSLNISTKVALLSDVKDGVNQAAPAFGFGSSQAATFMSPGFPVNNSSSDNAQNFSFKTNSGFAAASSGSPAGFGSSPAFGAAASTSSGISTSAPAFGFGKPEVTSAASFSFKSPAASSFGSPGFSGLPASLATGPVRAPVAPAFGGGSSVAGFGSPGSHSHTAFSKPSSDTFGNSSISTSLSASSSIIATDNVLFTPRDKLTVEELEQFQSKKFTLGKIPLKPPPLELLNV

SEQ ID NO: 171967 - DNA, 1272 bp, Artificial Sequence
  derived and/or modified sequence
atggcgatctgtcagttcttcttacaaggccgctgccgcttcggggataggtgttggaacgagcatcctggcgcccgaggagccggggggggccggcaacagccccaacaacagcctagcgggaataaccgcaggggctggaatactacaagccaaagatacagcaatgttattcagccatcctctttcagcaagtcgaccccttggggcggctcccgcgaccaggaaaaaccctactttagtagcttcgattcgggtgcaagcaccaaccgcaaggagggctttggcttgagtgaaaatccattcgcctccttgtctccagacgagcagaaggatgagaaaaagctgctcgaaggcatcgtgaaagacatggaggtatgggagtcttcaggacagtggatgttctcagtgtattccccagtgaagaagaagccaaatatttctggattcaccgacataagccctgaggagctgcggctggagtaccataacttcctgacctccaacaacctgcaatcatatctgaattccgtccagcgattgataaaccagtggcgtaacagggtcaacgagctgaaatccctgaacatcagtaccaaggtggccctgctgtctgacgtgaaggatggcgttaatcaggccgcaccggcctttggttttggaagcagtcaggcagctactttcatgtcacctggattccccgtgaataactctagttccgataatgctcagaatttctcttttaagactaactccggattcgcggcagcttcctccgggagtcccgccggtttcggctcctcccctgcctttggtgcagcggccagtaccagttctgggatttccacctccgcgcccgcatttgggttcggaaaaccagaggttacctccgctgcctccttctctttcaagtcccccgctgcaagcagctttggctcgcccggtttctctgggctgcccgcatctttggcgactggaccggtccgggctcccgtggctccagctttcggcggggggtccagcgtggctggctttggttcgcctggaagtcactcccacacggcttttagcaagccttcttctgatacgttcggcaatagttccatttccacatctctgtcagcctctagctccattatcgccacggataacgtgctgtttacccctcgtgacaaactaaccgttgaagagttggagcagttccagtccaagaagttcacactagggaagatccctctaaaaccacctccgctggagttgctcaacgtgtag

SEQ ID NO: 171968 - DNA, 1272 bp, Artificial Sequence
  derived and/or modified sequence
atggccatctgccagttcttcctgcagggccgctgccgctttggagaccgctgctggaatgagcaccctggggcccggggggccggcggcggccggcagcagccccagcagcagcccagcggcaacaacagaagaggctggaacaccaccagccagcgctacagcaatgtcatccagcccagcagcttcagcaagagcaccccctggggcggcagccgggaccaggagaagccctacttcagcagctttgattctggggccagcaccaacaggaaggagggcttcggcctgtctgagaacccctttgccagcctgagcccagatgagcagaaggatgagaagaagctgctggagggcatcgtgaaggacatggaggtgtgggagagcagcggccagtggatgttttctgtgtacagccctgtgaagaagaagcccaacatcagcggcttcacagacatcagccctgaggagctgcggctggagtaccacaacttcctgaccagcaacaacctgcagagctacctgaacagcgtgcagaggctcatcaaccagtggaggaacagagtgaatgagctgaagagcctgaacatcagcaccaaggtggccctgctgagtgatgtgaaggatggagtgaaccaggccgccccagccttcggcttcggcagcagccaggccgccaccttcatgagccctggcttccctgtgaacaacagcagcagtgacaatgcccagaacttctccttcaagaccaacagcggctttgctgctgccagcagcggcagccctgctggcttcggcagcagccctgcctttggagctgctgccagcaccagcagcggcatcagcaccagcgccccagccttcggctttgggaagccagaggtgaccagcgctgccagcttctccttcaagagccctgctgccagcagctttggcagccctggcttcagcggcctgcctgccagcctggccactggacctgtgcgggcccctgtggccccagccttcggcggcggcagctctgtggccggcttcggcagccctggcagccacagccacacagccttcagcaagcccagcagtgacaccttcggcaacagcagcatcagcaccagcctgagcgccagcagcagcatcatcgccacagacaacgtgctcttcaccccccgggacaagctgactgtggaggagctggagcagttccagagcaagaagttcaccctgggcaagatccccctgaagcccccacccctggagctgctgaatgtgtag

SEQ ID NO: 171969 - DNA, 1272 bp, Artificial Sequence
  derived and/or modified sequence
atggccatctgccagttcttcctgcagggccggtgccggttcggcgatagatgctggaacgaacatccaggggctagaggggccggaggaggtagacagcaacctcaacagcagccgtccggaaataatagaaggggctggaataccacaagccagcggtatagtaacgttattcagccatcaagcttttcaaaatccactccctggggagggagtagggaccaagagaagccgtactttagctcttttgactcaggagcgtcaaccaacagaaaggaggggttcggtctcagcgagaacccatttgcttcactgtctcccgacgaacaaaaggacgaaaaaaaattactcgaaggcatcgtcaaggacatggaggtgtgggaatccagcgggcaatggatgtttagtgtgtacagtccggtaaagaaaaaacctaatatcagcggttttaccgatatcagtcccgaggaactccggcttgaatatcataatttccttacttccaataatctacagtcttacctgaatagcgttcaacggctgatcaaccagtggaggaaccgtgtcaatgagttgaagtcgcttaacatcagtacaaaagtggctctgttaagcgacgtaaaggacggcgtgaatcaggcggctcctgcattcggcttcggctcttctcaggcagccactttcatgtcacctgggtttccagtcaataattcttcctccgacaacgcccagaacttctcatttaaaaccaactccggcttcgctgccgcgagttcaggttcccccgccgggttcggcagttcacccgcattcggtgccgctgcatccacaagttccggaatatctactagcgcccctgcctttggctttggaaagcctgaagtgaccagcgcagcgtcattctcttttaaatcgccagccgcctcaagtttcgggtctccgggattttctggactgcccgctagtctggctaccgggcctgttagagcacctgttgcacctgctttcggcggcgggagcagcgtggcgggcttcgggagccccggatcccacagccacaccgcattctccaaaccttcctcagatacatttgggaattcctccattagcacatcccttagtgccagtagctcaataatcgcaacagacaatgtgctattcactccccgagataagctcacagtggaagagttagaacagtttcagagcaagaagttcactttggggaaaattccgctgaagcctcctcctcttgagctgcttaatgtgtag

SEQ ID NO: 171970 - DNA, 1272 bp, Artificial Sequence
  derived and/or modified sequence
atggccatttgccagttctttttgcagggccgttgtcgattcggggacagatgctggaacgaacatcccggtgcccgtggcgctgggggtgggaggcagcagccgcagcagcagccaagcggtaataaccgaagaggctggaatactactagccagagatacagcaacgtgattcaaccaagtagtttcagcaaatccaccccgtggggcggatcgcgggatcaggaaaagccatacttttctagcttcgactcaggggcttcaacaaatcgcaaagagggcttcggattaagtgagaatccctttgcatccctatcccctgacgaacagaaagatgaaaagaagctgttggaaggcatcgtgaaagatatggaggtatgggagtcctccggccagtggatgttctccgtatatagcccagttaagaagaaaccaaacatttccggattcaccgacatatctccggaagaattgaggttggagtaccataactttctgacttctaataacttgcagtcctatctgaactctgttcagcgactcattaaccagtggaggaatcgtgtcaacgagctgaagtctctaaacatctccacgaaagtggccctgttgagcgatgtgaaagacggcgtgaaccaggcagcacctgctttcggcttcggttccagccaggctgctacatttatgtcccccggattccctgttaataatagtagtagcgacaatgcgcagaatttcagtttcaagaccaactctggatttgccgctgcgagtagtggcagcccagcaggctttggctcatccccggcattcggcgcagccgcatcaacctcttcaggaatctccacaagtgcccctgctttcggttttggaaaacctgaggtgacatctgcagcctcttttagtttcaaaagccctgctgcttccagtttcgggtcacccggattcagtgggctccccgcatcactagccaccgggccagtgcgcgctcctgtggcacctgcttttgggggtgggagcagcgttgctggtttcgggtctcctggatcccacagtcataccgcattctctaagcctagctctgacacattcggcaactcatccataagcactagcctgtccgcaagctccagcatcattgccactgataacgtgctctttacaccccgagataagctgacagttgaagagctcgaacagttccagtccaagaaatttacgttgggcaaaatccctctcaagccccctcccctggagctccttaacgtgtag

SEQ ID NO: 171971 - DNA, 1795 bp, Artificial Sequence
  derived and/or modified sequence
acgtaaccgttcaagcatccctccttcccaggacacactcaaagcgtcagagcggtccgctcttctcaagtcctattggctcaagtccatgcgtctcatggcactgccgggtgagaggcggaaaaaggccttcccaggcgcgagaagatgacgtcacagtagcccggccgggcgccgaggttgccttagggctctctgcccagtaacaggcatcgaacggtgcagactgaagacgccctccgtcagcgacgccgtcgcaatggccatttgtcaattcttccttcaaggccggtgccgctttggagatcggtgctggaacgaacatcccggtgctaggggtgcaggaggaggacggcagcaaccgcagcagcagccttcaggtaataatagacgtggatggaatacaactagccagagatattccaatgtcatccagccatccagtttctccaaatccacaccatgggggggcagcagagatcaagaaaagccatatttcagttcttttgattctggagcttcaactaacaggaaggaaggctttggattgtctgagaacccatttgcttcacttagtcctgatgagcagaaagatgaaaagaaacttctggaaggaattgtaaaagatatggaggtttgggaatcatcagggcagtggatgttttctgtttattcaccagtgaaaaagaaacctaatatttcaggttttacagacatttcaccagaggaattgaggcttgaataccataacttcttaaccagcaataacttacagagttatctaaattctgtccaacgtttaataaatcaatggaggaacagggtaaatgaactgaaaagtctaaatatatcaactaaagtagctttgctctctgatgtaaaggatggagtaaatcaagcagcacctgcatttggatttggcagcagtcaagcagcaacatttatgtcgccaggctttccagtcaataacagcagcagtgataatgctcagaactttagttttaaaacaaactctggatttgctgctgcctcttctggaagccctgctggttttgggagttccccagcatttggagctgcagcctctaccagttcaggtatctctacttctgctccagcttttggatttgggaagcctgaagtcacatcggctgcatcattttcattcaaaagccctgcagcttccagttttggatcacctggattttcaggacttccagcttccttggcaacaggtcctgtcagagctccagtggccccagcctttggaggtggcagttctgtggctggttttggtagtccgggctcacattctcacactgctttttctaagccatccagtgacacttttggaaatagcagcatatccacttctctgtcagcctcaagcagcatcattgcaacagataatgtgttattcacacccagagataaactaacagtagaagaactggaacaatttcaatccaagaaatttactctgggaaaaattccattaaagcctccacctctggaacttctaaatgtttaaaagggcaattttaaatacaaaaaagaatgatgtttaaaattgctttgagtgattcatacagagatgtatatatgcatacatgtatatattcataaggaatataagcttccatcaatagtgattttaaatttgatttttttcttaactctaaatatttaagtaaaaagtaacaaaaactctgcaagcaagggaatttttttgtactgtaattttgaatggaactgaaaaattatgcacgaataaagtacttttctcatgccatac

SEQ ID NO: 171972 - DNA, 1272 bp, Artificial Sequence
  derived and/or modified sequence
atggccatctgccagttcttcctgcagggcagatgcagattcggcgacagatgctggaacgagcaccccggcgccagaggcgccggcggcggcagacagcagccccagcagcagcccagcggcaacaacagaagaggctggaacaccaccagccagagatacagcaacgtgatccagcccagcagcttcagcaagagcaccccctggggcggcagcagagaccaggagaagccctacttcagcagcttcgacagcggcgccagcaccaacagaaaggagggcttcggcctgagcgagaaccccttcgccagcctgagccccgacgagcagaaggacgagaagaagctgctggagggcatcgtgaaggacatggaggtgtgggagagcagcggccagtggatgttcagcgtgtacagccccgtgaagaagaagcccaacatcagcggcttcaccgacatcagccccgaggagctgagactggagtaccacaacttcctgaccagcaacaacctgcagagctacctgaacagcgtgcagagactgatcaaccagtggagaaacagagtgaacgagctgaagagcctgaacatcagcaccaaggtggccctgctgagcgacgtgaaggacggcgtgaaccaggccgcccccgccttcggcttcggcagcagccaggccgccaccttcatgagccccggcttccccgtgaacaacagcagcagcgacaacgcccagaacttcagcttcaagaccaacagcggcttcgccgccgccagcagcggcagccccgccggcttcggcagcagccccgccttcggcgccgccgccagcaccagcagcggcatcagcaccagcgcccccgccttcggcttcggcaagcccgaggtgaccagcgccgccagcttcagcttcaagagccccgccgccagcagcttcggcagccccggcttcagcggcctgcccgccagcctggccaccggccccgtgagagcccccgtggcccccgccttcggcggcggcagcagcgtggccggcttcggcagccccggcagccacagccacaccgccttcagcaagcccagcagcgacaccttcggcaacagcagcatcagcaccagcctgagcgccagcagcagcatcatcgccaccgacaacgtgctgttcacccccagagacaagctgaccgtggaggagctggagcagttccagagcaagaagttcaccctgggcaagatccccctgaagcccccccccctggagctgctgaacgtgtag

SEQ ID NO: 171973 - protein, 304 aa, Artificial Sequence
  derived and/or modified sequence
MCGPDDRCPARWPGPGRAVKCGKGLAAARPGRVERGGAQRGGAGLELHPLLGGRTWRAARDADGCEALGTVAVPFDDDDKIVGGYTCEENSLPYQVSLNSGSHFCGGSLISEQWVVSAAHCYKTRIQVRLGEHNIKVLEGNEQFINAAKIIRHPKYNRDTLDNDIMLIKLSSPAVINARVSTISLPTTPPAAGTECLISGWGNTLSFGADYPDELKCLDAPVLTQAECKASYPGKITNSMFCVGFLEGGKDSCQRDSGGPVVCNGQLQGVVSWGHGCAWKNRPGVYTKVYNYVDWIKDTIAANS

SEQ ID NO: 171974 - DNA, 915 bp, Artificial Sequence
  derived and/or modified sequence
atgtgtgggccagacgatcggtgccccgcacgttggcctggaccagggcgggctgttaaatgcggcaagggattggcagcagcgcgcccaggccgcgtggagagagggggggcacaacgcggtggagccggtctagaactacaccccctgctgggcgggcggacgtggcgcgccgctagggatgctgacggatgcgaagctctgggcacggtggccgtgccttttgatgacgatgataagatcgtgggaggttacacatgtgaagagaacagcctgccgtatcaagtgtccctgaattccggcagccacttttgtgggggctctctgatctccgagcagtgggtggtttcagccgcacattgctataaaactaggatccaggttaggctcggtgaacacaacattaaggtccttgagggcaacgagcagtttatcaatgccgccaagattatcaggcatccgaaatataatagggatacgctcgacaatgatattatgcttatcaaactgagtagcccggcagtcattaatgcccgcgtcagcaccatttcccttccaacaacacctccggcagctggcacagaatgtctgattagtggctggggcaacactctctctttcggagcggattacccggacgagctaaagtgcctggatgcacctgtacttacgcaggccgagtgcaaggccagctaccctggcaagataactaactcgatgttctgtgttgggtttctggaaggcggcaaagactcttgtcagcgcgactctggtgggccagtggtctgtaacgggcaattacagggtgtggtatcttggggacatggatgcgcctggaagaatagacccggtgtctacaccaaggtttacaattacgtggattggataaaagataccatcgccgccaattcctag

SEQ ID NO: 171975 - DNA, 915 bp, Artificial Sequence
  derived and/or modified sequence
atgtgtggcccagatgaccgctgcccagcccgctggccaggccctggccgggctgtgaagtgtgggaagggcctggccgccgcccggcccggccgggtggagcggggcggggcccagagaggaggagctggcctggagctgcaccccctgctgggcggccgcacctggagggctgccagagatgctgatggctgtgaggccctgggcaccgtggccgtgccctttgatgatgatgacaagatcgtgggcggctacacctgtgaggagaacagcctgccctaccaggtgtccctgaacagcggcagccacttctgtggcggcagcctcatcagcgagcagtgggtggtgtctgctgcccactgctacaagacccgcatccaggtgcggctgggggagcacaacatcaaggtgctggagggcaatgagcagttcatcaatgctgccaagatcatccgccaccccaagtacaacagagacaccctggacaatgacatcatgctgatcaagctgagcagccctgctgtgatcaatgcccgggtgtccaccatcagcctgcccaccaccccacctgctgctggaacagaatgtctcatcagcggctggggcaacaccctgagctttggagctgactacccagatgagctgaagtgcctggatgcccctgtgctgacccaggccgagtgcaaggccagctacccaggcaagatcaccaacagcatgttctgtgtgggcttcctggagggcggcaaggacagctgccagagggacagcggcggccctgtggtgtgcaatggccagctgcagggcgtggtgtcctggggccacggctgtgcctggaagaacagacctggggtgtacaccaaggtgtacaactacgtggactggatcaaggacaccatcgccgccaacagctag

SEQ ID NO: 171976 - DNA, 915 bp, Artificial Sequence
  derived and/or modified sequence
atgtgcggccccgacgaccggtgccccgcccggtggcccggccccggtcgcgctgtgaagtgtggaaagggcctcgcagctgcaagacccggtcgcgtggaacgtggcggagcacagagagggggggcagggctggagttgcaccctctcctaggaggccgcacgtggagagcggcccgggatgcagatgggtgtgaggccttggggaccgttgccgtgccttttgatgacgacgataaaatcgtgggagggtacacatgcgaggaaaattctctgccgtaccaggtgtctcttaatagcgggtcccacttctgtggtggatctctgatctcggaacagtgggtcgtctcggccgcccactgctataaaaccagaatccaagtccgcctgggagagcacaacatcaaggtgctcgaaggcaacgaacaattcattaacgccgccaaaatcatcagacaccccaaatataatagggataccctcgataacgacattatgcttattaagctctcgtctcccgccgtcattaacgctagagtttccactatttctctgccaaccacccctcctgctgctggaaccgagtgtttgatctctgggtgggggaacactctcagcttcggagccgactaccccgatgaactgaagtgcctcgatgctccagtgttaactcaggcagagtgcaaggcaagctacccagggaagatcactaatagcatgttttgtgtgggtttcttggaggggggaaaagatagctgtcagcgcgactccgggggccccgtggtatgtaacggccaactgcagggcgtggtgtcctggggacatggatgcgcctggaagaaccgtcccggggtttataccaaagtctataactatgtggactggattaaagatactatagcagccaacagctag

SEQ ID NO: 171977 - DNA, 915 bp, Artificial Sequence
  derived and/or modified sequence
atgtgtggcccagatgaccggtgccctgcccgatggccaggccctggcagggccgtaaaatgtggtaaggggctggctgcggcaagacctgggcgagtcgaacgcggaggggcacaacggggaggagccggtttggagttacaccccctgctcggcggtcgcacatggagagctgctagggacgccgatggttgcgaggcattgggtacggtggcggtccctttcgatgacgatgacaaaatcgtaggcggatatacctgtgaagaaaactctctgccgtaccaagtgagcctcaatagtggcagccacttttgtggtgggtccctcatatctgagcagtgggtggtttcagctgcgcactgttataagaccaggatacaagtgcgcctgggcgagcataatatcaaagtactcgagggcaacgaacagtttataaatgcagctaagataataaggcatccaaagtataacagagacacattggataacgacattatgctcattaagctgagttcccccgcagtcataaacgccagggtctcgaccatttcgttgcctactaccccaccagctgccggtaccgagtgtctgattagtggttggggcaataccttgtctttcggcgctgactatccagatgagctaaaatgtctggacgcccctgtactgacccaggctgaatgtaaagcctcttatcccggaaaaattactaatagtatgttttgtgtcggattcctggaaggcggtaaggattcctgtcagcgcgattcaggagggcctgtagtgtgtaacggtcagctccaaggtgttgttagttggggacacgggtgtgcgtggaaaaacagaccaggggtctataccaaggtctacaattatgttgattggatcaaagataccattgctgccaattcttag

SEQ ID NO: 171978 - DNA, 966 bp, Artificial Sequence
  derived and/or modified sequence
atgtgcggacctgacgacagatgccccgcacgctggccgggaccgggaagggcggtcaagtgtggaaagggtctggcggctgccaggcctggcagagtggagcggggcggggcgcagcggggcggggcgggcctggagctgcacccgcttctgggtggacgcacttggcgagcggcgcgggatgcagacggctgcgaggcgctgggcacagttgctgtcccctttgacgatgatgacaagattgttgggggctacacctgtgaggagaattctctcccctaccaggtgtccctgaattctggctcccacttctgcggtggctccctcatcagcgaacagtgggtggtatcagcagctcactgctacaagacccgcatccaggtgagactgggagagcacaacatcaaagtcctggaggggaatgagcagttcatcaatgcggccaagatcatccgccaccctaaatacaacagggacactctggacaatgacatcatgctgatcaaactctcctcacctgccgtcatcaatgcccgcgtgtccaccatctctctgcccaccacccctccagctgctggcactgagtgcctcatctccggctggggcaacactctgagctttggtgctgactacccagacgagctgaagtgcctggatgctccggtgctgacccaggctgagtgtaaagcctcctaccctggaaagattaccaacagcatgttctgtgtgggcttccttgagggaggcaaggattcctgccagcgtgactctggtggccctgtggtctgcaacggacagctccaaggagttgtctcctggggccatggctgtgcctggaagaacaggcctggagtctacaccaaggtctacaactatgtggactggattaaggacaccatcgctgccaacagctaaagcccccggtccctctgcagtctctataccaataaagtggccctgctctca

SEQ ID NO: 171979 - DNA, 915 bp, Artificial Sequence
  derived and/or modified sequence
atgtgcggccccgacgacagatgccccgccagatggcccggccccggcagagccgtgaagtgcggcaagggcctggccgccgccagacccggcagagtggagagaggcggcgcccagagaggcggcgccggcctggagctgcaccccctgctgggcggcagaacctggagagccgccagagacgccgacggctgcgaggccctgggcaccgtggccgtgcccttcgacgacgacgacaagatcgtgggcggctacacctgcgaggagaacagcctgccctaccaggtgagcctgaacagcggcagccacttctgcggcggcagcctgatcagcgagcagtgggtggtgagcgccgcccactgctacaagaccagaatccaggtgagactgggcgagcacaacatcaaggtgctggagggcaacgagcagttcatcaacgccgccaagatcatcagacaccccaagtacaacagagacaccctggacaacgacatcatgctgatcaagctgagcagccccgccgtgatcaacgccagagtgagcaccatcagcctgcccaccaccccccccgccgccggcaccgagtgcctgatcagcggctggggcaacaccctgagcttcggcgccgactaccccgacgagctgaagtgcctggacgcccccgtgctgacccaggccgagtgcaaggccagctaccccggcaagatcaccaacagcatgttctgcgtgggcttcctggagggcggcaaggacagctgccagagagacagcggcggccccgtggtgtgcaacggccagctgcagggcgtggtgagctggggccacggctgcgcctggaagaacagacccggcgtgtacaccaaggtgtacaactacgtggactggatcaaggacaccatcgccgccaacagctag

SEQ ID NO: 171980 - protein, 1845 aa, Artificial Sequence
  derived and/or modified sequence
MGLCGLLERCWLHHDPDGVLTLNAENTNYAYQVPNFHKCEICLLSFPKESQFQRHMRDHERNDKPHRCDQCPQTFNVEFNLTLHKCTHSGEDPTCPVCNKKFSRVASLKAHIMLHEKEENLICSECGDEFTLQSQLAVHMEEHRQELAGTRQHACKACKKEFETSSELKEHMKTHYKIRVSSTRSYNRNIDRSGFTYSCPHCGKTFQKPSQLTRHIRIHTGERPFKCSECGKAFNQKGALQTHMIKHTGEKPHACAFCPAAFSQKGNLQSHVQRVHSEVKNGPTYNCTECSCVFKSLGSLNTHISKMHMGGPQNSTSSTETAHVLTATLFQTLPLQQTEAQATSASSQPSSQAVSDVIQQLLELSEPAPVESGQSPQPGQQLSITVGINQDILQQALENSGLSSIPAAAHPNDSCHAKTSAPHAQNPDVSSVSNEQTDPTDAEQEKEQESPEKLDKKEKKMIKKKSPFLPGSIREENGVRWHVCPYCAKEFRKPSDLVRHIRIHTHEKPFKCPQCFRAFAVKSTLTAHIKTHTGIKAFKCQYCMKSFSTSGSLKVHIRLHTGVRPFACPHCDKKFRTSGHRKTHIASHFKHTELRKMRHQRKPAKVRVGKTNIPVPDIPLQEPILITDLGLIQPIPKNQFFQSYFNNNFVNEADRPYKCFYCHRAYKKSCHLKQHIRSHTGEKPFKCSQCGRGFVSAGVLKAHIRTHTGLKSFKCLICNGAFTTGGSLRRHMGIHNDLRPYMCPYCQKTFKTSLNCKKHMKTHRYELAQQLQQHQQAASIDDSTVDQQSMQASTQMQVEIESDELPQTAEVVAANPEAMLDLEPQHVVGTEEAGLGQQLADQPLEADEDGFVAPQDPLRGHVDQFEEQSPAQQSFEPAGLPQGFTVTDTYHQQPQFPPVQQLQDSSTLESQALSTSFHQQSLLQAPSSDGMNVTTRLIQESSQEELDLQAQGSQFLEDNEDQSRRSYRCDYCNKGFKKSSHLKQHVRSHTGEKPYKCKLCGRGFVSSGVLKSHEKTHTGVKAFSCSVCNASFTTNGSLTRHMATHMSMKPYKCPFCEEGFRTTVHCKKHMKRHQTVPSAVSATGETEGGDICMEEEEEHSDRNASRKSRPEVITFTEEETAQLAKIRPQESATVSEKVLVQSAAEKDRISELRDKQAELQDEPKHANCCTYCPKSFKKPSDLVRHVRIHTGEKPYKCDECGKSFTVKSTLDCHVKTHTGQKLFSCHVCSNAFSTKGSLKVHMRLHTGAKPFKCPHCELRFRTSGRRKTHMQFHYKPDPKKARKPMTRSSSEGLQPVNLLNSSSTDPNVFIMNNSVLTGQFDQNLLQPGLVGQAILPASVSAGGDLTVSLTDGSLATLEGIQLQLAANLVGPNVQISGIDAASINNITLQIDPSILQQTLQQGNLLAQQLTGEPGLAPQNSSLQTSDSTVPASVVIQPISGLSLQPTVTSANLTIGPLSEQDSVLTTNSSGTQDLTQVMTSQGLVSPSGGPHEITLTINNSSLSQVLAQAAGPTATSSSGSPQEITLTISELNTTSGSLPSTTPMSPSAISTQNLVMSSSGVGGDASVTLTLADTQGMLSGGLDTVTLNITSQGQQFPALLTDPSLSGQGGAGSPQVILVSHTPQSASAACEEIAYQVAGVSGNLAPGNQPEKEGRAHQCLECDRAFSSAAVLMHHSKEVHGRERIHGCPVCRKAFKRATHLKEHMQTHQAGPSLSSQKPRVFKCDTCEKAFAKPSQLERHSRIHTGERPFHCTLCEKAFNQKSALQVHMKKHTGERPYKCAYCVMGFTQKSNMKLHMKRAHSYAGALQESAGHPEQDGEELSRTLHLEEVVQEAAGEWQALTHVF

SEQ ID NO: 171981 - DNA, 8140 bp, Artificial Sequence
  derived and/or modified sequence
gcctggaaactacaaaggattgtgttaattttgtgtttaggaagaaagaggtaatgggtaggaatcaatgtaaacttattcataggccacaccaaaccaggaattcttgtcgtgattgcacttggtagagttaacacacgtgcacattacggaaacgttggtgaccaacaggcgtttcagcgagctttcgcacacctcatgggcctttgtgggctgctggagagatgttggctgcaccatgacccagatggagttttaacattgaatgcggagaacactaattatgcctatcaagttccaaacttccataaatgtgaaatctgtctactatcttttccaaaagaatcccagtttcaacgccacatgagggatcacgagcgaaatgacaagccacatcgatgtgaccagtgcccccaaacatttaatgttgaattcaacctgacacttcataaatgcacccacagcggggaagatcctacctgccctgtgtgtaacaagaaattctccagagtggctagtctcaaagcgcatattatgctacatgaaaaggaagagaatctcatctgttctgagtgtggggatgagtttactctgcagagtcagctggccgtgcacatggaggagcaccgccaggagctggctggaacccggcagcatgcctgcaaggcctgcaagaaagagttcgagacctcctcggagctgaaggaacacatgaagactcattacaaaattagggtatcaagtacaaggtcttataaccggaatatcgacagaagtggattcacgtattcgtgtccgcactgtggaaagacgtttcaaaagccaagccagttaacgcgacacattaggatacacacaggtgaaaggccgttcaaatgtagtgaatgtggaaaggcttttaaccagaagggggcactgcagacccacatgatcaagcacacaggtgaaaaaccccatgcctgtgccttctgtcctgccgccttctctcagaaagggaatcttcagtcgcacgtgcagcgagtccactcagaggtcaagaatggtcctacctataactgtacagaatgtagttgtgtatttaaaagtttaggcagcttaaacacgcatatcagcaagatgcatatgggtgggccacagaattcaacaagttctacagagactgctcatgttttaacggccacactttttcagacgttacctcttcaacagacggaagcccaagccacgtcggcctcaagccagccgagctcccaggcggtgagcgacgtcatccagcagctcctggagctctcagagccggcgccggtggagtcggggcagtccccgcagcctgggcagcagctgagcatcacagtgggcatcaaccaggacattttacagcaagccttagaaaacagtgggctgtcttcaattccagctgcagcacatcctaatgactcctgccatgccaagacctctgcaccacacgctcaaaacccagatgtttccagcgtttcaaatgagcagacggaccccacagacgcagagcaagaaaaagaacaggaaagcccggagaaactggataaaaaagaaaaaaaaatgataaagaagaagtcaccgtttctacctggctccatccgcgaggagaacggcgtgcgctggcatgtgtgtccctactgcgccaaggagttccgcaagcccagcgacctggtccgccacatccgcatccacacccacgagaagcccttcaagtgcccgcagtgcttccgcgccttcgccgtgaagagcacgctgacagcgcacatcaagacgcacaccggcatcaaggcgttcaagtgccagtactgcatgaagagcttctccacctctggcagcctcaaggtgcacattcgcctgcacacaggagttagaccttttgcttgtcctcactgtgacaaaaaatttcgaacctcaggccataggaagactcacattgcttcccactttaaacatacggaattaaggaaaatgaggcaccagcgtaaacctgcaaaggtccgtgttggcaagacgaatattccagtccctgatattcctttgcaggaaccaatcctcataactgacttaggtctcatccagcccattccaaaaaaccagtttttccaaagctatttcaataataattttgtcaatgaagcagatagaccatacaagtgtttttactgtcatcgtgcatataaaaaatcttgccaccttaaacaacacatcagatcccatacaggtgaaaaaccttttaaatgttctcagtgtggaagaggctttgtttctgcaggcgtgctcaaagcacacatcagaacacacacaggactgaaatctttcaagtgtctgatatgtaatggggctttcactactggtggcagcttacggcgacacatgggtatccacaacgaccttcgtccctatatgtgtccctattgccaaaaaacatttaagacttcactaaattgcaaaaagcacatgaaaacccacagatatgagcttgcccagcagctccaacagcatcagcaggcagcctcgatagatgacagcactgtagaccagcagagcatgcaggcctccactcaaatgcaggtggagatcgagagcgacgagctgccgcagacggcagaggtggtcgcagcgaaccccgaggccatgctggacctggagcctcagcatgtggtgggcacggaggaagcagggctgggccagcagttggcagatcagcccctggaagcagatgaagatgggtttgtggctccacaggaccctctgcgagggcacgtagaccagtttgaagagcagagccctgcgcaacagtccttcgaaccagcagggctaccccaaggttttacagtgactgatacgtaccatcagcagcctcagtttccacctgtccaacagctacaggattccagcacacttgagtctcaggccctctccacaagcttccaccagcagagcttgctgcaggctcccagctctgatgggatgaatgtaacaactcgcttgattcaggagtcatcccaagaggaactggacctgcaggcacaaggttcccagtttctggaggacaacgaggaccagagcaggcgctcttacaggtgtgactattgcaacaaaggctttaagaagtccagccacctgaagcagcatgtgcggtcgcacaccggggaaaagccctacaagtgcaagctctgtggacgcggctttgtttcctctggggtcctcaagtcccacgagaagacacacacaggagtgaaggcgttcagctgcagtgtgtgcaatgcttccttcaccaccaatggcagcctcacccggcacatggccacacatatgagcatgaagccttataagtgtccgttttgtgaggagggtttccgaactacagtgcattgtaaaaagcacatgaagagacaccaaacagtcccctctgctgtgtcagccactggagagacagaaggaggagacatttgtatggaggaagaggaagaacattctgacagaaatgcatcacggaagtctcgtcctgaggtcatcactttcacggaggaggagacagcccagttagccaagatccggccgcaggagagcgccacggtgtcagagaaggtcctggtgcagtccgcggcagaaaaggaccgcatcagtgagctgagggacaagcaggcggagctgcaggacgagcccaagcacgccaactgctgcacatactgccccaagagcttcaagaaacctagcgacctggtgaggcatgttcgaatccatactggagaaaagccatacaaatgtgatgaatgtggaaagagttttactgtgaaatccactctcgattgtcatgtgaagactcacacaggtcagaagctcttcagctgtcacgtctgcagcaacgccttctccacgaagggaagtctgaaggtccacatgcgcctgcacacgggagccaagcccttcaaatgcccgcattgcgagctgcgtttccgtacctcgggtagaagaaagacacacatgcagtttcattataaaccagacccaaagaaggccagaaagcctatgactcgaagctcatcggaaggactgcagcctgtaaacctcctcaactcctcctctactgacccaaacgtgtttatcatgaacaactctgttctaacaggacagtttgatcagaatctgctgcaaccaggactggtgggccaagctattctccctgcctctgtgtcagctgggggtgacctgaccgtgtctctgacagatgggagcctggctaccctagaaggcatccagttacagttggctgctaacttggttggaccaaatgtacagatttctggaatcgatgctgccagcattaataacattacgttgcagattgatccaagcattctgcagcagacgctacagcagggcaacctattggctcagcagctcacgggggagcctggcctggccccacagaacagctctctccagacatcggacagcacggtccctgccagtgttgtcatccagcccatctcaggcctgtccttacagcccacagtgacctctgcgaacctgaccataggcccgctgtctgagcaggattcagtgctgaccactaacagcagtgggacccaagacctcactcaagtgatgacttcgcaaggtctagtgtccccctccggcggtccccacgagatcaccctgaccattaacaactccagcctgagccaggtcctggcacaggccgctgggcccactgccacgtcttcctcggggtctccacaggaaattaccctgactatctccgaacttaacactacaagcggaagccttccttcaacaacaccgatgtctccatcggccatctcgactcagaacctggtcatgtcctcgtcgggcgtgggaggtgacgctagtgtcacgctgacgctggccgatactcagggtatgctatctggaggcctggacactgtcacactcaacatcacctctcagggtcagcagttcccagcgctcctcacggatccctctctctcgggccagggtggagcaggctcgccgcaagtcatactagtgagccacacgccacagtcagcgtctgctgcttgtgaagaaatagcctaccaggtagctggcgtctctgggaacctggccccgggcaaccagccagagaaggagggccgggcgcaccagtgcctggagtgtgaccgcgccttctcatcggcggcggtgctcatgcaccacagcaaggaggtgcatggccgggagcgcatccacggctgccccgtgtgcaggaaggccttcaagcgcgccacgcacctcaaggagcacatgcagacacaccaggccggcccctctttgagctcccagaagccaagagtgtttaaatgtgacacttgtgagaaggcatttgccaaaccaagccagctggagcgccacagccgcatacatacaggggagcggccgttccattgcacgctttgtgagaaagccttcaaccagaagagtgcgctgcaggtgcacatgaagaagcacacgggggagcggccctacaagtgtgcctactgcgtcatgggcttcacgcagaagagcaacatgaagctgcacatgaagcgggcgcacagctatgctggagctctgcaggagtctgcaggtcacccggagcaggacggggaggagctgagccggaccctccacctggaggaggtggtgcaggaggccgccggcgagtggcaggccctcacccacgtcttctgatgcgagttggaagtacacctttaagaatgtttctgaagttacgttttgtgaagagcaaagcacttggaatctctgttttaaagcttcaagtgttaaaaatgctacaatagttttttatctataaaattatctaaagaatcattgtctttcagagactcataggaaaaaaaaactgggaaaagtgtcaccgcattgttctcttttgtctacaaatcactgaactcaggtactactgtaggcagtttcctcctcagtctcctccgtggctagtgtgtctagttcacgaagcaattaactgggtcttactatcattgtagtgtgatttctttgtattagcaaagacaaaaacgctaacattgaaaaagtatgtcagattttccttcatgtttctggttataagaagcatagcttacaaagcaagcgtaagattgaggcatgaagttcagaaaaaaaagtgttacaacacacagggaagttttttccactcttttctctgtgcattttgaaaattagtcaaaatggactcttttcagtctaccataagttaatataactgataccttgagagatggctggaccaattctctccatgacaaatgtttaatcattagttacaagaatgcagtatctggggcgtcaacatggggactcgagtaaacctgacccaccaataaggattcagctgtccacacgggctggcgacacacttaccgcatcaatctgtgttcaggtccagggttacataattgcagaagcacaagccatacatcgcaggtaggaaaccacagaaccgtctgcaaggagcaagcaacggtggccctgtccaccccagcaaataagaagcatatctgtagcttaaggccacgaatccgtaaaaaccccatgactttctcttcgtgcataaacagatgtatttttgatttcagggaattctttagtatcgtcaatggtgccacataaaacatgtcccaaaccaaatcccacccgtgctgggcagagtgcgtgcacgccattcctacagcattccaaagatggaaggttctttacttcatgttaatttttcctttgaaattatttatatgttctatatataaatacatatgtacatagatatatgggcctctgtgtggctgaacagtatattttgtaaatataagtactagtcctaattgcagaaagagcgtcagtttcacctccccacgagcacttcagatcagtattgtattcattttattcataaatggatatctttttcattgtcatataaagctgggttttatttttttttcctgaaaaataattgcctttattttctctcgttgcctccttggtttcagaagagagtagttttattataaatattgtatggactttgtatattaagagaggagctcatttcagattcctaaagaaatagacattttactgttattttgaaagggcatcttttgatttttttgttgttgttgttcacttttggcatatgtatataagtaatattgacggtgatatgaaaacttttgttatgtgaagatatttaagtcagaaaattgttaaataatattacttcttttccaaactgctttgtgtattgtatatttttttaagaaaaagaaaagccttatttgacttatgcttgtgatactggacttcttaccaatccggaggtttccttccttgaatgtcagtgtgtaaacctggctgtagccgcatatgcagaataactgtaattgtgctagagttttaaaggttctgcttttaatgcactttttattttataattttgtattgaaatattttagaaatgttgattaattttggtgaaaaaatatccccaaagtggaaattattggaattttaaacttttgttcttgctgggttatttattttgattttagcattaaatgtcatctcaggacatctctaaaaggggttgtttaattcctaattgtatagaaagctagtttggtgaattgtattggttaattgactgtttaaggccttaacaggtgaatctagagcctacttttattttggttaaagaaaaagaaaatatcaataattcaattttgtgtcttttctcaatttattagcaaacacaagacattttatgtattatttcgatttacttcctaattataaaagctgcttttttgcagaacattccttgaaaatataaggttttgaaaagacataattttacttgaatctttgtggggtacaggttgatctttatattttactggttgttttaaaaattctagaaaagagatttctaggcctcatgtataaccagggttttgaggataaagaactgtatttttagaactatctcatcatagcatatctgctttggaataactataaataaaagatgaagttaggaaaaaaaaaaaaaaaaaaa

SEQ ID NO: 171982 - DNA, 5538 bp, Artificial Sequence
  derived and/or modified sequence
atgggcctgtgcggcctgctggagagatgctggctgcaccacgaccccgacggcgtgctgaccctgaacgccgagaacaccaactacgcctaccaggtgcccaacttccacaagtgcgagatctgcctgctgagcttccccaaggagagccagttccagagacacatgagagaccacgagagaaacgacaagccccacagatgcgaccagtgcccccagaccttcaacgtggagttcaacctgaccctgcacaagtgcacccacagcggcgaggaccccacctgccccgtgtgcaacaagaagttcagcagagtggccagcctgaaggcccacatcatgctgcacgagaaggaggagaacctgatctgcagcgagtgcggcgacgagttcaccctgcagagccagctggccgtgcacatggaggagcacagacaggagctggccggcaccagacagcacgcctgcaaggcctgcaagaaggagttcgagaccagcagcgagctgaaggagcacatgaagacccactacaagatcagagtgagcagcaccagaagctacaacagaaacatcgacagaagcggcttcacctacagctgcccccactgcggcaagaccttccagaagcccagccagctgaccagacacatcagaatccacaccggcgagagacccttcaagtgcagcgagtgcggcaaggccttcaaccagaagggcgccctgcagacccacatgatcaagcacaccggcgagaagccccacgcctgcgccttctgccccgccgccttcagccagaagggcaacctgcagagccacgtgcagagagtgcacagcgaggtgaagaacggccccacctacaactgcaccgagtgcagctgcgtgttcaagagcctgggcagcctgaacacccacatcagcaagatgcacatgggcggcccccagaacagcaccagcagcaccgagaccgcccacgtgctgaccgccaccctgttccagaccctgcccctgcagcagaccgaggcccaggccaccagcgccagcagccagcccagcagccaggccgtgagcgacgtgatccagcagctgctggagctgagcgagcccgcccccgtggagagcggccagagcccccagcccggccagcagctgagcatcaccgtgggcatcaaccaggacatcctgcagcaggccctggagaacagcggcctgagcagcatccccgccgccgcccaccccaacgacagctgccacgccaagaccagcgccccccacgcccagaaccccgacgtgagcagcgtgagcaacgagcagaccgaccccaccgacgccgagcaggagaaggagcaggagagccccgagaagctggacaagaaggagaagaagatgatcaagaagaagagccccttcctgcccggcagcatcagagaggagaacggcgtgagatggcacgtgtgcccctactgcgccaaggagttcagaaagcccagcgacctggtgagacacatcagaatccacacccacgagaagcccttcaagtgcccccagtgcttcagagccttcgccgtgaagagcaccctgaccgcccacatcaagacccacaccggcatcaaggccttcaagtgccagtactgcatgaagagcttcagcaccagcggcagcctgaaggtgcacatcagactgcacaccggcgtgagacccttcgcctgcccccactgcgacaagaagttcagaaccagcggccacagaaagacccacatcgccagccacttcaagcacaccgagctgagaaagatgagacaccagagaaagcccgccaaggtgagagtgggcaagaccaacatccccgtgcccgacatccccctgcaggagcccatcctgatcaccgacctgggcctgatccagcccatccccaagaaccagttcttccagagctacttcaacaacaacttcgtgaacgaggccgacagaccctacaagtgcttctactgccacagagcctacaagaagagctgccacctgaagcagcacatcagaagccacaccggcgagaagcccttcaagtgcagccagtgcggcagaggcttcgtgagcgccggcgtgctgaaggcccacatcagaacccacaccggcctgaagagcttcaagtgcctgatctgcaacggcgccttcaccaccggcggcagcctgagaagacacatgggcatccacaacgacctgagaccctacatgtgcccctactgccagaagaccttcaagaccagcctgaactgcaagaagcacatgaagacccacagatacgagctggcccagcagctgcagcagcaccagcaggccgccagcatcgacgacagcaccgtggaccagcagagcatgcaggccagcacccagatgcaggtggagatcgagagcgacgagctgccccagaccgccgaggtggtggccgccaaccccgaggccatgctggacctggagccccagcacgtggtgggcaccgaggaggccggcctgggccagcagctggccgaccagcccctggaggccgacgaggacggcttcgtggccccccaggaccccctgagaggccacgtggaccagttcgaggagcagagccccgcccagcagagcttcgagcccgccggcctgccccagggcttcaccgtgaccgacacctaccaccagcagccccagttcccccccgtgcagcagctgcaggacagcagcaccctggagagccaggccctgagcaccagcttccaccagcagagcctgctgcaggcccccagcagcgacggcatgaacgtgaccaccagactgatccaggagagcagccaggaggagctggacctgcaggcccagggcagccagttcctggaggacaacgaggaccagagcagaagaagctacagatgcgactactgcaacaagggcttcaagaagagcagccacctgaagcagcacgtgagaagccacaccggcgagaagccctacaagtgcaagctgtgcggcagaggcttcgtgagcagcggcgtgctgaagagccacgagaagacccacaccggcgtgaaggccttcagctgcagcgtgtgcaacgccagcttcaccaccaacggcagcctgaccagacacatggccacccacatgagcatgaagccctacaagtgccccttctgcgaggagggcttcagaaccaccgtgcactgcaagaagcacatgaagagacaccagaccgtgcccagcgccgtgagcgccaccggcgagaccgagggcggcgacatctgcatggaggaggaggaggagcacagcgacagaaacgccagcagaaagagcagacccgaggtgatcaccttcaccgaggaggagaccgcccagctggccaagatcagaccccaggagagcgccaccgtgagcgagaaggtgctggtgcagagcgccgccgagaaggacagaatcagcgagctgagagacaagcaggccgagctgcaggacgagcccaagcacgccaactgctgcacctactgccccaagagcttcaagaagcccagcgacctggtgagacacgtgagaatccacaccggcgagaagccctacaagtgcgacgagtgcggcaagagcttcaccgtgaagagcaccctggactgccacgtgaagacccacaccggccagaagctgttcagctgccacgtgtgcagcaacgccttcagcaccaagggcagcctgaaggtgcacatgagactgcacaccggcgccaagcccttcaagtgcccccactgcgagctgagattcagaaccagcggcagaagaaagacccacatgcagttccactacaagcccgaccccaagaaggccagaaagcccatgaccagaagcagcagcgagggcctgcagcccgtgaacctgctgaacagcagcagcaccgaccccaacgtgttcatcatgaacaacagcgtgctgaccggccagttcgaccagaacctgctgcagcccggcctggtgggccaggccatcctgcccgccagcgtgagcgccggcggcgacctgaccgtgagcctgaccgacggcagcctggccaccctggagggcatccagctgcagctggccgccaacctggtgggccccaacgtgcagatcagcggcatcgacgccgccagcatcaacaacatcaccctgcagatcgaccccagcatcctgcagcagaccctgcagcagggcaacctgctggcccagcagctgaccggcgagcccggcctggccccccagaacagcagcctgcagaccagcgacagcaccgtgcccgccagcgtggtgatccagcccatcagcggcctgagcctgcagcccaccgtgaccagcgccaacctgaccatcggccccctgagcgagcaggacagcgtgctgaccaccaacagcagcggcacccaggacctgacccaggtgatgaccagccagggcctggtgagccccagcggcggcccccacgagatcaccctgaccatcaacaacagcagcctgagccaggtgctggcccaggccgccggccccaccgccaccagcagcagcggcagcccccaggagatcaccctgaccatcagcgagctgaacaccaccagcggcagcctgcccagcaccacccccatgagccccagcgccatcagcacccagaacctggtgatgagcagcagcggcgtgggcggcgacgccagcgtgaccctgaccctggccgacacccagggcatgctgagcggcggcctggacaccgtgaccctgaacatcaccagccagggccagcagttccccgccctgctgaccgaccccagcctgagcggccagggcggcgccggcagcccccaggtgatcctggtgagccacaccccccagagcgccagcgccgcctgcgaggagatcgcctaccaggtggccggcgtgagcggcaacctggcccccggcaaccagcccgagaaggagggcagagcccaccagtgcctggagtgcgacagagccttcagcagcgccgccgtgctgatgcaccacagcaaggaggtgcacggcagagagagaatccacggctgccccgtgtgcagaaaggccttcaagagagccacccacctgaaggagcacatgcagacccaccaggccggccccagcctgagcagccagaagcccagagtgttcaagtgcgacacctgcgagaaggccttcgccaagcccagccagctggagagacacagcagaatccacaccggcgagagacccttccactgcaccctgtgcgagaaggccttcaaccagaagagcgccctgcaggtgcacatgaagaagcacaccggcgagagaccctacaagtgcgcctactgcgtgatgggcttcacccagaagagcaacatgaagctgcacatgaagagagcccacagctacgccggcgccctgcaggagagcgccggccaccccgagcaggacggcgaggagctgagcagaaccctgcacctggaggaggtggtgcaggaggccgccggcgagtggcaggccctgacccacgtgttctag

SEQ ID NO: 171983 - DNA, 5538 bp, Artificial Sequence
  derived and/or modified sequence
atggggctctgtggattgctggagcgctgctggctgcaccacgatcctgacggagtgctgacactgaacgccgagaatacgaattatgcatatcaggtaccaaattttcacaagtgcgaaatctgtctactgtccttccctaaggaatcacagttccagcggcatatgagagatcacgagcggaacgacaagccacataggtgcgaccagtgtcctcagacatttaatgtggagttcaatctgacacttcataaatgcactcatagtggagaggaccccacatgccctgtctgtaataagaaatttagcagggtggctagcctgaaagctcacatcatgctgcatgagaaagaggagaatcttatttgttctgagtgcggggacgagttcactctacagagccaattggccgtacatatggaggaacaccgccaggaacttgcaggaacaagacagcatgcatgtaaggcctgcaaaaaagagtttgagacttcctcagagctcaaggagcacatgaagactcattacaaaatcagagtgtcttcaacccggagctacaatcgcaacattgatcgatcagggtttacatactcctgcccacattgcggaaagacattccaaaagccctcacagctgaccaggcacataaggattcataccggggagagaccctttaagtgctccgagtgcggcaaagcgtttaatcagaaaggggctctccagacccacatgataaaacacactggggagaagccccatgcctgcgcgttctgccctgccgcattctcccagaaaggtaacctgcagtcacatgtacagagggtgcattctgaagtaaaaaatggacctacatacaactgcactgagtgttcatgcgtgttcaagtctctcggcagccttaatactcatatctctaagatgcacatggggggtcctcagaattcaaccagttcaacggaaacagctcacgtgctgacggctacattattccagacgctgccattacagcaaacagaggcccaggccaccagcgccagcagtcagccatccagccaagccgtgagcgacgtaattcagcagctgttagaattgtccgaaccggcacctgtcgagtctggccagtctccgcagccaggccaacagctttcaattacagtggggattaatcaggatatcctgcagcaggccctcgagaatagtgggctcagttccattcctgccgccgcacaccctaacgatagctgtcatgccaaaactagtgcgccacacgcccagaacccagacgtgtcatctgtgtcaaatgagcaaactgaccctacggatgccgaacaggaaaaggaacaggaaagccccgagaaactggacaaaaaagaaaaaaaaatgattaagaagaagagccccttcctgcctgggtctattcgcgaagagaacggtgtgcggtggcatgtctgcccctactgtgctaaggaattcagaaagccctccgacttagttcgccatatccgaattcatactcatgaaaaaccatttaagtgtccacaatgcttcagggctttcgcagtgaagtccactttgactgctcatatcaagacacacacaggaattaaggccttcaagtgccaatactgcatgaaatcctttagtacctctggctccctaaaagtacatattaggctccacactggtgtcaggccattcgcatgtccgcattgtgataagaagtttagaaccagcgggcatagaaaaacacacatcgccagccactttaaacatactgagctcagaaaaatgcgacaccagcgaaagccagcaaaggttcgcgtcgggaagactaacatacctgtccccgacatcccgttgcaagagcccatacttataacagatcttggcctgattcagcccatccccaagaatcaattcttccagtcatattttaacaacaacttcgtgaatgaagcagatagaccctataagtgcttctactgtcatcgtgcctacaaaaagagctgccaccttaaacagcacatccgctcccatacaggcgaaaagcctttcaaatgcagccagtgtggtcggggatttgtgtcagctggggtgctgaaggcgcatataaggacccacaccgggctaaagtccttcaaatgtcttatttgtaacggagcattcactaccgggggaagcctgcggcgccacatgggcatccataatgatctgcggccatatatgtgcccctattgtcaaaagactttcaaaacatcactgaattgcaaaaagcacatgaagacccaccggtacgagctagcccaacaattgcagcagcaccagcaggccgcatccattgatgactccaccgtggatcagcaaagcatgcaggcttcaacccaaatgcaggtggaaatcgaatccgacgaactgccgcagaccgccgaagtggtggcagcaaaccccgaggccatgctcgatctggaaccacagcatgtagtgggaacggaggaggccggcttgggccagcaactagccgatcaacccttggaggctgatgaggatggtttcgtggccccacaggatcccctgcgaggacatgtggaccagttcgaggagcaaagtcctgcccagcagagtttcgagcccgcaggtctgcctcagggcttcacagtgactgatacatatcaccagcaaccacagttcccccccgtccaacagctgcaggatagtagtacattggagtcacaagcactatccacctcttttcaccagcagtctctactccaggcaccctccagcgatggcatgaatgtcacaacacgcttgatacaggagtcgtcacaggaagagttagatctgcaagcacagggaagccagttcctggaggacaacgaagaccagagtcgtcgctcgtatcgttgtgattactgcaacaaaggctttaagaagtcttcacatttgaagcagcatgtgagatctcatactggcgagaaaccttataagtgcaagctgtgtgggcggggattcgtgtctagtggcgtattgaagtcccacgagaaaactcacactggtgtaaaggcttttagctgcagcgtttgcaatgcttcattcacaactaatggcagtctgacacgacacatggccacccatatgtcgatgaaaccatataaatgtccattctgtgaggaggggttccggactactgtgcattgtaagaagcacatgaagagacatcagaccgttcctagtgcagtgtccgcgacaggcgagaccgagggcggcgatatttgcatggaagaggaagaggagcattccgacaggaacgcctcccggaagtctcgccccgaagtgatcacgttcacagaggaggagacagctcagctggccaaaattcgcccccaggaatctgcaaccgtcagcgaaaaggtgttggtgcagagtgcggccgagaaagaccgtatcagcgaattgagagataaacaggcagagcttcaggatgagcccaagcatgcaaattgctgtacctattgccccaagtcattcaaaaagccctcagacctggtgagacacgtaagaatccacaccggcgagaaaccatacaaatgcgatgaatgtggcaaatctttcactgtgaagtccaccttggactgccacgttaaaacacacacaggccagaagttgttttcctgccacgtctgttccaacgccttctccactaaggggtccctcaaggtccatatgcgtttgcacactggcgccaaaccttttaaatgtccccactgtgagctgaggttcaggacatcgggcaggcgtaaaactcatatgcagtttcattacaagccagaccccaaaaaggcccgcaaaccaatgacaagatcctcttcagaaggcctgcagccggtgaacctgcttaacagctcttcaactgaccctaatgtgtttatcatgaacaactccgtcctgacgggccagttcgatcaaaacctcctccagccaggcctggtgggccaggccatactgcccgcctcagtgagcgccgggggtgatctaacagttagtttaactgatggatcccttgcgaccctggaaggcattcaactgcaattggccgcaaatctcgtgggacctaatgtgcagatcagcggaatagacgccgctagcatcaacaacatcactttgcaaatcgatccctcaattttacagcagactttacagcaaggaaacctgctcgcccaacagctgacaggagagcctggactggcaccccagaatagttcactgcagaccagcgatagtacagtaccggctagcgtcgtcattcaacccattagtggtctatcgctgcagcctactgttacaagcgcgaacctgaccattggtcccctgtcagagcaggatagcgtcctgacgaccaactcgagcggcacccaggatctgactcaagtaatgactagtcaagggctagtctcccccagtggaggaccccacgaaatcacccttacgataaacaatagctccctgtctcaagtgcttgcccaggccgcaggacccacagccacgtcctcctccgggtcaccccaggagatcacactcactattagcgaattgaacactacaagcgggtccctgccttctacaacgccgatgtcgccgtcggccattagtactcaaaatctggttatgtcttcatcaggcgtaggcggcgacgccagcgtgactctgaccttggctgacacacaggggatgttgtcgggagggctggacacggtgacgcttaacatcacttcccaggggcaacagtttccagcccttctaactgatcccagcctcagtggacagggtggagccgggagcccccaggtgattctagtgagccatacaccacagtccgcgtcagccgcttgcgaggagattgcctaccaggttgctggcgtctccgggaaccttgcacctggtaatcagccggaaaaagaaggcagagctcaccagtgcttggagtgcgaccgggcgttctcctccgccgccgtgcttatgcaccattccaaggaggtgcacgggcgtgagcgcatacacggctgtcctgtgtgcagaaaagctttcaaacgggccacccacttgaaagagcacatgcagacgcatcaggccgggcccagcctgagcagtcagaagccacgggtgtttaagtgtgacacgtgcgaaaaggcctttgctaagccatcccagctcgaaaggcacagtagaattcatactggcgaacgccctttccattgtaccctttgcgagaaggcatttaaccagaagagtgccctgcaggtgcatatgaagaaacacacgggcgaaaggccttacaagtgtgcctattgcgttatgggttttacccagaagtctaacatgaaacttcatatgaagagggctcacagctacgctggcgcactgcaagagagcgccgggcacccagagcaggatggggaggagctgagtaggactttgcacctggaggaggtcgttcaggaggcagccggagagtggcaggcactaacccatgttttttag

SEQ ID NO: 171984 - DNA, 5538 bp, Artificial Sequence
  derived and/or modified sequence
atgggcctgtgtggcctgctggagcgctgctggctgcaccacgaccctgatggagtgctgaccctgaatgctgagaacaccaactatgcctaccaggtgcccaacttccacaagtgtgagatctgcctgctgtccttccccaaggagagccagttccagaggcacatgagggaccatgaaagaaatgacaagccccaccgctgtgaccagtgcccccagaccttcaacgtggagttcaacctgaccctgcacaagtgcacccacagcggggaggaccccacctgccctgtgtgcaacaagaagttcagccgggtggccagcctgaaggcccacatcatgctgcacgagaaggaggagaacctgatctgcagtgaatgtggagatgagttcaccctgcagagccagctggccgtgcacatggaggagcaccggcaggagctggccggcacccggcagcacgcctgcaaggcctgcaagaaggagtttgagaccagcagcgagctgaaggagcacatgaagacccactacaagatccgggtgagcagcaccaggagctacaacagaaacatcgacagaagtggcttcacctacagctgcccccactgtgggaagaccttccagaagcccagccagctgaccaggcacatccgcatccacactggagagcggcccttcaagtgcagtgaatgtgggaaggccttcaaccagaagggggccctgcagacccacatgatcaagcacactggagagaagccccacgcctgtgccttctgcccagctgccttcagccagaagggcaacctgcagagccacgtgcagagggtgcacagcgaggtgaagaatggccccacctacaactgcacagaatgttcctgtgtgttcaagagcctgggcagcctgaacacccacatcagcaagatgcacatgggcggcccccagaacagcaccagcagcacagaaacagcccacgtgctgacagccaccctcttccagaccctgcccctgcagcagacagaggcccaggccaccagcgccagcagccagcccagcagccaggccgtgtctgatgtgatccagcagctgctggagctgtctgagcccgcccctgtggagagcggccagagcccccagcccggccagcagctgagcatcaccgtgggcatcaaccaggacatcctgcagcaggccctggagaacagcggcctgagcagcatcccagctgctgcccaccccaatgacagctgccacgccaagaccagcgcccctcatgcccagaacccagatgtgtcctctgtgtccaatgagcagacagaccccacagatgctgagcaggagaaggagcaggagagccctgagaagctggacaagaaggagaagaagatgatcaagaagaagagccccttcctgcccggcagcatccgggaggagaatggagtgcgctggcacgtgtgcccctactgtgccaaggagttcaggaagcccagcgacctggtgcgccacatccgcatccacacccatgagaagcccttcaagtgcccccagtgcttccgggcctttgctgtgaagagcaccctgacagcccacatcaagacccacacaggcatcaaggccttcaagtgccagtactgcatgaagagcttcagcaccagcggcagcctgaaggtgcacatccggctgcacactggagtgcggccctttgcctgcccccactgtgacaagaagttccgcaccagcggccacaggaagacccacatcgccagccacttcaagcacacagagctgaggaagatgaggcaccagaggaagccagccaaggtgcgggtgggcaagaccaacatccctgtgcctgacatccccctgcaggagcccatcctgatcacagacctgggcctcatccagcccatccccaagaaccagttcttccagagctacttcaacaacaactttgtgaatgaagctgaccggccctacaagtgcttctactgccaccgggcctacaagaagagctgccacctgaagcagcacatccgcagccacactggagagaagcccttcaagtgcagccagtgtggccggggctttgtgtctgctggggtgctgaaggcccacatccgcacccacacaggcctgaagagcttcaagtgcctgatctgcaatggagccttcaccaccggcggcagcctgcggcggcacatgggcatccacaatgacctgcggccctacatgtgcccctactgccagaagaccttcaagaccagcctgaactgcaagaagcacatgaagacccacagatatgagctggcccagcagctgcagcagcaccagcaggccgccagcattgatgacagcacagtggaccagcagagcatgcaggccagcacccagatgcaggtggagattgaaagtgatgagctgccccagacagctgaggtggtggccgccaaccctgaggccatgctggacctggagccccagcacgtggtgggcacagaggaggccggcctgggccagcagctggccgaccagcccctggaggctgatgaagatggctttgtggccccccaggaccccctgcggggccacgtggaccagtttgaggagcagagccctgcccagcagagctttgagcccgccggcctgccccagggcttcaccgtgacagacacctaccaccagcagccccagtttcctcctgtgcagcagctgcaggacagcagcaccctggagagccaggccctgagcaccagcttccaccagcagagcctgctgcaggcccccagcagtgatggcatgaatgtgaccaccaggctcatccaggagagcagccaggaggagctggacctgcaggcccagggcagccagttcctggaggacaatgaagaccagagccgccgcagctaccgctgtgactactgcaacaagggcttcaagaagagcagccacctgaagcagcacgtgcgcagccacactggagagaagccctacaagtgcaagctgtgtggccggggctttgtgtcctctggagtgctgaagagccatgagaagacccacactggagtgaaggccttcagctgcagcgtgtgcaatgccagcttcaccaccaacggcagcctgaccaggcacatggccacccacatgtccatgaagccctacaagtgccccttctgtgaggagggcttccgcaccaccgtgcactgcaagaagcacatgaagaggcaccagacagtgcccagcgctgtgtctgccactggagaaacagagggcggggacatctgcatggaggaggaggaggagcacagcgacagaaatgccagcaggaagagcaggcctgaggtgatcaccttcacagaggaggagacagcccagctggccaagatccggccccaggagagcgccaccgtgtctgagaaggtgctggtgcagagcgctgctgagaaggaccgcatcagcgagctgcgggacaagcaggccgagctgcaggatgagcccaagcacgccaactgctgcacctactgccccaagagcttcaagaagcccagcgacctggtgagacatgtgcgcatccacactggagagaagccctacaagtgtgatgaatgtgggaagagcttcaccgtgaagagcaccctggactgccacgtgaagacccacacaggccagaagctgttcagctgccacgtgtgcagcaatgccttcagcaccaagggcagcctgaaggtgcacatgaggctgcacactggagccaagcccttcaagtgcccccactgtgagctgcgcttccgcaccagcggccgcaggaagacccacatgcagttccactacaagccagaccccaagaaggccaggaagcccatgaccaggagcagcagcgagggcctgcagcctgtgaacctgctgaacagcagcagcacagaccccaacgtgttcatcatgaacaacagcgtgctgaccggccagtttgaccagaacctgctgcagcccggcctggtgggccaggccatcctgcctgcctctgtgtctgctggaggagacctgactgtgtccctgacagatggcagcctggccaccctggagggcatccagctgcagctggccgccaacctggtgggccccaacgtgcagatcagcggcattgatgctgccagcatcaacaacatcaccctgcagattgaccccagcatcctgcagcagaccctgcagcagggcaacctgctggcccagcagctgaccggggagcccggcctggccccccagaacagcagcctgcagaccagtgacagcacagtgcctgcctctgtggtgatccagcccatcagcggcctgagcctgcagcccaccgtgaccagcgccaacctgaccatcggccccctgtctgagcaggacagcgtgctgaccaccaacagcagcggcacccaggacctgacccaggtgatgaccagccagggcctggtgagccccagcggcggcccccatgagatcaccctgaccatcaacaacagcagcctgagccaggtgctggcccaggccgccggccccacagccaccagcagcagcggcagcccccaggagatcaccctgaccatcagcgagctgaacaccaccagcggcagcctgcccagcaccacccccatgagccccagcgccatcagcacccagaacctggtgatgagcagcagtggagtgggcggagatgcctctgtgaccctgaccctggccgacacccagggcatgctgagcggcggcctggacacagtgaccctgaacatcaccagccagggccagcagtttcctgccctgctgacagaccccagcctgagcggccagggcggggccggcagcccccaggtgatcctggtgagccacaccccccagagcgccagcgctgcctgtgaggagatcgcctaccaggtggccggcgtgtctggcaacctggcccctggcaaccagcctgagaaggagggccgggcccaccagtgcctggagtgtgaccgggccttcagcagcgctgctgtgctgatgcaccacagcaaggaggtgcacggccgggagcgcatccacggctgccctgtgtgcaggaaggccttcaagagggccacccacctgaaggagcacatgcagacccaccaggccggccccagcctgagcagccagaagcccagggtcttcaagtgtgacacctgtgagaaggcctttgccaagcccagccagctggagcggcacagccgcatccacactggagagcggcccttccactgcaccctgtgtgagaaggccttcaaccagaagagcgccctgcaggtgcacatgaagaagcacactggagagcggccctacaagtgtgcctactgtgtgatgggcttcacccagaagagcaacatgaagctgcacatgaagagggcccacagctatgctggggccctgcaggagagcgctggccaccctgagcaggatggagaggagctgagcaggaccctgcacctggaggaggtggtgcaggaggccgccggggagtggcaggccctgacccacgtgttctag

SEQ ID NO: 171985 - DNA, 5538 bp, Artificial Sequence
  derived and/or modified sequence
atgggcctgtgcggcctgctggagcggtgctggctgcaccacgaccctgatggagtcctgaccctcaacgccgagaatacaaactatgcttatcaagtgcccaatttccacaagtgtgagatctgtctgctgtcctttcccaaagaatcacaatttcaacgacacatgcgtgaccatgaacgcaatgacaagcctcaccgatgtgaccagtgcccacagaccttcaatgtggaattcaatttaaccctgcacaaatgcactcactctggcgaggatccgacatgccctgtgtgtaacaaaaagttttcacgcgtcgctagtttgaaggcacacatcatgctgcatgaaaaggaggagaacctcatctgtagcgagtgcggagacgaattcaccctgcagagccagctggccgtgcacatggaggagcacagacaggagctggccggcactcgacagcatgcatgcaaggcctgcaagaaagaattcgaaactagctcagagctgaaggaacatatgaaaacacactacaagattcgcgtctcctctacacgctcttataatcggaatattgatagaagcggttttacttactcatgcccacactgcggcaaaaccttccagaaacccagtcagctcacccgacacattcgcattcacacaggcgagcgcccatttaagtgctccgaatgtggcaaggctttcaatcagaaaggcgctctgcagacacatatgatcaaacacacaggcgagaaaccacatgcgtgcgcgttttgccctgcagcgttttctcagaaggggaatctccagtcccatgtccagagagtgcatagcgaggttaagaatggccccacatataattgtaccgaatgttcatgcgtattcaaaagtctggggtctctgaacactcacataagcaaaatgcacatgggagggcctcagaattccacctcctctaccgagactgctcatgtcttgacggctacacttttccaaaccttaccactccagcagactgaagcccaggccacttccgccagctctcagcccagttcccaggccgtgtcagacgttattcagcagctcctggaactaagcgaaccggcgcctgtggaaagcggccagagtccccagcctgggcagcaactgtctataaccgtagggataaaccaggacattctgcaacaagctttagagaactctggcttgtcgagcattcccgccgccgcacacccgaatgacagctgccacgcaaaaacgagcgccccacacgctcagaatcccgacgtctcttccgtgtccaacgaacagacagatcctacggatgccgagcaggaaaaggaacaggaatcaccagagaagctggataaaaaggaaaagaagatgatcaagaagaaaagcccttttctccccggttccatccgggaagagaacggggtcaggtggcacgtgtgcccatattgcgccaaagagttccgcaaacctagcgatttggtgcgacacattagaatacatacccatgaaaagccctttaaatgtcctcagtgctttagagccttcgctgtgaagtctaccctcaccgcacacattaagacacatacaggaatcaaggcctttaagtgtcaatactgcatgaaaagctttagtacctccgggagtttgaaagtgcatattcggctacacacgggcgtaagaccttttgcatgcccccactgcgataagaaattccgaacctcagggcacagaaagacacacatcgcttcccattttaaacatactgagttgcgtaagatgaggcatcaacgcaaaccagctaaggttcgcgtggggaagacaaacattccagtgcctgacatacccctccaagagcctatccttattaccgacctgggattgattcaacctatccctaaaaatcagttcttccaatcctatttcaacaacaacttcgtcaatgaggcagataggccttacaagtgcttctactgtcatagagcttataaaaagagttgccaccttaagcagcacattagatcccatacaggtgaaaagccgttcaaatgcagtcaatgtgggaggggattcgtgagcgcaggagtcttgaaagcgcatataagaacccatactggtctcaaaagtttcaagtgcctgatatgtaatggggcctttacaactggtggtagcttaagaaggcacatgggaatccacaatgatctcaggccctatatgtgcccatattgccaaaaaacatttaagacttctcttaattgtaagaagcatatgaaaacccaccggtacgagctagctcagcagcttcagcaacatcagcaagcagccagcattgacgatagcacagttgaccagcagagcatgcaggcttcaacgcagatgcaagtggagatcgagagtgatgagctcccccagacggccgaggtcgtggcagccaatcccgaggccatgttggatctagaacctcagcacgttgtcggaactgaagaagctggccttggccagcagctagctgaccagcccttagaagccgatgaagacggtttcgtagctccacaggacccactacgcgggcacgtggaccagttcgaagaacagtcccctgcccaacagtcctttgagcccgctggccttccccagggcttcacggtgaccgacacttaccatcaacagccacaattccctcctgtccaacagttacaggatagttcaacgcttgagagccaggctctgtccacaagttttcatcagcagtctcttctgcaggcacccagctctgacgggatgaatgtcactactaggcttattcaggagagtagccaggaggagctggacctgcaggcccagggaagccaattcctggaggacaatgaagaccagtcgagaagaagctaccgttgcgattactgtaataaaggcttcaagaagagtagccacctgaagcagcatgtaaggtcccacactggggagaaaccctataaatgcaagttgtgcggaagggggtttgtttcaagcggagtcctgaaaagtcatgaaaagactcacacgggtgtcaaggcctttagttgcagtgtttgtaatgcatcttttaccaccaacgggtcacttaccagacacatggccacccacatgtctatgaagccatataagtgcccattttgcgaagagggattccggacgaccgtccattgtaagaaacatatgaagaggcaccaaactgtacctagcgccgtcagcgcaacaggggagactgaaggcggggacatatgcatggaggaggaggaagagcacagtgaccgaaatgctagtagaaagtcaaggcccgaggtgatcacattcacagaagaggaaaccgcccagttggcgaagatcaggccacaggagtcagcaactgtcagcgaaaaggtactggtccagtccgcagccgagaaggacagaatctccgagctcagggataagcaggctgagttgcaggacgagcccaagcacgccaactgttgcacctattgtccaaagtccttcaagaaaccgtccgacctggttcgtcatgtccgtattcataccggagaaaagccctataaatgtgacgaatgcggcaagtcattcaccgtcaagtctacactggattgccacgtcaagactcacactgggcagaaactcttcagttgccacgtgtgcagcaacgcattttccactaaaggatcccttaaagtccatatgcggctccacactggcgctaagccatttaagtgtcctcattgcgagttacgattcaggacttcgggccgccgaaagacccatatgcagttccactacaagcccgacccgaaaaaggcacgcaagccaatgactcgaagttcttcagagggtctccagccggttaacttgctcaattcctcttcaacagatcctaacgtgttcatcatgaacaatagcgtactcacgggacagtttgatcagaatctgctgcaacctggacttgttgggcaggccatcctgcctgcgtctgtaagtgccgggggcgacctgaccgtgagcctcactgacggaagcttggccaccctagagggaatacaattacagctggcagcaaatctcgtcgggcctaatgtccagatttccggaattgatgctgccagcatcaacaacataaccctgcaaatcgaccctagtattttgcaacagacgctccaacaaggtaacttgctcgcacagcaactcaccggtgagcctggtctggctccacagaactcctcgcttcagacaagtgactccactgttccagccagtgtagtgatccaacctatctccggtttatctctgcagcccactgtaacaagcgcaaacctaacaataggacccttgtccgagcaggatagtgttctgacaactaacagctctggcactcaggatctgactcaggtgatgacatctcaggggttggtcagcccttccgggggccctcatgagatcacattaactataaataatagcagtttgagccaggtgctcgctcaggcagcaggacctaccgctaccagctcatcagggtcgccacaggagatcaccctgaccatcagtgagctgaatactacatctggcagtctgcctagcactactcccatgtctccttcagccattagtacgcagaacttggttatgtcttcatcaggtgtgggcggtgacgctagtgtcacactgacacttgccgatacccaaggaatgctttcagggggactggacacagtgacactcaacattaccagccaaggacaacaattccctgccctgctgactgatcctagcctgtcgggccagggcggtgcaggttccccccaggttatccttgtctcccacactccacagagcgcaagtgccgcgtgcgaggagattgcctatcaggtggctggcgtgagtggcaatttggcacctggtaaccaacctgaaaaagaaggacgggcccaccagtgcctcgagtgcgaccgcgccttctcttccgctgctgtgctcatgcatcactctaaggaagtgcacggccgtgaacgcattcatggttgccctgtttgccggaaggcctttaaaagagcgacccacctgaaagagcacatgcaaacccatcaggctggcccctcattgtcctctcagaaaccccgagttttcaaatgcgacacctgcgaaaaagccttcgctaagccctctcagctcgaacgtcatagccgaatccataccggtgaaaggcccttccattgcacactatgtgagaaggcttttaaccaaaagagcgcactccaagtgcacatgaaaaaacacactggggaacgcccgtataaatgtgcctactgtgtgatgggatttacacaaaagtctaatatgaagcttcatatgaagcgggctcattcctatgccggcgcgctccaggagtcggctggacatcccgagcaagacggcgaggagctgagccgcacgttacatttagaggaagtagtccaagaagcggctggggagtggcaggcgctgacacatgtcttctag

SEQ ID NO: 171986 - DNA, 5538 bp, Artificial Sequence
  derived and/or modified sequence
atgggactctgcggcctcctcgagcgatgctggctccatcacgaccctgacggggtcttgactttgaacgccgaaaacactaactacgcataccaggtgcccaacttccacaagtgtgaaatttgcctcctctctttccctaaggagtctcagttccagagacacatgagagaccacgaacggaatgacaaaccacaccggtgtgaccagtgcccccaaacgtttaacgtagaattcaatctaacactgcataaatgcacacactctggggaggatcctacttgcccagtgtgtaataaaaagttcagccgagtcgccagcctcaaagcccacataatgcttcatgagaaagaggaaaatctgatctgctcggaatgtggggacgaatttactctgcaaagccagcttgcggtgcacatggaggagcaccgccaggaactggccggaacacgccagcacgcgtgcaaggcctgtaagaaggaatttgaaacatccagcgaactgaaggagcatatgaaaactcactacaagattagggtgagtagcacacggtcatacaacagaaacatagaccgctccggctttacctactcttgcccccactgcggtaagacctttcaaaagccctctcagcttactagacacataaggattcataccggggagcgaccctttaagtgttccgagtgcggcaaggcgtttaatcagaagggcgcactccagacacacatgatcaaacatactggagagaagccccatgcttgtgcgttctgccctgccgctttttcccaaaaggggaacctgcagagccatgttcagagggtgcacagcgaagtgaagaatggcccaacatacaactgcactgagtgcagctgtgtcttcaaatctttgggatccctcaacactcacatttccaaaatgcatatgggcggaccacagaacagcacctccagcactgagacagcgcatgtgctcaccgcaacattgtttcagaccctccccctgcagcaaactgaagctcaggccacttccgcctcctctcagccgtcatcacaagcagtgagcgatgtcattcagcaactgctcgagctgtcagagcctgctcccgtggaatccggtcagtcaccccagcctggacagcaactaagcatcaccgtgggtattaaccaggatattctccagcaagcactggagaattccggcctgtcgtctataccagccgctgcccatccaaacgactcatgccatgctaaaacatctgcgcctcatgcccagaatcccgatgtgagctccgtctcgaatgagcagacagacccaaccgatgccgagcaggaaaaggagcaggaatctcctgagaagctggacaaaaaagaaaaaaagatgatcaaaaagaagagtccattccttccaggctccatacgggaggagaatggtgtccgctggcacgtttgcccgtactgcgctaaggaattccggaagcccagtgatctggtacgacacataagaatccatacacatgagaaaccattcaaatgccctcaatgtttcagagcattcgccgtgaagtccacgctcacagcccatatcaaaacccacaccggcataaaagcttttaagtgtcagtattgtatgaagagctttagtacctctggatctttgaaggtgcacatccgtctacacaccggcgttaggccatttgcttgcccacattgtgataagaaattccgaacttctggtcaccggaaaacacatatcgccagccatttcaagcacactgaattaagaaaaatgcggcatcaacggaaaccagcgaaagtgcgtgtagggaagacgaacattccagttcctgatattcccttgcaagaacccatcctgatcacggatctgggtttgatccagccaatacccaagaaccaattttttcagagttacttcaataataattttgtgaacgaagcagacaggccttacaagtgcttctattgtcacagggcgtacaaaaagtcttgccacttgaaacaacacatcaggtcacacacaggagagaagcctttcaagtgttcacagtgcggtcggggatttgtcagcgcaggcgtgctgaaagcgcacattaggactcacacaggtcttaagagttttaaatgtctgatttgtaacggcgcttttacaactggaggatcgctacggaggcacatgggcatccacaacgaccttcgtccctatatgtgtccctattgccagaaaacctttaagaccagcttgaattgcaagaaacacatgaagacccacagatatgaattggcacagcagttacagcaacaccagcaggccgcaagtatagacgacagcactgtggaccagcagtcaatgcaagcctccacacagatgcaggtggagattgaatcggacgagcttcctcagacggccgaggtggtagcagccaaccccgaggccatgctcgacctcgagccccagcacgtcgttggtaccgaagaagcgggtctgggccaacaattggcagaccagccactggaggcggacgaagatggcttcgtagcccctcaggaccctttaagaggacacgtggaccagtttgaagagcaatccccagcccagcaaagctttgagccggctgggctccctcaggggtttacagttaccgacacataccaccaacaacctcaattcccaccagtgcaacagttgcaagattcttccactcttgagtcacaggctctgtccacgtcatttcaccagcaaagcctgttgcaggcccctagcagcgacgggatgaacgtcactaccaggctgatccaggaaagcagccaagaggagttagacctacaggctcaaggatcacagttcctagaggataacgaggaccaaagtcgtaggagctatcgctgtgactactgcaacaaaggattcaaaaaatccagccatcttaaacaacatgtgcgcagtcacacaggagaaaagccgtataaatgcaagctgtgtggaagaggttttgtctcatccggggtgcttaaaagccatgaaaagacccacacaggagtcaaagcttttagctgcagtgtgtgtaacgccagctttacaaccaatggatccttgacccgccatatggccacacacatgtcgatgaagccatataaatgccccttctgtgaggaagggttcaggacaactgtgcactgtaaaaagcacatgaaacgccaccagacagtgccgtctgccgtatcggctactggagagacggaggggggagatatctgcatggaagaagaggaggagcactccgatcggaatgcatcccggaagagtcggcctgaggttattacattcaccgaggaggaaacagctcagctggccaaaataaggccccaggaaagtgcaacagtgtctgaaaaggtgctcgtgcagtcagcggctgaaaaggacaggatttctgagctgcgggataagcaggcagaactccaggatgaacccaagcacgctaattgctgtacatactgtccaaaatcatttaagaaaccttccgatctggttcgccatgttcggatccacaccggcgaaaaaccgtataagtgtgatgagtgtggcaagtcattcactgtcaagagtacactggattgccatgtgaaaacccacactgggcaaaaacttttctcctgtcatgtttgcagcaatgcctttagcacaaagggatccctcaaggttcatatgcgcctccacacaggagctaaacctttcaagtgtcctcattgcgagctgcgattcagaacgtccggccgaaggaagacacacatgcagtttcactataaaccagatcccaagaaggcccgtaaacccatgacgaggtcctcctctgaaggtctgcaaccggtcaacctactaaactcaagctccacggacccaaacgtttttatcatgaataattccgtcctgaccggccagtttgatcagaatctgctacagcccggacttgtgggccaagccatattgcccgcatcagtgtcagccggaggcgatctcaccgtctcgctgacagacggctccctcgcgacattggagggcattcaactgcagctcgccgcaaatctggttggaccaaacgtgcagatttccggcatcgacgccgcttctattaacaatattacacttcagatcgacccctcaatcctgcagcagaccctgcagcaagggaatcttcttgcacagcagctgactggtgagccaggcctggcgcctcaaaattcctcacttcaaacgagcgattcaaccgttcctgcctctgtggtcattcagccaatttcgggattgagcttgcagccgacagtgacatccgctaacctgacgatagggcctctgagtgagcaggattcagtcctgacaacaaatagcagcgggacgcaggatctgacacaggtcatgacgagccagggactagtgtctccgtcggggggacctcacgagatcacactgacaattaacaattccagtttatctcaagtgttagcccaggccgctggacctacagccacttccagcagcggatctccccaggaaatcacactcacaatctctgaacttaataccacgtctggctctttacctagcaccacaccaatgtccccctcagccattagtacacaaaacctggtgatgtctagcagcggagtcggtggggacgcctccgttacattgactttggcggacactcaggggatgctgtctggaggccttgacactgtgactctcaatattactagtcaggggcagcagttcccagcactgctaaccgacccatccctgtctggacagggaggggctggatcaccgcaggtgatcctcgtttcccacactccacagtccgcctcagcagcctgcgaggagattgcctatcaagtggcgggagtttccggaaatctcgctccgggtaatcaacccgaaaaagaaggacgagcacatcagtgtctggaatgcgatcgcgcatttagttcagccgctgtgctaatgcatcattccaaggaagttcacggacgagagagaatccatggttgtcccgtctgccgaaaggcatttaagagagctactcacctcaaggaacatatgcagactcatcaggccggacccagtctgagctcccagaaacctagggttttcaagtgtgatacttgcgaaaaagcgtttgctaagccctcccagctggagagacactccagaattcacacaggagagcgcccttttcattgtacattatgtgaaaaagcattcaatcagaaatctgccttgcaagtccatatgaagaagcacactggcgaaaggccttacaaatgtgcatactgcgttatgggtttcactcagaaaagcaacatgaagctgcacatgaaacgtgctcactcttatgctggcgcactccaggagtctgccggtcaccccgaacaggacggcgaggaactctctaggactctgcatctggaagaagtcgtacaggaggctgccggagagtggcaggcactgacccacgtgttctaa

SEQ ID NO: 171987 - DNA, 8121 bp, Artificial Sequence
  derived and/or modified sequence
gcctggaaactacaaaggattgtgttaattttgtgtttaggaagaaagaggtaatgggtaggaatcaatgtaaacttattcataggccacaccaaaccaggaattcttgtcgtgattgcacttggtagagttaacacacgtgcacattacggaaacgttggtgaccaacaggcgtttcagcgagctttcgcacacctcatgggcctttgtgggctgctggagagatgttggctgcaccatgacccagatggagttttaacattgaatgcggagaacactaattatgcctatcaagttccaaacttccataaatgtgaaatctgtctactatcttttccaaaagaatcccagtttcaacgccacatgagggatcacgagcgaaatgacaagccacatcgatgtgaccagtgcccccaaacatttaatgttgaattcaacctgacacttcataaatgcacccacagcggggaagatcctacctgccctgtgtgtaacaagaaattctccagagtggctagtctcaaagcgcatattatgctacatgaaaaggaagagaatctcatctgttctgagtgtggggatgagtttactctgcagagtcagctggccgtgcacatggaggagcaccgccaggagctggctggaacccggcagcatgcctgcaaggcctgcaagaaagagttcgagacctcctcggagctgaaggaacacatgaagactcattacaaaattagggtatcaagtacaaggtcttataaccggaatatcgacagaagtggattcacgtattcgtgtccgcactgtggaaagacgtttcaaaagccaagccagttaacgcgacacattaggatacacacaggtgaaaggccgttcaaatgtagtgaatgtggaaaggcttttaaccagaagggggcactgcagacccacatgatcaagcacacaggtgaaaaaccccatgcctgtgccttctgtcctgccgccttctctcagaaagggaatcttcagtcgcacgtgcagcgagtccactcagaggtcaagaatggtcctacctataactgtacagaatgtagttgtgtatttaaaagtttaggcagcttaaacacgcatatcagcaagatgcatatgggtgggccacagaattcaacaagttctacagagactgctcatgttttaacggccacactttttcagacgttacctcttcaacagacggaagcccaagccacgtcggcctcaagccagccgagctcccaggcggtgagcgacgtcatccagcagctcctggagctctcagagccggcgccggtggagtcggggcagtccccgcagcctgggcagcagctgagcatcacagtgggcatcaaccaggacattttacagcaagccttagaaaacagtgggctgtcttcaattccagctgcagcacatcctaatgactcctgccatgccaagacctctgcaccacacgctcaaaacccagatgtttccagcgtttcaaatgagcagacggaccccacagacgcagagcaagaaaaagaacaggaaagcccggagaaactggataaaaaagaaaaaaaaatgataaagaagaagtcaccgtttctacctggctccatccgcgaggagaacggcgtgcgctggcatgtgtgtccctactgcgccaaggagttccgcaagcccagcgacctggtccgccacatccgcatccacacccacgagaagcccttcaagtgcccgcagtgcttccgcgccttcgccgtgaagagcacgctgacagcgcacatcaagacgcacaccggcatcaaggcgttcaagtgccagtactgcatgaagagcttctccacctctggcagcctcaaggtgcacattcgcctgcacacaggagttagaccttttgcttgtcctcactgtgacaaaaaatttcgaacctcaggccataggaagactcacattgcttcccactttaaacatacggaattaaggaaaatgaggcaccagcgtaaacctgcaaaggtccgtgttggcaagacgaatattccagtccctgatattcctttgcaggaaccaatcctcataactgacttaggtctcatccagcccattccaaaaaaccagtttttccaaagctatttcaataataattttgtcaatgaagcagatagaccatacaagtgtttttactgtcatcgtgcatataaaaaatcttgccaccttaaacaacacatcagatcccatacaggtgaaaaaccttttaaatgttctcagtgtggaagaggctttgtttctgcaggcgtgctcaaagcacacatcagaacacacacaggactgaaatctttcaagtgtctgatatgtaatggggctttcactactggtggcagcttacggcgacacatgggtatccacaacgaccttcgtccctatatgtgtccctattgccaaaaaacatttaagacttcactaaattgcaaaaagcacatgaaaacccacagatatgagcttgcccagcagctccaacagcatcagcaggcagcctcgatagatgacagcactgtagaccagcagagcatgcaggcctccactcaaatgcaggtggagatcgagagcgacgagctgccgcagacggcagaggtggtcgcagcgaaccccgaggccatgctggacctggagcctcagcatgtggtgggcacggaggaagcagggctgggccagcagttggcagatcagcccctggaagcagatgaagatgggtttgtggctccacaggaccctctgcgagggcacgtagaccagtttgaagagcagagccctgcgcaacagtccttcgaaccagcagggctaccccaaggttttacagtgactgatacgtaccatcagcagcctcagtttccacctgtccaacagctacaggattccagcacacttgagtctcaggccctctccacaagcttccaccagcagagcttgctgcaggctcccagctctgatgggatgaatgtaacaactcgcttgattcaggagtcatcccaagaggaactggacctgcaggcacaaggttcccagtttctggaggacaacgaggaccagagcaggcgctcttacaggtgtgactattgcaacaaaggctttaagaagtccagccacctgaagcagcatgtgcggtcgcacaccggggaaaagccctacaagtgcaagctctgtggacgcggctttgtttcctctggggtcctcaagtcccacgagaagacacacacaggagtgaaggcgttcagctgcagtgtgtgcaatgcttccttcaccaccaatggcagcctcacccggcacatggccacacatatgagcatgaagccttataagtgtccgttttgtgaggagggtttccgaactacagtgcattgtaaaaagcacatgaagagacaccaaacagtcccctctgctgtgtcagccactggagagacagaaggaggagacatttgtatggaggaagaggaagaacattctgacagaaatgcatcacggaagtctcgtcctgaggtcatcactttcacggaggaggagacagcccagttagccaagatccggccgcaggagagcgccacggtgtcagagaaggtcctggtgcagtccgcggcagaaaaggaccgcatcagtgagctgagggacaagcaggcggagctgcaggacgagcccaagcacgccaactgctgcacatactgccccaagagcttcaagaaacctagcgacctggtgaggcatgttcgaatccatactggagaaaagccatacaaatgtgatgaatgtggaaagagttttactgtgaaatccactctcgattgtcatgtgaagactcacacaggtcagaagctcttcagctgtcacgtctgcagcaacgccttctccacgaagggaagtctgaaggtccacatgcgcctgcacacgggagccaagcccttcaaatgcccgcattgcgagctgcgtttccgtacctcgggtagaagaaagacacacatgcagtttcattataaaccagacccaaagaaggccagaaagcctatgactcgaagctcatcggaaggactgcagcctgtaaacctcctcaactcctcctctactgacccaaacgtgtttatcatgaacaactctgttctaacaggacagtttgatcagaatctgctgcaaccaggactggtgggccaagctattctccctgcctctgtgtcagctgggggtgacctgaccgtgtctctgacagatgggagcctggctaccctagaaggcatccagttacagttggctgctaacttggttggaccaaatgtacagatttctggaatcgatgctgccagcattaataacattacgttgcagattgatccaagcattctgcagcagacgctacagcagggcaacctattggctcagcagctcacgggggagcctggcctggccccacagaacagctctctccagacatcggacagcacggtccctgccagtgttgtcatccagcccatctcaggcctgtccttacagcccacagtgacctctgcgaacctgaccataggcccgctgtctgagcaggattcagtgctgaccactaacagcagtgggacccaagacctcactcaagtgatgacttcgcaaggtctagtgtccccctccggcggtccccacgagatcaccctgaccattaacaactccagcctgagccaggtcctggcacaggccgctgggcccactgccacgtcttcctcggggtctccacaggaaattaccctgactatctccgaacttaacactacaagcggaagccttccttcaacaacaccgatgtctccatcggccatctcgactcagaacctggtcatgtcctcgtcgggcgtgggaggtgacgctagtgtcacgctgacgctggccgatactcagggtatgctatctggaggcctggacactgtcacactcaacatcacctctcagggtcagcagttcccagcgctcctcacggatccctctctctcgggccagggtggagcaggctcgccgcaagtcatactagtgagccacacgccacagtcagcgtctgctgcttgtgaagaaatagcctaccaggtagctggcgtctctgggaacctggccccgggcaaccagccagagaaggagggccgggcgcaccagtgcctggagtgtgaccgcgccttctcatcggcggcggtgctcatgcaccacagcaaggaggtgcatggccgggagcgcatccacggctgccccgtgtgcaggaaggccttcaagcgcgccacgcacctcaaggagcacatgcagacacaccaggccggcccctctttgagctcccagaagccaagagtgtttaaatgtgacacttgtgagaaggcatttgccaaaccaagccagctggagcgccacagccgcatacatacaggggagcggccgttccattgcacgctttgtgagaaagccttcaaccagaagagtgcgctgcaggtgcacatgaagaagcacacgggggagcggccctacaagtgtgcctactgcgtcatgggcttcacgcagaagagcaacatgaagctgcacatgaagcgggcgcacagctatgctggagctctgcaggagtctgcaggtcacccggagcaggacggggaggagctgagccggaccctccacctggaggaggtggtgcaggaggccgccggcgagtggcaggccctcacccacgtcttctgatgcgagttggaagtacacctttaagaatgtttctgaagttacgttttgtgaagagcaaagcacttggaatctccgttttaaagcttcaagtgttaaaaatgctacaatagttttttatctataaaattatctaaagaatcattgtctttcagagactcataggaaaaaaaaactaggaaaagtgtcaccgcattgttctcttttgtctacaaatcactgaactcaggtactactgtaggcagtttcctcctcagtctcctccgtggctagtgtgtctagttcacgaagcaattaactgggtcttactatcattgtagtgtgatttctttgtattagcaaagacaaaaacgctaacattgaaaaagtatgtcagattttccttcatgtttctggttataagaagcatagcttacaaagcaagcgtaagattgaggcatgaagttcagaaaaaaaagtgttacaacacacagggaagttttttccactcttttctctgtgcattttgaaaattagtcaaaatggactcttttcagtctaccataagttaatataactgataccttgagagatggctggaccaattctctccatgacaaatgtttaatcattagttacaagaatgcagtatctggggcgtcaacatggggactcgagtaaacctgacccaccaataaggattcagctgtccacacgggctggcgacacacttaccgcatcaatctgtgttcaggtccagggttacataattgcagaagcacaagccatacatcgcaggtaggaaaccacagaaccgtctgcaaggagcaagcaacggtggccctgtccaccccagcaaataagaagcatatctgtagcttaaggccacgaatccgtaaaaaccccatgactttctcttcgtgcataaacagatgtatttttgatttcagggaattctttagtatcgtcaatggtgccacataaaacatgtcccaaaccaaatcccacccgtgctgggcagagtgcgtgcacgccattcctacagcattccaaagatggaaggttctttacttcatgttaatttttcctttgaaattatttatatgttctatatataaatacatatgtacatagatatatgggcctctgtgtggctgaacagtatattttgtaaatataagtactagtcctaattgcagaaagagcgtcagtttcacctccccacgagcacttcagatcagtattgtattcattttattcataaatggatatctttttcattgtcatataaagctgggttttatttttttttcctgaaaaataattgcctttattttctctcgttgcctccttggtttcagaagagagtagttttattataaatattgtatggactttgtatattaagagaggagctcatttcagattcctaaagaaatagacattttactgttattttgaaagggcatcttttgatttttttgttgttgttgttcacttttggcatatgtatataagtaatattgacggtgatatgaaaacttttgttatgtgaagatatttaagtcagaaaattgttaaataatattacttcttttccaaactgctttgtgtattgtatatttttttaagaaaaagaaaagccttatttgacttatgcttgtgatactggacttcttaccaatccggaggtttccttccttgaatgtcagtgtgtaaacctggctgtagccgcatatgcagaataactgtaattgtgctagagttttaaaggttctgcttttaatgcactttttattttataattttgtattgaaatattttagaaatgttgattaattttggtgaaaaaatatccccaaagtggaaattattggaattttaaacttttgttcttgctgggttatttattttgattttagcattaaatgtcatctcaggacatctctaaaaggggttgtttaattcctaattgtatagaaagctagtttggtgaattgtattggttaattgactgtttaaggccttaacaggtgaatctagagcctacttttattttggttaaagaaaaagaaaatatcaataattcaattttgtgtcttttctcaatttattagcaaacacaagacattttatgtattatttcgatttacttcctaattataaaagctgcttttttgcagaacattccttgaaaatataaggttttgaaaagacataattttacttgaatctttgtggggtacaggttgatctttatattttactggttgttttaaaaattctagaaaagagatttctaggcctcatgtataaccagggttttgaggataaagaactgtatttttagaactatctcatcatagcatatctgctttggaataactataaataaaagatgaagttagg

SEQ ID NO: 171988 - protein, 677 aa, Artificial Sequence
  derived and/or modified sequence
MDDPDCDSTWEEDEEDAEDAEDEDCEDGEAAGARDADAGDEDEESEEPRAARPSSFQSRMTGSRNWRATRDMCRYRHNYPDLVERDCNGDTPNLSFYRNEIRFLPNGCFIEDILQNWTDNYDLLEDNHSYIQWLFPLREPGVNWHAKPLTLREVEVFKSSQEIQERLVRAYELMLGFYGIRLEDRGTGTVGRAQNYQKRFQNLNWRSHNNLRITRILKSLGELGLEHFQAPLVRFFLEETLVRRELPGVRQSALDYFMFAVRCRHQRRQLVHFAWEHFRPRCKFVWGPQDKLRRFKPSSLPHPLEGSRKVEEEGSPGDPDHEASTQGRTCGPEHSKGGGRVDEGPQPRSVEPQDAGPLERSQGDEAGGHGEDRPEPLSPKESKKRKLELSRREQPPTEPGPQSASEVEKIALNLEGCALSQGSLRTGTQEVGGQDPGEAVQPCRQPLGARVADKVRKRRKVDEGAGDSAAVASGGAQTLALAGSPAPSGHPKAGHSENGVEEDTEGRTGPKEGTPGSPSETPGPSPAGPAGDEPAESPSETPGPRPAGPAGDEPAESPSETPGPRPAGPAGDEPAESPSETPGPSPAGPTRDEPAESPSETPGPRPAGPAGDEPAESPSETPGPRPAGPAGDEPAESPSETPGPSPAGPTRDEPAKAGEAAELQDAEVESSAKSGKP

SEQ ID NO: 171989 - protein, 657 aa, Artificial Sequence
  derived and/or modified sequence
MDDPDCDSTWEEDEEDAEDAEDEDCEDGEAAGARDADAGDEDEESEEPRAARPSSFQSRMTGSRNWRATRDMCRYRHNYPDLVERDCNGDTPNLSFYRNEIRFLPNGCFIEDILQNWTDNYDLLEDNHSYIQWLFPLREPGVNWHAKPLTLREVEVFKSSQEIQERLVRAYELMLGFYGIRLEDRGTGTVGRAQNYQKRFQNLNWRSHNNLRITRILKSLGELGLEHFQAPLVRFFLEETLVRRELPGVRQSALDYFMFAVRCRHQRRQLVHFAWEHFRPRCKFVWGPQDKLRRFKPSSLPHPLEGSRKVEEEGSPGDPDHEASTQGRTCGPEHSKGGGRVDEGPQPRSVEPQDAGPLERSQGDEAGGHGEDRPEPLSPKESKKRKLELSRREQPPTEPGPQSASEVEKIALNLEGCALSQGSLRTGTQEVGGQDPGEAVQPCRQPLGARVADKVRKRRKVDEGAGDSAAVASGGAQTLALAGSPAPSGHPKAGHSENGVEEDTEGRTGPKEGTPGSPSETPGPSPAGPAGDEPAESPSETPGPRPAGPAGDEPAESPSETPGPSPAGPTRDEPAESPSETPGPRPAGPAGDEPAESPSETPGPRPAGPAGDEPAESPSETPGPSPAGPTRDEPAKAGEAAELQDAEVESSAKSGKP

SEQ ID NO: 171990 - protein, 625 aa, Artificial Sequence
  derived and/or modified sequence
MRLPERHGGPQGSLCLMDPCCPLSLALQDLVERDCNGDTPNLSFYRNEIRFLPNGCFIEDILQNWTDNYDLLEDNHSYIQWLFPLREPGVNWHAKPLTLREVEVFKSSQEIQERLVRAYELMLGFYGIRLEDRGTGTVGRAQNYQKRFQNLNWRSHNNLRITRILKSLGELGLEHFQAPLVRFFLEETLVRRELPGVRQSALDYFMFAVRCRHQRRQLVHFAWEHFRPRCKFVWGPQDKLRRFKPSSLPHPLEGSRKVEEEGSPGDPDHEASTQGRTCGPEHSKGGGRVDEGPQPRSVEPQDAGPLERSQGDEAGGHGEDRPEPLSPKESKKRKLELSRREQPPTEPGPQSASEVEKIALNLEGCALSQGSLRTGTQEVGGQDPGEAVQPCRQPLGARVADKVRKRRKVDEGAGDSAAVASGGAQTLALAGSPAPSGHPKAGHSENGVEEDTEGRTGPKEGTPGSPSETPGPSPAGPAGDEPAESPSETPGPRPAGPAGDEPAESPSETPGPRPAGPAGDEPAESPSETPGPSPAGPTRDEPAESPSETPGPRPAGPAGDEPAESPSETPGPRPAGPAGDEPAESPSETPGPSPAGPTRDEPAKAGEAAELQDAEVESSAKSGKP

SEQ ID NO: 171991 - protein, 461 aa, Artificial Sequence
  derived and/or modified sequence
MDDPDCDSTWEEDEEDAEDAEDEDCEDGEAAGARDADAGDEDEESEEPRAARPSSFQSRMTGSRNWRATRDMCRYRHNYPDLVERDCNGDTPNLSFYRNEIRFLPNGCFIEDILQNWTDNYDLLEDNHSYIQWLFPLREPGVNWHAKPLTLREVEVFKSSQEIQERLVRAYELMLGFYGIRLEDRGTGTVGRAQNYQKRFQNLNWRSHNNLRITRILKSLGELGLEHFQAPLVRFFLEETLVRRELPGVRQSALDYFMFAVRCRHQRRQLVHFAWEHFRPRCKFVWGPQDKLRRFKPSSLPHPLEGSRKVEEEGSPGDPDHEASTQGRTCGPEHSKGGGRVDEGPQPRSVEPQDAGPLERSQGDEAGGHGEDRPEPLSPKESKKRKLELSRREQPPTEPGPQSASEVEKIALNLEGCALSQGSLRTGTQEVGGQDPGESSCPCCRGWGLRSCCGLPSGSAS

SEQ ID NO: 171992 - protein, 512 aa, Artificial Sequence
  derived and/or modified sequence
MPSPSRSGRSRCLKAPRRSRSGLSGPTSSCWASTIRLEDRGTGTVGRAQNYQKRFQNLNWRSHNNLRITRILKSLGELGLEHFQAPLVRFFLEETLVRRELPGVRQSALDYFMFAVRCRHQRRQLVHFAWEHFRPRCKFVWGPQDKLRRFKPSSLPHPLEGSRKVEEEGSPGDPDHEASTQGRTCGPEHSKGGGRVDEGPQPRSVEPQDAGPLERSQGDEAGGHGEDRPEPLSPKESKKRKLELSRREQPPTEPGPQSASEVEKIALNLEGCALSQGSLRTGTQEVGGQDPGEAVQPCRQPLGARVADKVRKRRKVDEGAGDSAAVASGGAQTLALAGSPAPSGHPKAGHSENGVEEDTEGRTGPKEGTPGSPSETPGPSPAGPAGDEPAESPSETPGPRPAGPAGDEPAESPSETPGPSPAGPTRDEPAESPSETPGPRPAGPAGDEPAESPSETPGPRPAGPAGDEPAESPSETPGPSPAGPTRDEPAKAGEAAELQDAEVESSAKSGKP

SEQ ID NO: 171993 - protein, 94 aa, Artificial Sequence
  derived and/or modified sequence
MTGSRNWRATRDMCRYRHNYPDLVERDCNGDTPNLSFYRNEIRFLPNGCFIEDILQNWTDNYDLLEDNHSYIQWLFPLREPGVNWHAKPLTLRE

SEQ ID NO: 171994 - DNA, 1974 bp, Artificial Sequence
  derived and/or modified sequence
atggacgaccccgactgcgacagcacctgggaggaggacgaggaggacgccgaggacgccgaggacgaggactgcgaggacggcgaggccgccggcgccagagacgccgacgccggcgacgaggacgaggagagcgaggagcccagagccgccagacccagcagcttccagagcagaatgaccggcagcagaaactggagagccaccagagacatgtgcagatacagacacaactaccccgacctggtggagagagactgcaacggcgacacccccaacctgagcttctacagaaacgagatcagattcctgcccaacggctgcttcatcgaggacatcctgcagaactggaccgacaactacgacctgctggaggacaaccacagctacatccagtggctgttccccctgagagagcccggcgtgaactggcacgccaagcccctgaccctgagagaggtggaggtgttcaagagcagccaggagatccaggagagactggtgagagcctacgagctgatgctgggcttctacggcatcagactggaggacagaggcaccggcaccgtgggcagagcccagaactaccagaagagattccagaacctgaactggagaagccacaacaacctgagaatcaccagaatcctgaagagcctgggcgagctgggcctggagcacttccaggcccccctggtgagattcttcctggaggagaccctggtgagaagagagctgcccggcgtgagacagagcgccctggactacttcatgttcgccgtgagatgcagacaccagagaagacagctggtgcacttcgcctgggagcacttcagacccagatgcaagttcgtgtggggcccccaggacaagctgagaagattcaagcccagcagcctgccccaccccctggagggcagcagaaaggtggaggaggagggcagccccggcgaccccgaccacgaggccagcacccagggcagaacctgcggccccgagcacagcaagggcggcggcagagtggacgagggcccccagcccagaagcgtggagccccaggacgccggccccctggagagaagccagggcgacgaggccggcggccacggcgaggacagacccgagcccctgagccccaaggagagcaagaagagaaagctggagctgagcagaagagagcagccccccaccgagcccggcccccagagcgccagcgaggtggagaagatcgccctgaacctggagggctgcgccctgagccagggcagcctgagaaccggcacccaggaggtgggcggccaggaccccggcgaggccgtgcagccctgcagacagcccctgggcgccagagtggccgacaaggtgagaaagagaagaaaggtggacgagggcgccggcgacagcgccgccgtggccagcggcggcgcccagaccctggccctggccggcagccccgcccccagcggccaccccaaggccggccacagcgagaacggcgtggaggaggacaccgagggcagaaccggccccaaggagggcacccccggcagccccagcgagacccccggccccagccccgccggccccgccggcgacgagcccgccgagagccccagcgagacccccggccccagacccgccggccccgccggcgacgagcccgccgagagccccagcgagacccccggccccagccccgccggccccaccagagacgagcccgccgagagccccagcgagacccccggccccagacccgccggccccgccggcgacgagcccgccgagagccccagcgagacccccggccccagacccgccggccccgccggcgacgagcccgccgagagccccagcgagacccccggccccagccccgccggccccaccagagacgagcccgccaaggccggcgaggccgccgagctgcaggacgccgaggtggagagcagcgccaagagcggcaagccctag

SEQ ID NO: 171995 - DNA, 1878 bp, Artificial Sequence
  derived and/or modified sequence
atgagactgcccgagagacacggcggcccccagggcagcctgtgcctgatggacccctgctgccccctgagcctggccctgcaggacctggtggagagagactgcaacggcgacacccccaacctgagcttctacagaaacgagatcagattcctgcccaacggctgcttcatcgaggacatcctgcagaactggaccgacaactacgacctgctggaggacaaccacagctacatccagtggctgttccccctgagagagcccggcgtgaactggcacgccaagcccctgaccctgagagaggtggaggtgttcaagagcagccaggagatccaggagagactggtgagagcctacgagctgatgctgggcttctacggcatcagactggaggacagaggcaccggcaccgtgggcagagcccagaactaccagaagagattccagaacctgaactggagaagccacaacaacctgagaatcaccagaatcctgaagagcctgggcgagctgggcctggagcacttccaggcccccctggtgagattcttcctggaggagaccctggtgagaagagagctgcccggcgtgagacagagcgccctggactacttcatgttcgccgtgagatgcagacaccagagaagacagctggtgcacttcgcctgggagcacttcagacccagatgcaagttcgtgtggggcccccaggacaagctgagaagattcaagcccagcagcctgccccaccccctggagggcagcagaaaggtggaggaggagggcagccccggcgaccccgaccacgaggccagcacccagggcagaacctgcggccccgagcacagcaagggcggcggcagagtggacgagggcccccagcccagaagcgtggagccccaggacgccggccccctggagagaagccagggcgacgaggccggcggccacggcgaggacagacccgagcccctgagccccaaggagagcaagaagagaaagctggagctgagcagaagagagcagccccccaccgagcccggcccccagagcgccagcgaggtggagaagatcgccctgaacctggagggctgcgccctgagccagggcagcctgagaaccggcacccaggaggtgggcggccaggaccccggcgaggccgtgcagccctgcagacagcccctgggcgccagagtggccgacaaggtgagaaagagaagaaaggtggacgagggcgccggcgacagcgccgccgtggccagcggcggcgcccagaccctggccctggccggcagccccgcccccagcggccaccccaaggccggccacagcgagaacggcgtggaggaggacaccgagggcagaaccggccccaaggagggcacccccggcagccccagcgagacccccggccccagccccgccggccccgccggcgacgagcccgccgagagccccagcgagacccccggccccagacccgccggccccgccggcgacgagcccgccgagagccccagcgagacccccggccccagacccgccggccccgccggcgacgagcccgccgagagccccagcgagacccccggccccagccccgccggccccaccagagacgagcccgccgagagccccagcgagacccccggccccagacccgccggccccgccggcgacgagcccgccgagagccccagcgagacccccggccccagacccgccggccccgccggcgacgagcccgccgagagccccagcgagacccccggccccagccccgccggccccaccagagacgagcccgccaaggccggcgaggccgccgagctgcaggacgccgaggtggagagcagcgccaagagcggcaagccctag

SEQ ID NO: 171996 - DNA, 1386 bp, Artificial Sequence
  derived and/or modified sequence
atggacgaccccgactgcgacagcacctgggaggaggacgaggaggacgccgaggacgccgaggacgaggactgcgaggacggcgaggccgccggcgccagagacgccgacgccggcgacgaggacgaggagagcgaggagcccagagccgccagacccagcagcttccagagcagaatgaccggcagcagaaactggagagccaccagagacatgtgcagatacagacacaactaccccgacctggtggagagagactgcaacggcgacacccccaacctgagcttctacagaaacgagatcagattcctgcccaacggctgcttcatcgaggacatcctgcagaactggaccgacaactacgacctgctggaggacaaccacagctacatccagtggctgttccccctgagagagcccggcgtgaactggcacgccaagcccctgaccctgagagaggtggaggtgttcaagagcagccaggagatccaggagagactggtgagagcctacgagctgatgctgggcttctacggcatcagactggaggacagaggcaccggcaccgtgggcagagcccagaactaccagaagagattccagaacctgaactggagaagccacaacaacctgagaatcaccagaatcctgaagagcctgggcgagctgggcctggagcacttccaggcccccctggtgagattcttcctggaggagaccctggtgagaagagagctgcccggcgtgagacagagcgccctggactacttcatgttcgccgtgagatgcagacaccagagaagacagctggtgcacttcgcctgggagcacttcagacccagatgcaagttcgtgtggggcccccaggacaagctgagaagattcaagcccagcagcctgccccaccccctggagggcagcagaaaggtggaggaggagggcagccccggcgaccccgaccacgaggccagcacccagggcagaacctgcggccccgagcacagcaagggcggcggcagagtggacgagggcccccagcccagaagcgtggagccccaggacgccggccccctggagagaagccagggcgacgaggccggcggccacggcgaggacagacccgagcccctgagccccaaggagagcaagaagagaaagctggagctgagcagaagagagcagccccccaccgagcccggcccccagagcgccagcgaggtggagaagatcgccctgaacctggagggctgcgccctgagccagggcagcctgagaaccggcacccaggaggtgggcggccaggaccccggcgagagcagctgcccctgctgcagaggctggggcctgagaagctgctgcggcctgcccagcggcagcgccagctag

SEQ ID NO: 171997 - DNA, 1539 bp, Artificial Sequence
  derived and/or modified sequence
atgcccagccccagcagaagcggcagaagcagatgcctgaaggcccccagaagaagcagaagcggcctgagcggccccaccagcagctgctgggccagcaccatcagactggaggacagaggcaccggcaccgtgggcagagcccagaactaccagaagagattccagaacctgaactggagaagccacaacaacctgagaatcaccagaatcctgaagagcctgggcgagctgggcctggagcacttccaggcccccctggtgagattcttcctggaggagaccctggtgagaagagagctgcccggcgtgagacagagcgccctggactacttcatgttcgccgtgagatgcagacaccagagaagacagctggtgcacttcgcctgggagcacttcagacccagatgcaagttcgtgtggggcccccaggacaagctgagaagattcaagcccagcagcctgccccaccccctggagggcagcagaaaggtggaggaggagggcagccccggcgaccccgaccacgaggccagcacccagggcagaacctgcggccccgagcacagcaagggcggcggcagagtggacgagggcccccagcccagaagcgtggagccccaggacgccggccccctggagagaagccagggcgacgaggccggcggccacggcgaggacagacccgagcccctgagccccaaggagagcaagaagagaaagctggagctgagcagaagagagcagccccccaccgagcccggcccccagagcgccagcgaggtggagaagatcgccctgaacctggagggctgcgccctgagccagggcagcctgagaaccggcacccaggaggtgggcggccaggaccccggcgaggccgtgcagccctgcagacagcccctgggcgccagagtggccgacaaggtgagaaagagaagaaaggtggacgagggcgccggcgacagcgccgccgtggccagcggcggcgcccagaccctggccctggccggcagccccgcccccagcggccaccccaaggccggccacagcgagaacggcgtggaggaggacaccgagggcagaaccggccccaaggagggcacccccggcagccccagcgagacccccggccccagccccgccggccccgccggcgacgagcccgccgagagccccagcgagacccccggccccagacccgccggccccgccggcgacgagcccgccgagagccccagcgagacccccggccccagccccgccggccccaccagagacgagcccgccgagagccccagcgagacccccggccccagacccgccggccccgccggcgacgagcccgccgagagccccagcgagacccccggccccagacccgccggccccgccggcgacgagcccgccgagagccccagcgagacccccggccccagccccgccggccccaccagagacgagcccgccaaggccggcgaggccgccgagctgcaggacgccgaggtggagagcagcgccaagagcggcaagccctag

SEQ ID NO: 171998 - DNA, 285 bp, Artificial Sequence
  derived and/or modified sequence
atgaccggcagcagaaactggagagccaccagagacatgtgcagatacagacacaactaccccgacctggtggagagagactgcaacggcgacacccccaacctgagcttctacagaaacgagatcagattcctgcccaacggctgcttcatcgaggacatcctgcagaactggaccgacaactacgacctgctggaggacaaccacagctacatccagtggctgttccccctgagagagcccggcgtgaactggcacgccaagcccctgaccctgagagagtag

SEQ ID NO: 171999 - DNA, 1999 bp, Artificial Sequence
  derived and/or modified sequence
agcgcgagccccgccgccgccgagcatggacgaccccgactgcgactccacctgggaggaggacgaggaggatgcggaggacgcggaggacgaggactgcgaggacggcgaggccgccggcgcgagggacgcggacgcaggggacgaggacgaggagtcggaggagccgcgggcggcgcggcccagctcgttccagtccagaatgacagggtccagaaactggcgagccacgagggacatgtgtaggtatcggcacaactatccggatctggtggaacgagactgcaatggggacacgccaaacctgagtttctacagaaatgagatccgcttcctgcccaacggctgtttcattgaggacattcttcagaactggacggacaactatgacctccttgaggacaatcactcctacatccagtggctgtttcctctgcgagaaccaggagtgaactggcatgccaagcccctcacgctcagggaggtcgaggtgtttaaaagctcccaggagatccaggagcggcttgtccgggcctacgagctcatgctgggcttctacgggatccggctggaggaccgaggcacgggcacggtgggccgagcacagaactaccagaagcgcttccagaacctgaactggcgcagccacaacaacctccgcatcacacgcatcctcaagtcgctgggtgagctgggcctcgagcacttccaggcgccgctggtccgcttcttcctggaggagacgctggtgcggcgggagctgccgggggtgcggcagagtgccctggactacttcatgttcgccgtgcgctgccgacaccagcgccgccagctggtgcacttcgcctgggagcacttccggccccgctgcaagttcgtctgggggccccaagacaagctgcggaggttcaagcccagctctctgccccatccgctcgagggctccaggaaggtggaggaggaaggaagccccggggaccccgaccacgaggccagcacccagggtcggacctgtgggccagagcatagcaagggtgggggcagggtggacgaggggccccagccacggagcgtggagccccaggatgcgggacccctggagaggagccagggggatgaggcagggggccacggggaagataggccggagcccttaagccccaaagagagcaagaagaggaagctggagctgagccggcgggagcagccgcccacagagccaggccctcagagtgcctcagaggtggagaagatcgctctgaatttggaggggtgtgccctcagccagggcagcctcaggacggggacccaggaagtgggcggtcaggaccctggggaggcagtgcagccctgccgccaacccctgggagccagggtggccgacaaggtgaggaagcggaggaaggtggatgagggtgctggggacagtgctgcggtggccagtggtggtgcccagaccttggcccttgccgggtcccctgccccatcggggcaccccaaggctggacacagtgagaacggggttgaggaggacacagaaggtcgaacggggcccaaagaaggtacccctgggagcccatcggagaccccaggccccagcccagcaggacctgcaggggacgagccagccgagagcccatcggagaccccaggcccccgcccggcaggacctgcaggggacgagccagccgagagcccatcggagaccccaggccccagcccggcaggacctacaagggatgagccagccgagagcccatcggagaccccaggcccccgcccggcaggacctgcaggggacgagccagccgagagcccatcggagaccccaggcccccgcccggcaggacctgcaggggacgagccagccgagagcccatcggagaccccaggccccagcccggcaggacctacaagggatgagccagccaaggcgggggaggcagcagagttgcaggacgcagaggtggagtcttctgccaagtctgggaagccttaa

SEQ ID NO: 172000 - DNA, 2034 bp, Artificial Sequence
  derived and/or modified sequence
atggacgatcccgactgcgatagcacttgggaggaagatgaggaggatgccgaagacgctgaggatgaggactgcgaagacggagaagccgccggtgcacgcgacgccgacgccggagatgaggatgaagaaagcgaagagccccgcgctgctagaccaagcagctttcagagtcggatgaccgggagccggaattggagggctaccagggacatgtgtcgctatcgacataactaccctgatctcgtagaacgggactgcaacggcgatacccccaacctgtccttttaccgcaatgagattcggttcctgccgaacggctgttttattgaagacattctacaaaactggacggacaattacgatctgctggaggataaccactcctacattcagtggttgtttcctttgcgggagcctggcgttaactggcatgccaaaccactgaccctacgggaagtcgaggtgttcaaatcttcccaggagatccaagaacggctcgtgagagcctatgagctgatgttgggattttacgggatcagattggaggacagaggcactggaacagttgggcgtgcccaaaactatcagaagagattccagaacctgaattggcggagccacaataatctgcgaatcacccggattttaaaatccctcggagagctcggtttggagcactttcaggccccgctagttcggttcttcctcgaagagacgctcgtgcggagagagctaccaggtgtccggcagtccgccttggactatttcatgtttgccgtcaggtgccgtcaccaaaggcggcaactagtgcactttgcctgggaacactttcggccacgctgtaagtttgtgtggggcccacaggacaagctgcgcaggtttaaaccctccagcctgccccatccacttgaagggagccgcaaagttgaagaggagggcagccccggggatcctgatcatgaggcatccactcaagggcggacctgtggaccagaacattctaaaggcgggggccgcgtggacgaggggccccagcctcggtctgttgagccacaagacgcaggtccactggaaagatcccagggtgacgaagctggtggacacggcgaagacagaccagagcctctgtcccccaaggagtcaaagaaacggaagttagagctgtctaggagggaacagcccccaaccgagcccgggccccagtcagcaagcgaggttgaaaagattgctctcaacctcgaggggtgtgctcttagtcagggctcgctgcggacaggaacacaggaagtcggcggccaggaccccggagaagctgtgcagccgtgcagacagccgctgggcgcgcgggtggccgataaagtgaggaaacgcaggaaggttgatgagggcgctggagactccgctgctgtcgcatcaggtggagcgcaaaccctcgctctggcagggtccccagctcctagtggacacccaaaggcaggccatagcgagaacggtgttgaggaggacaccgagggccgcaccggtccaaaggagggaacgcctggcagtccctctgaaacacctggccccagtcccgcgggacctgctggagacgagcccgctgagtctccatctgagacacctgggccacggcctgcaggccccgcaggtgatgagccagccgaatcaccatcggaaacccctgggccccgccctgctggaccagcaggagatgagcccgccgaatctccaagcgagaccccaggcccgtcaccggccgggccaacaagggatgaaccggccgaaagcccatcagagacaccagggccaaggccagccgggcccgccggggacgagccagccgaatccccctccgaaacccccggccctcgccccgcagggcccgcaggtgatgagcctgctgaatctccatcagaaaccccgggtccttcccccgctggtcccacacgtgacgagccagccaaggctggtgaagctgcggaactccaggacgctgaagttgagagctcagccaaaagcgggaaaccgtag

SEQ ID NO: 172001 - DNA, 1974 bp, Artificial Sequence
  derived and/or modified sequence
atggacgacccggactgcgacagcacttgggaggaagatgaggaggatgccgaagacgctgaggatgaggattgcgaagacggagaagctgccggagcaagggacgccgacgccggcgacgaggacgaggaaagtgaggagccacgcgctgccagaccatcctcctttcagtctaggatgaccgggtcaagaaactggagggccactcgtgatatgtgccggtatcggcataattacccagacctggtggaaagagactgcaacggcgatacccccaacctgagcttttatcggaatgagattcggtttttgcccaacggatgctttatagaagatatactgcaaaactggacagacaactacgacctgctggaggacaaccatagctatattcagtggctgttccctttacgggagcccggagtcaattggcacgcaaaaccccttacactgagagaggtcgaggttttcaagagttctcaggagatccaggaacgcctcgttagggcgtatgagctgatgttaggtttttacggaataagattggaagatagagggacgggtacagttggccgggcacagaattaccagaaaagatttcagaacttgaactggaggagccacaataacctgcggataactagaatactaaagagtttaggagagctggggctcgagcacttccaggcacccctcgtgagatttttcttggaagagaccctcgtgcggagggagctgcccggtgtgagacagtccgctttggactatttcatgtttgccgtgagatgccggcaccagcgtaggcagctggtccattttgcatgggagcacttccgccccagatgtaagttcgtgtggggtcctcaggacaaattaaggcggttcaaaccctctagtctgcctcacccgctcgaaggcagcagaaaagtcgaagaggaggggtcacctggcgacccagaccatgaagcttccacccaggggagaacgtgcgggccagaacattcaaagggcggcggacgggtcgacgagggaccccaaccgcgcagtgtggagccccaggacgctgggcctcttgagcgctcccagggcgacgaggctgggggtcatggagaggacagacccgagcccttgagtccgaaggagtcaaaaaagaggaaattagagctctcccgccgagagcagccgcccacagagccaggtccacagtcagctagcgaggtcgagaaaattgcacttaacctggagggctgtgccctctcacagggttccctgcgcactggcacgcaagaggttgggggccaggaccccggcgaggccgtgcagccgtgccggcaaccattaggcgcccgagtagccgacaaggtaagaaagaggcgtaaagtcgacgaaggagccggcgatagcgccgcagttgcctctggaggcgctcagactcttgccctggcgggctcgccagctccctcgggccaccccaaggccggtcatagcgaaaacggagttgaagaggacacagaaggcagaacaggcccgaaggaaggaactccagggagtccatccgagacgcctggcccctcacccgctggacctgccggcgacgaacccgccgaaagtcccagtgaaactcccggccccagaccagccggaccggctggcgatgagccagctgagagtccatccgaaactccgggcccaagtcctgcaggcccaacccgcgatgaacctgcagaatctcctagcgagacgcccgggccccgtcctgccggtccagctggcgatgagcctgctgaaagtccatctgagacacccggtcctagacccgccggacctgcaggcgacgagcctgcagagagcccgtcggagactccaggaccttctcctgcaggtcctaccagagacgagccagccaaagcgggtgaggcggcagaactgcaggacgccgaagtggagagttccgctaagtccgggaaaccctag

SEQ ID NO: 172002 - DNA, 1878 bp, Artificial Sequence
  derived and/or modified sequence
atgcgcctgcctgaacgtcacggcggcccccagggcagcctctgcctgatggatccatgttgccccctatctctcgctctacaggatttagtggaacgagattgcaacggagacactcctaacctcagcttctaccggaacgaaatccggttcctgccgaacggctgttttatcgaagacatcctccagaattggaccgacaactatgacctgctggaggacaatcacagttatattcaatggctatttccgctaagggagcccggtgttaactggcatgccaaacccctgactctgcgcgaagttgaggtcttcaagtcttcacaggaaatccaggagaggctcgtcagggcatacgagctgatgttggggttctatgggattagactggaagatagaggaaccggtactgtgggcagagcccaaaactaccaaaagcgctttcaaaacctcaactggaggtctcataataatctacgcattacccggatcttgaagagtctgggtgaactcggactggagcatttccaggcacctttagtcagatttttcctggaggagacgctggtgcgccgtgaactgccgggggtaaggcagagcgccctcgactacttcatgtttgctgtaaggtgtcggcatcaacgaaggcagctggtacatttcgcatgggagcattttagaccccgctgtaaattcgtctggggaccacaagacaagctgagacgctttaagccctcttcactcccccacccgctggaaggctcaaggaaggttgaggaagaggggtctccaggagacccggaccatgaagctagcacgcagggtcggacctgtggaccggagcactctaagggcgggggccgtgtggacgaaggcccgcagcctagaagcgtcgaacctcaagacgccggacctctggaacgctctcagggcgatgaggccggggggcacggtgaggaccgtccagagcctctgtctcctaaagagtctaagaagcggaaactggaactatcccgccgagagcaacctccgaccgagcccggacctcagagtgcgtctgaggtggagaaaatagcccttaacttggaaggctgtgcactgagccaagggagcctgcgtactggcacgcaggaggtgggagggcaggaccctggtgaggccgtccaaccctgtaggcagccgctgggcgccagggtggcggacaaagtcagaaagcgccggaaagtggacgagggggctggtgacagcgctgctgtggctagtggcggagcgcagactcttgccttggccggcagtcccgcaccttcaggccaccccaaagctggacactccgaaaacggcgtcgaggaggacacggaagggcgcaccggccccaaagaaggaactcccggttccccttctgagacccccggaccctcacctgccggaccagccggagacgagcctgccgaaagcccttctgagactcccggccctcggcctgcaggccccgccggtgatgagcctgccgaaagccccagcgaaacccccggcccacggccggctgggcccgctggggatgaacccgctgagagtcccagcgaaactcccggtccttcccctgccggtcccaccagagacgaaccggctgagtctccatctgagactcccggccccaggcctgccggcccagctggagacgagcccgcagagagtccttctgagacaccaggccccaggcccgctgggccagccggtgatgaaccagctgaatcccctagcgagacacctggccctagccctgccggccctacccgggacgagcctgcaaaggctggagaagccgccgagctgcaggacgcggaggtggagtctagcgctaaaagtgggaagccttag

SEQ ID NO: 172003 - DNA, 1386 bp, Artificial Sequence
  derived and/or modified sequence
atggatgatcccgactgcgactccacctgggaggaagacgaggaagatgctgaggatgccgaggacgaggactgtgaggacggagaagcagccggcgctcgtgatgctgatgctggcgatgaggatgaggagtccgaagaaccccgagcagctcgtcctagttctttccagagtcgaatgaccgggtctaggaattggcgggccacccgggatatgtgcaggtaccgccataactaccctgatttagttgagagggactgcaacggagacacacctaatctctcattttatagaaacgagatcagatttctgcccaatggatgttttattgaggacattctacagaattggaccgacaactatgacctattagaggacaaccactcatatatacaatggctgttccctttgcgcgaacccggagtcaactggcatgccaagcctctgacacttagggaagtcgaggttttcaaaagttctcaggagatccaggagcggcttgtgagggcgtatgagctgatgttaggcttttatgggataaggcttgaagatagaggtactggcactgtgggaagggcccagaattatcagaaacggttccagaacctgaattggcggagtcacaataacctccgcattacccgaatactcaagagtctcggcgagctaggcttggagcacttccaggctccactggtgcggttcttccttgaagagaccctggtaaggagggagttgcctggcgtgcgccagagcgcgctcgattattttatgtttgccgttaggtgtcgtcatcagcgaaggcaactggttcacttcgcctgggagcactttaggccccgttgcaagttcgtgtggggcccccaagataagctgaggagatttaagccctcatccctcccacaccctttagagggcagcaggaaggtagaagaagaagggagccccggggaccccgatcacgaagcgtcaacacagggcagaacatgcggccctgaacacagtaagggaggagggagggtcgatgagggcccccagccccgttctgtggaaccccaggacgcaggcccattggaaaggtcccagggcgacgaagcgggtggccatggagaggatagacccgaacccctcagccctaaagaatccaagaagagaaaattagaactgtccaggcgggagcagccccccaccgaaccaggtccgcagtcagcgtccgaagttgagaaaatcgcgctcaatctggaaggctgcgccctgtcccaaggttcactgcgaacagggacacaggaagtcggaggtcaggaccccggagagagctcttgtccctgttgtaggggctggggactgaggagctgttgtggattgccttctggctctgcttcctag

SEQ ID NO: 172004 - DNA, 1539 bp, Artificial Sequence
  derived and/or modified sequence
atgccctctccaagccgatccggacgctctaggtgcctcaaggcaccacggaggtctcggagcggactgagcggtcctactagcagctgctgggcgtcaacaatccgcctggaggatcgcggcaccggcaccgtgggtcgcgcgcagaactaccaaaaacggtttcaaaacctcaattggcgcagccacaacaacctgagaatcacccggattttgaaaagcttaggcgaactgggactcgagcacttccaagcgcccctcgtcagattctttcttgaagagacactcgtcaggagggaattgcccggggttagacagtccgctttagactattttatgttcgcggtgcgttgtcgccatcagaggaggcaattagttcactttgcctgggagcactttagacctcgctgcaaatttgtgtgggggccccaggacaagctgcgacggttcaaaccatcatcattgcctcacccactggagggatcacggaaggtggaagaggaggggagcccaggagatcccgaccacgaagcctctacacaggggcgcacctgcggtcccgaacacagcaagggtgggggtagagtcgatgagggtccccagccccggtctgtcgaacctcaagacgctggcccgctcgagcgctcccagggagatgaggccggcggccacggtgaggatagacctgagccattgagccctaaggagagtaagaaacgcaagcttgaactgtcccgacgcgaacaacctccgactgagcctggcccccagtctgcatccgaggtggagaagatcgccctgaatctcgaagggtgtgccttaagccagggatctctcagaactggtacacaggaggttggtggccaggatcctggcgaggcagtgcagccttgccgccagccactgggcgcccgtgttgctgacaaggttaggaaaaggcggaaagtggatgagggcgccggggatagcgccgctgtcgcttcaggtggagcccagactctggctctggccggaagccctgctcctagtggccatcctaaagcaggtcactccgagaatggtgtggaagaagacaccgaaggtaggacaggcccaaaggagggcacgcccggctctccatccgaaactcctggtccatctcctgctgggccagcaggagatgagcctgcagaaagccctagcgagactcccggcccccggcccgctggaccggcgggagatgagccagctgagtccccctctgagactccaggaccgagtccagctggcccaacccgggacgagcccgccgagtctccttccgagacccccgggccacgtccagccggacctgcgggagacgagcctgctgagtccccctccgaaaccccggggcctcggcccgccggcccggccggagatgagcctgctgaaagcccctccgaaacgcccggaccgagccccgccgggccgacccgggacgagccagcaaaggccggagaagctgctgaactacaggacgccgaggtggagtcctcggcgaaaagcggaaaaccgtag

SEQ ID NO: 172005 - DNA, 285 bp, Artificial Sequence
  derived and/or modified sequence
atgacgggctctcgcaattggagggctactcgggacatgtgtcggtaccggcacaactatcctgatttagttgaaagggattgcaacggagatactcctaatctcagcttctaccgcaatgaaattagatttctccctaatgggtgtttcatcgaggatatcctgcagaactggacagacaattacgacttactcgaggacaatcactcttatatccaatggctgttccccctgcgcgaacccggcgtcaattggcatgccaagccccttactcttcgcgaatag

SEQ ID NO: 172006 - DNA, 4506 bp, Artificial Sequence
  derived and/or modified sequence
actggagttcctcaggccgctctcctgaagcggtgctcagaggccctgaccatcctgccaggcgcccgtgacccctgacctcttccctctgcctcctgctgtggcttctgtccacaagcccctccccttcccctttggacccctcaggcctccccagctgcctgcgctggaccctggcggggctgtttcactttttcctgggcagtgtcatgtatgcacctgtgggctgactgtgtggccacatccagtcaggacccagcctccagaactgacccagggaggctcccgctggccccaggaaggagaagtagaaactgatgatcaggcggggcgagagaaccacaccagcggccctgttgagaaatcaggccgagaggtcggtggcggtggctcaggcctgtaatcccagcactttcggaggcctgggcagtcggatcaccagaggtcaggagtccaagattagcctggccaacatggtgaaactgttgtctctactaaaaatacaacattagccaggcgtgatgggcacctgtaatcccagttcctccagagattgaagcaggagaatcgcttaaacctgggaggtggaggttgcagtgagtggagattgcctgggaggtggaggttgcagtgagtggagattgcctgggaggtggagattgcatgaagctccatctcgaggggaaaaaaataagaaagaaaaatcaggcagagaggcaacgccaggtcccagctggagctcagcggggagccaggggatacagtggctgaccgggcctcctaaccccccttctagcactcccccaggatcctgggtcccaattgttgccctggacaaatacgcccattcctgccctacccaccgagtgaggctcagccccaggccccccaccctcatcacaaggtcagggctgtgtcccaccatcctcatcactaggtacttccggccctttgctcagccccatgatgcttggcctgcagagatgggggctgaagggcttggggcatcaaggggacctgacatcttgctgagaagccatcactagacagggctggaggctggagactcagggcctgccctcaccgtggccagtgaggcgtggggttgggcagggaaggggcattcattcattagaccctgccagaagcacctgggtccccttctggggctacaggtggtgaggccactgcccccaagaacacagcctggtgactttagtgtacaaagcagggggagtctccaggggcacagaacagaggctaaagccagggtggaggtggccagcaggcctaggaggaggagagggtcagggccacaccccaggggaggtgcatgtcagccaggggccaccctaaggtggaagccaggagtcccaaaggggcctagagaaggagcagccccccacctggctaccgcagccctctctggttctgtgcagggtattgggatgcgttactgaggcccaaatctgccccactgggaacccccaaaaaagagccagggcaggagaatgagagggaggagccatgaaacccccgccctttaaagacagctctgtggcagctggcccaggccctgcagccctcaccacgttgggactcacttgggggtctcccatgggggtcctaatcccatctcttttcttcccagtccagaatgacagggtccagaaactggcgagccacgagggacatgtgtaggtatcggcacaactatccggtacgtacctgcccctgccccgggacacagaaccctcccgccagctgctcttctcaggcagaatgtcccaggttctactggaaggctggcctggcttgctgtgccagggccacagttctgggcaggaccctgcctggggcacagcctggtatagattcagagccctgcccttcccctctcgcgggagaccgggggcatccccctacttttctgagcttcagcacaccgtcgccttgcaaacatggccatagtgccagcctcgtgatgcacacgtgtggggtccgtgataccgcccacacagcaccccacccccatgccagccctgtctcctgcaggttgtcctcagccattaccctccacacccctgaatcacggaaacccctgtgctgccttcagggtgctgaggaggggacctgccaggcctggcctggctggcgaaatggggaaggggggtccctggggcttggaggcagctgctgtcctctgaatggcccccacctgcagagtgaggagccaggcgggctcttggggtattgggccagcctggaggtttgcagatgcgcctccccgaaagacacggagggccccagggcagcttgtgtctgatggatccctgctgtcccctttctctggctcttcaggatctggtggaacgagactgcaatggggacacgccaaacctgagtttctacagaaatgagatccgcttcctgcccaacggctgtttcattgaggacattcttcagaactggacggacaactatgacctccttgaggacaatcactcctacatccagtggctgtttcctctgcgagaaccaggagtgaactggcatgccaagcccctcacgctcagggaggtcgaggtgtttaaaagctcccaggagatccaggagcggcttgtccgggcctacgagctcatgctgggcttctacgggatccggctggaggaccgaggcacgggcacggtgggccgagcacagaactaccagaagcgcttccagaacctgaactggcgcagccacaacaacctccgcatcacacgcatcctcaagtcgctgggtgagctgggcctcgagcacttccaggcgccgctggtccgcttcttcctggaggagacgctggtgcggcgggagctgccgggggtgcggcagagtgccctggactacttcatgttcgccgtgcgctgccgacaccagcgccgccagctggtgcacttcgcctgggagcacttccggccccgctgcaagttcgtctgggggccccaagacaagctgcggaggttcaagcccagctctctgccccatccgctcgagggctccaggaaggtggaggaggaaggaagccccggggaccccgaccacgaggccagcacccagggtcggacctgtgggccagagcatagcaagggtgggggcagggtggacgaggggccccagccacggagcgtggagccccaggatgcgggacccctggagaggagccagggggatgaggcagggggccacggggaagataggccggagcccttaagccccaaagagagcaagaagaggaagctggagctgagccggcgggagcagccgcccacagagccaggccctcagagtgcctcagaggtggagaagatcgctctgaatttggaggggtgtgccctcagccagggcagcctcaggacggggacccaggaagtgggcggtcaggaccctggggaggcagtgcagccctgccgccaacccctgggagccagggtggccgacaaggtgaggaagcggaggaaggtggatgagggtgctggggacagtgctgcggtggccagtggtggtgcccagaccttggcccttgccgggtcccctgccccatcggggcaccccaaggctggacacagtgagaacggggttgaggaggacacagaaggtcgaacggggcccaaagaaggtacccctgggagcccatcggagaccccaggccccagcccagcaggacctgcaggggacgagccagccgagagcccatcggagaccccaggcccccgcccagcaggacctgcaggggacgagccagccgagagcccatcggagaccccaggcccccgcccggcaggacctgcaggggacgagccagccgagagcccatcggagaccccaggccccagcccggcaggacctacaagggatgagccagccgagagcccatcggagaccccaggcccccgcccggcaggacctgcaggggacgagccagccgagagcccatcggagaccccaggcccccgcccggcaggacctgcaggggacgagccagccgagagcccatcggagaccccaggccccagcccggcaggacctacaagggatgagccagccaaggcgggggaggcagcagagttgcaggacgcagaggtggagtcttctgccaagtctgggaagccttaaggaaaggagtgcccgtcggcgtcttggtcctcctgtccctgctgcaggggctggggcctccggagctgctgcgggctcccctcaggctctgcttcgtgacccgtgacccatgacccacagtgctggcctcctgtggggccactatagcagccaccagaagccgcgaggccctcagggaagcccaaggcctgcagaagcctcctggcctggctgtgtcttccccacccagctctcccctgcgcccctgtctttgtaaattgacccttctggagtggggggcggcgggcagggctgcttttcttagtctgataccaagcaaggccttttctgaataaattcatttgactttga

SEQ ID NO: 172007 - DNA, 1663 bp, Artificial Sequence
  derived and/or modified sequence
agcgcgagccccgccgccgccgagcatggacgaccccgactgcgactccacctgggaggaggacgaggaggatgcggaggacgcggaggacgaggactgcgaggacggcgaggccgccggcgcgagggacgcggacgcaggggacgaggacgaggagtcggaggagccgcgggcggcgcggcccagctcgttccagtccagaatgacagggtccagaaactggcgagccacgagggacatgtgtaggtatcggcacaactatccggatctggtggaacgagactgcaatggggacacgccaaacctgagtttctacagaaatgagatccgcttcctgcccaacggctgtttcattgaggacattcttcagaactggacggacaactatgacctccttgaggacaatcactcctacatccagtggctgtttcctctgcgagaaccaggagtgaactggcatgccaagcccctcacgctcagggaggtcgaggtgtttaaaagctcccaggagatccaggagcggcttgtccgggcctacgagctcatgctgggcttctacgggatccggctggaggaccgaggcacgggcacggtgggccgagcacagaactaccagaagcgcttccagaacctgaactggcgcagccacaacaacctccgcatcacacgcatcctcaagtcgctgggtgagctgggcctcgagcacttccaggcgccgctggtccgcttcttcctggaggagacgctggtgcggcgggagctgccgggggtgcggcagagtgccctggactacttcatgttcgccgtgcgctgccgacaccagcgccgccagctggtgcacttcgcctgggagcacttccggccccgctgcaagttcgtctgggggccccaagacaagctgcggaggttcaagcccagctctctgccccatccgctcgagggctccaggaaggtggaggaggaaggaagccccggggaccccgaccacgaggccagcacccagggtcggacctgtgggccagagcatagcaagggtgggggcagggtggacgaggggccccagccacggagcgtggagccccaggatgcgggacccctggagaggagccagggggatgaggcagggggccacggggaagataggccggagcccttaagccccaaagagagcaagaagaggaagctggagctgagccggcgggagcagccgcccacagagccaggccctcagagtgcctcagaggtggagaagatcgctctgaatttggaggggtgtgccctcagccagggcagcctcaggacggggacccaggaagtgggcggtcaggaccctggggagtcctcctgtccctgctgcaggggctggggcctccggagctgctgcgggctcccctcaggctctgcttcgtgacccgtgacccatgacccacagtgctggcctcctgtggggccactatagcagccaccagaagccgcgaggccctcagggaagcccaaggcctgcagaagcctcctggcctggctgtgtcttccccacccagctctcccctgcgcccctgtctttgtaaattgacccttctggagtggggggcggcgggcagggctgcttttcttagtctgataccaagcaaggccttttctgaataaattcatttgactttga

SEQ ID NO: 172008 - DNA, 1997 bp, Artificial Sequence
  derived and/or modified sequence
agcgcgagccccgccgccgccgagcatggacgaccccgactgcgactccacctgggaggaggacgaggaggatgcggaggacgcggaggacgaggactgcgaggacggcgaggccgccggcgcgagggacgcggacgcaggggacgaggacgaggagtcggaggagccgcgggcggcgcggcccagctcgttccagtccagaatgacagggtccagaaactggcgagccacgagggacatgtgtaggtatcggcacaactatccggatctggtggaacgagactgcaatggggacacgccaaacctgagtttctacagaaatgagatccgcttcctgcccaacggctgtttcattgaggacattcttcagaactggacggacaactatgacctccttgaggacaatcactcctacatccagtggctgtttcctctgcgagaaccaggagtgaactggcatgccaagcccctcacgctcagggaggtcgaggtgtttaaaagctcccaggagatccaggagcggcttgtccgggcctacgagctcatgctgggcttctacgatccggctggaggaccgaggcacgggcacggtgggccgagcacagaactaccagaagcgcttccagaacctgaactggcgcagccacaacaacctccgcatcacacgcatcctcaagtcgctgggtgagctgggcctcgagcacttccaggcgccgctggtccgcttcttcctggaggagacgctggtgcggcgggagctgccgggggtgcggcagagtgccctggactacttcatgttcgccgtgcgctgccgacaccagcgccgccagctggtgcacttcgcctgggagcacttccggccccgctgcaagttcgtctgggggccccaagacaagctgcggaggttcaagcccagctctctgccccatccgctcgagggctccaggaaggtggaggaggaaggaagccccggggaccccgaccacgaggccagcacccagggtcggacctgtgggccagagcatagcaagggtgggggcagggtggacgaggggccccagccacggagcgtggagccccaggatgcgggacccctggagaggagccagggggatgaggcagggggccacggggaagataggccggagcccttaagccccaaagagagcaagaagaggaagctggagctgagccggcgggagcagccgcccacagagccaggccctcagagtgcctcagaggtggagaagatcgctctgaatttggaggggtgtgccctcagccagggcagcctcaggacggggacccaggaagtgggcggtcaggaccctggggaggcagtgcagccctgccgccaacccctgggagccagggtggccgacaaggtgaggaagcggaggaaggtggatgagggtgctggggacagtgctgcggtggccagtggtggtgcccagaccttggcccttgccgggtcccctgccccatcggggcaccccaaggctggacacagtgagaacggggttgaggaggacacagaaggtcgaacggggcccaaagaaggtacccctgggagcccatcggagaccccaggccccagcccagcaggacctgcaggggacgagccagccgagagcccatcggagaccccaggcccccgcccggcaggacctgcaggggacgagccagccgagagcccatcggagaccccaggccccagcccggcaggacctacaagggatgagccagccgagagcccatcggagaccccaggcccccgcccggcaggacctgcaggggacgagccagccgagagcccatcggagaccccaggcccccgcccggcaggacctgcaggggacgagccagccgagagcccatcggagaccccaggccccagcccggcaggacctacaagggatgagccagccaaggcgggggaggcagcagagttgcaggacgcagaggtggagtcttctgccaagtctgggaagccttaa

SEQ ID NO: 172009 - DNA, 2034 bp, Artificial Sequence
  derived and/or modified sequence
atggatgatcctgactgtgacagcacctgggaggaggatgaagaagatgctgaagatgctgaagatgaggactgtgaagatggagaggccgccggggccagagatgctgatgctggagatgaagatgaggagagcgaggagccccgggccgcccggcccagcagcttccagagcaggatgacaggcagcaggaactggagggccacccgggacatgtgccgctaccgccacaactacccagacctggtggagcgggactgcaatggagacacccccaacctgtccttctacagaaatgagatccgcttcctgcccaacggctgcttcatcgaggacatcctgcagaactggacagacaactatgacctgctggaggacaaccacagctacatccagtggctgttccccctgcgggagcccggggtgaactggcacgccaagcccctgaccctgcgggaggtggaggtgttcaagagcagccaggagatccaggagcggctggtgcgggcctatgagctgatgctgggcttctacggcatccggctggaggaccggggcactggaacagtgggccgggcccagaactaccagaagcgcttccagaacctgaactggaggagccacaacaacctgcgcatcacccgcatcctgaagagcctgggggagctgggcctggagcacttccaggcccccctggtgcgcttcttcctggaggagaccctggtgagaagagagctgcccggggtgcggcagagcgccctggactacttcatgtttgctgtgcgctgccgccaccagaggcggcagctggtgcactttgcctgggagcacttccggccccgctgcaagtttgtgtggggcccccaggacaagctgcggcgcttcaagcccagcagcctgccccaccccctggagggcagcaggaaggtggaggaggagggcagccctggggaccctgaccacgaggccagcacccagggccgcacctgtggccctgagcacagcaagggcggcggccgggtggatgagggcccccagcccaggtctgtggagccccaggatgctggccccctggagaggagccagggagatgaggccggcggccatggagaagatagacctgagcccctgagccccaaggagagcaagaagaggaagctggagctgagcagaagagagcagcccccaacagagcccggcccccagagcgccagcgaggtggagaagatcgccctgaacctggagggctgtgccctgagccagggcagcctgaggacaggcacccaggaggtgggcggccaggaccccggggaggccgtgcagccctgccggcagcccctgggcgcccgggtggccgacaaggtgaggaagaggaggaaggtggatgagggcgctggggacagcgctgctgtggccagcggcggggcccagaccctggccctggccggcagccctgcccccagcggccaccccaaggccggccacagtgaaaatggagtggaggaggacacagagggccgcacaggccccaaggagggcaccccaggcagccccagcgagaccccaggccccagccctgctggccctgctggagatgagcctgctgagagccccagcgagaccccaggccccaggcctgctggccctgctggagatgagcctgctgagagccccagcgagaccccaggccccaggcctgctggccctgctggagatgagcctgctgagagccccagcgagaccccaggccccagccctgctggccccaccagagatgagcctgctgagagccccagcgagaccccaggccccaggcctgctggccctgctggagatgagcctgctgagagccccagcgagaccccaggccccaggcctgctggccctgctggagatgagcctgctgagagccccagcgagaccccaggccccagccctgctggccccaccagagatgagcccgccaaggccggggaggccgctgagctgcaggatgctgaggtggagagcagcgccaagagcggcaagccctag

SEQ ID NO: 172010 - DNA, 1974 bp, Artificial Sequence
  derived and/or modified sequence
atggatgatcctgactgtgacagcacctgggaggaggatgaagaagatgctgaagatgctgaagatgaggactgtgaagatggagaggccgccggggccagagatgctgatgctggagatgaagatgaggagagcgaggagccccgggccgcccggcccagcagcttccagagcaggatgacaggcagcaggaactggagggccacccgggacatgtgccgctaccgccacaactacccagacctggtggagcgggactgcaatggagacacccccaacctgtccttctacagaaatgagatccgcttcctgcccaacggctgcttcatcgaggacatcctgcagaactggacagacaactatgacctgctggaggacaaccacagctacatccagtggctgttccccctgcgggagcccggggtgaactggcacgccaagcccctgaccctgcgggaggtggaggtgttcaagagcagccaggagatccaggagcggctggtgcgggcctatgagctgatgctgggcttctacggcatccggctggaggaccggggcactggaacagtgggccgggcccagaactaccagaagcgcttccagaacctgaactggaggagccacaacaacctgcgcatcacccgcatcctgaagagcctgggggagctgggcctggagcacttccaggcccccctggtgcgcttcttcctggaggagaccctggtgagaagagagctgcccggggtgcggcagagcgccctggactacttcatgtttgctgtgcgctgccgccaccagaggcggcagctggtgcactttgcctgggagcacttccggccccgctgcaagtttgtgtggggcccccaggacaagctgcggcgcttcaagcccagcagcctgccccaccccctggagggcagcaggaaggtggaggaggagggcagccctggggaccctgaccacgaggccagcacccagggccgcacctgtggccctgagcacagcaagggcggcggccgggtggatgagggcccccagcccaggtctgtggagccccaggatgctggccccctggagaggagccagggagatgaggccggcggccatggagaagatagacctgagcccctgagccccaaggagagcaagaagaggaagctggagctgagcagaagagagcagcccccaacagagcccggcccccagagcgccagcgaggtggagaagatcgccctgaacctggagggctgtgccctgagccagggcagcctgaggacaggcacccaggaggtgggcggccaggaccccggggaggccgtgcagccctgccggcagcccctgggcgcccgggtggccgacaaggtgaggaagaggaggaaggtggatgagggcgctggggacagcgctgctgtggccagcggcggggcccagaccctggccctggccggcagccctgcccccagcggccaccccaaggccggccacagtgaaaatggagtggaggaggacacagagggccgcacaggccccaaggagggcaccccaggcagccccagcgagaccccaggccccagccctgctggccctgctggagatgagcctgctgagagccccagcgagaccccaggccccaggcctgctggccctgctggagatgagcctgctgagagccccagcgagaccccaggccccagccctgctggccccaccagagatgagcctgctgagagccccagcgagaccccaggccccaggcctgctggccctgctggagatgagcctgctgagagccccagcgagaccccaggccccaggcctgctggccctgctggagatgagcctgctgagagccccagcgagaccccaggccccagccctgctggccccaccagagatgagcccgccaaggccggggaggccgctgagctgcaggatgctgaggtggagagcagcgccaagagcggcaagccctag

SEQ ID NO: 172011 - DNA, 1878 bp, Artificial Sequence
  derived and/or modified sequence
atgaggctgcctgagagacatggaggcccccagggcagcctgtgcctgatggacccctgctgccccctgagcctggccctgcaggacctggtggagcgggactgcaatggagacacccccaacctgtccttctacagaaatgagatccgcttcctgcccaacggctgcttcatcgaggacatcctgcagaactggacagacaactatgacctgctggaggacaaccacagctacatccagtggctgttccccctgcgggagcccggggtgaactggcacgccaagcccctgaccctgcgggaggtggaggtgttcaagagcagccaggagatccaggagcggctggtgcgggcctatgagctgatgctgggcttctacggcatccggctggaggaccggggcactggaacagtgggccgggcccagaactaccagaagcgcttccagaacctgaactggaggagccacaacaacctgcgcatcacccgcatcctgaagagcctgggggagctgggcctggagcacttccaggcccccctggtgcgcttcttcctggaggagaccctggtgagaagagagctgcccggggtgcggcagagcgccctggactacttcatgtttgctgtgcgctgccgccaccagaggcggcagctggtgcactttgcctgggagcacttccggccccgctgcaagtttgtgtggggcccccaggacaagctgcggcgcttcaagcccagcagcctgccccaccccctggagggcagcaggaaggtggaggaggagggcagccctggggaccctgaccacgaggccagcacccagggccgcacctgtggccctgagcacagcaagggcggcggccgggtggatgagggcccccagcccaggtctgtggagccccaggatgctggccccctggagaggagccagggagatgaggccggcggccatggagaagatagacctgagcccctgagccccaaggagagcaagaagaggaagctggagctgagcagaagagagcagcccccaacagagcccggcccccagagcgccagcgaggtggagaagatcgccctgaacctggagggctgtgccctgagccagggcagcctgaggacaggcacccaggaggtgggcggccaggaccccggggaggccgtgcagccctgccggcagcccctgggcgcccgggtggccgacaaggtgaggaagaggaggaaggtggatgagggcgctggggacagcgctgctgtggccagcggcggggcccagaccctggccctggccggcagccctgcccccagcggccaccccaaggccggccacagtgaaaatggagtggaggaggacacagagggccgcacaggccccaaggagggcaccccaggcagccccagcgagaccccaggccccagccctgctggccctgctggagatgagcctgctgagagccccagcgagaccccaggccccaggcctgctggccctgctggagatgagcctgctgagagccccagcgagaccccaggccccaggcctgctggccctgctggagatgagcctgctgagagccccagcgagaccccaggccccagccctgctggccccaccagagatgagcctgctgagagccccagcgagaccccaggccccaggcctgctggccctgctggagatgagcctgctgagagccccagcgagaccccaggccccaggcctgctggccctgctggagatgagcctgctgagagccccagcgagaccccaggccccagccctgctggccccaccagagatgagcccgccaaggccggggaggccgctgagctgcaggatgctgaggtggagagcagcgccaagagcggcaagccctag

SEQ ID NO: 172012 - DNA, 1386 bp, Artificial Sequence
  derived and/or modified sequence
atggatgatcctgactgtgacagcacctgggaggaggatgaagaagatgctgaagatgctgaagatgaggactgtgaagatggagaggccgccggggccagagatgctgatgctggagatgaagatgaggagagcgaggagccccgggccgcccggcccagcagcttccagagcaggatgacaggcagcaggaactggagggccacccgggacatgtgccgctaccgccacaactacccagacctggtggagcgggactgcaatggagacacccccaacctgtccttctacagaaatgagatccgcttcctgcccaacggctgcttcatcgaggacatcctgcagaactggacagacaactatgacctgctggaggacaaccacagctacatccagtggctgttccccctgcgggagcccggggtgaactggcacgccaagcccctgaccctgcgggaggtggaggtgttcaagagcagccaggagatccaggagcggctggtgcgggcctatgagctgatgctgggcttctacggcatccggctggaggaccggggcactggaacagtgggccgggcccagaactaccagaagcgcttccagaacctgaactggaggagccacaacaacctgcgcatcacccgcatcctgaagagcctgggggagctgggcctggagcacttccaggcccccctggtgcgcttcttcctggaggagaccctggtgagaagagagctgcccggggtgcggcagagcgccctggactacttcatgtttgctgtgcgctgccgccaccagaggcggcagctggtgcactttgcctgggagcacttccggccccgctgcaagtttgtgtggggcccccaggacaagctgcggcgcttcaagcccagcagcctgccccaccccctggagggcagcaggaaggtggaggaggagggcagccctggggaccctgaccacgaggccagcacccagggccgcacctgtggccctgagcacagcaagggcggcggccgggtggatgagggcccccagcccaggtctgtggagccccaggatgctggccccctggagaggagccagggagatgaggccggcggccatggagaagatagacctgagcccctgagccccaaggagagcaagaagaggaagctggagctgagcagaagagagcagcccccaacagagcccggcccccagagcgccagcgaggtggagaagatcgccctgaacctggagggctgtgccctgagccagggcagcctgaggacaggcacccaggaggtgggcggccaggaccccggggagagcagctgcccctgctgccggggctggggcctgcggagctgctgcggcctgcccagcggcagcgccagctag

SEQ ID NO: 172013 - DNA, 1539 bp, Artificial Sequence
  derived and/or modified sequence
atgcccagccccagccgcagcggccgcagccgctgcctgaaggcccccaggaggagccgcagcggcctgagcggccccaccagcagctgctgggccagcaccatccggctggaggaccggggcaccggcaccgtgggccgggcccagaactaccagaagcgcttccagaacctgaactggaggagccacaacaacctgcgcatcacccgcatcctgaagagcctgggggagctgggcctggagcacttccaggcccccctggtgcgcttcttcctggaggagaccctggtgcggcgggagctgcccggggtgcggcagagcgccctggactacttcatgtttgctgtgcgctgccgccaccagaggcggcagctggtgcactttgcctgggagcacttccggccccgctgcaagtttgtgtggggcccccaggacaagctgcggcgcttcaagcccagcagcctgccccaccccctggagggcagcaggaaggtggaggaggagggcagccctggggaccctgaccacgaggccagcacccagggccgcacctgtggccctgagcacagcaaaggaggcggccgggtggatgagggcccccagcccaggtctgtggagccccaggatgctggccccctggagaggagccagggagatgaagctgggggccacggggaggacaggcctgagcccctgagccccaaggagagcaagaagaggaagctggagctgagccggcgggagcagcccccaacagagcccggcccccagagcgccagcgaggtggagaagatcgccctgaacctggagggctgtgccctgagccagggcagcctgaggacaggcacccaggaggtgggcggccaggaccctggagaggccgtgcagccctgccggcagcccctgggcgcccgggtggccgacaaggtgaggaagaggaggaaggtggatgaaggagctggggacagcgctgctgtggccagcggcggggcccagaccctggccctggccggcagccctgcccccagcggccaccccaaggccggccacagtgaaaatggagtggaggaggacacagagggccgcacaggccccaaggagggcaccccaggcagccccagcgagaccccaggccccagccctgctggccctgctggagatgagcctgctgagagccccagcgagaccccaggccccaggcctgctggccctgctggagatgagcctgctgagagccccagcgagaccccaggccccagccctgctggccccaccagagatgagcctgctgagagccccagcgagaccccaggccccaggcctgctggccctgctggagatgagcctgctgagagccccagcgagaccccaggccccaggcctgctggccctgctggagatgagcctgctgagagccccagcgagaccccaggccccagccctgctggccccaccagagatgagcccgccaaggccggggaggccgctgagctgcaggatgctgaggtggagagcagcgccaagagcggcaagccctag

SEQ ID NO: 172014 - DNA, 285 bp, Artificial Sequence
  derived and/or modified sequence
atgacaggcagcaggaactggagggccacccgggacatgtgccgctaccgccacaactacccagacctggtggagcgggactgcaatggagacacccccaacctgtccttctacagaaatgagatccgcttcctgcccaacggctgcttcatcgaggacatcctgcagaactggacagacaactatgacctgctggaggacaaccacagctacatccagtggctgttccccctgcgggagcccggggtgaactggcacgccaagcccctgaccctgcgggagtag

SEQ ID NO: 172015 - DNA, 2034 bp, Artificial Sequence
  derived and/or modified sequence
atggacgaccccgactgcgacagcacctgggaggaggacgaggaggacgccgaagatgccgaggacgaagactgcgaggatggtgaggcagccggcgcccgagacgctgacgctggagacgaggatgaagaatccgaggaaccccgcgcggctagaccgagctccttccagtccagaatgaccggaagccgcaactggcgtgctacacgagacatgtgccgatataggcataactacccagatctagttgagcgtgattgtaacggggacacacccaacctgtcattttatagaaatgagatcaggttcctgcctaatggctgcttcattgaagatatcctccagaactggacagacaattacgacttgctggaggataaccatagctatattcagtggctcttccctttgagggaacctggcgtgaactggcatgctaagcctctcacattaagagaagtcgaagtattcaagtcctctcaggaaattcaggagaggctggtcagggcctacgagcttatgctgggattttatggcattcgtctagaagataggggcacaggcacagtaggccgagcacagaattatcagaagcggtttcagaatctgaactggcggagccataacaatctccggatcactaggatcctcaaaagtcttggcgaactggggctcgagcacttccaggctccactggtccggttttttcttgaggagactctggttagacgggaactgcctggagttagacagtctgctctggactatttcatgttcgccgtgaggtgtagacaccagaggcggcagctggtgcacttcgcctgggaacatttccgtccccggtgcaagttcgtgtggggaccccaggataaacttaggagatttaagcctagctcattacctcaccctctcgagggttctcgaaaggtggaggaggaaggcagcccaggggacccggatcatgaggccagtacccagggacgtacctgcggaccagagcattcgaaggggggtggcagggttgatgagggaccccagcccaggtctgtggaaccccaggatgctggcccacttgagaggtcccagggggacgaagccgggggacacggcgaggacaggcccgagccattgtctccaaaggaatcaaaaaagcggaagttagaactgtctagacgggagcagcctcctaccgaacccggtcctcagtcagcttcagaagtggagaagatcgcgctcaatttggaaggctgcgctctctctcagggctctttacgaaccggtacacaggaggtcggcggacaggatcccggagaggccgtgcagccatgtagacagcctctgggagcacgggtcgccgataaagtcaggaagcggcggaaggtggatgaaggcgccggagacagtgccgccgttgcttctggaggcgcccaaactctggccctggccggaagtccagctccgagtgggcaccccaaggccggccatagcgagaatggcgtggaggaagataccgaaggacgcactggacctaaggaggggacccccgggtcacctagcgagacaccagggccctcacctgctggcccagcgggcgatgaacctgctgagtccccatctgaaactcctggaccacggcccgccgggcccgccggcgacgaaccagctgaaagtccctcggagacgcctggccccaggccagcaggaccagcaggggatgaaccggcagagtccccatcagagactcccggcccctctccagctggacctactcgggatgagcccgccgaaagcccatcagaaaccccgggcccgcgtcctgccgggcccgccggtgatgagccagcagagtctccgagcgagacacctggccctcggccggccggtcctgcgggtgacgagcccgccgaaagcccttcggaaacacctggccccagtcctgcaggccccacaagagacgagcccgccaaagccggcgaggccgcagagcttcaagacgccgaggttgagagtagtgccaagtctggcaaaccatag

SEQ ID NO: 172016 - DNA, 1974 bp, Artificial Sequence
  derived and/or modified sequence
atggacgaccccgactgcgacagcacctgggaggaggacgaggaggatgctgaagatgccgaagacgaggactgtgaagatggtgaagctgctggcgccagagacgctgatgccggcgatgaagacgaggaatcagaggaacctcgcgctgctaggccaagcagctttcagtccagaatgaccggtagccgtaattggagggctaccagggacatgtgcagataccgccataattatcccgatctggttgagagagattgtaatggagatacccccaatctgtccttttatcggaatgagatccgttttttgcccaacggatgtttcatcgaagatattttgcagaactggaccgacaactatgatctgttggaagacaatcactcctacatccagtggttgtttcccttgagggagcctggcgtgaattggcatgccaagccgcttacgcttcgcgaggttgaagtgttcaagagctctcaggagatccaagaacgcctcgtgcgagcctatgaactcatgcttgggttctatggcattcgactcgaagatcgtgggactgggactgttgggcgtgcccagaattaccagaaacgctttcagaacttgaattggagatcacataataatctgcggataacacgaatcctaaagagcctgggtgagctggggctggaacacttccaggccccactggtaaggtttttcctggaagaaacactggtccgaagggaactaccaggggtgaggcagagcgcactggattacttcatgttcgctgtacgctgccgacaccagcggcggcaattggtccattttgcgtgggaacacttccggccccgatgcaagtttgtatggggtccccaggataagctgagaaggtttaaaccttcctccttgccccaccccttggaaggttcccggaaggttgaggaggaaggctcccctggggaccccgatcacgaagcaagtacacaaggccgaacctgtgggccggagcattccaaggggggggggagagtggacgaaggcccccagccgaggtcagtcgagcctcaagatgctggacctctcgaacgaagccagggcgatgaggccggaggccacggtgaggatcggcctgaaccactctcaccaaaagagtcaaaaaaacggaagttagagctgagtcgcagggagcagccgcctactgagcctgggccacagtccgcctcagaggtggaaaaaatcgccctgaacctagaaggatgtgcattgtcccaagggagcctgaggacgggcacccaggaggtagggggtcaggatcccggagaagctgtgcaaccctgtaggcagcctctgggcgcgcgggtcgcagacaaagtgcggaaacgtaggaaagtcgacgagggtgctggcgactctgccgcagtggcttccggcggcgcccagaccctcgccctggctggcagccccgctccctcaggccaccctaaggctggccactccgaaaatggggtggaagaggataccgaaggcagaacgggccccaaagagggcaccccagggtcaccttccgagacacccgggcccagcccagcggggcctgcaggggatgagcctgctgagagtcctagcgagactcccggaccaaggccagccgggcctgccggcgatgaaccggccgaatcgccaagtgagacaccaggaccttctcccgcaggcccgactcgggacgaacccgctgaatctcctagtgagacaccaggccctcgaccagccggtcccgcaggggacgagccggctgagtcaccctctgagacgcccggaccccgcccagctggaccagcgggagacgaaccagccgagtcgcctagtgagactccgggtccgagcccagccggccctactagggacgaacccgcaaaggctggcgaagctgcagaactccaggacgccgaggtcgaaagctcagccaagagcggcaagccatag

SEQ ID NO: 172017 - DNA, 1878 bp, Artificial Sequence
  derived and/or modified sequence
atgcggctgcccgagcggcacggcggcccccagggcagcctgtgcctgatggacccatgttgtcctctgtcacttgccctacaggacctggtcgagagggattgcaacggtgacactccaaatctctcattctatcggaatgaaatcagattcttgccaaatggatgtttcattgaggatatactccagaactggactgacaattacgatctcctagaggataaccactcctacatccaatggctctttcctctgcgcgagccaggggtgaactggcacgccaagccactgactcttagggaggtcgaagtgttcaaatctagtcaagaaatccaggagcgactggtacgtgcttacgagctaatgttggggttctatggcataagattggaggaccgtgggactggtaccgtcggacgcgcgcagaattatcagaagcggttccagaatctgaactggcggtcccataataatttgagaatcacgaggatactgaaatctttaggggagctgggcctggaacattttcaggccccactggtacgcttctttctcgaggagacactggtgcgccgggagcttccaggagtcagacagagtgcattagattatttcatgtttgccgttcggtgccgccaccagcgccgccagctcgtccacttcgcatgggagcacttcaggcctcgatgcaaattcgtgtggggccctcaggacaaacttaggagatttaaaccctcatccttgccacatcccctggagggctctcgtaaagttgaggaggaaggatcccctggtgaccccgaccacgaggcgagcacccagggcaggacctgcggccccgaacactccaaagggggcggtagagtggacgagggaccacagcccaggtctgttgagcctcaggacgctgggcctctggagaggtcccagggcgatgaagccggtggccacggagaggatagacccgaaccactcagccctaaggagtctaagaagcggaagcttgaacttagcaggagggagcagcccccaactgaacccgggccccagtctgcaagtgaggtggagaaaattgctctcaatttggaggggtgcgccctctcccagggatctttaaggactgggacacaagaggtgggggggcaagacccaggggaagccgtacagccttgtcgacaaccactgggcgcccgcgtcgcggacaaggtccgcaagaggagaaaagtggatgagggtgccggggactctgcggcggtagcttcaggcggagcacagacgctcgccctagcaggtagtcccgcacccagtgggcaccctaaggctgggcactctgagaacggtgtagaggaagataccgagggtcgaaccggccctaaggagggcactccgggaagtccttcagagactcctggcccctctcccgctggaccagctggagatgagcctgccgagtctccctccgagacgccaggccctcgacctgccgggcctgccggtgatgaacctgccgaatctccaagcgagacccccgggcccaggcccgccggaccagccggagatgagcccgcggagtctccgtccgagactcccggccccagccctgctggacctacccgcgatgaacccgcagaatccccatcagagactccaggccctcgacctgctggacctgcaggagatgaacccgctgagtccccatccgaaaccccaggcccacggccggctgggccggcaggcgatgagcctgccgagtcgccctcggaaacacccgggccctcacccgccggaccaaccagggacgagcccgcaaaggcaggagaggccgccgaactgcaggatgccgaggtagaatcttcagccaagtcaggcaagccctag

SEQ ID NO: 172018 - DNA, 1386 bp, Artificial Sequence
  derived and/or modified sequence
atggacgaccccgactgcgacagcacctgggaggaggacgaggaggacgcagaagacgccgaggacgaagattgcgaagacggcgaggccgctggtgccagggatgcagatgctggcgatgaagatgaggagtctgaagaaccaagggcagctagaccctcatcattccagtcaaggatgactggatctagaaattggcgggcaacccgtgatatgtgccgttatagacacaactacccggatctggtggagcgggattgcaacggcgacacccctaacctcagcttctaccgcaatgagatacggtttctgcctaatgggtgttttatagaagacatcctgcaaaactggacggacaactacgacctgcttgaagataaccactcttacatccaatggctctttcctctcagggagcctggggtgaactggcacgccaagccattgacccttagagaggtggaggtgttcaagtccagccaggaaatccaggaacgtctcgttcgggcctacgaacttatgctcggcttctacggaattcggctggaggacaggggcaccggaaccgttggaagggctcagaattaccaaaagaggttccaaaatcttaattggagaagccacaataacttgcgcatcacccgcatcctcaaatccttaggggagctgggacttgagcacttccaagctcccctggttcggttctttctcgaggaaaccctagttagacgggagctgccaggtgtgaggcagtccgcgctggactattttatgttcgcggttcgatgccgccaccagcgccgccagctggtacatttcgcttgggagcattttagaccaagatgtaaattcgtttggggtccgcaggacaaactcagacgctttaagcctagttctctgccacatcctttagaagggagtcgtaaggtggaggaagaaggatctccaggggacccagatcatgaggcgtctacacagggtcggacatgcggaccagaacattccaaaggtggaggaagggtggacgaaggcccccagcctcggtccgtcgagccacaggacgccggccccttagaacgctcacagggtgatgaggcaggtggtcacggcgaggaccgaccggaacccttgagtcctaaggagagcaagaaacgcaagttggagctctcacggagagaacagccacccactgagcccggcccgcagagcgccagtgaggtagagaagatcgcactgaacttggagggttgtgccctgagccaggggtccctcaggacagggacccaggaagttggtggacaagatcctggagagtcatcctgtccatgctgcagaggatggggcctgcgatcttgttgcggactcccgagcggtagcgcatcctag

SEQ ID NO: 172019 - DNA, 1539 bp, Artificial Sequence
  derived and/or modified sequence
atgcccagccccagccggagcggccggagccggtgcctgaaggccccacggcgatctagaagcggattatccgggcctacttcttcctgttgggcttccactatcaggctggaagatcgcggcactggaacagtgggaagagcacaaaactaccaaaagcgatttcagaaccttaattggcggtctcataacaacttaaggattacacgaatccttaagagtctgggtgagctcggcctggagcactttcaggctccgttggtgaggttctttctggaggaaaccctggtgcgcagggagttgcccggcgtgcgccagagcgctctggactattttatgttcgctgtgaggtgtcgacatcaacgcaggcaactggtgcatttcgcctgggagcatttcagaccaagatgtaagttcgtctggggcccgcaggacaagctgaggagatttaagccgtcatcacttcctcaccctctggagggaagccgtaaagtcgaggaggaaggctctcccggcgatcccgaccacgaagcttcgacacaggggcgcacctgcgggcccgaacattccaaaggggggggaagagtcgatgagggacctcagccgaggagtgtcgaaccacaagacgccgggcctctcgagaggagccagggcgacgaagcaggtggccacggtgaggaccgcccagaaccgttgtcacctaaagagagcaagaagagaaagctggaattgagccgccgcgagcagcctcctacagaacccggccctcagagcgcttctgaggtcgagaagatagcactgaatttggagggatgtgcactgtctcaggggtccctgcgaacaggtacccaagaagttggcgggcaggaccccggggaagcagtgcagccttgtcggcagcccttgggagctagagtggcagacaaagttcggaaacgtcggaaagtggatgagggggcaggtgacagtgccgcagttgcctcgggcggagctcagaccttggctcttgccgggtctcccgccccatcagggcatcctaaagcaggacattccgaaaacggtgtggaggaagacaccgaaggacgtaccggacctaaagaaggaacccctggttccccttcagagacccccggaccttctccagccggtcccgctggcgacgagccagcagaatctccatccgaaacccctggaccaagaccagctggacccgctggcgatgagcccgcagaatcaccgtcagaaacccctggaccttcccccgctggtcctactagggatgagcctgcagagagccctagtgaaacccctgggcctaggcccgccggtcccgctggggatgagcccgcagaaagtccaagtgaaaccccaggaccccggccagcgggacccgcgggcgatgagcctgccgagagtccgtcagagacgccaggtcctagtcccgctggacctactcgcgacgaacctgctaaggccggcgaagctgccgagctgcaggacgcggaagtggagagctctgcaaaatcaggaaaaccatag

SEQ ID NO: 172020 - DNA, 285 bp, Artificial Sequence
  derived and/or modified sequence
atgaccggcagccggaactggcgggccacccgggacatgtgccggtatcggcacaattatcctgatctggtcgagagagactgtaatggtgacactcctaatctctctttctatcggaacgaaatacggtttctgcccaacggatgctttatcgaggatattcttcagaattggacggataattatgacctcctagaggataaccatagctatatccagtggctattccctctgcgagagccaggtgtgaactggcatgcaaagcctttaacactgagggagtag

SEQ ID NO: 172021 - DNA, 2034 bp, Artificial Sequence
  derived and/or modified sequence
atggatgaccccgactgtgatagtacctgggaggaggatgaggaagatgccgaagacgccgaagatgaggattgcgaggatggtgaagctgctggagccagggatgccgacgcaggtgacgaggacgaagagagcgaagaaccccgtgctgctcgccctagcagctttcagagccgaatgacagggtcgcgcaactggcgggcaacgcgggatatgtgccgctatcggcataattacccagaccttgtcgaaagagactgcaatggcgatacgccaaatctatcattttacaggaatgagatcagattcttacctaacggatgctttatcgaagatatccttcagaattggactgacaactacgatctgttggaagataaccacagctacatccaatggctgtttccgctgcgagagcccggagtcaattggcacgctaaacctcttactttgcgggaagttgaggtgtttaaaagctcccaagagatacaggagaggctggttagagcttacgagctgatgttaggattctatgggattagactcgaggacagaggaacgggcacagtggggagagcacaaaactaccagaaaaggtttcagaaccttaattggcgcagccataacaacttgcgcattaccagaatattgaaatctctaggtgagctaggattggagcatttccaagctcctctggtaaggttcttcctggaagagaccctggtgcgccgagagttacctggtgttcgccagagtgccctggattacttcatgttcgcagtgcggtgtagacatcagcgcaggcaactcgtccatttcgcctgggagcatttccgcccaagatgcaagtttgtctggggtcctcaggacaaactgagacgattcaaaccttcctccctcccccatcccctggagggaagccgtaaagtcgaggaggaagggtctcccggtgatcccgatcatgaggccagcacccaggggaggacatgcggcccagaacactcaaagggagggggtcgagtcgatgagggcccacagcctaggtcagttgagccccaggacgctgggcctttggagagatcccagggggatgaagctggtggtcatggtgaagatcgccctgagcctttgagccccaaagagagtaaaaagcgtaaactggaactctctcggagggagcagcctcccacggaacccggaccacagtctgcttcggaagtggaaaagatcgcattgaacctcgagggctgtgctttatctcagggctcactaagaacgggcacacaagaggtcggtggacaggaccccggagaggctgtccagccttgccggcagccactaggggcaagggtggccgataaggtgagaaagaggcggaaggtcgacgagggggcaggggactctgcagccgtggcctccggcggagcacaaacactcgcgctcgctggcagcccagcgccttcaggccacccaaaggccggtcatagtgaaaacggggttgaggaggacactgaagggcgtaccggtcccaaggagggcacgccaggctccccatccgaaacgccgggaccatcccctgccggaccagccggagacgagccagccgagtcgcccagcgagacccccggaccccgtcccgcaggacctgcaggggacgaaccagctgaaagcccatcagaaacccctggtcctaggcccgctggacccgctggcgacgagcctgcggagagtccctctgaaactcctggtccatctcctgccggacccacgagagatgagcctgccgagagcccttctgaaacaccaggccctcggccagccggacccgctggagacgaacccgcagagtctccctccgaaacaccgggaccgcgtccggctggcccagctggggatgaaccggctgagtcaccctcggaaaccccaggtcccagccccgctggtccgacgcgagatgagccagctaaagctggggaggcagccgagctacaggacgcagaagtggaatcctcagcaaagtccgggaagccgtag

SEQ ID NO: 172022 - DNA, 1974 bp, Artificial Sequence
  derived and/or modified sequence
atggacgatcctgactgcgattccacatgggaggaggatgaagaagacgcagaagacgccgaggatgaggattgcgaagatggggaggcagcgggagccagagatgctgatgctggagatgaagatgaagagtccgaggagcctagggcagccagaccatcttcattccagtctcggatgaccggaagtagaaattggagggccacacgggacatgtgcagatatagacacaactatccggacctagtggagcgcgactgcaatggcgacactccaaatctgtctttctacagaaacgagattagattcttgccaaacggctgttttatcgaagacattctacagaattggacagataactatgacttgctcgaagacaatcatagctatatccagtggctgttcccactccgagagcccggagtcaattggcacgcaaagcctcttacactcagagaggtcgaggtgtttaaaagttcacaggaaatccaggagaggctagtacgcgcatacgaactgatgctcgggttctacggtattcggttggaggacaggggcactgggaccgtgggccgtgcccagaactaccagaaacggtttcagaacctaaactggcggtcacataacaacctgaggatcaccagaattctcaaatccctcggggagctgggattggagcacttccaagctcccctggtgcggttcttcctagaggaaactctcgtgcggagagaacttcccggtgtccgccagtctgctttggactacttcatgtttgccgtccggtgtcggcaccagaggcgccagctcgtccacttcgcctgggagcatttccgccctaggtgtaagtttgtgtgggggccacaggacaagttgcgcaggtttaagccatcctctcttccccaccccctagaaggatctagaaaggtggaggaagagggctctcccggtgaccccgaccacgaagcatcgacccaggggaggacgtgcggcccagagcatagcaagggcggtggcagagtcgacgagggccctcagccccgttctgtggagccccaggatgcagggccactggagcgtagtcagggagatgaagcagggggacatggcgaagaccgtcccgagccattgagtcccaaggagtccaagaaaagaaaactggagctgtcacgcagagaacagcctccaaccgagcccggtccacagtcggcgagtgaggtcgagaagattgctctgaatctagaagggtgcgcactgtcccagggctcgctcagaacagggacccaggaggtgggaggccaggatcccggagaggctgtacaaccctgcaggcagcctctgggcgctcgcgtggcagacaaagtgcggaagcggcgtaaggtggacgaaggtgccggagatagtgctgccgttgcgtctgggggtgcgcagactctagctttggcgggaagcccagctcctagcggacatcccaaagccggacactcagagaacggggttgaggaggacaccgagggtcggaccggccctaaggaaggcaccccgggtagtcccagcgagactcccggtcccagccctgcaggccctgccggtgacgagcctgccgagagtccctctgagacccccggaccgaggcccgcaggcccagccggagatgagcctgccgagtctcccagtgaaactcccggaccatctcccgcaggcccaacccgggacgagcctgccgagagtccaagcgaaactccaggaccaaggccggctggtcctgcaggcgatgagcccgctgagagccccagtgaaacaccaggacctagacctgcgggacccgctggcgatgaacccgctgagagccccagcgagactcccggaccctcacccgctgggccaacacgggacgaaccagcgaaggccggtgaagccgctgaactgcaagatgccgaagtagaatcctccgctaagtccggcaagccttag

SEQ ID NO: 172023 - DNA, 1878 bp, Artificial Sequence
  derived and/or modified sequence
atgagactgccagaacggcacggaggacctcaaggaagcctctgtctgatggatccatgctgtccactgtcccttgccctgcaggacctagtcgagagggattgcaatggtgacacaccaaacctgtccttctacaggaacgagatacgatttttgcccaacgggtgttttatcgaggacattctgcagaactggactgacaattacgatctcctggaagataaccacagctacatccagtggctgttcccccttagggagccaggagtcaactggcatgccaaaccactaactcttcgcgaggtggaggtattcaaatcatcccaggaaatacaggaacggctcgtccgggcatatgaactcatgctgggattctatggtatcaggttggaggaccgagggactggtactgtcgggagagcccagaattatcaaaaaagatttcagaatctcaattggaggagtcacaacaatctccgaattacacggatccttaagtctctgggggaacttggcctggagcacttccaggcaccactggtccgcttcttcctcgaggagactctggtccgcagagaattgccaggcgtccggcagtccgccttagactatttcatgtttgccgtgaggtgtagacaccagaggaggcaacttgtgcactttgcctgggagcatttccgcccaagatgcaagttcgtgtggggaccccaagacaagttgaggagattcaagccatctagtctgccccatccactggagggtagccgcaaagtggaagaagagggctccccaggcgaccccgatcacgaggcttccactcagggtaggacatgcggccctgaacattctaagggagggggacgcgtcgacgaggggccacagccaagatcagtggagccgcaggacgccggtccgctggaaaggagtcagggagatgaagccggtggtcatggcgaagaccggcctgagccactcagccccaaggaatccaagaagcgcaagctggagttgtctcggcgagagcagcctccaactgaacccggaccgcagagcgcaagcgaagtagagaagattgcactgaacttggaagggtgcgcactctcccaaggttcccttagaacagggacccaggaagtagggggacaggacccgggagaggcagtccagccctgtcgacagccacttggcgcaagggtagcagacaaggtacggaaacgcagaaaagttgacgagggagcgggagactctgctgctgtggcgtccgggggagctcagacccttgctctggcaggcagcccagctccatccggacacccaaaggcaggccactctgagaatggcgtagaagaggacaccgagggcaggacagggccaaaagagggtactccaggatcaccctccgagacccctggtccaagccccgctggcccagcgggagatgagccggcagaatcgccaagcgagacccctggccctcggcctgccggtccagcgggagatgaacccgctgagtctcctagcgaaacacccggaccgagaccggcaggtcctgccggagacgaacccgcagagtctccttcagagaccccgggtccgtctcccgctgggccaactagagatgagcctgcagaatcgccctctgagactcctggccctcggccagctggccctgcaggcgacgagcccgctgaaagtccctctgaaactccagggccacgcccagctggccctgcgggtgacgagccagccgaatcccccagtgaaactccgggaccctcacccgcaggtccaaccagggacgaacccgctaaagcaggcgaagccgcagaactgcaagatgcggaggtagagagctccgctaaaagcggcaagccgtag

SEQ ID NO: 172024 - DNA, 1386 bp, Artificial Sequence
  derived and/or modified sequence
atggatgaccctgattgcgacagtacctgggaagaagacgaggaagatgcggaggatgctgaggatgaggactgtgaggacggggaggcagcaggtgccagggatgctgacgcaggagacgaggacgaggagtctgaagaacccagagccgctagaccttcttccttccagtcccggatgactggaagccggaattggcgggctaccagggatatgtgtcggtacagacataactatccagatctggtggagcgggactgcaatggggacactccaaatctttccttctataggaatgagattcgattccttcccaatggttgttttatcgaggacattctgcagaattggaccgataactatgacctgctggaagacaaccattcctatatccagtggctattccctctacgggagccaggagtaaattggcacgcaaagccgctgacactaagggaagttgaggtgtttaagtcctctcaggagattcaggaacgcctggttcgcgcatacgaactcatgctcggcttctacggaatccggcttgaggaccggggaacaggaacagtcgggcgagcacagaactaccagaagcgatttcagaacctgaactggagaagtcataacaacctaagaattactcggatcctaaagtccctgggcgagctgggattagagcacttccaggctcctctggtcagatttttcctggaggaaaccctcgtgcgaagggagctgccaggtgtccgtcagagtgcactagattatttcatgttcgcagtgcgttgcagacaccagaggagacagttggttcacttcgcgtgggaacacttcaggcctcgctgcaagttcgtctggggaccgcaagacaagttgcggaggttcaagccttcatctcttccccaccctctagaagggagtaggaaagttgaggaagaggggtcgcccggagaccccgatcatgaggcatccacacaggggagaacttgtggaccggaacatagcaaagggggtgggagagtagatgagggcccacagcccaggtcagtggaacctcaggatgccggtccactggaacggtcccagggtgacgaggcagggggacatggagaagacaggcccgagcctctctcacctaaagaatctaaaaaaagaaagttagaactcagcagacgcgagcagccgcctactgagccaggaccacaatccgcgtcggaggtggaaaaaatcgcgctcaatctagagggttgcgccctgagtcaggggtcactgcgcactgggacacaggaggttggaggccaagatccaggggagagttcctgcccatgctgcaggggctggggcttgcgtagctgttgtggcctcccttccggatcagccagctag

SEQ ID NO: 172025 - DNA, 1539 bp, Artificial Sequence
  derived and/or modified sequence
atgccttccccctccagatctggtagatcccgctgtttaaaagcaccgaggcgcagcaggtccggactcagcggcccaacatctagctgctgggcttctactatccgactggaggatagggggacagggactgtgggccgtgcacagaactatcagaagcggtttcaaaatctcaactggcggagccataataatctgagaatcacccggatcttgaagtcactcggcgagttggggctggagcacttccaggcacccctggtgagatttttcttggaggaaaccctggtcaggagagaactccccggagtccgccagtctgcactcgactactttatgttcgccgtgagatgtcgccatcaacgcagacagcttgtgcatttcgcgtgggaacactttcgcccacggtgtaagttcgtctgggggcctcaggacaagctcaggaggttcaagccttccagtctcccacaccctctggagggaagcaggaaggtagaggaggaaggaagtcctggcgatccagaccatgaagccagtacgcaaggcagaacttgcggacctgagcactccaagggtgggggaagggtggacgaaggcccacagcccaggagcgtggagccccaggacgcgggtcctctggagcggtcccagggggacgaggcagggggacacggggaggataggcctgagcctctctctcccaaagagagcaagaagcgcaaactggagctgtccagaagggagcaacctcccaccgagcccggaccacagtccgcctctgaggtcgagaaaattgctctgaatctggaaggctgtgccctttctcagggctctctgcgtactgggactcaggaggttgggggacaggacccgggagaggctgttcagccatgtagacagcctctgggcgctagggtcgctgacaaagtgcgaaagcgtcgaaaggtggacgaaggggctggtgattcagccgcagtggcaagcggcggtgctcagacgctggctttagccggttcccccgctccatcgggccacccgaaagctggccacagtgaaaacggggtggaagaagacaccgagggtaggacaggcccaaaggaaggcactcctggatctccatcagagacgcctggaccatctcctgccggtcctgccggtgacgaacctgccgagtcgccgtcagagacgccgggacctcgacccgctgggccagccggtgacgaacctgccgagtcaccatctgagacgccaggcccttcccccgcagggccaaccagagatgagccagccgagtcaccttccgaaacccccggacctaggcctgcgggtcccgcaggggacgaaccagccgaaagccctagtgagactccgggacctaggcccgcagggcctgccggagatgaacccgcagagagcccaagcgagactcctggtcctagcccagccggtcccacccgggatgagccagcgaaagctggagaggccgcagagctgcaggacgctgaggtcgaatcttcagctaaaagtggaaagccctag

SEQ ID NO: 172026 - DNA, 285 bp, Artificial Sequence
  derived and/or modified sequence
atgaccggaagcagaaactggcgggcaacccgtgacatgtgcaggtataggcacaattatcctgaccttgtcgagcgcgattgtaatggagatacacctaatctctctttctatcggaatgagatccgttttctgcccaacggctgcttcatcgaggacatactccagaattggaccgacaactatgacctgctagaggataaccattcctacatacaatggttgtttcccttgcgcgaacccggagtgaactggcatgctaagcccctgacactgcgagagtag

SEQ ID NO: 172027 - DNA, 553 bp, Artificial Sequence
  derived and/or modified sequence
agaaggagcagccccccacctggctaccgcagccctctctggttctgtgcagggtattgggatgcgttactgaggcccaaatctgccccactgggaacccccaaaaaagagccagggcaggagaatgagagggaggagccatgaaacccccgccctttaaagacagctctgtggcagctggcccaggccctgcagccctcaccacgttgggactcacttgggggtctcccatgggggtcctaatcccatctcttttcttcccagtccagaatgacagggtccagaaactggcgagccacgagggacatgtgtaggtatcggcacaactatccggatctggtggaacgagactgcaatggggacacgccaaacctgagtttctacagaaatgagatccgcttcctgcccaacggctgtttcattgaggacattcttcagaactggacggacaactatgacctccttgaggacaatcactcctacatccagtggctgtttcctctgcgagaaccaggagtgaactggcatgccaagcccctcacgctcagggagg

SEQ ID NO: 172028 - DNA, 2410 bp, Artificial Sequence
  derived and/or modified sequence
agcgcgagccccgccgccgccgagcatggacgaccccgactgcgactccacctgggaggaggacgaggaggatgcggaggacgcggaggacgaggactgcgaggacggcgaggccgccggcgcgagggacgcggacgcaggggacgaggacgaggagtcggaggagccgcgggcggcgcggcccagctcgttccagtccagaatgacagggtccagaaactggcgagccacgagggacatgtgtaggtatcggcacaactatccggatctggtggaacgagactgcaatggggacacgccaaacctgagtttctacagaaatgagatccgcttcctgcccaacggctgtttcattgaggacattcttcagaactggacggacaactatgacctccttgaggacaatcactcctacatccagtggctgtttcctctgcgagaaccaggagtgaactggcatgccaagcccctcacgctcagggaggtcgaggtgtttaaaagctcccaggagatccaggagcggcttgtccgggcctacgagctcatgctgggcttctacgggatccggctggaggaccgaggcacgggcacggtgggccgagcacagaactaccagaagcgcttccagaacctgaactggcgcagccacaacaacctccgcatcacacgcatcctcaagtcgctgggtgagctgggcctcgagcacttccaggcgccgctggtccgcttcttcctggaggagacgctggtgcggcgggagctgccgggggtgcggcagagtgccctggactacttcatgttcgccgtgcgctgccgacaccagcgccgccagctggtgcacttcgcctgggagcacttccggccccgctgcaagttcgtctgggggccccaagacaagctgcggaggttcaagcccagctctctgccccatccgctcgagggctccaggaaggtggaggaggaaggaagccccggggaccccgaccacgaggccagcacccagggtcggacctgtgggccagagcatagcaagggtgggggcagggtggacgaggggccccagccacggagcgtggagccccaggatgcgggacccctggagaggagccagggggatgaggcagggggccacggggaagataggccggagcccttaagccccaaagagagcaagaagaggaagctggagctgagccggcgggagcagccgcccacagagccaggccctcagagtgcctcagaggtggagaagatcgctctgaatttggaggggtgtgccctcagccagggcagcctcaggacggggacccaggaagtgggcggtcaggaccctggggaggcagtgcagccctgccgccaacccctgggagccagggtggccgacaaggtgaggaagcggaggaaggtggatgagggtgctggggacagtgctgcggtggccagtggtggtgcccagaccttggcccttgccgggtcccctgccccatcggggcaccccaaggctggacacagtgagaacggggttgaggaggacacagaaggtcgaacggggcccaaagaaggtacccctgggagcccatcggagaccccaggccccagcccagcaggacctgcaggggacgagccagccgagagcccatcggagaccccaggcccccgcccagcaggacctgcaggggacgagccagccgagagcccatcggagaccccaggcccccgcccggcaggacctgcaggggacgagccagccgagagcccatcggagaccccaggccccagcccggcaggacctacaagggatgagccagccgagagcccatcggagaccccaggcccccgcccggcaggacctgcaggggacgagccagccgagagcccatcggagaccccaggcccccgcccggcaggacctgcaggggacgagccagccgagagcccatcggagaccccaggccccagcccggcaggacctacaagggatgagccagccaaggcgggggaggcagcagagttgcaggacgcagaggtggagtcttctgccaagtctgggaagccttaaggaaaggagtgcccgtcggcgtcttggtcctcctgtccctgctgcaggggctggggcctccggagctgctgcgggctcccctcaggctctgcttcgtgacccgtgacccatgacccacagtgctggcctcctgtggggccactatagcagccaccagaagccgcgaggccctcagggaagcccaaggcctgcagaagcctcctggcctggctgtgtcttccccacccagctctcccctgcgcccctgtctttgtaaattgacccttctggagtggggggcggcgggcagggctgcttttcttagtctgataccaagcaaggccttttctgaataaattcatttgactttga

SEQ ID NO: 172029 - DNA, 2034 bp, Artificial Sequence
  derived and/or modified sequence
atggacgaccccgactgcgacagcacctgggaggaggacgaggaggacgccgaggacgccgaggacgaggactgcgaggacggcgaggccgccggcgccagagacgccgacgccggcgacgaggacgaggagagcgaggagcccagagccgccagacccagcagcttccagagcagaatgaccggcagcagaaactggagagccaccagagacatgtgcagatacagacacaactaccccgacctggtggagagagactgcaacggcgacacccccaacctgagcttctacagaaacgagatcagattcctgcccaacggctgcttcatcgaggacatcctgcagaactggaccgacaactacgacctgctggaggacaaccacagctacatccagtggctgttccccctgagagagcccggcgtgaactggcacgccaagcccctgaccctgagagaggtggaggtgttcaagagcagccaggagatccaggagagactggtgagagcctacgagctgatgctgggcttctacggcatcagactggaggacagaggcaccggcaccgtgggcagagcccagaactaccagaagagattccagaacctgaactggagaagccacaacaacctgagaatcaccagaatcctgaagagcctgggcgagctgggcctggagcacttccaggcccccctggtgagattcttcctggaggagaccctggtgagaagagagctgcccggcgtgagacagagcgccctggactacttcatgttcgccgtgagatgcagacaccagagaagacagctggtgcacttcgcctgggagcacttcagacccagatgcaagttcgtgtggggcccccaggacaagctgagaagattcaagcccagcagcctgccccaccccctggagggcagcagaaaggtggaggaggagggcagccccggcgaccccgaccacgaggccagcacccagggcagaacctgcggccccgagcacagcaagggcggcggcagagtggacgagggcccccagcccagaagcgtggagccccaggacgccggccccctggagagaagccagggcgacgaggccggcggccacggcgaggacagacccgagcccctgagccccaaggagagcaagaagagaaagctggagctgagcagaagagagcagccccccaccgagcccggcccccagagcgccagcgaggtggagaagatcgccctgaacctggagggctgcgccctgagccagggcagcctgagaaccggcacccaggaggtgggcggccaggaccccggcgaggccgtgcagccctgcagacagcccctgggcgccagagtggccgacaaggtgagaaagagaagaaaggtggacgagggcgccggcgacagcgccgccgtggccagcggcggcgcccagaccctggccctggccggcagccccgcccccagcggccaccccaaggccggccacagcgagaacggcgtggaggaggacaccgagggcagaaccggccccaaggagggcacccccggcagccccagcgagacccccggccccagccccgccggccccgccggcgacgagcccgccgagagccccagcgagacccccggccccagacccgccggccccgccggcgacgagcccgccgagagccccagcgagacccccggccccagacccgccggccccgccggcgacgagcccgccgagagccccagcgagacccccggccccagccccgccggccccaccagagacgagcccgccgagagccccagcgagacccccggccccagacccgccggccccgccggcgacgagcccgccgagagccccagcgagacccccggccccagacccgccggccccgccggcgacgagcccgccgagagccccagcgagacccccggccccagccccgccggccccaccagagacgagcccgccaaggccggcgaggccgccgagctgcaggacgccgaggtggagagcagcgccaagagcggcaagccctag

SEQ ID NO: 172030 - DNA, 168 bp, Artificial Sequence
  derived and/or modified sequence
atgaagatgagcttcgagcggtgcaccgcccggaacaagatgttcgttaactccgcctttacaaaggttgataattactgtacatttctgatggagaaggttctgttcaaagtgctctttctggtggagtactaccagaaaggaaagaaaaacgatctgaacttttag

SEQ ID NO: 172031 - protein, 1137 aa, Artificial Sequence
  derived and/or modified sequence
MSDIVEKTLTALPGLFLQNQPGGGPAAAKASFSSRLGSLVRGITALTSKHEEEKLIQQELSSLKATVSAPTTTLKMMKECMVRLIYCEMLGYDASFGYIHAIKLAQQGNLLEKRVGYLAVSLFLHESHELLLLLVNTVVKDLQSTNLVEVCMALTVVSQIFPCEMIPAVLPLIEDKLQHSKEIVRRKAVLALYKFHLIAPNQVQHIHIKFRKALCDRDVGVMAASLHIYLRMIKENSSGYKDLTGSFVTILKQVVGGKLPVEFNYHSVPAPWLQIQLLRILGLLGKDDQRTSELMYDVLDESLRRAELNHNVTYAILFECVHTVYSIYPKSELLEKAAKCIGKFVLSPKINLKYLGLKALTYVIQQDPTLALQHQMTIIECLDHPDPIIKRETLELLYRITNAQNITVIVQKMLEYLHQSKEEYVIVNLVGKIAELAEKYAPDNAWFIQTMNAVFSVGGDVMHPDIPNNFLRLLAEGFDDETEDQQLRLYAVQSYLTLLDMENVFYPQRFLQVMSWVLGEYSYLLDKETPEEVIAKLYKLLMNDSVSSETKAWLIAAVTKLTSQAHSSNTVERLIHEFTISLDTCMRQHAFELKHLHENVELMKSLLPVDRSCEDLVVDASLSFLDGFVAEGLSQGAAPYKPPHQRQEEKLSQEKVLNFEPYGLSFSSSGFTGRQSPAGISLGSDVSGNSAETGLKETNSLKLEGIKKLWGKEGYLPKKESKTGDESGALPVPQESIMENVDQAITKKDQSQVLTQSKEEKEKQLLASSLFVGLGSESTINLLGKADTVSHKFRRKSKVKEAKSGETTSTHNMTCSSFSSLSNVAYEDDYYSNTLHDTGDKELKKFSLTSELLDSESLTELPLVEKFSYCSLSTPSLFANNNMEIFHPPQSTAASVAKESSLASSFLEETTEYIHSNAMEVCNNETISVSSYKIWKDDCLLMVWSVTNKSGLELKSADLEIFPAENFKVTEQPGCCLPVMEAESTKSFQYSVQIEKPFTEGNLTGFISYHMMDTHSAQLEFSVNLSLLDFIRPLKISSDDFGKLWLSFANDVKQNVKMSESQAALPSALKTLQQKLRLHIIEIIGNEGLLACQLLPSIPCLLHCRVHADVLALWFRSSCSTLPDYLLYQCQKVMEGS

SEQ ID NO: 172032 - DNA, 3414 bp, Artificial Sequence
  derived and/or modified sequence
atgtcagacattgtggagaaaacgttgactgccttgcccgggttatttctacaaaatcagcctggaggcggaccagctgcagccaaagcgtccttttctagcaggctggggagcctcgttcgcggaatcaccgctctgaccagcaaacatgaagaagaaaaactgatccagcaggagttgtcatccctgaaggctaccgtctctgcccctactaccaccctgaaaatgatgaaggaatgtatggtgcgcctcatttattgcgaaatgttgggatacgacgcctcgttcggctacatccatgccatcaaacttgcccagcaaggcaacttgctggagaaaagggtcgggtacctggcagtgagcttgtttcttcacgagtctcatgaattactgctcctactggtgaacactgtagttaaagacctgcaatctacgaacctggtggaggtatgcatggccctgactgtcgtatctcaaatctttccctgtgagatgatccctgcagtgctccctttgatagaagataagctacagcactccaaggagattgttcgaagaaaggccgtgctggcactgtataagtttcacctgattgctcccaaccaggtgcagcacatccatattaagttccgcaaagctttgtgcgatcgggatgtgggtgttatggccgccagcctccacatatacctgcggatgatcaaggaaaattcaagtggctacaaggacctcaccgggtcttttgtgaccatcctgaagcaggtggtcggcggtaaacttcctgtggagtttaactatcactctgttccagcgccctggctgcaaattcagctgttacgcatattaggactgctcgggaaagacgatcagcgtactagtgaactcatgtatgatgttttggacgaaagtttaagacgtgcagaactgaaccacaatgtcacttacgcaattctgttcgagtgcgtgcacacagtgtactccatctatccgaaatcagaattgctggaaaaagctgctaagtgcatcgggaagtttgtgttatcccccaagattaacttgaaatatctcgggcttaaggccttaacgtacgttatacagcaggatcctacattggccctccaacaccagatgactatcatcgagtgtctggaccaccccgaccccataatcaaaagagagacattggaactgctgtatagaattacaaatgcgcaaaatataacggtgattgtgcagaagatgctcgaatatctccaccaaagcaaggaagaatacgtgattgtcaacctggtgggcaaaatcgctgagctcgccgagaagtatgccccggacaatgcttggttcatccagactatgaacgctgtatttagcgttggaggagacgttatgcacccggatatccctaataactttttgcgccttcttgctgagggctttgatgacgagacagaggaccagcaacttagactttacgccgtgcagtcctacctgacccttttagacatggagaacgtgttctacccccagcggttcctccaggtgatgtcttgggttctcggagaatattcctacctgctggacaaagaaactccggaggaggttatcgccaaactgtacaagttactgatgaacgactctgtttcaagcgagaccaaagcatggcttatcgccgcagtgaccaagctgacctcccaggcacacagctcgaacaccgtggaacgactgattcatgaatttacgattagcctggatacttgcatgcggcagcacgcattcgagctaaaacacctgcacgagaatgtggaactgatgaaaagcctgctacctgttgacagatcgtgtgaagatctggtcgtagacgcatcactctcctttctggacggatttgtcgcagaaggcctgtctcagggcgcagcaccatacaaacccccgcatcagcgccaagaggaaaagctgtcccaggagaaagtgctgaactttgaaccatacggtctcagcttcagtagcagcgggtttacaggcaggcaaagtccggctggtataagcctggggtctgacgtcagcggaaattccgcggaaacaggtctgaaggaaacgaattcccttaaactggagggcattaagaaactctgggggaaggagggatatctgccaaagaaggaaagtaagactggcgacgaatcaggcgccctccccgtcccccaagagagtatcatggagaatgtggatcaggctattacgaagaaagaccagagccaagttcttactcaaagcaaagaagagaaagagaagcaactactggcaagctctctctttgtggggctcggctctgagtccactattaacctcctgggtaaagcggatacagtgagtcataagtttcgccgcaagtctaaagttaaagaggccaagagcggggagaccacatccacgcacaacatgacctgttcctcgttttccagcctgagtaatgtggcctacgaagacgactattatagtaacacactccatgataccggggataaagaactgaaaaaatttagcctcacctccgagctactcgattccgagtctctcaccgagcttccactggtggagaagttttcctactgctcccttagcactccgtcactgtttgcaaacaacaatatggaaatttttcatccaccccagtctaccgcggccagcgtggcaaaagagtcgtcacttgccagcagctttctcgaggagacgacagaatacatccactcaaacgccatggaagtgtgtaacaacgagactatctccgtgtcgtcttataaaatctggaaggatgactgtctgctgatggtgtggagcgtgaccaataagtccggtctcgaactgaaaagtgccgatttggagattttccccgctgaaaattttaaggtaaccgagcagcctggctgctgcctgccagtgatggaggccgaaagcacgaagagctttcagtactctgtccagatcgaaaaaccatttactgaaggtaacctgacaggcttcatctcttatcacatgatggacacccacagtgcccagttggagttctctgtcaatctttctctgctggacttcattagaccccttaaaatcagctctgatgatttcggaaagctgtggttgtcttttgctaatgacgtcaaacagaatgttaagatgtcggaatctcaggctgcactgccatccgctctcaagactctccagcaaaagctgcgactgcacatcattgaaatcatcgggaatgagggtctgctggcatgccagctgttgccaagtattccttgcctgctacattgtagagttcacgcggatgtcctggcattatggttccggtcatcatgctctacgttgcccgactacctgctgtaccagtgccagaaggttatggaaggcagctag

SEQ ID NO: 172033 - DNA, 6758 bp, Artificial Sequence
  derived and/or modified sequence
aaaaacaggaagtgcctacggaggccgggccggcagcggcggccgggcatgaagccgggcggctacgggatcgcgggcggcggcggcatcgcgggcggcggcggcgatgagcgacatagtggagaagacgctgacggcgctgccgggactctttctgcagaaccagcccggtggtgggcccgcggccgccaaggcgtccttctcctcgaggctgggcagccttgtccgcggcatcacagccctcacctccaagcacgaagaagaaaaattaatccagcaggaactgagtagtctgaaagcgactgtttctgctcctactacaacactgaaaatgatgaaggaatgtatggtgagacttatatattgtgaaatgcttggatatgatgcttcctttggctatattcatgcaatcaagttagcccaacaaggaaacctcttagaaaaaagagtaggttatttggctgtttccttatttctacatgaaagtcatgaattattgcttctccttgtgaatacagttgtaaaggatctgcagagcactaacctagtagaagtgtgtatggcactgactgttgttagccagattttcccctgcgaaatgattccagctgttcttccattaatagaagataaacttcaacattctaaggagattgtacgaagaaaagctgttctggcattatacaaattccatctcattgctcctaatcaagtacaacatattcatattaagtttcggaaagcactttgtgacagagatgttggggtcatggctgcctccttgcatatatatcttagaatgattaaggagaattcatctggatataaagacttgactgggagttttgtaaccattttgaagcaagtagttggaggaaagctcccagtagaattcaattaccacagtgtgccagcaccatggttacaaattcagctcttgagaatactgggacttctaggaaaagatgatcaaaggacaagtgaattaatgtatgatgttcttgatgaatccttacgaagagctgagttaaatcacaatgtcacatatgctattttgtttgaatgtgtgcatacagtctattctatttatcctaaatcggaattacttgagaaggctgccaagtgcattggaaaatttgttctgtcacctaaaataaatctaaaatatttaggactgaaggctcttacctatgttatccaacaggatcctactctggctcttcaacaccagatgacaataattgaatgtttagatcatcctgatcccattattaaaagagagactctggaacttctttacagaattactaatgcacagaatataacagttattgtccagaaaatgcttgaatatttacatcagagcaaagaagagtatgtcatcgtcaatttggtcggcaaaatagcagagctggctgagaaatatgctcctgataatgcatggtttattcagacaatgaatgctgtgttttcagtaggaggagatgtaatgcatcctgatattcccaataactttctgagactactagcggaaggttttgatgatgaaacagaagatcagcaattaagactctatgcagttcagtcttatctcactttactggatatggaaaatgtgttctatccacagagatttcttcaagttatgagttgggtattaggggaatattcctacctcttagataaggaaacgccagaggaagttatagctaagctctacaagttacttatgaatgactctgtgtcttcagaaacaaaagcctggttaattgctgctgtgaccaaattgacatctcaggcgcactcttctaatacagttgagagattaatccatgaatttaccatatctttggatacttgtatgagacaacatgcatttgaattaaaacatttgcatgagaatgtggaacttatgaagagcttgcttccagttgacaggagttgtgaagacttggtggtagatgcttctttatcttttctggatggttttgtggctgaaggactcagtcagggtgcagcgccttacaaacctccccatcaacgccaggaggaaaagctttctcaggaaaaagttctcaattttgaaccatatggactctccttttcttcatctggcttcactggacgacagtctcctgctggcatttctcttggttcagatgtatctgggaatagtgctgagacaggactgaaagagacaaatagcttgaagctggaaggtataaagaaattgtgggggaaagaaggctatcttcccaagaaggaaagcaaaactggtgatgaaagtggagctctgcctgttcctcaagagagtataatggagaatgtagatcaagctataactaaaaaggatcaatctcaagttcttacccaatctaaagaggagaaagaaaagcagctgctggcatcatcattatttgttggtctaggatcagaaagtacaatcaacctgctgggaaaagcagatactgtctctcacaagttcagaaggaaatcaaaagtcaaagaagctaaaagtggcgaaacaaccagtactcataatatgacctgttcttcctttagttctttgtcaaatgtggcatatgaagatgattattattcgaatactttgcacgatacaggagacaaggaattaaagaaattttctctcacttcagaacttttggattctgagtcactcacagaactgcccttggttgagaaattctcatattgtagtctgtctacaccttcattgtttgctaataacaacatggaaatttttcaccctcctcaatctactgcagcctcagttgccaaggaaagctctttagcttcatcttttttggaagaaactactgaatacatacactcaaatgctatggaagtctgtaataatgaaactatatcagtgtcttcttataaaatttggaaagatgattgtttattgatggtctggtcagtcactaataagagtggtttggaattgaaaagtgctgacttagaaatttttcctgcagaaaatttcaaggtgactgagcaacctggatgctgtttgcctgtaatggaagcagaaagcaccaaaagctttcaatatagtgtgcagatagaaaaaccttttacagaaggaaatcttactggttttattagttatcatatgatggatactcattctgctcagctggaattttctgtaaacttatcactattagatttcattagaccattaaaaatctcaagtgacgactttgggaaactctggttatccttcgcaaatgatgtgaaacaaaatgtaaaaatgtcagaatctcaagctgcacttccttctgcactaaagactctgcaacagaaactaagactccatattattgagattataggcaatgaagggctattggcctgtcagctgctcccatccatcccctgcttactgcattgccgagttcatgcagatgtattagccctgtggttcagatcctcctgttctactcttcctgactatttactgtatcagtgtcaaaaggtgatggagggatcctagcagaagccctgctaaattttactccatcaagatcaatggtttacatagataaacttatttaccaaagtaaaaagaactcatggtacttctaatgaaaatggggattattacaagtgtggtttatatgttttctttgtgattcctggtcaagaaagatccccaaaactgtatccctaacctttaactcaggattgtacagtatgtttaggtccctcaaaaagtgacctaagctaatgttataaactgctaatgatttatatatcacttagtgtgtagagggactgaaaatatttattttgttataaataattttatagcacgtttactctagtgctagctaatttgtaataaagccaagtctcagttttctgcattaaatggaagggagacatgaaattgataatctcaaacttaattcatatttggctttggaatgtagtgtatggtttttggtagggaagtcaatattttcgattatgttttgcttagatcagtgttgaactaagttggcatagcacacactaacagttgtaggagatccatgagcatgctggatattgaggggatccaatctgtgatctattttttattatagataactgttacacataatttcagatcgtttggctgtaaaatttgtctgttttccacttggagttattttaaaattcaaagtaaatcactctattcttattttgaaaactcagagccattttatatagaaacaaaacccataagagcacacagtaacaaagcaaacagatacaaaaatgactttttagttatgacaaatattttagttggttactacttaggtccttttggcaaatgaaaatttgtgattagagtataaatggcaaaactatcttttcctggcctttgaatccactagtacttaatggatatagctgaagcagagactaagtataacatacaggttcttcagtaaaatatatcattttcatgttatagttatgcctgtgtggcctctgtcagaactattatcagtaaaagaggttaagcctatatatgaatgatggaccaaaaccttgaggttgtacattaactgaaatagtattttataaaatcttatggtgctgtggaaaatatttattatttcaccttttctgacacttcaccatggagactattcaggtaatacaattttaagtcattgcagttaatactctggttaattggtactgttaatcacccaggtcaggaattctgattttaggttatctcattaatcatggctgataaagaagctaaggggattctccagatctaatagatttcattagtcatttgtgtcgagtattcctccctaaaaacaaaagcagtattttctttctcaattaatttttaagttattcattaaaaaatatataacatcttaattttattcttttaaaaacatacagtgaagccttgctacaagagtcataagtgactggaatttcttgcataataggttcctccttttgaatagatcagattcatccccaggctctcagcagtgtcatgatgaaatgagtgtgctgacttcaggggtgtggtggacactggtagctagccttatcagctccctccttattcctacctctgtcagcagcatgcctcgccccttacctaattctgctgtgactctgacagagaggaagtgccttctcactttgcaaaggaatgcagcatgtcacaaaggaggtgctccaattttttgtgtccttacttccctatgtttgcctagttactgaggctaggtcgagtgtgaagcaataggtgtaagatgctgagagcacatggacagctaccagggagatctgttgcttggttacagggtgtattcatgagtggtagctgcagttgtcgtgagagacatgcttggcatacagagctgtctaatgggtgggagacatgtaatggtagatttagggctgggagcatgattttgggtctgcccaaaggaacatggtgtcacttttgttctttctgacccactaaataaaaagtagtgtaacagggtttcactggaatgtttattagaaagtttacactttttatatttttatgattttaaaaacaaacaataatagaaaaacagattttaaggaacttcagagcagtatatattctgtctaaactcactgaatattttaagttgtaaatcaggtgtccaccaacctttatttttgcattgcaggagatgtgactgtaaagtagggagtttttttttttgagacagagtttcacccttgttgcccaggctagagtgtaatggtgcaatctccgctcactgcaacctctgcctcccaggttcaagcgattctcctgcctcagcctccctagtagctgggattacaggcatgcaccaccacacccggctaatttttttatatttttagtagagacaaggtttctccatgttggtcaggctggtctcgaactcccgacctcaggtgatctgcccgcctcagcctcccaaagtgctgggattacaggcgtgagccactgcgcccggccaaattatttttgtgggtagattcattctctttacctaatagtcataatttagtcagtgaagggacaacatctggggtaagagctatggaggaggtgctcagctttgtgagttttgtgccaggcatctttgctgaaaatggagatggcagcaagtgtgaatctgggggaatataagggaagacagaaaagccttaagagtagacggaggaagaagggtaccagaatagtccctgtggaggcaggcagatcagagctcagggtttgaaagtgggcctgagtaagggtcctgctagagaaactgcagatggaagctgagcagttaccaactgctaatgtgccaagtataccaagcacagcatgtgtcctgtagaggagcattattttaaacaatgttctactatcatctaccaaaataattgtggtaaaagtgtagtattttattttttccttttatgtcagcaatattttaaaatattgatctgtttatcttatatttttatggataaatgtagtatttgcctcatgattgtgagccactgagagtgcactgaacctattcacatgtctttaagatgttttgctgtgttaaaattttaggagagaaaaatacaagtgaataattatttaataggcatttattactttattttggagttgaattctgtcatttgaaaaagttcagtaatgtaataaatacaaagtgatctgcactgtt

SEQ ID NO: 172034 - DNA, 3414 bp, Artificial Sequence
  derived and/or modified sequence
atgtctgacatcgtggagaagaccctgacagccctgcccggcctcttcctgcagaaccagcccggcggcggccctgctgctgccaaggccagcttcagcagccggctgggcagcctggtgcggggcatcacagccctgaccagcaagcatgaggaggagaagctgatccagcaggagctgagcagcctgaaggccaccgtgtctgcccccaccaccaccctgaagatgatgaaggagtgcatggtgcggctcatctactgtgagatgctgggctatgatgccagctttggctacatccacgccatcaagctggcccagcagggcaacctgctggagaagagggtgggctacctggccgtgtccctcttcctgcacgagagccatgagctgctgctgctgctggtgaacacagtggtgaaggacctgcagagcaccaacctggtggaggtgtgcatggccctgactgtggtgtcccagatcttcccctgtgagatgatcccagctgtgctgcccctgattgaggacaagctgcagcacagcaaggagatcgtgcggaggaaggctgtgctggccctgtacaagttccacctgattgcccccaaccaggtgcagcacatccacatcaagttcaggaaggccctgtgtgacagagatgtgggcgtgatggccgccagcctgcacatctacctgaggatgatcaaggagaacagcagcggctacaaggacctgaccggcagctttgtgaccatcctgaagcaggtggtgggcggcaagctgcctgtggagttcaactaccacagcgtgcctgccccctggctgcagatccagctgctgcgcatcctgggcctgctgggcaaggatgaccagaggaccagcgagctgatgtatgatgtgctggatgagagcctgcggcgggcagagctgaaccacaacgtgacctacgccatcctgtttgaatgtgtgcacacagtgtacagcatctaccccaagtctgagctgctggagaaggccgccaagtgcatcggcaagtttgtgctgagccccaagatcaacctgaagtacctgggcctgaaggccctgacctacgtgatccagcaggaccccaccctggccctgcagcaccagatgaccatcatcgagtgcctggaccacccagaccccatcatcaagcgggagaccctggagctgctgtaccgcatcaccaatgcccagaacatcaccgtgattgtgcagaagatgctggagtacctgcaccagagcaaggaggagtatgtgattgtgaacctggtgggcaagattgctgagctggccgagaagtatgccccagacaatgcctggttcatccagaccatgaatgctgtgttttctgtgggcggagatgtgatgcacccagacatccccaacaacttcctgcggctgctggccgagggctttgatgatgaaacagaggaccagcagctgcggctgtatgctgtgcagagctacctgaccctgctggacatggagaatgtgttctacccccagcgcttcctgcaggtgatgtcctgggtgctgggggagtacagctacctgctggacaaggagaccccagaggaggtgattgccaagctgtacaagctgctgatgaatgattctgtgagcagcgagaccaaggcctggctgattgctgctgtgaccaagctgaccagccaggcccacagcagcaacacagtggagcggctcatccacgagttcaccatcagcctggacacctgcatgaggcagcacgcctttgagctgaagcacctgcatgaaaatgtggagctgatgaagagcctgctgcctgtggacaggagctgtgaggacctggtggtggatgccagcctgtccttcctggatggctttgtggccgagggcctgagccagggcgccgccccctacaagccaccccaccagaggcaggaggagaagctgagccaggagaaggtgctgaactttgagccctacggcctgtccttcagcagcagcggcttcaccggccggcagagccctgctggcatcagcctgggcagtgatgtgtctggcaacagcgctgagaccggcctgaaggagaccaacagcctgaagctggagggcatcaagaagctgtggggcaaggagggctacctgcccaagaaggagagcaagacaggagatgaaagtggggccctgcctgtgccccaggagagcatcatggagaatgtggaccaggccatcaccaagaaggaccagagccaggtgctgacccagagcaaggaggagaaggagaagcagctgctggccagcagcctgtttgtgggcctgggcagcgagagcaccatcaacctgctgggcaaggctgacacagtgagccacaagttccggaggaagagcaaggtgaaggaggccaagagcggggagaccaccagcacccacaacatgacctgcagcagcttcagcagcctgagcaatgtggcctatgaagatgactactacagcaacaccctgcatgacaccggggacaaggagctgaagaagttcagcctgaccagcgagctgctggacagcgagagcctgacagagctgcccctggtggagaagttctcctactgcagcctgagcacccccagcctgtttgccaacaacaacatggagatcttccaccccccccagagcacagctgcctctgtggccaaggagagcagcctggccagcagcttcctggaggagaccacagagtacatccacagcaatgccatggaggtgtgcaacaatgagaccatctctgtgtcctcctacaagatctggaaggatgactgcctgctgatggtgtggagcgtgaccaacaagagcggcctggagctgaagtctgctgacctggagatcttccctgctgagaacttcaaggtgacagagcagcccggctgctgcctgcctgtgatggaggccgagagcaccaagagcttccagtacagcgtgcagatcgagaagcccttcacagagggcaacctgaccggcttcatctcctaccacatgatggacacccacagcgcccagctggagttctctgtgaacctgagcctgctggacttcatccggcccctgaagatcagcagtgatgactttgggaagctgtggctgagctttgccaatgatgtgaagcagaatgtgaagatgtctgagagccaggccgccctgcccagcgccctgaagaccctgcagcagaagctgcggctgcacatcatcgagatcattggaaatgaaggcctgctggcctgccagctgctgcccagcatcccctgcctgctgcactgccgggtgcatgctgatgtgctggccctgtggttccgcagcagctgcagcaccctgcctgactacctgctgtaccagtgccagaaggtgatggagggcagctag

SEQ ID NO: 172035 - DNA, 3414 bp, Artificial Sequence
  derived and/or modified sequence
atgagcgacatcgtggagaagaccctgaccgccctgcccggcctgttcctgcagaatcaacctggcggggggccagctgcagccaaagcaagctttagctctcggctgggttctttggtgagaggcatcaccgctttgacatctaaacatgaggaagaaaagctcattcagcaggagttgagctctctgaaggcaaccgtgtccgcccccaccaccacgctaaaaatgatgaaagaatgcatggtgaggttgatctattgtgagatgctgggatatgacgcatctttcgggtatatccacgcaataaaattggctcaacaaggaaacttgttggagaagagggtgggctacctggcagtctccctgtttctgcacgagtcccatgaattactgctcttactggtgaacaccgtcgtgaaggatttgcaatctacgaatctggtggaggtttgtatggcccttacagtcgtgagccagattttcccttgtgaaatgattccagctgtgctgccactcattgaggacaagctgcagcactccaaagagattgttcgaagaaaggcggtccttgctctgtataagttccatcttatcgcacccaaccaggtgcaacacattcacatcaagttccgaaaagcactgtgtgatagggacgttggcgtcatggccgcttcccttcatatctatctgcggatgataaaggagaacagctccgggtacaaggatctgactgggtccttcgtcacgattctgaaacaggtggtgggcggcaagctccctgtggaatttaactatcactctgtccctgcaccttggctgcagatccaacttctgcggattctagggctgctgggtaaggatgatcagcgcacaagcgagttgatgtacgatgtgctggatgaaagcctcaggcgagcagaactgaaccataatgtcacttacgccatcttattcgagtgcgtgcacaccgtgtatagcatctacccaaagtccgagctcctggagaaggccgctaaatgcattggaaaattcgtcctgagccctaaaatcaacctcaaatatctcggactgaaggctctcacttacgttattcaacaggaccctaccctcgccctgcaacaccagatgacgataattgagtgtttggaccacccggacccgatcatcaaacgggagacccttgagctactctatcggatcaccaacgcccaaaacattacagtgattgtacaaaagatgctggagtacctgcaccaaagtaaggaagagtacgttattgtgaaccttgtgggcaaaatcgccgagttggccgagaagtatgcccccgacaacgcttggtttatccagacaatgaatgccgttttctcagtcggcggggacgttatgcaccctgacatccctaacaacttcctcagactgctcgcagaagggtttgacgatgagactgaggaccagcagctgcgtctgtacgccgtgcagtcttacctgaccctactcgacatggagaatgtgttttatcctcaacggttcctgcaggttatgtcttgggttcttggtgagtattcttacctcctggataaggagacacctgaagaggtgattgctaaactgtacaaattgttgatgaacgattctgttagcagcgagactaaagcttggctcattgcagccgtgaccaaactaacctctcaagctcactccagcaatacagtggagcgactgattcacgagtttacaatttcgcttgatacctgcatgaggcaacacgctttcgaactcaagcacctgcacgagaacgtggagctgatgaagtccctcctgcccgtggatcggagctgtgaagacctggtcgtggatgctagcctgtcattcctggacggcttcgtcgctgaaggattgagccagggggccgccccctataaacccccccatcagaggcaggaggagaagctctcacaagagaaagtgctgaactttgaaccatatggcctctctttctcctcttctggttttaccggccggcaatctccagccggcatcagcctgggctctgacgtgtctggtaacagtgccgaaaccggccttaaggagactaactctttgaagcttgaggggattaagaagctgtgggggaaagagggctacctccctaagaaggaatccaagacgggagatgaatctggtgctcttcccgtaccccaggagtctataatggagaatgttgatcaggccatcacaaaaaaggaccaatcccaagtgttaacccaatcgaaggaggagaaggaaaaacagctactcgctagcagtctgtttgtcggattaggctccgagtccaccatcaacctcctgggcaaagctgacaccgtgtcgcacaagtttcgaaggaagtctaaggtcaaggaggcaaagtccggtgagacaacaagcacccacaatatgacctgctcgtcattttcctccctgagtaatgtcgcctacgaagatgactattactcaaatacactgcatgacaccggtgacaaagaattgaagaagttctctctgacaagcgaactgttggactccgaatctctgacggaactgcctctggtagagaagttttcctattgttccctgagcacaccgtcgctctttgctaacaataacatggaaatctttcaccccccacagtcaactgctgccagcgtagcgaaagagagcagcctggccagctccttcctggaagagacgacagagtacatccatagcaatgccatggaagtgtgcaataatgagacaatcagtgtgtccagctataaaatatggaaagatgattgcctccttatggtatggtccgttaccaataagagtggccttgagcttaaatcagcggatcttgaaattttcccagcagagaatttcaaagtcacagaacagcccgggtgttgcttgcccgtcatggaagcagaatctaccaagtctttccaatacagtgtgcagatcgaaaagccctttactgagggaaacctaacaggtttcatatcatatcatatgatggatacccacagcgcccagttggagttctcagttaatctgagcctgctagatttcatccgtccactgaagatctcatccgacgatttcgggaagctgtggctctccttcgcaaacgacgtgaagcagaacgtaaaaatgtctgagagccaggcagcactgccttcggccctgaagactttacagcagaaactgcggctccacattatcgaaatcatcggcaacgagggattgctagcctgtcagctgctccccagtatcccttgcctcctccactgcagagtacatgctgatgtgttggcactctggtttaggtcctcttgctcgacacttcctgattaccttctctatcagtgtcagaaagtgatggaggggtcatag

SEQ ID NO: 172036 - DNA, 3414 bp, Artificial Sequence
  derived and/or modified sequence
atgagtgatatagttgaaaagaccctcacggccctgccgggattattcctccagaatcagccgggaggagggccagccgctgctaaagcttcatttagctcccggctaggttcgctggttcgtggaatcacagccctgacatcaaaacatgaagaggagaagcttatacaacaggagttgtcttcactgaaggcaactgtcagtgcgcctaccacaacattgaaaatgatgaaagagtgtatggtccgcctcatatactgtgagatgctgggatatgatgcctcctttgggtacatccacgctatcaagttagcccagcagggaaacttattggaaaagagagtagggtacctggcagtttctctgttcctccacgaaagtcacgagcttctcctgctcttggtcaataccgtagtgaaagatctccagtctaccaacttggtagaggtgtgtatggcactcacggtggtctctcaaatatttccctgcgaaatgattccagcagtgctgccactgatagaagataagttgcagcactccaaagagatcgtgcgtagaaaggcagttcttgcactgtacaagttccacctgatcgctcctaaccaagtccagcatatccacattaaatttcgaaaagcactttgtgacagagacgtcggagtcatggcggcttccttgcacatatatttgagaatgattaaggagaattcaagtgggtacaaggacctaacaggttccttcgtgacgattctcaagcaggttgtcgggggaaagctacccgtggaatttaactatcatagtgtgcccgcaccatggctgcagattcagctgctacgcatcttgggcctgctgggcaaggatgatcagaggacatccgagctgatgtatgatgtgctggacgagtcccttcggagagctgagctgaatcacaacgtgacatatgccattctgtttgaatgcgtgcacaccgtctactcaatttatccaaaaagtgaactgcttgaaaaagctgcgaagtgtattggaaagtttgtcctttcacctaagattaatttaaagtacttggggctcaaagccctcacctatgtcattcagcaggacccgaccctcgctctgcagcaccagatgaccattatagagtgtctcgaccatccagacccaatcataaagagagaaaccctggaacttctttaccgcatcactaacgcacaaaatatcaccgtgatcgtccagaaaatgctggagtatctccatcaaagtaaagaggagtacgttatagtgaatctggtaggcaagatcgctgagctcgcagaaaagtacgcccctgacaatgcttggtttatccagaccatgaatgcggtgttttctgtggggggagacgtgatgcacccagacattcccaataactttctgcgattactcgccgaggggttcgacgatgaaactgaggatcagcagcttcgtttgtacgctgtgcagagctaccttacgttactggacatggagaacgttttttatcctcagagatttctgcaggttatgagctgggtgttgggggaatatagctacttgctggacaaggaaactcctgaagaagtgatcgcaaaactgtacaagctattaatgaatgattcggtgtctagtgaaacgaaagcgtggttgatagccgctgtcactaaactgacctcccaggcacattcttcaaatacagtggagagattaattcatgagttcaccatttcgctggatacttgcatgaggcagcacgccttcgagcttaaacatttgcacgaaaatgtggagctgatgaagagtcttctccccgtggatcggagctgtgaggaccttgttgttgatgcttcactctcatttttggacggcttcgtcgccgaaggactcagccagggcgcagccccatataagccgcctcaccagaggcaggaggaaaagctgagccaggagaaggttttgaactttgagccgtatggtctgtcattctccagctccggctttaccggccgacagtccccagccggaattagcctcggcagcgacgtctctggtaacagcgcggagactggcctcaaggagactaactccttgaagttagaaggcattaagaagctgtgggggaaagagggctatcttcccaagaaagaatccaaaaccggagatgagtccggagccctgcctgtgccacaggagagcatcatggagaacgtcgaccaagcaataaccaaaaaggaccagagtcaggtgctgacccaatcaaaggaagagaaggaaaagcagcttctggcctctagcctgttcgtggggctgggttctgagtctacgattaacttgttagggaaagcagacaccgtgtctcataaattccgcaggaaatctaaggtgaaagaggccaagtctggagagactacgtctactcacaatatgacttgttcaagcttctcatcactaagcaatgtggcctatgaggacgattactacagtaacactctgcacgatactggagataaggaactgaaaaaattcagcctgacaagtgagctactcgattcggaatctctcaccgagctccccctagtagaaaaatttagctattgtagcctgagcactccatctctcttcgcaaataataacatggaaatcttccatccccctcagagcaccgcagcaagtgtggcaaaggaatcttcactggcctcaagcttcctcgaagagaccacagagtatattcatagcaatgcaatggaagtgtgcaacaacgaaacaatcagcgtatctagctataagatttggaaagacgattgcctgttaatggtatggtcagtaaccaacaaatccggattagaattgaagtcggcagatctggaaattttcccagccgagaactttaaggtgacggagcagcctggctgctgtctcccagttatggaggccgaatccacgaagtccttccaatatagcgtgcaaatcgagaagccttttaccgagggcaatttgacgggttttatatcataccatatgatggacactcatagtgcacaactggagttttcggtgaacctgtccctgctggatttcatccggccactcaagatcagcagcgatgacttcggcaagctttggctctcgttcgccaatgatgtgaaacagaacgtgaagatgagcgagtctcaagcggctctgcccagcgcactgaaaacgctgcagcagaagctgcggctgcacataattgaaattattgggaacgagggcctgttggcttgtcagcttctgccatcaatcccctgtctattgcactgcagggtgcatgcagacgtgctggctttgtggttccgctcctcttgttcaacccttcccgactatctattataccaatgtcagaaagttatggagggcagctag

SEQ ID NO: 172037 - DNA, 3414 bp, Artificial Sequence
  derived and/or modified sequence
atgagcgacatcgtggagaagaccctgaccgccctgcccggcctgttcctgcagaaccagcccggcggcggccccgccgccgccaaggccagcttcagcagcagactgggcagcctggtgagaggcatcaccgccctgaccagcaagcacgaggaggagaagctgatccagcaggagctgagcagcctgaaggccaccgtgagcgcccccaccaccaccctgaagatgatgaaggagtgcatggtgagactgatctactgcgagatgctgggctacgacgccagcttcggctacatccacgccatcaagctggcccagcagggcaacctgctggagaagagagtgggctacctggccgtgagcctgttcctgcacgagagccacgagctgctgctgctgctggtgaacaccgtggtgaaggacctgcagagcaccaacctggtggaggtgtgcatggccctgaccgtggtgagccagatcttcccctgcgagatgatccccgccgtgctgcccctgatcgaggacaagctgcagcacagcaaggagatcgtgagaagaaaggccgtgctggccctgtacaagttccacctgatcgcccccaaccaggtgcagcacatccacatcaagttcagaaaggccctgtgcgacagagacgtgggcgtgatggccgccagcctgcacatctacctgagaatgatcaaggagaacagcagcggctacaaggacctgaccggcagcttcgtgaccatcctgaagcaggtggtgggcggcaagctgcccgtggagttcaactaccacagcgtgcccgccccctggctgcagatccagctgctgagaatcctgggcctgctgggcaaggacgaccagagaaccagcgagctgatgtacgacgtgctggacgagagcctgagaagagccgagctgaaccacaacgtgacctacgccatcctgttcgagtgcgtgcacaccgtgtacagcatctaccccaagagcgagctgctggagaaggccgccaagtgcatcggcaagttcgtgctgagccccaagatcaacctgaagtacctgggcctgaaggccctgacctacgtgatccagcaggaccccaccctggccctgcagcaccagatgaccatcatcgagtgcctggaccaccccgaccccatcatcaagagagagaccctggagctgctgtacagaatcaccaacgcccagaacatcaccgtgatcgtgcagaagatgctggagtacctgcaccagagcaaggaggagtacgtgatcgtgaacctggtgggcaagatcgccgagctggccgagaagtacgcccccgacaacgcctggttcatccagaccatgaacgccgtgttcagcgtgggcggcgacgtgatgcaccccgacatccccaacaacttcctgagactgctggccgagggcttcgacgacgagaccgaggaccagcagctgagactgtacgccgtgcagagctacctgaccctgctggacatggagaacgtgttctacccccagagattcctgcaggtgatgagctgggtgctgggcgagtacagctacctgctggacaaggagacccccgaggaggtgatcgccaagctgtacaagctgctgatgaacgacagcgtgagcagcgagaccaaggcctggctgatcgccgccgtgaccaagctgaccagccaggcccacagcagcaacaccgtggagagactgatccacgagttcaccatcagcctggacacctgcatgagacagcacgccttcgagctgaagcacctgcacgagaacgtggagctgatgaagagcctgctgcccgtggacagaagctgcgaggacctggtggtggacgccagcctgagcttcctggacggcttcgtggccgagggcctgagccagggcgccgccccctacaagcccccccaccagagacaggaggagaagctgagccaggagaaggtgctgaacttcgagccctacggcctgagcttcagcagcagcggcttcaccggcagacagagccccgccggcatcagcctgggcagcgacgtgagcggcaacagcgccgagaccggcctgaaggagaccaacagcctgaagctggagggcatcaagaagctgtggggcaaggagggctacctgcccaagaaggagagcaagaccggcgacgagagcggcgccctgcccgtgccccaggagagcatcatggagaacgtggaccaggccatcaccaagaaggaccagagccaggtgctgacccagagcaaggaggagaaggagaagcagctgctggccagcagcctgttcgtgggcctgggcagcgagagcaccatcaacctgctgggcaaggccgacaccgtgagccacaagttcagaagaaagagcaaggtgaaggaggccaagagcggcgagaccaccagcacccacaacatgacctgcagcagcttcagcagcctgagcaacgtggcctacgaggacgactactacagcaacaccctgcacgacaccggcgacaaggagctgaagaagttcagcctgaccagcgagctgctggacagcgagagcctgaccgagctgcccctggtggagaagttcagctactgcagcctgagcacccccagcctgttcgccaacaacaacatggagatcttccaccccccccagagcaccgccgccagcgtggccaaggagagcagcctggccagcagcttcctggaggagaccaccgagtacatccacagcaacgccatggaggtgtgcaacaacgagaccatcagcgtgagcagctacaagatctggaaggacgactgcctgctgatggtgtggagcgtgaccaacaagagcggcctggagctgaagagcgccgacctggagatcttccccgccgagaacttcaaggtgaccgagcagcccggctgctgcctgcccgtgatggaggccgagagcaccaagagcttccagtacagcgtgcagatcgagaagcccttcaccgagggcaacctgaccggcttcatcagctaccacatgatggacacccacagcgcccagctggagttcagcgtgaacctgagcctgctggacttcatcagacccctgaagatcagcagcgacgacttcggcaagctgtggctgagcttcgccaacgacgtgaagcagaacgtgaagatgagcgagagccaggccgccctgcccagcgccctgaagaccctgcagcagaagctgagactgcacatcatcgagatcatcggcaacgagggcctgctggcctgccagctgctgcccagcatcccctgcctgctgcactgcagagtgcacgccgacgtgctggccctgtggttcagaagcagctgcagcaccctgcccgactacctgctgtaccagtgccagaaggtgatggagggcagctag

SEQ ID NO: 172038 - protein, 670 aa, Artificial Sequence
  derived and/or modified sequence
MGEPAGVAGTMESPFSPGLFHRLDEDWDSALFAELGYFTDTDELQLEAANETYENNFDNLDFDLDLMPWESDIWDINNQICTVKDIKAEPQPLSPASSSYSVSSPRSVDSYSSTQHVPEELDLSSSSQMSPLSLYGENSNSLSSAEPLKEDKPVTGPRNKTENGLTPKKKIQVNSKPSIQPKPLLLPAAPKTQTNSSVPAKTIIIQTVPTLMPLAKQQPIISLQPAPTKGQTVLLSQPTVVQLQAPGVLPSAQPVLAVAGGVTQLPNHVVNVVPAPSANSPVNGKLSVTKPVLQSTMRNVGSDIAVLRRQQRMIKNRESACQSRKKKKEYMLGLEARLKAALSENEQLKKENGTLKRQLDEVVSENQRLKVPSPKRRVVCVMIVLAFIILNYGPMSMLEQDSRRMNPSVSPANQRRHLLGFSAKEAQDTSDGIIQKNSYRYDHSVSNDKALMVLTEEPLLYIPPPPCQPLINTTESLRLNHELRGWVHRHEVERTKSRRMTNNQQKTRILQGALEQGSNSQLMAVQYTETTSSISRNSGSELQVYYASPRSYQDFFEAIRRRGDTFYVVSFRRDHLLLPATTHNKTTRPKMSIVLPAININENVINGQDYEVMMQIDCQVMDTRILHIKSSSVPPYLRDQQRNQTNTFFGSPPAATEATHVVSTIPESLQ

SEQ ID NO: 172039 - DNA, 2488 bp, Artificial Sequence
  derived and/or modified sequence
ttttgtccgcctgccgccgccgtcccagatattaatcacggagttccagggagaaggaacttgtgaaatgggggagccggctggggttgccggcaccatggagtcaccttttagcccgggactctttcacaggctggatgaagattgggattctgctctctttgctgaactcggttatttcacagacactgatgagctgcaattggaagcagcaaatgagacgtatgaaaacaattttgataatcttgattttgatttggatttgatgccttgggagtcagacatttgggacatcaacaaccaaatctgtacagttaaagatattaaggcagaacctcagccactttctccagcctcctcaagttattcagtctcgtctcctcggtcagtggactcttattcttcaactcagcatgttcctgaggagttggatttgtcttctagttctcagatgtctcccctttccttatatggtgaaaactctaatagtctctcttcagcggagccactgaaggaagataagcctgtcactggtcctaggaacaagactgaaaatggactgactccaaagaaaaaaattcaggtgaattcaaaaccttcaattcagcccaagcctttattgcttccagcagcacccaagactcaaacaaactccagtgttccagcaaaaaccatcattattcagacagtaccaacgcttatgccattggcaaagcagcaaccaattatcagtttacaacctgcacccactaaaggccagacggttttgctgtctcagcctactgtggtacaacttcaagcacctggagttctgccctctgctcagccagtccttgctgttgctgggggagtcacacagctccctaatcacgtggtgaatgtggtaccagccccttcagcgaatagcccagtgaatggaaaactttccgtgactaaacctgtcctacaaagtaccatgagaaatgtcggttcagatattgctgtgctaaggagacagcaacgtatgataaaaaatcgagaatccgcttgtcagtctcgcaagaagaagaaagaatatatgctagggttagaggcgagattaaaggctgccctctcagaaaacgagcaactgaagaaagaaaatggaacactgaagcggcagctggatgaagttgtgtcagagaaccagaggcttaaagtccctagtccaaagcgaagagttgtctgtgtgatgatagtattggcatttataatactgaactatggacctatgagcatgttggaacaggattccaggagaatgaaccctagtgtgagccctgcaaatcaaaggaggcaccttctaggattttctgctaaagaggcacaggacacatcagatggtattatccagaaaaacagctacagatatgatcattctgtttcaaatgacaaagccctgatggtgctaactgaagaaccattgctttacattcctccacctccttgtcagcccctaattaacacaacagagtctctcaggttaaatcatgaacttcgaggatgggttcatagacatgaagtagaaaggaccaagtcaagaagaatgacaaataatcaacagaaaacccgtattcttcagggtgctctggaacagggctcaaattctcagctgatggctgttcaatacacagaaaccactagtagtatcagcaggaactcagggagtgagctacaagtgtattatgcttcacccagaagttatcaagacttttttgaagccatccgcagaaggggagacacattttatgttgtgtcatttcgaagggatcacctgctgttaccagctaccacccataacaagaccacaagaccaaaaatgtcaattgtgttaccagcaataaacataaatgagaatgtgatcaatgggcaggactacgaagtgatgatgcagattgactgtcaggtgatggacaccaggatcctccatatcaaaagttcgtcagttcctccttacctccgagatcagcagaggaatcaaaccaacaccttctttggctcccctcccgcagccacagaggcaacccacgttgtcagcaccatccctgagtcattacaatagcaccctgcagctatgctggaaaactgagcgtgggaccctgccagactgaagagcaggtgagcaaaatgctgctttctgccttggtggcaggcagagaactgtctcgtactagaattcaaggaggaaagaagaagaaataaaagaagctgctccatttttcatcatctacccatctatttggaaagcactggaattcagatgcaagagaacaatgtttcttcagtggcaaatgtagccctgcatcctccagtgttacctggtgtagatttttttttctgtacctttctaaacctctcttccctctgtgatggttttgtgtttaaacagtcatcttcttttaaataatatccacctctcctttttgccatttcacttattgattcataaagtgaattttatttaaagcta

SEQ ID NO: 172040 - DNA, 2013 bp, Artificial Sequence
  derived and/or modified sequence
atgggagagcccgctggcgtcgccgggactatggaaagtcccttttcacccggactttttcaccgactggacgaggactgggactccgcactgtttgctgaattaggctactttaccgacacagacgagctgcagctcgaggcggctaacgaaacctatgagaataactttgacaatctcgactttgacctggacttgatgccttgggagtcagatatttgggacataaacaatcagatttgcactgtcaaagatattaaggcagaaccccagccgctgtctcccgcctcgtcctcatactccgtctcttccccccgtagcgtggattcatactcaagtacccagcacgtgcccgaagaattagacttaagttcctccagccaaatgtctcctctgagcctgtacggagagaacagtaatagccttagctctgccgagcctctgaaggaggacaagccggtaactggacctaggaacaagaccgagaacggattaacccccaagaagaaaattcaagttaatagtaagccttctattcaacccaaacctcttctgctgccggccgctcccaagacccagactaactcttctgtcccggccaagaccattattattcagactgtgcccactttgatgccattagccaaacagcagccaataatttctttgcaaccagctccgacaaagggacagaccgtgctactcagccagccaacagtcgttcaattacaggcccccggggtgctgccctctgctcagcctgtactggcagtcgcaggtggggtgactcagttgccaaatcacgtcgtgaacgtggtgcccgcaccaagcgccaattcccctgtcaacgggaaactaagtgttacgaaacctgtgctgcaatccacaatgagaaacgtggggtctgacattgccgtcctgagaaggcaacagaggatgatcaagaaccgggagagcgcttgccagtcaagaaaaaagaagaaagagtacatgttagggttagaagcccgcctaaaggctgccctaagcgagaacgaacagctcaaaaaggagaatggaacactcaaacgccaattggacgaggtcgtgtcggagaatcagagactcaaagtacctagtcccaagcgcagggtggtgtgtgtaatgatcgtactggctttcatcatcctcaattacggaccaatgtccatgttggaacaggatagtaggcgcatgaatccaagcgtgagccccgccaatcagaggcggcatttgttaggattcagcgccaaggaggctcaggacacgagcgacgggattatccagaagaatagttaccgctacgatcattcagtgagtaatgataaagctctcatggtgctgaccgaggaacccctactgtacatccccccacctccctgtcaaccactgattaatactacagagtctctgcgcctgaaccacgaactcaggggttgggtacaccggcacgaggtcgagcgaaccaaatctaggcggatgacaaataaccaacagaagactaggattctgcaaggtgccctcgagcagggatccaactcccagctgatggctgtgcaatataccgagaccacctcaagtatttcaaggaatagtggtagtgaattgcaggtatattacgcctctcctagatcctatcaggacttttttgaggccattaggagaagaggtgatacgttttatgttgtcagctttagaagggatcacctgctgctccctgcaacgactcacaacaagaccactcggccaaagatgagcattgtgctacccgcaatcaatattaacgaaaatgttattaatggtcaggattacgaggtgatgatgcagattgattgtcaggttatggatactagaattctgcatataaagagcagcagcgtgccaccatatctgcgcgaccaacagcggaaccagacgaatacgttttttggctctccacccgccgctactgaggcaactcacgtggtgtctacgatccctgagtccctccagtag

SEQ ID NO: 172041 - DNA, 2013 bp, Artificial Sequence
  derived and/or modified sequence
atgggagagcctgctggggtggccggcaccatggagagccccttcagccctggcctcttccaccggctggatgaggactgggacagcgccctgtttgctgagctgggctacttcacagacacagatgagctgcagctggaggccgccaatgagacctatgagaacaactttgacaacctggactttgacctggacctgatgccctgggagagtgacatctgggacatcaacaaccagatctgcaccgtgaaggacatcaaggccgagccccagcccctgagccctgccagcagcagctacagcgtgagcagccccaggtctgtggacagctacagcagcacccagcacgtgcctgaggagctggacctgagcagcagcagccagatgagccccctgagcctgtatggagagaacagcaacagcctgagcagcgctgagcccctgaaggaggacaagcctgtgacaggccccaggaacaagacagaaaatggcctgacccccaagaagaagatccaggtgaacagcaagcccagcatccagcccaagcccctgctgctgcctgctgcccccaagacccagaccaacagctctgtgcctgccaagaccatcatcatccagacagtgcccaccctgatgcccctggccaagcagcagcccatcatcagcctgcagcctgcccccaccaagggccagacagtgctgctgagccagcccaccgtggtgcagctgcaggcccctggggtgctgcccagcgcccagcctgtgctggccgtggccggcggcgtgacccagctgcccaaccacgtggtgaatgtggtgcctgcccccagcgccaacagccctgtgaatggcaagctgtctgtgaccaagcctgtgctgcagagcaccatgagaaatgtgggcagtgacattgctgtgctgcggcggcagcagaggatgatcaagaaccgggagagcgcctgccagagcaggaagaagaagaaggagtacatgctgggcctggaggcccggctgaaggccgccctgtctgaaaatgagcagctgaagaaggaaaatggcaccctgaagaggcagctggatgaggtggtgtctgagaaccagaggctgaaggtgcccagccccaagagaagagtggtgtgtgtgatgattgtgctggccttcatcatcctgaactacggccccatgtccatgctggagcaggacagcaggaggatgaaccccagcgtgtccccagccaaccagaggaggcacctgctgggcttcagcgccaaggaggcccaggacaccagtgatggcatcatccagaagaacagctaccgctatgaccacagcgtgtccaatgacaaggccctgatggtgctgacagaggagcccctgctgtacatccccccaccaccctgccagcccctcatcaacaccacagagagcctgcggctgaaccacgagctgcggggctgggtgcacagacatgaggtggagaggaccaagagcaggaggatgaccaacaaccagcagaagacccgcatcctgcagggcgccctggagcagggcagcaacagccagctgatggctgtgcagtacacagagaccaccagcagcatcagcaggaacagcggcagcgagctgcaggtgtactatgccagccccaggagctaccaggacttctttgaggccatcagaagaagaggagacaccttctacgtggtgtccttccggcgggaccacctgctgctgcctgccaccacccacaacaagaccacccggcccaagatgagcatcgtgctgcctgccatcaacatcaatgaaaatgtcatcaatggccaggactatgaggtgatgatgcagattgactgccaggtgatggacacccgcatcctgcacatcaagagcagctctgtgcccccctacctgcgggaccagcagaggaaccagaccaacaccttcttcggcagccccccagctgccacagaggccacccacgtggtgtccaccatccctgagagcctgcagtag

SEQ ID NO: 172042 - DNA, 2013 bp, Artificial Sequence
  derived and/or modified sequence
atgggcgagcccgccggcgtggccggcaccatggagagccccttctcccctgggctgtttcaccgtttggacgaagattgggattctgccttgttcgcggaattgggttatttcacagacactgacgaattacagctcgaggccgcaaacgagacatacgagaataactttgacaacctggacttcgaccttgacctaatgccatgggaatcggatatctgggatatcaacaaccagatctgcacggttaaggatattaaggccgagccccaacccctgagcccagctagctcgagttactctgtgtcatccccgcggagtgtggactcatatagcagtacccaacacgtgcctgaagagctggacctaagcagctcttcccaaatgtctcccctcagcctctatggagaaaatagcaacagtttgtcttctgctgagccccttaaggaggacaagcccgtgactggaccgcgtaataaaaccgagaacggtctgactcctaaaaaaaaaatccaggtgaactctaagcccagcattcaaccaaagccactgctgctgcccgccgcccccaaaacacaaacaaactcgagtgttccggcgaaaaccattattattcaaacagttcccaccctcatgcctctggccaagcaacagcccatcatcagcctgcaacccgctccaacaaaaggacagactgttttgctctcccaaccgactgtagtccaacttcaggccccaggcgtcctgccaagtgcccagcccgttctggccgtcgctggaggggtgacgcaactccccaatcacgtggttaacgtagtgcctgccccatcagccaacagtccagttaatggcaagctcagcgtgaccaagcctgtgctccaatctactatgagaaatgtgggcagcgatatcgccgtgctccgccgccagcaacgcatgattaagaacagagaaagtgcctgtcagagcaggaaaaagaagaaggaatatatgctggggttggaggccaggctcaaggctgcactctcagagaatgagcaactgaaaaaggaaaacggcaccttgaagcgccagctggacgaggtggtctccgaaaaccagcgactaaaggttccttcgccgaaaaggcgtgtggtctgcgtcatgatagtgttggcctttataatcctcaattacggtcccatgtccatgctggaacaagactctcgccggatgaacccatccgtctcccccgccaatcaacgacgtcacctgctaggcttctctgccaaggaggcacaggataccagcgatgggattatccagaagaactcctaccggtacgaccattccgtgtccaacgataaggccctgatggttctaaccgaggagcccctactctatatacccccacccccttgtcagcccttgatcaataccactgagtctctgcgcctgaaccatgagctgagaggctgggtccaccgccatgaggtggaacgaacaaagagtcggcggatgaccaacaaccagcagaagactaggattctgcagggtgctcttgaacaaggatccaacagccagctcatggcagtgcagtatacagagaccaccagttccatttccagaaacagtgggtctgagctgcaggtatattacgcatcaccaagatcttatcaagatttttttgaagctattaggcggagaggggacacattctatgttgtgagcttccgcagggaccacttactcctgccggctacgacgcacaataaaaccacaagacctaagatgagcatcgtgttacctgcgattaatatcaacgagaacgtgattaatggacaagactacgaagttatgatgcagatcgattgtcaggtgatggacaccagaatcctccacatcaaaagttcctccgtgccaccatatcttagggaccagcagcggaatcaaaccaacacctttttcggttctccccctgctgccacagaagccacacatgtagtttccacaattcccgagagcctacagtag

SEQ ID NO: 172043 - DNA, 2013 bp, Artificial Sequence
  derived and/or modified sequence
atgggcgaaccagccggagttgccggtacgatggaaagtcctttttctcctggcctgttccatcggctggatgaggactgggacagtgccctgtttgccgaactcggatatttcacggacaccgacgaactgcagttagaggccgcaaacgagacttatgagaacaacttcgataatctagattttgacctggatttaatgccctgggagagcgacatctgggatatcaataatcagatctgtactgtgaaagacatcaaagcagagccccaacctctctccccagcctccagctcctactccgttagcagccctcgcagtgtggacagctatagttctacgcaacatgtgccagaggagctcgacctgagttcatccagccagatgagccctctcagcctctacggtgagaatagtaacagcctctcaagcgccgaacctctgaaagaggataaacccgtcactggcccacggaataagacggaaaatggattaacaccaaagaagaagatccaggtcaactccaagccctcgatacaacccaaacctctactgctccctgccgcacccaaaactcaaactaattcttcggttcctgccaagactattataatccagacagtgcccaccctgatgcctctcgcgaagcagcaaccaataattagcttacaaccagcacccactaagggccagactgtgctgctgtctcagcctaccgtagtgcaacttcaggcccctggagttctgcctagcgcccagccagtgttggcagtagccggtggggtgactcagctgcctaatcacgtggttaacgtagttcctgcccctagtgctaattctccggtcaacggtaagctttccgtaaccaagccagttctgcaaagcacaatgcggaacgtggggtccgacatcgctgtcctgcgacggcagcagcggatgatcaagaatcgggaatccgcctgccagagccgcaagaaaaaaaaggaatacatgctgggtcttgaagcgaggttaaaggctgcacttagtgagaacgagcagctgaaaaaagagaacggaacgttaaagcgccaactggatgaagtagtaagtgaaaatcagcgacttaaggtgccctcacccaagcggagggttgtctgtgtaatgattgttctggcattcatcattctaaactacggacctatgtccatgctggagcaggatagtcggaggatgaacccttcagtgagtcccgcaaaccagaggaggcaccttttggggtttagcgcaaaagaggcccaagacaccagcgacgggatcattcagaagaacagctatagatacgaccactccgtttcaaatgacaaagcacttatggtgctgaccgaggagccactgttatacatcccacccccaccctgtcagccactcatcaatacaaccgagagtctcaggctgaaccacgaactgcgtggctgggtgcacaggcacgaagtagagcgcacaaaaagccgcagaatgacaaacaaccaacagaagacgcggatactccagggcgcactggagcagggctcaaattcacagctgatggcagtgcagtacaccgaaactacttcgtctatctcacgcaattcaggaagtgaactacaggtctactatgcctcacctcgctcatatcaggacttcttcgaagcgattagacgtcggggagatactttctacgtggtctcctttcggagggatcacctcctgctccctgccactacccacaacaaaacaacaaggccgaagatgagcatcgtgctcccggcaatcaatattaacgagaatgtcatcaatgggcaggattacgaggtgatgatgcaaatcgactgtcaggtcatggacacccgaatcctgcacattaagtccagttccgtcccaccatacctcagagaccagcagcgcaatcagacaaacacgttcttcggcagccccccagcagcaactgaggccacacatgttgtctcaactattcccgaatctctgcaatag

SEQ ID NO: 172044 - DNA, 7496 bp, Artificial Sequence
  derived and/or modified sequence
ttttgtccgcctgccgccgccgtcccagatattaatcacggagttccagggagaaggaacttgtgaaatgggggagccggctggggttgccggcaccatggagtcaccttttagcccgggactctttcacaggctggatgaagattgggattctgctctctttgctgaactcggttatttcacagacactgatgagctgcaattggaagcagcaaatgagacgtatgaaaacaattttgataatcttgattttgatttggatttgatgccttgggagtcagacatttgggacatcaacaaccaaatctgtacagttaaagatattaaggcagaacctcagccactttctccagcctcctcaagttattcagtctcgtctcctcggtcagtggactcttattcttcaactcagcatgttcctgaggagttggatttgtcttctagttctcagatgtctcccctttccttatatggtgaaaactctaatagtctctcttcagcggagccactgaaggaagataagcctgtcactggtcctaggaacaagactgaaaatggactgactccaaagaaaaaaattcaggtgaattcaaaaccttcaattcagcccaagcctttattgcttccagcagcacccaagactcaaacaaactccagtgttccagcaaaaaccatcattattcagacagtaccaacgcttatgccattggcaaagcagcaaccaattatcagtttacaacctgcacccactaaaggccagacggttttgctgtctcagcctactgtggtacaacttcaagcacctggagttctgccctctgctcagccagtccttgctgttgctgggggagtcacacagctccctaatcacgtggtgaatgtggtaccagccccttcagcgaatagcccagtgaatggaaaactttccgtgactaaacctgtcctacaaagtaccatgagaaatgtcggttcagatattgctgtgctaaggagacagcaacgtatgataaaaaatcgagaatccgcttgtcagtctcgcaagaagaagaaagaatatatgctagggttagaggcgagattaaaggctgccctctcagaaaacgagcaactgaagaaagaaaatggaacactgaagcggcagctggatgaagttgtgtcagagaaccagaggcttaaagtccctagtccaaagcgaagagttgtctgtgtgatgatagtattggcatttataatactgaactatggacctatgagcatgttggaacaggattccaggagaatgaaccctagtgtgagccctgcaaatcaaaggaggcaccttctaggattttctgctaaagaggcacaggacacatcagatggtattatccagaaaaacagctacagatatgatcattctgtttcaaatgacaaagccctgatggtgctaactgaagaaccattgctttacattcctccacctccttgtcagcccctaattaacacaacagagtctctcaggttaaatcatgaacttcgaggatgggttcatagacatgaagtagaaaggaccaagtcaagaagaatgacaaataatcaacagaaaacccgtattcttcagggtgctctggaacagggctcaaattctcagctgatggctgttcaatacacagaaaccactagtagtatcagcaggaactcagggagtgagctacaagtgtattatgcttcacccagaagttatcaagacttttttgaagccatccgcagaaggggagacacattttatgttgtgtcatttcgaagggatcacctgctgttaccagctaccacccataacaagaccacaagaccaaaaatgtcaattgtgttaccagcaataaacataaatgagaatgtgatcaatgggcaggactacgaagtgatgatgcagattgactgtcaggtgatggacaccaggatcctccatatcaaaagttcgtcagttcctccttacctccgagatcagcagaggaatcaaaccaacaccttctttggctcccctcccgcagccacagaggcaacccacgttgtcagcaccatccctgagtcattacaatagcaccctgcagctatgctggaaaactgagcgtgggaccctgccagactgaagagcaggtgagcaaaatgctgctttctgccttggtggcaggcagagaactgtctcgtactagaattcaaggaggaaagaagaagaaataaaagaagctgctccatttttcatcatctacccatctatttggaaagcactggaattcagatgcaagagaacaatgtttcttcagtggcaaatgtagccctgcatcctccagtgttacctggtgtagatttttttttctgtacctttctaaacctctcttccctctgtgatggttttgtgtttaaacagtcatcttcttttaaataatatccacctctcctttttgccatttcacttattgattcataaagtgaattttatttaaagctatgccacacatgcatgttcaaatggtttccactgattcgatttttcattcatttaatgcaaacccattctggatattgtgcttatttgagaaaacacatttcaaaaccagaaaagccaaaaacactccaaaaacaagcaaaacaatttggagctttagataaaaggaaaaactcccagttggtaaagtttatctttacttaggatttgtggctcacacctaaacaaagggggtcagggagtgggtacaaatttgagaaaatagaagggtaagggaagggccagtggtggggtttggagagaggagatagctccattaatacacatgtttaaaagatggaaagttcacgcctgtaatcccagcactttgggaggccgaggcgggtggatcacgaggtcaggagatcaagaccatcccggctaaaacggtgaaaccccgtctctactaaaaatacaaaaaattagccgggcgtagtgacgggcgcctgtagtcccagctacttgggaggctgaggcaggagaatggcgtgaacccgggaggcggagcttgcagtgagccgagatcccgccactgcactccagcctgggcgacagagcgagactccgtctcaaaaaaaaaaaaaaaaaaaaaaaaagatggaaagttcgatgtgactgcagtatgagattaaagccacaactattgtttattttggggactctaggccaccaagtattagcacacatacttatgttttctctactaatctggtccaggtcctcatggaccacaggacaaagctttcattttcattcattcttctattgaaattataccaaattcagctgaggaatatggaagtaactttagacttaaacaagacaaaagttttttcactgaagaattgacaagtatttgctccttaaaacaacgcagattagtgaacgtggattcctgctgagggagtgcatcccataatatggcaataattttcagtttctccaacgaaaagatagtgaaggaattaaatcttttgtcctcccatggttaaaaaaaaaaaaaaagctgtgttcatttttactgtactatgcctcttttttcaccatagtagacaattatgtttcatttgatgaattcatagaactggatctcatacagcgatgtcctctctaatgttctacctttcagtttctaaagtgagtcttcctccctctcctacaaaacttttcaattttttgatgtaactcatctacaaatactgtttcttaccccagttgacttgcctttgtcagatttcttcttgttccacactatagcaatcaatttctcttcttccttacaagaaagggaacgagaaattgtagcaacctctcaaggattatatgcagctagttagttttctgcctgtgaaattaggtctggctcctaaataattttaaagaaccatcagcacttctaactctctggacaggtgcctctttgtccaagctagttaaatgctttccaaggaaatcagttcaacttttgtgagcggggaaaagcagggctttattgttgtgttacctgggagtctggagtttgaaaagtgctaattaaccttcctctttttccacattacaaacctttttaagcagcgcagcactccccttagatttggctatcctgggtgattttcagacaagaaccattttctctggggaccattcttctgctgggtgccaaggaatataaggcaaatgcccagaagaccttcaggtgactgggcagtcttatcatgggatatttcttctggccctgccccttcccattctgtaatgtgaattagccacaccagaggctgtgaccatggctagtagacagtggcaacatagtcatccccaagatgctaatcttctgctggaactgtcatacgttatcatggtcaatgtaaacctggtttgtgtggggtgattataaatagagtttccctcctctctgtgacagaatcacaggagaaggacccatctcgtggccttcttgttcttagcgcttcacttttacttcatccctcgattcccagctttttctatcatcattttgccaactcctcagatgcaagactttggttatgtcatactcaccaacgttagtccctctcttccaggtgaaaaggtgggtagcggttgggagggagtctccactgaagagcaggaaggtggtagcagggccggcagctctgccacagagctaggggtgcctgtaaggtgccgcctagagcagcctgggagctttgccttcttttgtctctcactagcccttctactctttgtcattgcctgttcttgagtggatctttgaaatgaggggacaggattctcctaagggtagagtttcaggaaatgagtgaaaggcaattgacaaatgcaaagaagtagtcactttttaaattgctggcaaagctataattaatccctaggcacaattgtagtttttattttaatgtttgtatgcacaaggccctttaggaaatgagaagttgccatgccagattaatttttttttttttttttggtgggattgccttttgggggttgcagccagaaattgtgggtaatgtgtgtatttttttatttattaaattttaaacaggattgtgcaagcttatgagacaattagataaactcatggaggaggcaggtcctcctgttattagatgattttgtgctcttggggctgacaataatacactcttgggaagtgatggtagagactgatgggaatagtctttctgcctggttgcaagtcccaaatttttaagggttaatggaagtaagtggatgtttcctcatgttaactactgaatcagatgttaggagcttgtccctttggggttgacttatgcccagcagtacagggacacagcttcattagagtgttagtgtaaactaactccaaagttaggagttaatgtgaaaggatcatccttgaaacaaatctgctgtttgccatgcttgtagtacagaaacttcacatggagttttgggtgggatttgtgttttcacaagtaaaaaatccctcacgattataaaactcagagcatcatctaatttttttttttaatgactacaagttccagcacaaaactggcatttctttgccatttcttgccagtaagaagttgacacggaggtatttgaaagcaatgttatgtgagtcattcttaagtgttccaagtaagtttagaaacagaaaaggaacttgggattcaaattgatttttcaaatcatttttaaagagacatcatcctgactaaatcttagcctgaaccttcctcccctgtgtgtattccccggtagtcaccgcagcgagatgctggtgagactgccgtggtggcatttagcatcgttaaaactggaaaactctcaagctctttgccactttcctactattttttgattcttgccattttaccaagcttaggttgtgaaacttgacagaaatgtattacaggaaaaacttataattgtatttgactttctaacacattgcaaagtttcaaagtgactttcactttcaacaacatattagaagtaaccacttttgctttcacagcctgaagagttagagcctgatctgatgccccctttcactctgaagtcatgggaaattttccagccatgaaagccctctttccactgcatactgatgggctgactcagcttccttcagccgactgagatcttttcatactattggctatttcataccaattaacctcttaaataagattgtgaattgccaaaattgatagacacttattaccacctgtggactccatattccttaccacaaatgttattttcatcagtcctgagtcattttaacttacagaaattaggattgttgctgctaatatgaataccaattataacttttagaaacaagaataaagcctaaaagagaatgaaatataagaaatgttcgttcccacccctaataacatttggaagtgaatattcccattttcttccacccacagggattgggattgatttttaatttcctaggaaacaatactagactacccaaaaagatgttgccagaatccaaaaggaactatgctcgtaaaagaaatgcagttttctcctacctaaaaaaaagaaagtaaagtgtgttctgttcttatctttttaatgactaagctttaaacagtttattttgggtaagactagaactttcggccatttgttctaatatgtgtgttattagatgcaatagaatttatgaaaagaagaatgacaaaggtatctgattagaaaatttgatcttacgcatgaatccatgtcatggccagccactgtcacatagtgggtgccattctcaacatattggtttgctaactttaagcattagggatttagcacactaaaatacttttaattatattaggtttggtaactaaggagtaaataaatcataatttatcatttgccaaggccaacaaacaacactattgtgctgtttgctctcaatgaagttgaataaaccaggaggcttggcatatcccctttatgttaatcccagctagagattagtaggttgactttcacagcaattgtatattgatccattttaactcatccttgccataatttccaggccagtcaccaggacagaggagatgatggggaaacagagctttagatgaaaactactatgcactactagccttagaggcactggtttcctgttaccactttggcaagtatggatggtctaagtccagtagggcttcatccatggagccattagaactgaggggggagtgttagagatgccatttcaccaggatctttttgctcaggttgtacccatgccaattgaagaacgtgttaaagatgaggaggagagatgtaccattctctcccttaataatgatgttggtttgcaaaacctaaagaaataataacaacagactatttcatactttcaagcaagtctttatactacctgttatttctctaaaattcaaataaagaatttttaaactta

SEQ ID NO: 172045 - DNA, 2013 bp, Artificial Sequence
  derived and/or modified sequence
atgggcgagcccgccggcgtggccggcaccatggagagccccttcagccccggcctgttccacagactggacgaggactgggacagcgccctgttcgccgagctgggctacttcaccgacaccgacgagctgcagctggaggccgccaacgagacctacgagaacaacttcgacaacctggacttcgacctggacctgatgccctgggagagcgacatctgggacatcaacaaccagatctgcaccgtgaaggacatcaaggccgagccccagcccctgagccccgccagcagcagctacagcgtgagcagccccagaagcgtggacagctacagcagcacccagcacgtgcccgaggagctggacctgagcagcagcagccagatgagccccctgagcctgtacggcgagaacagcaacagcctgagcagcgccgagcccctgaaggaggacaagcccgtgaccggccccagaaacaagaccgagaacggcctgacccccaagaagaagatccaggtgaacagcaagcccagcatccagcccaagcccctgctgctgcccgccgcccccaagacccagaccaacagcagcgtgcccgccaagaccatcatcatccagaccgtgcccaccctgatgcccctggccaagcagcagcccatcatcagcctgcagcccgcccccaccaagggccagaccgtgctgctgagccagcccaccgtggtgcagctgcaggcccccggcgtgctgcccagcgcccagcccgtgctggccgtggccggcggcgtgacccagctgcccaaccacgtggtgaacgtggtgcccgcccccagcgccaacagccccgtgaacggcaagctgagcgtgaccaagcccgtgctgcagagcaccatgagaaacgtgggcagcgacatcgccgtgctgagaagacagcagagaatgatcaagaacagagagagcgcctgccagagcagaaagaagaagaaggagtacatgctgggcctggaggccagactgaaggccgccctgagcgagaacgagcagctgaagaaggagaacggcaccctgaagagacagctggacgaggtggtgagcgagaaccagagactgaaggtgcccagccccaagagaagagtggtgtgcgtgatgatcgtgctggccttcatcatcctgaactacggccccatgagcatgctggagcaggacagcagaagaatgaaccccagcgtgagccccgccaaccagagaagacacctgctgggcttcagcgccaaggaggcccaggacaccagcgacggcatcatccagaagaacagctacagatacgaccacagcgtgagcaacgacaaggccctgatggtgctgaccgaggagcccctgctgtacatccccccccccccctgccagcccctgatcaacaccaccgagagcctgagactgaaccacgagctgagaggctgggtgcacagacacgaggtggagagaaccaagagcagaagaatgaccaacaaccagcagaagaccagaatcctgcagggcgccctggagcagggcagcaacagccagctgatggccgtgcagtacaccgagaccaccagcagcatcagcagaaacagcggcagcgagctgcaggtgtactacgccagccccagaagctaccaggacttcttcgaggccatcagaagaagaggcgacaccttctacgtggtgagcttcagaagagaccacctgctgctgcccgccaccacccacaacaagaccaccagacccaagatgagcatcgtgctgcccgccatcaacatcaacgagaacgtgatcaacggccaggactacgaggtgatgatgcagatcgactgccaggtgatggacaccagaatcctgcacatcaagagcagcagcgtgcccccctacctgagagaccagcagagaaaccagaccaacaccttcttcggcagcccccccgccgccaccgaggccacccacgtggtgagcaccatccccgagagcctgcagtag

SEQ ID NO: 172046 - protein, 1069 aa, Artificial Sequence
  derived and/or modified sequence
MSDQAPKVPEEMFREVKYYAVGDIDPQVIQLLKAGKAKEVSYNALASHIISEDGDNPEVGEAREVFDLPVVKPSWVILSVQCGTLLPVNGFSPESCQIFFGITACLSQVSSEDRSALWALVTFYGGDCQLTLNKKCTHLIVPEPKGEKYECALKRASIKIVTPDWVLDCVSEKTKKDEAFYHPRLIIYEEEEEEEEEEEEVENEEQDSQNEGSTDEKSSPASSQEGSPSGDQQFSPKSNTEKSKGELMFDDSSDSSPEKQERNLNWTPAEVPQLAAAKRRLPQGKEPGLINLCANVPPVPGNILPPEVRGNLMAAGQNLQSSERSEMIATWSPAVRTLRNITNNADIQQMNRPSNVAHILQTLSAPTKNLEQQVNHSQQGHTNANAVLFSQVKVTPETHMLQQQQQAQQQQQQHPVLHLQPQQIMQLQQQQQQQISQQPYPQQPPHPFSQQQQQQQQAHPHQFSQQQLQFPQQQLHPPQQLHRPQQQLQPFQQQHALQQQFHQLQQHQLQQQQLAQLQQQHSLLQQQQQQQIQQQQLQRMHQQQQQQQMQSQTAPHLSQTSQALQHQVPPQQPPQQQQQQQPPPSPQQHQLFGHDPAVEIPEEGFLLGCVFAIADYPEQMSDKQLLATWKRIIQAHGGTVDPTFTSRCTHLLCESQVSSAYAQAIRERKRCVTAHWLNTVLKKKKMVPPHRALHFPVAFPPGGKPCSQHIISVTGFVDSDRDDLKLMAYLAGAKYTGYLCRSNTVLICKEPTGLKYEKAKEWRIPCVNAQWLGDILLGNFEALRQIQYSRYTAFSLQDPFAPTQHLVLNLLDAWRVPLKVSAELLMSIRLPPKLKQNEVANVQPSSKRARIEDVPPPTKKLTPELTPFVLFTGFEPVQVQQYIKKLYILGGEVAESAQKCTHLIASKVTRTVKFLTAISVVKHIVTPEWLEECFRCQKFIDEQNYILRDAEAEVLFSFSLEESLKRAHVSPLFKAKYFYITPGICPSLSTMKAIVECAGGKVLSKQPSFRKLMEHKQNSSLSEIILISCENDLHLCREYFARGIDVHNAEFVLTGVLTQTLDYESYKFN

SEQ ID NO: 172047 - protein, 401 aa, Artificial Sequence
  derived and/or modified sequence
MRRAPAAERLLELGFPPRCGRQEPPFPLGVTRGWGRWPIQKRREGARPVPFSERSQEDGRGPAARSSGTLWRIRTRLSLCRDPEPPPPLCLLRVSLLCALRAGGRGSRWGEDGARLLLLPPARAAGNGEAEPSGGPSYAGRMLESSGCKALKEGVLEKRSDGLLQLWKKKCCILTEEGLLLIPPKQLQHQQQQQQQQQQQQQQQPGQGPAEPSQPSGPAVASLEPPVKLKELHFSNMKTVDCVERKGKYMYFTVVMAEGKEIDFRCPQDQGWNAEITLQMVQYKNRQAILAVKSTRQKQQHLVQQQPPSQPQPQPQLQPQPQPQPQPQPQPQSQPQPQPQPKPQPQQLHPYPHPHPHPHSHPHSHPHPHPHPHPHQIPHPHPQPHSQPHGHRLLRSTSNSA

SEQ ID NO: 172048 - protein, 219 aa, Artificial Sequence
  derived and/or modified sequence
MLESSGCKALKEGVLEKRSDGLLQLWKKKCCILTEEGLLLIPPKQLQHQQQQQQQQQQQQQQQPGQGPAEPSQPSGPAVASLEPPVKLKELHFSNMKTVDCVERKGKYMYFTVVMAEGKEIDFRCPQDQGWNAEITLQMVQYKNRQAILAVKSTRQKQQHLVQQQLHPYPHPHPHPHSHPHSHPHPHPHPHPHQIPHPHPQPHSQPHGHRLLRSTSNSA

SEQ ID NO: 172049 - DNA, 93 bp, Artificial Sequence
  derived and/or modified sequence
atgcgccggggggccctgaccgggctgctcctggtcctgtgcctgagtgttgtgctacgtgcagccccctctgcaacaagcaagaagcgcagg

SEQ ID NO: 172050 - DNA, 426 bp, Artificial Sequence
  derived and/or modified sequence
atgtcatccccaccacacagcggtcagacagtgcatcccccatgttcatccaagctcaggatggatcccacacccgcatggccagcatcatgcgaggccttgatggggccatctagctccgctggtcctgcaagactcaggcttccgccacggcgacacagttccttaccacctcgtcgcgcatcatttttgattgtgtcaagggcctccaagagttgggaatgcgcaggcccagtgccggctttgccaggaggtgtagtagcggtcccaaccagtcagcaggatccccagtgccgcggttcccaggtcgcgcatcgcagatgcctgagcagggccatcttacagtctggccctcagtgtcagagctgtctatccatctgggtaacatccgcccgaagtcgcgtgcaagcctcctcgcggagctag

SEQ ID NO: 172051 - DNA, 357 bp, Artificial Sequence
  derived and/or modified sequence
atgcccagcaagaccgccgagaacgccaccttctactacatcagcagcctgctgagcagcagaagccccgtgttcaaccagagccccaaggtgaaggccggccacatgctggaggccagccagatcagcgccaagaacagcgccgacttcttccaccccacccccagctgcagcgagctggacttcaccctgcaccccgagctggccgacagcctgggcgccaagcacaactacaaggccacctgcctgatgagattcctgcccctgcagagacacaccagaagctggttcagcctgatcctgtggtgcatccagagagacgactacctgatcggcctgttcagctgcttcagctag

SEQ ID NO: 172052 - DNA, 378 bp, Artificial Sequence
  derived and/or modified sequence
atgggcatcttccagctgctgagagacagaagaatcagcagcagaggccccggcctgcacacccccaaggccgagcccagaagaagaaagggcctgaccaccggcctgatgacccaggccgagagacagaagcaggcccaccagagacaggccaccatgagagagaccgccctgtggtgcaccggccacatcagacccagaacccacatgcacaccggcacccacacccagaccgacagagagagagagagaaacacccagagactgagagacagagagagaagagagaacggcagacacacccacatccacacccagacccacagacagagcctgatcgccaaggccctgaaggacacccaccccggcaacccctag

SEQ ID NO: 172053 - DNA, 381 bp, Artificial Sequence
  derived and/or modified sequence
atgggcatgagactgcagctgctgagagacagaagaatcagcagcagaggccccggcctgcacagagccaaggccgacccccagcagcagaagagactgaccaccggcctgatgacccaggccgagacccagaaggaggcccagcagagacaggccgccatgagaaagaccgccctgtggcacaccggccacctgcagcccaagacccacacccacaccggcatgcacacccagacccacagagagagagagagaaacacccagagactgagagacagagagagaagagagaacggcagacacacccacacccacaccgagacccacacccagagacacaccgaggaggccctgaagcacaccccccccggcaacccctag

SEQ ID NO: 172054 - DNA, 390 bp, Artificial Sequence
  derived and/or modified sequence
atgtgctgcaactactacggcaacagctgcggctacggcagcagctacggctgcggctacggcagcggctacggctacggctacggcagcagctacggctgcggctacggcaccggctacagctgcggctacggctgcggctacggcagcggctacggctgcggctacggcagcagctacggctgcggctacggcaccggctacagctgcggctacggcagcggctacagctgcggctacggcagcggcagcggctgcggctacggcaccggcttcggctgcggctacggctgcggctacggcaccggctacggctgcggctgcggcagcggcagcggctactgcggctacagacccttctgcttcagaagatgctacagcagctgctag

SEQ ID NO: 172055 - DNA, 390 bp, Artificial Sequence
  derived and/or modified sequence
atgtgctgcaactactacggcaacagctgtggctacggcagcagctatggctgcggctacggcagcggctacggctacggctacggcagcagctatggctgcggctacggcaccggctacagctgtggctacggctgcggctacggcagcggctacggctgcggctacggcagcagctatggctgcggctacggcaccggctacagctgtggctacggcagcggctacagctgtggctacggcagcggcagcggctgcggctacggcaccggcttcggctgcggctacggctgcggctacggcaccggctacggctgcggctgcggcagcggcagcggctactgcggctaccggcccttctgcttccgccgctgctacagcagctgctag

SEQ ID NO: 172056 - DNA, 546 bp, Artificial Sequence
  derived and/or modified sequence
atgtctgagctgcccttcaccatcgccagcaagaggatcaagtacctgcgcatccagctgaccagagatgtgaaggacctcttcaagaagaactacaagcccctgctgaatgagatcaaggaggacaccaacaagtggaagaacatcccctgctcctggattggccgcatcaacatcatgaagatggccatcctgcccaaggtgatctaccgcttcaatgccatccccatcaagctgcccatgaccttcttcaccaagctggagaagaccaccctgaagttcatctggaaccagaagagggccctgattgccaagaccatcatcagcaagaagaacaaggccggcggcatcaccctgcctgacttcaagctgtgctacaaggccaccgtgaccaagacagcctgctgctggtacctgaacagagacatcgaccagtggaacagaacagaggtgtctgagatcaccatccacatctacaaccacctgatctttgacaagccagacaagaacaagcagtggggcaaggacagcctcttcaacaagtag

SEQ ID NO: 172057 - DNA, 390 bp, Artificial Sequence
  derived and/or modified sequence
atgtgttgcaactactacggcaactcctgtggctatggctccagctatggctgtggctatggctctggttatggctatggctatggctccagctatggctgtggctatggaactggctacagctgtggctatggctgtggctatggctctggttatggctgtggctatggctccagctatggctgtggctatggaactggctacagctgtggctatggctctggctacagctgtggctatggctctggctctggctgtggctatggaactggcttcggctgtgggtatggctgtggttatggaactggctatggctgtggatgtggctctggctctggctactgtggctaccggccattttgctttagaagatgctattcttcctgctaa

SEQ ID NO: 172058 - DNA, 1206 bp, Artificial Sequence
  derived and/or modified sequence
atgagacgggcccctgctgctgagcggttgctcgagttggggttccccccccgatgcggcaggcaggaacccccctttccgttgggggttacacgaggctgggggagatggccgatccagaagagacgcgaaggggcccggcctgtaccattcagcgaaaggtctcaggaagatgggcgcgggcctgctgcccgttctagcgggactctctggaggattaggactcggctttcattgtgccgtgacccagaacctccaccccccttgtgcctcttgagggtgtcactgctgtgcgcgcttcgcgccggcggccgcgggtcaagatggggggaggacggtgcgcggctgctcctgttgcctcctgcacgagctgctggtaacggtgaggccgaacccagtggtggcccgtcgtatgctgggcgcatgttagaaagttccgggtgtaaagcccttaaagagggagtccttgagaaaagatcagatggcctgctgcaactgtggaagaagaaatgctgtatactcacagaggaaggactcctactcatcccccctaagcagttgcagcaccaacaacagcagcagcagcagcaacaacagcagcaacaacaacagccgggccagggccccgcagagccatcccagccctccggccctgcagtcgccagcctcgaaccccctgttaagttaaaagagttgcacttttccaatatgaaaacagtggactgtgtagagcgcaaggggaagtacatgtactttaccgtggtgatggcagaaggaaaggaaatcgactttcgttgcccgcaggatcagggatggaacgctgagatcacacttcaaatggtccagtacaaaaatagacaggctatcttggctgtcaaatcaaccaggcagaagcaacaacatctggttcaacaacagcctccgagccagccacagccacagcctcagttgcaaccccagcctcagccacaacctcagccacagccacagccccagtctcagccacagcctcagccccagccaaagccccagccccagcagttacacccttacccccaccctcatcctcacccacacagccacccccatagtcacccccatcctcacccacatcctcacccccatcaaatcccgcacccccacccacagccccactcgcaacctcatggacaccgtctcctgcggagcacatctaattctgcgtag

SEQ ID NO: 172059 - DNA, 660 bp, Artificial Sequence
  derived and/or modified sequence
atgctcgaatcctcaggttgcaaggcgttgaaggagggcgtgctggaaaagagatccgacggcttattgcagctctggaaaaaaaagtgctgcatactgacagaggagggtctattactgataccacccaaacagcttcagcaccaacagcaacagcagcagcagcagcagcaacagcagcagcagcagccaggccagggacctgcagaaccaagccagcccagtggaccagccgtcgctagtctggaaccaccagtcaaactgaaggaattgcacttttccaacatgaagaccgttgattgcgttgagaggaagggcaagtacatgtacttcacggtggtaatggctgagggcaaagagatagatttccggtgtccccaggaccaagggtggaatgccgaaattacgctgcagatggtacaatacaaaaacagacaagccattctcgcagtaaaaagcactcgacagaagcagcaacatctggtgcagcagcagctgcacccctaccctcatcctcatccgcatcctcatagtcatccccacagtcacccacatccacacccccacccccacccacatcagattccacacccacacccccagccacattctcagccgcatgggcatcgcctgttgcgctccaccagcaactctgcctag

SEQ ID NO: 172060 - DNA, 1206 bp, Artificial Sequence
  derived and/or modified sequence
atgaggcgggccccagctgctgagcggctgctggagctgggcttccccccaagatgtggccggcaggagccccccttccccctgggcgtgacccggggctggggccgctggcccatccagaagaggcgggagggcgcccggcctgtgcccttcagcgagaggagccaggaggatggccggggccctgctgcccggagcagcggcaccctgtggaggatccgcacccggctgagcctgtgccgggaccctgagcccccaccacccctgtgcctgctgcgggtgtccctgctgtgtgccctgcgggccggcggccggggcagccgctggggagaagatggagcccggctgctgctgctgcccccagcccgggctgctggaaatggagaggccgagcccagcggcggccccagctatgccggccgcatgctggagagcagcggctgcaaggccctgaaggagggcgtgctggagaagagaagtgatggcctgctgcagctgtggaagaagaagtgctgcatcctgacagaggagggcctgctgctgatcccccccaagcagctgcagcaccagcagcagcagcagcagcagcagcagcagcagcagcagcagcagcccggccagggccctgctgagcccagccagcccagcggccctgctgtggccagcctggagccccctgtgaagctgaaggagctgcacttcagcaacatgaagacagtggactgtgtggagaggaagggcaagtacatgtacttcaccgtggtgatggccgagggcaaggagattgacttccgctgcccccaggaccagggctggaatgctgagatcaccctgcagatggtgcagtacaagaaccggcaggccatcctggccgtgaagagcacccggcagaagcagcagcacctggtgcagcagcagccccccagccagccccagccccagccccagctgcagccccagccccagccccagccccagccccagccccagccccagagccagccccagccccagccccagcccaagccccagccccagcagctgcacccctacccccacccccacccccacccccacagccacccccacagccacccccacccccacccccacccccacccccaccagatcccccacccccacccccagccccacagccagccccacggccaccggctgctgcggagcaccagcaacagcgcctag

SEQ ID NO: 172061 - DNA, 660 bp, Artificial Sequence
  derived and/or modified sequence
atgctggagagcagcggctgcaaggccctgaaggagggcgtgctggagaagagaagtgatggcctgctgcagctgtggaagaagaagtgctgcatcctgacagaggagggcctgctgctgatcccccccaagcagctgcagcaccagcagcagcagcagcagcagcagcagcagcagcagcagcagcagcccggccagggccctgctgagcccagccagcccagcggccctgctgtggccagcctggagccccctgtgaagctgaaggagctgcacttcagcaacatgaagacagtggactgtgtggagaggaagggcaagtacatgtacttcaccgtggtgatggccgagggcaaggagattgacttccgctgcccccaggaccagggctggaatgctgagatcaccctgcagatggtgcagtacaagaaccggcaggccatcctggccgtgaagagcacccggcagaagcagcagcacctggtgcagcagcagctgcacccctacccccacccccacccccacccccacagccacccccacagccacccccacccccacccccacccccacccccaccagatcccccacccccacccccagccccacagccagccccacggccaccggctgctgcggagcaccagcaacagcgcctag

SEQ ID NO: 172062 - DNA, 1206 bp, Artificial Sequence
  derived and/or modified sequence
atgcggcgggcccccgccgccgagcggctgctggagctgggcttccctcccaggtgcggaagacaggagcccccattcccccttggggttacccgtggctggggacgttggcccattcaaaaacggagagaaggggcccggcccgtgcccttttccgaaagatctcaggaggacgggcggggtcctgcagcgagatcttccggtaccctatggcgaatcagaaccaggctctcactttgtagagatcctgagccccctcctcctttgtgcctgttgcgggtcagcctgctctgcgctctgcgggcaggcggtcgggggtcccgatggggagaagatggggcacgcctgctccttttgcctcccgcccgcgcggccgggaacggagaagccgagccctcggggggtcctagttatgctggtaggatgttggagtcttccggctgcaaggccttaaaagagggagtgctggagaagcgatcggacggactattacagctatggaaaaaaaaatgttgcatcttgacagaggagggccttctgctcatacctcccaagcagttacagcatcagcagcagcagcagcagcagcagcaacagcagcagcaacaacagcctggccagggtccagctgagccttcacaaccgtcgggccctgccgtggcctcgctggaacctccggtcaagttaaaggagctacatttttcaaacatgaagaccgtggactgtgtggaacgtaaagggaagtacatgtattttactgtggttatggccgagggtaaggaaattgacttcagatgtccacaggaccagggctggaatgctgagatcactctgcaaatggttcagtataagaatcgccaggccatcctcgcagtgaaaagcacgcgacagaaacagcagcacttggtccagcaacagcccccatcgcagccgcagccgcagccacagctgcagcctcagccccagcctcaaccacagccacagccacaaccacaatcacagccacagccgcagcctcagccaaaaccccagccacagcagctgcacccatacccccaccctcacccacacccacattctcatcctcacagtcaccctcacccccatccccatccccatccccaccaaattccgcatcctcatccccagccacacagtcagcctcacggacaccggttgctgcggtccaccagcaatagcgcctag

SEQ ID NO: 172063 - DNA, 660 bp, Artificial Sequence
  derived and/or modified sequence
atgctggagagcagcggctgcaaggccctgaaggagggcgtgctggaaaagagatccgacggtttgctccaactctggaagaaaaagtgttgcatcttaaccgaagaagggctgttacttatcccacctaaacagctgcagcatcagcagcagcagcaacagcagcaacagcagcagcagcagcagcagccgggtcaagggcctgccgagcccagtcagccttctgggcctgcggtcgcttcattggagcctccagtaaagttgaaagagctgcacttctcaaatatgaagaccgttgattgtgttgagcgtaaaggcaagtatatgtattttacagtcgttatggccgagggaaaggaaatcgattttagatgcccacaggaccaagggtggaatgctgagatcaccctacagatggtgcagtataaaaacagacaagccatcttagctgtcaaatctactagacagaagcagcagcacctggtgcagcaacagctgcacccttacccacacccacatccccaccctcatagccatccacattcccatccacacccgcatcctcatccacacccacaccagataccgcatcctcatcctcaaccgcacagccagcctcatggacaccgcctgcttcgatccacatccaatagtgcttag

SEQ ID NO: 172064 - DNA, 8069 bp, Artificial Sequence
  derived and/or modified sequence
tttttttttttaagttattttctgtaatgcattttctgtgaatttattgtcttaaaaattggcaaatatggccattttgacatatttgccaaatatgagcatatggcaactatgctcttaatttgttaagtcaccaactgttggtggtaactgttgaaataacaagagcaaagttatcaccaatctacgggatccttacactactgatattttcaataatgcaccgtagtcagacattgtagacttaacctctgagctgctcacaaaattactaaatcattctgaaatacgtaactgcaaattctgggctttaaagtctctagttaaatgggtgattttgaaaattggtggctgttcagacattttcaaatgagaatagaatgcatttgtttcagactgataaactgcagaaggttagataacaccaaacacatttgagtttctcctaagaaaatgacttgggcctccagattacatctcattttttttttttttaccctatcaagtttgtttttccatatgaaatgtctttcccaactacacctgcccttggagactgtgaataacagacttaaaggaagtatcctttccagatgagctgaagaatgtcatcctcttaaaagaatgaacagctggtcatgtagaaattctctggaatgctcacttgtcctacaaaggcaggggagcagaaaacatgtagtttttttgttattggtatacataattgtaaatcttcgagataattttactagaagtccacataattttaataattgcctttctcctgaaaagattgctaataaattaacaatgtgaaggctagaaagctggccaagcataatccggtgggactcaggattgctggctggattgtcccgtttgatcagacattgtttcttagatgaatattcaggacgccctcgtgtataaaagttgtcctttgttctgactaccttggtattaagttcgaatttcttaccatgacacacaaaggattcgattcttgcttagctctctaagctcctctcactttctcttcccctcttgaattctttgctcttgccacacaactagcagatgaactaatctatctgttccaacgtgggcacagtagcagccgtaactcttaccttggcccactctgacttgtccagccctggttgaattcttcgtatccccgtgagggtccgcacgtagttggggctgtttactaaacggatgaacttccctaccgggaggctaggtctcggttatgccttacttcccaggaagcggcttctataggcattgtttaaatgtaggagtaggagggagctgggggtattgcattccccaggtcacagataaatgagattccaaaaccaagatctggctaggccttggaaagagggacctgcgaggccgaccagacgtttggaactgcgccttgcagtgtgggatctcagcaccggatattaccccggtttgtagagagttgagttactgttttaagagacgttgcaaaccgtacgggtcaagaagaaagccgaagacgggttagcgcctgcggtcggggtcgagaaaagcaggcgagatgcgacctgacgtgggtccgcctctctccacccgtggcaagcccgacagtcgcactattgctttaacaatcgccctctttccaagaagagctacttagtgaccgtgagcgaatatgcgtgggaagacacgatgtcctctcggcctctgtgcgctcagttgtttacctaggcgtccgggggaggcacactcgcgggactcgcgggactcggccccggcctcccagctcgcccaggacacgacgctggttctgcgggctctcggagcccagcgcgaatcccccgggctaattcccaagaaccgagaggcagcactgcctggaggctgcccccgcctccgcgcccccgtcctcactttctgaggctgttagcagagagtcccgcgggccggggagaagcgggacgcgggggatggcctcgcagcgccctgtgagcgtcggcagtagtcaggcagccagggctccttgggcgatcgccctgggtagaggagaggagtttccggggctcgggtccgggtcgccttccaggggaacgagcgcggaagcaagtgggcggcgagaggcggagcaagagacgctggagggcgtggacgcagcgggctttggaaaggccccaagttaatgaggcgtgcgccggctgccgagcgcctcttggagctgggctttcccccgcggtgcgggcgccaggagccgccttttccgctgggtgtcactcgggggtggggaagatggcccattcaaaagcgccgcgagggggcccggccagtgcccttcagtgagcgctcgcaagaggacggcagaggcccggcagctcggagctccgggaccttgtggcgcatcaggacgcggctgtccctctgccgggacccagagccgccgccgccgctctgcctcctgcgtgttagcctcctctgcgcgctccgggcaggcggccgtgggagccgctggggcgaggacggcgcgaggctgctgctgctgcccccggcccgcgcggctggaaacggagaggccgagccaagcggcggcccctcttatgctgggaggatgctggagagtagcggctgcaaagcgctgaaggagggcgtgctggagaagcgcagcgacgggttgttgcagctctggaagaaaaagtgttgcatcctcaccgaggaagggctgctgcttatcccgcccaagcagctgcaacaccagcagcagcagcagcaacagcagcagcagcagcagcaacaacagcccgggcaggggccggccgagccgtcccaacccagtggccccgctgtcgccagcctcgagccgccggtcaagctcaaggaactgcacttctccaacatgaagaccgtggactgtgtggagcgcaagggcaagtacatgtacttcactgtggtgatggcagagggcaaggagatcgactttcggtgcccgcaagaccagggctggaacgccgagatcacgctgcagatggtgcagtacaagaatcgtcaggccatcctggcggtcaaatccacgcggcagaagcagcagcacctggtccagcagcagcccccctcgcagccgcagccgcagccgcagctccagccccaaccccagcctcagcctcagccgcaaccccagccccaatcacaaccccagcctcagccccaacccaagcctcagccccagcagctccacccgtatccgcatccacatccacatccacactctcatcctcactcgcacccacaccctcacccgcacccgcatccgcaccaaataccgcacccacacccacagccgcactcgcagccgcacgggcaccggcttctccgcagcacctccaactctgcctgaaaggggcagctcccgggcaagacaaggttttgaggacttgaggaagtgggacgagcacatttctattgtcttcacttggatcaaaagcaaaacagtctctccgccccgcaccagatcaagtagtttggacatcaccctactgaaaacttgcgattcttcttagttttctgcatacttttcatcacgatgcaggaaacgatttcgagtcaagaagacttttatttatgaacctttgaaaggatcgtcttgtatggtgaattttctaggagcgatgatgtactgtaattttattttaatgtattttgatttatgattatttattagtttttttttaaatgcttgttctaagacatttctgaatgtagaccattttccaaaaaggaaactttattttcaaaaacctaatccgtagtaattcctaatcttggagaataaaaaagggcggtggaggggaaaacattaagaatttattcattatttctcgagtactttcagaaagtctgacactttcattgttgtgccagctggttgaaattaaaactctgatattactttttttgaggatttttatttttgtttttgcttaaacatatagtttgtctagaagtttaaaaagctaaaagttaaaaatggtgtaattatgaaaatctaacactcaagatagtttctaaaaggaaatcagtagttaaggatacctgatttcaaaatatttaaagcataacctaactgatggtaggatgattgtatcttgaatatgtggtagggccacatctattgtaggaaaaccttgcttttatcatctgtgtgtaaagggcttaataaggagaagaggccttttgactgatttgtgagtataaatgcatttgctgtttcatttcaaaaatgttgtggaggaaaagagtacatttaacttgtataagagaatatttgtactcctgtccaggctgcaggacctttcttcgagagctttgcacacttgacttgaaccacattttctgatccctttactttgttttagaagcacactgaaaaatctcgttgtttaaagtacaatttgtaaatatttcaaaggtctaggagtcataacttttgttttcatactgaaaatgatgttgatcagagaaaccaactgttttgcttttcattgctctgtgagaaatttgaggattctgttttgctgttaggtaagctaaactcagaaattgaaaaggaaaagactggataaacacaggattttcagtaagaaaacaaccccagtcttgtcttagaagccacttgttgaggagtctgttgggggaaaaaagaggatatgcttttaaaggtagaacaaaccttcttctgtgttaaatcaaaaggatgttcaaaatccaccaggacagatgctacttgggtttaaatggagccatagatgatacaaagtcctcttggggctgaaaatcacttcctatttgcatggctttactaactggtttctgttttccattatctttttcacagaaagtcttggtcagtatttttccagcatttaaattgaaacggtcagtattagaccactgctaggttatgtagtcaagaaataaaaatagaattacatgctacagatgtctttattctccttccatctagaaaggagttccaaggtcaaattactttttagtgcaatagttaaatgacattttgagatcataactcatatccaaaaagttgcagggaaaattaaaatagctttcccctattaagctaatggcaaacaaaacttaagtggacccccacttccagtggttgtttaggttgcagttgtgaaaatatgctgccaacatttaaaaacttgtttcatatgtatatatgtatacacatatatgaatatgtatgtatatatacatatatgagaacatgtgtgtacacatatatgaatatgtatatatgtgtatgtatgtatatatgtatatgaaatgagagccacatctaaagatttcttaaatcaagtttggttcagcttccttagaactgtggctgtactttttgaggagtacctcatagtactatatttttaatgcatgcaaatcataatagctccaaatgaaccacagttttttcccaatggaggatttttttttaattcttgtactaaaaaaaaaaaatccataccaaatatttttacaaattaagattgatgtaggttttaaaaaaggcatttgtatgttgttagcttacatatggggctaggtaatttcattgcttaaaaagatgcgcctaggctccctcttggtggctggatttctttttcttcgcccgtggtggccatggttcttaatagggccaccggaatcatggtttctttttttttttttttttttgagatggagtctcgccctgtgacccaggctggagtgcagtggcacgatctcggctcactgcaacctctgcctcctgggttcacgccattctcctgtctcagcctcctgagtagctgggactacaggtgaatgccaccacgcccggctgatttttgtatttttagtagagatggggtttcaccatagtggtcaggctgttctcgaactcctgacctcaggtgatccacctgccttggcctcccaaagtgctaggattacaggtgtgagccaccacacccggccccagaataatggtttcttgactttctgtagcccttgttccttagtctgctgtgatatttatgttgacctttatcattttctattctgaacccctcttagcatttaatgtgaaatctaagaaattagaagtagaatggcttttattgttttgacacctttgaaattattattaataatttttccagagcaaaaaagcaaacacgctcaataagactaaacaaaacaaaatataaatgtacatcatttaatgtcccagtggctctattctacctgtaagaaaatgatacaaaaccacctaagatattttgaagcctgacaaatcagcttcatggaaaaaggtaaaaaatgcatttttcaaccgaaagggcagatccaatagaagacccgctccttaaataaacataaaatgtaaaaagttggaaaattaagagtaatgttccatctggaaactgaacttttgtccttgaacttgtgttggcaccaagcctcatacacagtgagctcaataactgttgggacaaaggaaggaaggacaaaatgtgtaacttcccagcatctgggagatgctgtctcttgcctcactgagtgttccttttctttgctctcatgtcattccctgagaacaatgaattctgggacaggctaaacatcatgatgaagtttcttaaacagactttcttagtggaaatccatttagatctgggtgtgctctatggggagtgctgacgtcaaagagcaaatgtctataaggggcccttttaaaatgaacattttcctcattgagcaagctgggattctctaatgtagaaatcaagccatctttataatttcacttcagatgtttatgtttttgttttttttgtctccaatgatggtaaaaataaaaactacgcattacttaaaggagtttccctcacatgtaaacactgttaggaagtctggattaagttgaaagtcctgttttaactttttttctctcatataccaaacactctgtatttctcttaaagaagccctttaagagaaagccctaattttatatctgacagtaaagtttgctgcaagtgtatgagttcaaacacatcccttgttttctgtccctaggggaaaagtcatgtagttttagcttggctccagtgttaatattatattcagtagcagccttagaagagtggtctaagacttgaacctggagcaattttatagcacagaatcctacgaagataggactgtgaacatttgttttctttttcgtgtgtgtcaaactaactggtttttgctttaccaataaaatgtcctcggcagagtaaattttaaacgtgaaaattatagatcttgatattgaatccatcagtgattcaagagatacacctatttgcctaaaacaacctaagatgtattggttatggaatcatgtgttggataggttcttaagacctgtttcctcaaatcttgacacagttttcaagggtggcttattgacttgcacggttgggcagataatccagatttacctaagattgggtaaaaaagtcatctgtgactttgctggcagggcatttgctaagtggagtacaggatctaaaagggttttcttagaaagggcaatattgtccaatgaagtaagcagaaggactctgggttagaagcatctgcacaaaaactggtgagacctactctccactgctctgcagctggatggctgatggcaggctgagcagtggggaagcaggttttaacaacagggagtccttccaggtcactgtatattgagaagaaacataaaactattgtctgttacattccgaggtcagccttcttcttaacgttttataatatgcaaatgccagcttctggaaagcaagtatcatcatgtaccaaatgctttatacaccatcacattcatgaattttttagcatggtcagaacttgtgtaaatatgtctcttagatgattttggggagatgtgatttatttttcatattttcaaaatgcatttcatttcaaataaagttatctattgagacaaccga

SEQ ID NO: 172065 - DNA, 1522 bp, Artificial Sequence
  derived and/or modified sequence
ctcttggagctgggctttcccccgcggtgcgggcgccaggagccgccttttccgctgggtgtcactcgggggtggggaagatggcccattcaaaagcgccgcgagggggcccggccagtgcccttcagtgagcgctcgcaagaggacggcagaggcccggcagctcggagctccgggaccttgtggcgcatcaggacgcggctgtccctctgccgggacccagagccgccgccgccgctctgcctcctgcgtgttagcctcctctgcgcgctccgggcaggcggccgtgggagccgctggggcgaggacggcgcgaggctgctgctgctgcccccggcccgcgcggctggaaacggagaggccgagccaagcggcggcccctcttatgctgggaggatgctggagagtagcggctgcaaagcgctgaaggagggcgtgctggagaagcgcagcgacgggttgttgcagctctggaagaaaaagtgttgcatcctcaccgaggaagggctgctgcttatcccgcccaagcagctgcaacaccagcagcagcagcagcaacagcagcagcagcagcagcaacaacagcccgggcaggggccggccgagccgtcccaacccagtggccccgctgtcgccagcctcgagccgccggtcaagctcaaggaactgcacttctccaacatgaagaccgtggactgtgtggagcgcaagggcaagtacatgtacttcactgtggtgatggcagagggcaaggagatcgactttcggtgcccgcaagaccagggctggaacgccgagatcacgctgcagatggtgcagtacaagaatcgtcaggccatcctggcggtcaaatccacgcggcagaagcagcagcacctggtccagcagcagctccacccgtatccgcatccacatccacatccacactctcatcctcactcgcacccacaccctcacccgcacccgcatccgcaccaaataccgcacccacacccacagccgcactcgcagccgcacgggcaccggcttctccgcagcacctccaactctgcctgaaaggggcagctcccgggcaagacaaggttttgaggacttgaggaagtgggacgagcacatttctattgtcttcacttggatcaaaagcaaaacagtctctccgccccgcaccagatcaagtagtttggacatcaccctactgaaaacttgcgattcttcttagttttctgcatacttttcatcacgatgcaggaaacgatttcgagtcaagaagacttttatttatgaacctttgaaaggatcgtcttgtatggtgaattttctaggagcgatgatgtactgtaattttattttaatgtattttgatttatgattatttattagtttttttttaaatgcttgttctaagacatttctgaatgtagaccattttccaaaaaggaaactttattttcaaaaacctaatccgtagtaattcctaatcttggagaataaaaaagggcggtggaggggaaaacattaagaa

SEQ ID NO: 172066 - DNA, 1206 bp, Artificial Sequence
  derived and/or modified sequence
atgcgcagggctcctgctgccgagaggctgttagagctgggtttcccccctcggtgcggtcgccaagagcctcctttccctttaggtgtcactagaggctggggccgttggcccatccagaaacgtcgcgagggagcgaggccagtccctttttccgagaggtcccaagaggacggcagaggaccggcagctcgttcctccggtactctttggcgaattcggacaaggttgagcctgtgtagggatcccgaaccgccacctcccttgtgtctcctgcgagtgagcctcttgtgcgccctgcgtgcagggggaaggggcagtcggtggggagaggatggtgcgagactgcttctcctcccccctgctagggcggcaggtaacggagaggccgagccatcagggggacctagctacgccggaaggatgctagaatcctctggctgtaaagcgctgaaggaaggggtactggaaaagcgatccgatggcctgttgcagctgtggaaaaagaagtgttgtatcctgaccgaggaaggtctgctgctgatcccccctaaacaattacagcatcagcaacagcagcagcagcagcagcagcagcagcaacagcaacagcctggacagggacctgccgagccgtcgcaacccagtggccctgctgttgcgtccctggagcctccagtgaagctgaaagaactccatttcagcaatatgaagactgttgactgtgttgagcggaaggggaaatatatgtactttactgtagtcatggcggaggggaaggaaattgactttcgctgccctcaggaccaagggtggaacgctgaaattactttacagatggtccagtataaaaacaggcaggctattcttgccgtcaaaagcacaagacagaaacagcagcatttggttcaacaacagcctccttctcaaccgcaacctcagccccagttacagcctcagccccagccacaaccacagccccagccgcagccacaaagccaaccgcagccccagccccagcccaagccacagccacagcagttacatccttatcctcacccacatccccacccacacagccacccccatagccacccacacccccatcctcacccacacccccaccaaatcccacaccctcacccacagccacatagccagcctcacgggcatcggctgctgcgcagtacttccaattcggcctag

SEQ ID NO: 172067 - DNA, 660 bp, Artificial Sequence
  derived and/or modified sequence
atgctcgagtcgagcgggtgtaaagcccttaaggagggcgttttggaaaagagatcggacggactgctgcagctgtggaaaaaaaagtgctgtatcttgaccgaagaagggctcctcctcattccccctaaacaactgcagcaccaacagcagcagcagcagcagcagcagcaacagcagcagcagcagcccggtcagggaccggctgaaccatcccaaccatctggaccagccgttgctagtctggagcccccagtcaaattgaaggagctgcacttctctaatatgaagaccgtggattgtgtggagcgaaaaggtaagtatatgtacttcactgtggttatggccgagggaaaggagatcgatttcaggtgtccgcaggatcagggttggaacgcagagataaccctacagatggtccagtataagaacagacaggccatcctggctgtgaagagcacacgacagaagcagcaacatctcgtccagcagcagcttcacccatacccccatccccaccctcacccccacagccaccctcattcccacccacatccacacccacacccccatccccatcagatcccccatccgcaccctcagcctcatagccagccacatggacacaggctgctgcgatctacaagtaactccgcctag

SEQ ID NO: 172068 - DNA, 1206 bp, Artificial Sequence
  derived and/or modified sequence
atgagaagagcccccgccgccgagagactgctggagctgggcttcccccccagatgcggcagacaggagccccccttccccctgggcgtgaccagaggctggggcagatggcccatccagaagagaagagagggcgccagacccgtgcccttcagcgagagaagccaggaggacggcagaggccccgccgccagaagcagcggcaccctgtggagaatcagaaccagactgagcctgtgcagagaccccgagccccccccccccctgtgcctgctgagagtgagcctgctgtgcgccctgagagccggcggcagaggcagcagatggggcgaggacggcgccagactgctgctgctgccccccgccagagccgccggcaacggcgaggccgagcccagcggcggccccagctacgccggcagaatgctggagagcagcggctgcaaggccctgaaggagggcgtgctggagaagagaagcgacggcctgctgcagctgtggaagaagaagtgctgcatcctgaccgaggagggcctgctgctgatcccccccaagcagctgcagcaccagcagcagcagcagcagcagcagcagcagcagcagcagcagcagcccggccagggccccgccgagcccagccagcccagcggccccgccgtggccagcctggagccccccgtgaagctgaaggagctgcacttcagcaacatgaagaccgtggactgcgtggagagaaagggcaagtacatgtacttcaccgtggtgatggccgagggcaaggagatcgacttcagatgcccccaggaccagggctggaacgccgagatcaccctgcagatggtgcagtacaagaacagacaggccatcctggccgtgaagagcaccagacagaagcagcagcacctggtgcagcagcagccccccagccagccccagccccagccccagctgcagccccagccccagccccagccccagccccagccccagccccagagccagccccagccccagccccagcccaagccccagccccagcagctgcacccctacccccacccccacccccacccccacagccacccccacagccacccccacccccacccccacccccacccccaccagatcccccacccccacccccagccccacagccagccccacggccacagactgctgagaagcaccagcaacagcgcctag

SEQ ID NO: 172069 - DNA, 660 bp, Artificial Sequence
  derived and/or modified sequence
atgctggagagcagcggctgcaaggccctgaaggagggcgtgctggagaagagaagcgacggcctgctgcagctgtggaagaagaagtgctgcatcctgaccgaggagggcctgctgctgatcccccccaagcagctgcagcaccagcagcagcagcagcagcagcagcagcagcagcagcagcagcagcccggccagggccccgccgagcccagccagcccagcggccccgccgtggccagcctggagccccccgtgaagctgaaggagctgcacttcagcaacatgaagaccgtggactgcgtggagagaaagggcaagtacatgtacttcaccgtggtgatggccgagggcaaggagatcgacttcagatgcccccaggaccagggctggaacgccgagatcaccctgcagatggtgcagtacaagaacagacaggccatcctggccgtgaagagcaccagacagaagcagcagcacctggtgcagcagcagctgcacccctacccccacccccacccccacccccacagccacccccacagccacccccacccccacccccacccccacccccaccagatcccccacccccacccccagccccacagccagccccacggccacagactgctgagaagcaccagcaacagcgcctag

SEQ ID NO: 172070 - protein, 1228 aa, Artificial Sequence
  derived and/or modified sequence
MKGARLFVLLSSLWSGGIGLNNSKHSWTIPEDGNSQKTMPSASVPPNKIQSLQILPTTRVMSAEIATTPEARTSEDSLLKSTLPPSETSAPAEGVRNQTLTSTEKAEGVVKLQNLTLPTNASIKFNPGAESVVLSNSTLKFLQSFARKSNEQATSLNTVGGTGGIGGVGGTGGVGNRAPRETYLSRGDSSSSQRTDYQKSNFETTRGKNWCAYVHTRLSPTVILDNQVTYVPGGKGPCGWTGGSCPQRSQKISNPVYRMQHKIVTSLDWRCCPGYSGPKCQLRAQEQQSLIHTNQAESHTAVGRGVAEQQQQQGCGDPEVMQKMTDQVNYQAMKLTLLQKKIDNISLTVNDVRNTYSSLEGKVSEDKSREFQSLLKGLKSKSINVLIRDIVREQFKIFQNDMQETVAQLFKTVSSLSEDLESTRQIIQKVNESVVSIAAQQKFVLVQENRPTLTDIVELRNHIVNVRQEMTLTCEKPIKELEVKQTHLEGALEQEHSRSILYYESLNKTLSKLKEVHEQLLSTEQVSDQKNAPAAESVSNNVTEYMSTLHENIKKQSLMMLQMFEDLHIQESKINNLTVSLEMEKESLRGECEDMLSKCRNDFKFQLKDTEENLHVLNQTLAEVLFPMDNKMDKMSEQLNDLTYDMEILQPLLEQGASLRQTMTYEQPKEAIVIRKKIENLTSAVNSLNFIIKELTKRHNLLRNEVQGRDDALERRINEYALEMEDGLNKTMTIINNAIDFIQDNYALKETLSTIKDNSEIHHKCTSDMETILTFIPQFHRLNDSIQTLVNDNQRYNFVLQVAKTLAGIPRDEKLNQSNFQKMYQMFNETTSQVRKYQQNMSHLEEKLLLTTKISKNFETRLQDIESKVTQTLIPYYISVKKGSVVTNERDQALQLQVLNSRFKALEAKSIHLSINFFSLNKTLHEVLTMCHNASTSVSELNATIPKWIKHSLPDIQLLQKGLTEFVEPIIQIKTQAALSNLTCCIDRSLPGSLANVVKSQKQVKSLPKKINALKKPTVNLTTVLIGRTQRNTDNIIYPEEYSSCSRHPCQNGGTCINGRTSFTCACRHPFTGDNCTIKLVEENALAPDFSKGSYRYAPMVAFFASHTYGMTIPGPILFNNLDVNYGASYTPRTGKFRIPYLGVYVFKYTIESFSAHISGFLVVDGIDKLAFESENINSEIHCDRVLTGDALLELNYGQEVWLRLAKGTIPAKFPPVTTFSGYLLYRT

SEQ ID NO: 172071 - protein, 531 aa, Artificial Sequence
  derived and/or modified sequence
MKGARLFVLLSSLWSGGIGLNNSKHSWTIPEDGNSQKTMPSASVPPNKIQSLQILPTTRVMSAEIATTPEKAEGVVKLQNLTLPTNASIKFNPGAESVVLSNSTLKFLQSFARKSNEQATSLNTVGGTGGIGGVGGTGGVGNRAPRETYLSRGDSSSSQRTDYQKSNFETTRGKNWCAYVHTRLSPTVILDNQVTYVPGGKGPCGWTGGSCPQRSQKISNPVYRMQHKIVTSLDWRCCPGYSGPKCQLRAQEQQSLIHTNQAESHTAVGRGVAEQQQQQGCGDPEVMQKMTDQVNYQAMKLTLLQKKIDNISLTVNDVRNTYSSLEGKVSEDKSREFQSLLKEEYSSCSRHPCQNGGTCINGRTSFTCACRHPFTGDNCTIKLVEENALAPDFSKGSYRYAPMVAFFASHTYGMTIPGPILFNNLDVNYGASYTPRTGKFRIPYLGVYVFKYTIESFSAHISGFLVVDGIDKLAFESENINSEIHCDRVLTGDALLELNYGQEVWLRLAKGTIPAKFPPVTTFSGYLLYRT

SEQ ID NO: 172072 - DNA, 5217 bp, Artificial Sequence
  derived and/or modified sequence
agagaggccaagaggtttctgcttctattgatgttagcatttggttataaccacgggcaaagaatattaagctttgtcagagacccttcagcacttccatagagccatcccactagaggtcacagatcacaaaaaccctacagaaacaggaaaccgaacttcctgagtacgctacaaaacacagaaacctgtttcctctacacatctcaaactggcaaaactcagtcttagcagattcagtgtggaagcagctatcaaaaaggccataaggattttgtccccaaatttcacatgagctaccttgcttcaaactactgagatgaagggggcaagattatttgtccttctttctagtttatggagtgggggcattgggcttaacaacagtaagcattcttggactatacctgaggatgggaactctcagaagactatgccttctgcttcagttcctccaaataaaatacaaagtttgcaaatactgccaaccactcgggtcatgtcggcggagatagctacaactccagaggcaagaacttctgaagacagtcttcttaaatcaacactgcctccctcagaaacaagtgcacctgctgagggtgtgagaaatcaaactctcacatccacagagaaagcagaaggagtggtcaagttacagaatcttaccctcccaaccaacgctagcatcaagttcaatcctggagcagaatcagtggtcctttccaattctacactgaaatttcttcagagctttgccagaaagtcaaatgaacaagcaacttctctaaacacagttggaggcactggaggcattggaggcgttggaggcactggaggcgtgggaaatcgagccccacgggaaacatacctcagccggggtgacagcagttccagccaaagaactgactaccaaaaatcaaatttcgaaacaactagaggaaagaattggtgtgcttatgtacataccaggttatctcccacagtgatattggacaaccaggtcacttatgtcccaggtgggaaaggaccttgtggctggaccggtggatcctgtcctcagagatctcagaagatatccaatcctgtctataggatgcaacataaaattgtcacctcattggattggaggtgctgtcctggatacagtgggccgaaatgtcaactaagagcccaggaacagcaaagtttgatacacaccaaccaggctgaaagtcatacagctgttggcagaggagtagctgagcagcagcagcagcaaggctgtggtgacccagaagtgatgcaaaaaatgactgatcaggtgaactaccaggcaatgaaactgactcttctgcagaagaagattgacaatatttctttgactgtgaatgatgtaaggaacacttactcctccctagaaggaaaagtcagcgaagataaaagcagagaatttcaatctcttctaaaaggtctaaaatccaaaagcattaatgtactgataagagacatagtaagagaacaatttaaaatttttcaaaatgacatgcaagagactgtagcacagctcttcaagactgtatcaagtctatcagaggacctcgaaagcaccaggcaaataattcaaaaagttaatgaatctgtggtttcaatagcagcccagcaaaagtttgttttggtgcaagagaatcggcccactttgactgatatagtggaactaaggaatcacattgtgaatgtaaggcaagaaatgactcttacatgtgagaagcctattaaagaactagaagtaaagcagactcatttagaaggtgctctagaacaggaacactcaagaagcattctgtattatgaatccctcaataaaactctttctaaattgaaggaagtacatgagcagcttttatcaactgaacaggtatcagaccagaagaatgctccagctgctgagtcagttagcaataatgtcactgagtacatgtctactttacatgaaaatataaagaagcagagtttgatgatgctgcaaatgtttgaagatttgcacattcaagaaagcaagattaacaatctcaccgtctctttggagatggagaaagagtctctcagaggtgaatgtgaagacatgttatccaaatgcagaaatgattttaaatttcaacttaaggacacagaagagaatttacatgtgttaaatcaaacattggctgaagttctctttccaatggacaataagatggacaaaatgagtgagcaactaaatgatttgacttatgatatggagatccttcaacccttgcttgagcagggagcatcactcagacagacaatgacatatgaacaaccaaaggaagcaatagtgataaggaaaaagatagaaaatctgactagtgctgtcaatagtctaaattttattatcaaagaacttacaaaaagacacaacttacttagaaatgaagtacagggtcgtgatgatgccttagaaagacgtatcaatgaatatgccttagaaatggaagatggcctcaataagacaatgactattataaataatgctattgatttcattcaagataactatgccctaaaagagactttaagtactattaaggataatagtgagatccatcataaatgtacctccgatatggaaactattttgacatttattcctcagttccaccgtctgaatgattctattcagactttggtcaatgacaatcagagatataactttgttttgcaagtcgccaagacccttgcaggtattcccagagatgagaaactaaatcagtccaacttccaaaagatgtatcaaatgttcaatgaaaccacttcccaagtgagaaaataccagcaaaatatgagtcatttggaagaaaaactactcttaactaccaagatttccaaaaattttgagactcggttgcaagacattgagtctaaagttacccagacgctcataccttattatatttcagttaaaaaaggcagtgtagttacaaatgagagagatcaggctcttcaactgcaagtattaaattccagatttaaggcgttggaagcaaaatctatccatctttcaattaacttcttttcgcttaacaaaactctccacgaagttttaacaatgtgtcacaatgcttctacaagtgtgtcagaactgaatgctaccatccctaagtggataaaacattccctgccagatattcaacttcttcagaaaggtctaacagaatttgtggaaccaataattcaaataaaaactcaagctgccctatctaatttaacttgttgtatagatcgatcgttgcctggtagtctggcaaatgttgtcaagtctcagaagcaagtaaaatcattgccaaagaaaattaacgcacttaagaaaccaacggtaaatcttaccacagtcctgataggccggactcaaagaaacacggacaacataatatatcctgaggagtattcaagctgtagtcggcatccgtgccaaaatgggggcacgtgcataaatggaagaactagctttacctgtgcctgcagacatccttttactggtgacaactgcactatcaagcttgtggaagaaaatgctttagctccagatttttccaaaggatcttacagatatgcacccatggtggcattttttgcatctcatacgtatggaatgactatacctggtcctatcctgtttaataacttggatgtcaattatggagcttcatataccccaagaactggaaaatttagaattccgtatcttggagtatatgttttcaagtacaccatcgagtcatttagtgctcatatttctggatttttagtggttgatggaatagacaagcttgcatttgagtctgaaaatattaacagtgaaatacactgtgatagggttttaactggggatgccttattagaattaaattatgggcaggaagtctggttacgacttgcaaaaggaacaattccagccaagtttccccctgttactacatttagtggctatttattatatcgtacataagttagtatgaaaaacagactatcacctttattgagaaacagccagtgttttcatttatctttgcttgcacatctgctctgttttggtttttctacaggaaatgaaaatcaacttgtttttttaatatgagtaaacttgtatgtctattttataaaattatttgaatattgtttaatgtctgaatatgaaagagttcttgatcctaaagaaatttagtggcacagaaaacaaagtgaatttgttagcataattattcctattcttatttcttcattttaagtcattgcaatggaaagtaatattataaaatggtaattacaacatattatcagtcacagttttctttccaattaaacacttaacttttgttattccctgtatataaatatataacacacattttctagattcacaaatttaaataaattactcaaaaaatgaaaattgattttgtaaacttttatttttactctttacgttgagttgatcaattttccatactaagattttcattcagaatcaaaattaagaaagttggactgaaaatatgaaaaatgcttaactattgttctcttcctataattctctaattataacatagtaatttacatgtagttggacatgtacactcaagtctaagaatatatgagtggatcatttaccgccccccgccccacaacatctataaggggcaaaaagtctttttctaataagtattcttctatggtagtacctacagatctgcccttcttcttctaaagggtaagtcataatctgtgtaatactacaatttatgggatgctcactatgccctgtttctcttctaaacaatttacatgtaatgtctcattcctcacaataacccttgtaaagtgggcatgattaccatgatttttatagttgaagaacctaagacacagagaccaaggcccatgagctcatagggctgaggcaggatttggaatcaggccatgtcttctccagagcccacatccatcctttctctatattgcctcccacagatgtgctaaaatttatttaactaatcctttatcctctatttgtgttgtctcccattttttattattacaatattactgtggtgaacatgcttaaaaatacattccttggatatctgacaacgtgtttctgaaaaacagattttcataagtaataataaaaataataataaaaaagttttggtatggtaa

SEQ ID NO: 172073 - DNA, 2805 bp, Artificial Sequence
  derived and/or modified sequence
atgaagggggcaagattatttgtccttctttctagtttatggagtgggggcattgggcttaacaacagtaagcattcttggactatacctgaggatgggaactctcagaagactatgccttctgcttcagttcctccaaataaaatacaaagtttgcaaatactgccaaccactcgggtcatgtcggcggagatagctacaactccagagaaagcagaaggagtggtcaagttacagaatcttaccctcccaaccaacgctagcatcaagttcaatcctggagcagaatcagtggtcctttccaattctacactgaaatttcttcagagctttgccagaaagtcaaatgaacaagcaacttctctaaacacagttggaggcactggaggcattggaggcgttggaggcactggaggcgtgggaaatcgagccccacgggaaacatacctcagccggggtgacagcagttccagccaaagaactgactaccaaaaatcaaatttcgaaacaactagaggaaagaattggtgtgcttatgtacataccaggttatctcccacagtgatattggacaaccaggtcacttatgtcccaggtgggaaaggaccttgtggctggaccggtggatcctgtcctcagagatctcagaagatatccaatcctgtctataggatgcaacataaaattgtcacctcattggattggaggtgctgtcctggatacagtgggccgaaatgtcaactaagagcccaggaacagcaaagtttgatacacaccaaccaggctgaaagtcatacagctgttggcagaggagtagctgagcagcagcagcagcaaggctgtggtgacccagaagtgatgcaaaaaatgactgatcaggtgaactaccaggcaatgaaactgactcttctgcagaagaagattgacaatatttctttgactgtgaatgatgtaaggaacacttactcctccctagaaggaaaagtcagcgaagataaaagcagagaatttcaatctcttctaaaagaggagtattcaagctgtagtcggcatccgtgccaaaatgggggcacgtgcataaatggaagaactagctttacctgtgcctgcagacatccttttactggtgacaactgcactatcaagcttgtggaagaaaatgctttagctccagatttttccaaaggatcttacagatatgcacccatggtggcattttttgcatctcatacgtatggaatgactatacctggtcctatcctgtttaataacttggatgtcaattatggagcttcatataccccaagaactggaaaatttagaattccgtatcttggagtatatgttttcaagtacaccatcgagtcatttagtgctcatatttctggatttttagtggttgatggaatagacaagcttgcatttgagtctgaaaatattaacagtgaaatacactgtgatagggttttaactggggatgccttattagaattaaattatgggcaggaagtctggttacgacttgcaaaaggaacaattccagccaagtttccccctgttactacatttagtggctatttattatatcgtacataagttagtatgaaaaacagactatcacctttattgagaaacagccagtgttttcatttatctttgcttgcacatctgctctgttttggtttttctacaggaaatgaaaatcaacttgtttttttaatatgagtaaacttgtatgtctattttataaaattatttgaatattgtttaatgtctgaatatgaaagagttcttgatcctaaagaaatttagtggcacagaaaacaaagtgaatttgttagcataattattcctattcttatttcttcattttaagtcattgcaatggaaagtaatattataaaatggtaattacaacatattatcagtcacagttttctttccaattaaacacttaacttttgttattccctgtatataaatatataacacacattttctagattcacaaatttaaataaattactcaaaaaatgaaaattgattttgtaaacttttatttttactctttacgttgagttgatcaattttccatactaagattttcattcagaatcaaaattaagaaagttggactgaaaatatgaaaaatgcttaactattgttctcttcctataattctctaattataacatagtaatttacatgtagttggacatgtacactcaagtctaagaatatatgagtggatcatttaccgccccccgccccacaacatctataaggggcaaaaagtctttttctaataagtattcttctatggtagtacctacagatctgcccttcttcttctaaagggtaagtcataatctgtgtaatactacaatttatgggatgctcactatgccctgtttctcttctaaacaatttacatgtaatgtctcattcctcacaataacccttgtaaagtgggcatgattaccatgatttttatagttgaagaacctaagacacagagaccaaggcccatgagctcatagggctgaggcaggatttggaatcaggccatgtcttctccagagcccacatccatcctttctctatattgcctcccacagatgtgctaaaatttatttaactaatcctttatcctctatttgtgttgtctcccattttttattattacaatattactgtggtgaacatgcttaaaaatacattccttggatatctgacaacgtgtttctgaaaaacagattttcataagtaataataaaaataataataaaaaagttttggtatggt

SEQ ID NO: 172074 - DNA, 3687 bp, Artificial Sequence
  derived and/or modified sequence
atgaagggagcaagattgttcgtcttgctgtcctcattgtggagcggtgggataggtttgaacaattcaaaacacagttggacaatccctgaggatgggaacagccagaagactatgccttcagcatccgtcccacccaacaagatccagtccctacagatcctgcccacaacccgtgtgatgtcggcagaaattgcgaccacaccagaggccaggactagtgaggactcactgctgaagtccacattgccgcctagcgagacaagtgccccagccgaaggcgtgcgtaaccagactctcacttctaccgagaaggccgagggcgtggtgaaattacagaacttaacacttccaacgaacgcatctattaagtttaatcctggcgcagagtcggtggttctttcaaattcaaccctgaagttcctgcagtcttttgctagaaaaagcaatgagcaggctacatcactgaacacagttggcggaacagggggaattggcggtgttggaggcaccgggggagtcggcaatcgtgctcccagagagacgtatctgtctcgaggcgattcatccagttcccaacgcacagattaccagaagagtaatttcgagacaacccgtggcaaaaactggtgcgcatacgtgcatacgaggctaagtcctacagtgatccttgacaatcaggtgacctacgtacccggtgggaagggcccttgtggatggaccggcggttcttgtccccaacgctcgcagaaaatcagcaatccagtttaccgcatgcagcacaaaattgtcacaagtctggattggaggtgctgcccaggatactccgggcctaagtgccagctgagggcccaggagcaacagtcattgatacacaccaatcaggctgaatcccataccgctgtaggccgtggcgtcgcagagcagcagcagcagcaaggatgcggcgatcctgaagtgatgcagaagatgactgaccaggttaactatcaggctatgaaattaaccctcctgcagaaaaaaatcgataacatctcacttacagtcaacgacgtgcgtaacacttacagtagtctggagggaaaggtcagcgaggataagtccagggagttccagagcttactgaagggcctgaaaagcaaaagcataaacgtgctcattcgggacatagtgagagagcagtttaagatcttccagaacgacatgcaggagaccgtggcacagttgttcaaaacagtgtcaagtttgtccgaggatttggaatctaccagacagattatccaaaaggtgaacgaatccgtggtatctatcgctgcgcagcagaagtttgtattggtgcaagaaaaccggcctactttgacagatatcgtggagctgcgcaaccacattgttaatgtgcgccaagagatgacattgacatgcgagaaacccatcaaggagctggaggtgaagcagacccacctcgaaggcgctcttgagcaggaacatagccggagtatcctgtattatgagtctcttaacaagactttatccaagctgaaggaggtccatgagcaattactgtcaaccgagcaagtgagcgaccagaagaacgcaccagcagctgagagtgtgagcaataacgtgaccgaatacatgtcaaccttgcacgaaaacattaaaaagcagagcctcatgatgctgcaaatgtttgaggatttgcacattcaagagtctaaaatcaataacttaacggtctccctcgaaatggaaaaagagtcacttcgtggcgaatgcgaagacatgctgtcaaaatgccgcaacgattttaagtttcagcttaaggatacggaagaaaatcttcacgtactcaatcagacactcgcggaggttctgttccccatggacaataagatggacaagatgagtgagcagttgaatgacctcacctacgacatggaaatcctccaacctttattggagcagggagcctccctgcgtcagacaatgacctatgaacagccaaaggaggccatcgtcatccgcaaaaaaatcgagaacctgacctccgccgtcaactcgctgaactttatcataaaagagctgactaaacgccacaacttgctccggaacgaagtgcagggcagagatgatgccctggaacgacggataaacgagtatgctctcgagatggaagacggactgaataagactatgaccattatcaacaacgccattgatttcatccaagataactatgcactcaaagaaacactgtccacaattaaggataactcagaaattcaccataagtgtaccagcgatatggagaccattctcactttcatccctcagttccatcgactaaacgatagcattcagacactagtcaacgacaaccaaagatataatttcgtactgcaggtagccaagaccctagctggaatacccagggacgagaaactgaatcaatccaactttcagaagatgtaccagatgtttaatgagactacttctcaggtgagaaaataccagcagaacatgtctcacctggaagagaagttgctgcttacgaccaagatatcaaaaaatttcgaaacaagactgcaggacatagagagtaaggtgacccaaacactgataccttattatatctctgtaaaaaaagggagtgtggtcaccaacgaacgtgaccaggccctgcagttgcaggttctaaacagtaggtttaaagccctggaggcaaagagtattcacttgtccattaattttttctctttaaataagaccctgcatgaggtgctcactatgtgtcacaacgccagcacaagcgtcagtgaactcaacgccacaatccccaagtggatcaaacactccctacctgatattcagcttctccagaaaggattaacagaatttgttgaaccaatcatccaaattaagacacaggctgctcttagtaacctgacgtgctgtatagacaggagtctgcccggttccctggccaatgtcgtgaaatctcagaagcaggtgaagagcctgcctaagaaaattaacgccttgaaaaagccgaccgtcaatctcaccacagtgctgattggacgcacacagcgaaacacagataacattatttatcctgaagagtacagcagttgttcaaggcatccgtgtcaaaacgggggaacctgtattaacggcaggacctcgttcacttgcgcctgtaggcatcccttcacaggagacaattgcactattaaactggtggaggaaaacgcgttagcaccagactttagcaaggggagctacaggtatgcacccatggttgcgttctttgcttctcacacttatgggatgacgatcccagggccaatcctgtttaacaatctggacgtgaactatggcgcttcctatacccctaggacaggcaagtttaggatcccctacctgggggtgtatgttttcaagtataccatagagtcatttagcgcacatatcagcggatttttggtggtcgatggcatcgataaactagcatttgagagcgagaacatcaacagtgaaattcactgtgacagggtgctgaccggcgatgccctgctggagcttaactacggacaggaggtgtggctccggctggccaagggaactatacccgcaaaattcccacccgtgactacattttctggttacctgctctaccggacctag

SEQ ID NO: 172075 - DNA, 3687 bp, Artificial Sequence
  derived and/or modified sequence
atgaaaggcgcaagactgtttgtccttctgtccagcctgtggagcggtggcattggcctcaacaacagtaagcactcgtggacaattcctgaggatgggaattcacagaagactatgccaagcgccagtgttcctcctaacaagatccaatcacttcaaatcttaccaacaacacgcgtcatgagcgctgagatcgccactaccccagaagcacgtaccagcgaggatagccttctaaaaagtacccttcccccaagcgagacaagcgctccagctgagggcgtcaggaaccagactcttaccagcactgaaaaagctgagggcgttgtcaagctgcaaaatctcaccctgcccactaacgcttccatcaaatttaaccccggtgccgagagcgtcgtcctttccaactccacactgaaattcctgcagagcttcgccagaaagtcaaacgaacaagccacctcgctaaataccgtcgggggtacaggaggtatcgggggagtcggcggtacaggcggagtgggaaacagggctccacgggaaacctaccttagcagaggtgactcctccagttcacagcgcactgactaccaaaagagtaattttgaaactactcggggaaaaaactggtgcgcttacgtccatactaggttgagccccacagttattcttgataaccaggttacgtacgtgcctggcggaaaaggcccatgcgggtggaccgggggaagttgccctcaacggagccaaaagatctccaacccagtttatcggatgcaacataaaatagtgacaagcttagattggagatgctgccctggatactctgggcctaagtgccagctccgggcacaggagcagcaatctctgatacacactaaccaggccgagtcacacacagcagtggggaggggcgttgcagagcagcagcaacagcagggatgtggcgaccccgaagtgatgcagaagatgaccgatcaggtgaactaccaggcgatgaagttaactctgctccaaaaaaaaatcgataatatctccctgactgtgaacgatgtcagaaatacctattcgagcctggagggcaaagtatctgaggacaaatcaagagagtttcagagtctgctgaaaggcttgaaaagtaagtctatcaatgtgcttataagggacatagtccgcgagcaattcaagattttccagaatgacatgcaggagacggtggcacaattgttcaaaacagtcagcagcctttccgaagatctagagtcaactaggcaaatcattcagaaagtgaatgagtcagtcgtctcaatagctgcccagcaaaagttcgtgttagtacaggaaaatcggccaacccttaccgacatagttgaacttcgtaatcacatcgtgaatgtccgccaggagatgacactaacctgtgagaaaccaattaaggaattagaggtgaaacagactcatctcgaaggggcactggaacaggagcattctcgatctattctgtattacgagtctctcaacaagaccctaagcaagctgaaggaggtgcatgagcagctgttgtcaacggagcaggtttctgatcagaaaaatgcccctgcagctgaatccgtgtctaacaacgtgactgagtatatgtccaccttgcatgaaaatattaaaaaacagtcccttatgatgctgcagatgttcgaagatttacacatccaggagtcgaaaattaacaatctgacagtgagcctggaaatggaaaaggaaagcctccgaggggaatgcgaagacatgctaagtaaatgcagaaatgacttcaagttccagctcaaggacactgaggagaacctacacgtgctgaatcaaacgctcgcggaagtgctgtttcctatggacaataagatggataagatgtcagaacaattgaatgacctcacatacgacatggagatcctgcagccgctcctggagcagggagcttctctgcggcaaacgatgacctatgagcaacccaaagaggcaattgttatccgtaagaaaatagagaatctgacatctgctgtcaatagcctgaatttcataattaaagaattgactaagaggcacaacctgttacggaatgaggtgcagggcagagatgatgcattggaaaggaggattaatgagtacgcacttgaaatggaagatggtttgaacaagactatgactattatcaataacgcaattgactttattcaggataattacgcactcaaagaaactctgtcaacaatcaaggacaacagcgaaatccaccataaatgtacgagcgatatggagaccatcctcaccttcattcctcagttccacagactcaatgacagtattcagacgctagtgaacgacaatcagcggtataactttgtgctgcaggtagctaagacactggcagggatcccacgtgacgaaaagctgaaccagagtaattttcagaaaatgtaccagatgtttaatgagactacctcacaggtgagaaaatatcaacaaaacatgtcccacctcgaagaaaagcttctactgaccaccaaaatatctaaaaattttgagacacgcttacaggatatcgagtctaaggtcactcagacactgattccctactatatttctgtgaaaaaggggagtgtggttacaaacgagagagaccaggcactgcagcttcaggttctcaatagcagatttaaggccctcgaggccaaaagcatccacttgtccataaactttttttccctgaacaagacacttcatgaggtgctgactatgtgccataacgcctcgacttccgtgagcgagctgaatgccaccatccccaaatggataaagcacagtttaccagacattcaactgttacaaaaaggactgacagagttcgtggaacctattatccagatcaagacgcaggcggcattgtcgaatcttacctgctgtatagatcggtccctgccaggctctctcgccaatgtggtgaaaagccagaagcaggtgaagtcattgccaaagaaaattaacgctctcaagaagcccacagttaacttaacaacggtgttgattgggaggacacagagaaatactgacaatatcatatatcctgaagagtactcttcttgcagccgacacccgtgccagaacggagggacttgcatcaatgggagaacatcgttcacttgcgcctgcagacatccattcaccggcgacaattgcaccattaaactcgttgaggaaaatgccctagccccagatttttcgaaagggtcttaccgctacgcaccaatggtggccttttttgcatcccacacttacgggatgaccatccccggacctatcctgttcaataacctggatgtgaactatggcgcaagttatactccacggactggaaagttcaggattccatatttgggtgtgtatgtgttcaaatatacaattgaatctttttctgcacacatctctgggttcttggtcgtcgacggcatagacaagctggcatttgaaagcgaaaacatcaatagtgagattcattgtgatcgcgtgttaaccggcgacgcacttcttgaactcaattatggtcaggaagtctggctgcgactagcgaaagggaccatccctgctaagttcccaccggtcactacgttttccggttatctcctttaccgcacatag

SEQ ID NO: 172076 - DNA, 1596 bp, Artificial Sequence
  derived and/or modified sequence
atgaaaggcgcacggttgttcgtgctgctttctagcctgtggtcagggggtataggactcaacaactctaagcactcttggacaataccagaggacgggaacagccagaagaccatgcctagcgcttctgttcctccaaacaagattcagagtctgcagatcctgccaacaaccagagtgatgtcagcggaaatcgccactactcctgagaaggccgaaggtgttgtgaaacttcagaatctgacgctgccaaccaatgcttctataaagtttaatccaggtgccgaatccgtggtgctttccaatagcacgctcaagtttctgcagtctttcgcgcgtaagtctaacgagcaggccacctctctaaatacggtggggggtaccggaggcatcgggggtgtcgggggaacaggcggtgtgggcaatcgagcaccccgtgaaacctatctctctcggggagactcatcctccagtcagaggaccgattatcagaagtccaactttgagacaacccgcggtaagaattggtgtgcttatgtgcatacacggctgtctcccacagtgattctggacaatcaggtcacctatgtacccggtggcaagggaccctgcggctggactggaggctcctgcccgcagcgatcccagaagatttctaacccagtctatagaatgcaacacaagatcgtcacatctcttgattggcgttgctgtccagggtattccggaccaaaatgtcagcttagagctcaggaacaacagagtctgattcacaccaatcaggccgagtctcacacagcagtgggccgaggagtggccgagcagcagcagcagcagggctgtggcgaccccgaagtaatgcagaaaatgaccgaccaagtcaactatcaagcaatgaagctgacgttgcttcagaaaaaaatcgacaacatttctctgaccgtcaacgacgttcgcaacacgtactcttccttagagggtaaggtgtccgaggataaaagcagggaattccagagtctactgaaggaggaatacagctcatgttcacggcacccctgccagaatggaggtacttgcatcaatggccgtactagcttcacttgcgcatgtcgccatccttttaccggcgataattgcacaatcaagctagttgaggaaaatgccctggctccagacttttccaaaggcagttacaggtacgccccaatggtggccttcttcgcttcccatacgtacggcatgactatccccggtcctatcttattcaataatctggatgtcaattatggggcatcctataccccgaggacaggcaaattccgcatcccatacctaggcgtatacgtgtttaaatacaccatcgaatcctttagtgcccacatttcaggattcttggtggtggacgggatagacaagctcgcgttcgagagcgagaatataaattcagagattcactgcgaccgcgtattgacaggtgatgctttgctcgagttaaactacggtcaggaggtctggctcagactcgctaaaggcactatcccggctaagttcccaccagttactacattttcaggatacctgctttatcggacctag

SEQ ID NO: 172077 - DNA, 3687 bp, Artificial Sequence
  derived and/or modified sequence
atgaagggagcacgcctgtttgtcttgctcagcagtctctggagtggtggtattgggctaaataactctaagcattcgtggaccatccccgaggatgggaactctcagaagacaatgccctctgccagcgtgccacccaacaagatccagtccctgcaaatcctgcctaccaccagagtgatgtctgctgagatcgccaccacccccgaggcccgcacgagtgaggattcactgctaaaaagtactctcccaccatccgaaaccagcgcacctgcagaaggcgtgagaaaccaaacccttacaagcacagaaaaagcagagggcgtcgtgaaacttcagaatttgaccctgcctacaaacgcctccataaagtttaaccctggagccgagagcgttgtgctgtccaactccactctcaagttcctacagtccttcgcaagaaaatcaaacgagcaggccaccagccttaatacagtgggcggaaccggtggcattggaggcgttggtgggaccgggggggtcgggaacagggctccgagggaaacttacctgagcagaggcgacagttcctccagccaaagaacagactaccaaaagtctaattttgagacaactcgggggaaaaattggtgtgcctacgtgcatacacgcctctccccaaccgtgatcttagataaccaggtgacatacgtgccagggggcaaaggaccctgcgggtggaccggcggatcctgtccacagaggtcacagaaaatctctaacccggtgtataggatgcagcacaagattgtgacgagcctggactggcgatgttgtccaggatacagtggcccgaagtgccagctgagagcccaagagcagcaaagtcttattcataccaatcaagctgagtcccatacggctgtggggcggggtgtcgccgaacaacaacagcaacagggatgtggggatcctgaagtgatgcagaaaatgacagatcaggtcaactaccaggccatgaaacttaccctgctgcagaaaaaaatcgataatataagtctgaccgtaaatgacgtgcgcaacacctacagttctctggaaggcaaggttagtgaggataagtcaagagaattccagtctctcttgaagggcctcaaaagcaaatcgatcaacgtgctcataagagacatcgtgagggagcagttcaagatattccagaacgatatgcaggaaacagttgcccagctgttcaagactgttagctctctctctgaggatcttgagtctacccgtcaaatcatccaaaaggtgaacgaatctgttgtttccattgctgcacagcaaaagtttgtactggtacaggagaaccgaccaactcttaccgatatcgtagaactgcgtaaccacatagtgaacgtccgccaagaaatgaccctaacgtgtgagaaaccaataaaggagcttgaagtgaaacagacacacttagaaggagcactggaacaggaacactctcgcagtatcttgtattacgaaagtttgaataagacattgtccaaattgaaagaggtgcacgaacagctgctttccacggagcaggtgtccgaccaaaagaacgcgcctgcggctgagagtgtatcaaacaacgtcacagaatatatgtcaacccttcatgagaacatcaaaaagcagtccctgatgatgcttcaaatgtttgaggacctgcacattcaagaatctaaaatcaataatctgacagtctcactggaaatggagaaagagagcttgagaggcgagtgcgaagatatgttgtctaagtgtcggaacgatttcaagttccagcttaaggacacggaagaaaacctgcacgtcctgaaccagactctcgccgaggtgctgtttccaatggataataaaatggataagatgagcgagcagctgaacgatctaacctacgatatggagattctgcagcctctgctcgaacaaggtgcatccctgaggcagactatgacatatgaacagccgaaggaggctatcgtgatccgcaagaaaatcgaaaatcttacatccgccgtgaactctctcaacttcatcatcaaagaactgacaaaacgccacaatcttcttagaaatgaggttcagggcagggacgacgcgctggagagacgaattaatgagtatgctctggaaatggaggatggcctgaacaagacaatgacaataatcaacaacgccatcgactttatccaagacaactacgcacttaaagagactctgagtaccatcaaggacaactcagaaattcatcacaaatgtacttctgatatggaaacgattcttaccttcattccccaatttcacagactaaatgactcaatacagacactcgtgaacgacaaccagcggtacaattttgtgctacaggttgctaaaacactggccggaattccgcgcgacgagaagctgaaccagtcaaatttccagaagatgtatcagatgtttaacgagaccacctcacaggttcggaaatatcagcagaacatgtcgcacctggaagagaaattgctccttacgaccaaaatcagcaaaaacttcgagactagactgcaggacatcgagtctaaggttacgcagacgctcattccatattatatttcagtaaaaaagggctctgtcgttaccaacgaacgggaccaggcactgcagctccaggtcctgaatagcaggttcaaggcgttggaagcaaaatcaattcacctgtctatcaacttcttctcgctgaacaaaacacttcatgaggtgctgacaatgtgccataacgcttcgacctccgtctctgagttgaacgccactataccgaaatggatcaagcacagccttcccgatatccagcttctccagaaaggattaacagaattcgtggagcctataatacagatcaagacccaagcggcactctccaatctgacctgctgcatcgaccgttcgctgcccgggtcattggcaaacgtggttaagtcccagaagcaagtgaaatcactgcctaagaaaatcaatgccttgaaaaagcccactgtcaacctcaccacagtgctgattggacggacgcagaggaatacggataacatcatttaccctgaggaatactcatcctgctccagacacccatgccagaatgggggtacatgtattaacggtcgtacttcatttacgtgtgcctgccgacacccattcaccggtgataattgcaccattaaactggttgaggagaatgccctggcccccgacttctccaaaggttcataccgctacgctccaatggttgcattttttgcttctcatacttacggcatgactatacccgggcctattctttttaataatctggacgtgaactacggcgcttcctatacaccgcggaccggtaagttcaggattccgtacctgggtgtatatgtattcaagtatacaattgaaagcttcagcgctcatatctctggattcttggtcgtggacggtatcgataaacttgctttcgagtctgaaaacataaacagcgaaattcattgcgatagggtgttaacaggtgacgcattactcgaactgaattacggtcaggaagtgtggcttcgcctggctaaggggaccatccccgccaagtttccgcccgtgacaacgttttctggatacctgctttacagaacctag

SEQ ID NO: 172078 - DNA, 3687 bp, Artificial Sequence
  derived and/or modified sequence
atgaagggcgccagactctttgtccttttatcctcactctggagtggcgggataggcctgaataactctaaacacagctggaccatccccgaagacggcaatagccagaagaccatgccatctgccagtgtaccacctaataagatacagtctctgcagatccttcccacaacccgcgttatgagcgccgagatcgctacaactcctgaggctcggacgagtgaggatagcttgctgaagtctaccctgcccccatcagagacatctgctcctgcagaaggcgttaggaaccagacgctcaccagcacagaaaaggctgagggcgtggtgaaactgcagaatttgacactccccacgaatgcatctattaagttcaatccaggtgctgagtccgtggtcctgagtaattctacactgaaattcttacaatctttcgccaggaaaagtaacgagcaggcaacgtccctgaacaccgtgggcgggacaggagggatcggaggggtgggcggtacaggcggggtgggcaacagggcacccagggaaacatatctctcccggggcgatagctcttcctctcagcgtaccgactaccagaagagcaactttgagaccacccgcggtaagaattggtgtgcttatgtgcacactcgactgtcacccacagtcattctggataatcaagtgacctacgtccctggaggaaaagggccttgtggctggaccggcgggagctgcccacagcgcagtcagaaaatatccaatcccgtttacaggatgcagcacaaaatcgtgacttctctggactggcggtgttgccccggatactcaggccctaaatgtcagcttcgggcccaggaacagcagtcacttatccacactaaccaagcagaaagtcacaccgccgttggccgtggcgtagccgaacagcagcagcagcaaggctgtggggaccccgaagttatgcagaagatgacggatcaagtgaattaccaagctatgaagctgaccctgctgcagaagaagatcgacaatatcagtctcacagtgaacgatgtccgaaacacctatagctccctggagggcaaggtttccgaggacaagagtcgggaattccagagcttgctgaaaggactgaagagtaagtccatcaacgtcctgataagagacatcgtgcgcgagcagttcaaaattttccaaaatgatatgcaggagactgtggcccagctctttaaaactgtgagtagcctatctgaagaccttgagtcgacccgccaaatcatccaaaaggttaacgagtcagttgtgagcattgcagcccagcaaaaattcgtgctggtacaggaaaaccgccctactctcacagacattgtggagcttcgtaaccacattgtgaacgtgcgccaggaaatgacccttacatgcgaaaaacctattaaagaactcgaggtcaagcaaacccatctggaaggagcccttgagcaggaacacagccggtcaatactgtattatgaatccttgaataagacccttagtaaacttaaagaagtgcacgagcagttgctgagcacggaacaagtcagcgaccaaaagaatgcccctgcagcagagtcggtctctaacaacgttaccgagtatatgtctactttacatgagaacattaaaaagcaaagcttgatgatgttgcaaatgtttgaagacctgcatatccaagagtctaagataaataatctcacagtttcacttgagatggagaaagagtctcttcgcggcgaatgtgaagacatgttgagtaagtgtcgaaacgattttaaatttcagctcaaagacacagaagaaaatttgcacgtccttaatcagacgctggccgaggttttattcccaatggacaacaaaatggataagatgtcggaacaattaaatgatctgacatatgacatggaaattctgcagccactgttggagcagggcgcttccttgcggcaaacaatgacttacgaacagccaaaagaggccatcgttatccggaagaagattgaaaatcttacatctgctgtgaattccttgaactttatcattaaagagctgaccaaacggcacaatttgttgaggaacgaggtccaggggcgcgacgacgccttggagagacgcattaatgaatacgcccttgaaatggaagacggcctgaataagaccatgacaattatcaacaatgctattgatttcattcaagacaactacgcactcaaagagaccctgtccacgattaaagataattccgaaattcatcataaatgtacttccgacatggagactatcttaacattcatccctcagtttcatcggttgaacgactcgatacaaaccctggtgaacgataatcagagatataattttgtcttacaagtcgcaaaaacacttgccggcatcccacgcgacgaaaaactaaaccagtcaaatttccagaaaatgtatcagatgttcaatgagactaccagccaggtgcgcaaataccaacagaacatgagtcacctggaggagaaattgctgctgactactaaaatctccaaaaattttgaaactagacttcaggacattgagtctaaggttactcaaaccctcatcccatattatatctccgtcaagaagggctcagtggtgactaatgaaagagatcaggcattgcaactgcaagtgcttaactctagatttaaggctcttgaggccaagagtatacacctaagtattaactttttctccttgaataagaccctgcacgaggtccttactatgtgccataacgcaagtacctccgtctccgaactgaacgcaacgatacctaaatggatcaagcactccctgcccgatattcagttgctgcagaagggactgaccgagtttgttgaacctatcatccagataaagactcaggcagctctttccaatcttacatgttgtattgacaggagtttacccggttcgctagcaaacgtggtgaagagccagaagcaagtcaaatccttgccaaaaaagatcaacgccctgaaaaaaccaactgtaaacctgactactgtcctgattggacgcacccaacggaacacagataacattatctatcctgaggaatacagcagctgcagccggcatccgtgccagaacggcgggacttgcatcaatgggcggacctctttcacgtgtgcttgtcggcaccctttcaccggcgacaattgtactatcaaactggtggaagagaatgcgctagctcccgatttttctaaaggatcatataggtatgcaccaatggtcgctttcttcgcaagccacacttacggcatgaccatcccaggcccaatactgtttaataacctcgatgtcaattacggagcatcttatactcccagaacagggaagttccgcataccatatctgggtgtctatgtttttaagtacaccatcgagtcctttagtgcacacatatccggatttcttgttgtggacggaatcgataaactggccttcgagtcagaaaatattaattccgagatccattgtgatagagttctaaccggggacgcactgctggagttaaactatgggcaagaagtgtggctgagattggcgaagggtacaatacctgcgaagttcccaccagtaacaacattctctggttaccttctgtaccggacatag

SEQ ID NO: 172079 - DNA, 1596 bp, Artificial Sequence
  derived and/or modified sequence
atgaaaggggcccggctgtttgtgctgctctctagcctgtggagcgggggtatcggtctgaataatagcaagcactcttggaccataccggaagacggtaacagccagaagaccatgccctctgcatcagtgccccccaacaaaatccagtcccttcagattctcccaaccacaagggtgatgagtgccgaaatcgcaacaacaccagaaaaggcggagggggtcgtgaagttgcagaacctgactctccctactaatgcttctatcaagttcaatcctggcgccgagagcgttgttcttagtaactctacactgaagtttctgcaatccttcgctagaaagagtaacgagcaggcgacttccctgaacaccgtgggcggcacagggggtatcgggggggtgggaggaacaggtggcgttgggaacagagcaccacgcgagacatacctgtcaaggggagactcctcctcctcacagcgaaccgactaccagaaaagtaatttcgagaccactcggggaaaaaattggtgcgcttacgtgcataccagactgtcacccaccgtgatactggacaatcaagtaacatatgtaccaggtgggaaggggccttgcggttggactggggggagttgccctcaacgatcccaaaagattagtaatcccgtctacagaatgcaacacaaaattgtcaccagccttgactggcgatgctgccccggatatagcggccctaagtgtcagttgagggcacaggaacagcaaagtttaatccacacaaatcaggctgaatctcacacagcagtgggcagaggagtggcagagcagcagcagcagcaaggatgtggcgaccccgaggtgatgcagaagatgactgaccaagtgaattatcaggccatgaaactaacacttctgcagaagaagatcgacaacatttctttaaccgtaaacgacgtacggaatacatacagctccctcgagggcaaggtaagcgaggacaagtcaagggagtttcagagtctcctaaaggaagagtactctagctgttcccggcatccatgccagaatggcggaacctgcatcaatggccgtacatcctttacctgcgcctgtaggcacccctttactggcgataattgcaccattaagctggtcgaagaaaatgcccttgccccggacttcagtaaaggatcttaccgctacgcacctatggtagccttttttgcttcccacacttacggcatgacaataccagggcctatcctgttcaacaatctggacgtgaactacggagcttcatacacccctcggacaggcaaattccgcattccctatctgggtgtttacgtgtttaagtataccattgaaagcttttctgcgcatatctccgggttcttggtggtagatgggattgacaaactcgcatttgaaagcgaaaacattaacagcgaaatccactgcgatagggtgcttaccggcgatgcattgttagaattgaattatggtcaggaagtctggctccgccttgctaaagggaccatacccgccaagtttcctcctgtaactaccttcagcggatacctgctttaccggacctag

SEQ ID NO: 172080 - DNA, 3687 bp, Artificial Sequence
  derived and/or modified sequence
atgaaaggtgcccgattgtttgttttactgtcctcattatggagtggcggaattggccttaataactcaaagcacagctggacaataccagaggatggcaattcccaaaagacaatgccttcagcctcagtcccccccaacaagatccagtccttgcagattctgccaaccacccgagttatgagcgctgaaattgccacaactccagaagcccgcaccagcgaagattccttactgaaatctacactgcctccttctgagacatccgcccctgcagaaggtgtacggaaccagaccctgacgagcacggaaaaagcagaaggcgttgttaaactacaaaatttgactctccctaccaatgcctcaataaaattcaacccaggagccgagagcgtggtcctgtccaactccactttaaagtttcttcagtcctttgcgcgaaagtcaaatgagcaagctacctcactcaacacagtcgggggaacgggaggaataggcggcgtcggggggacagggggggtggggaatcgggcacctagagaaacttatttatcacggggggattcctcatccagccagagaactgactatcagaaatccaatttcgaaactacaaggggaaaaaattggtgtgcatacgtgcacacacggttaagtcctacggtgattcttgacaatcaggttacgtatgtaccgggtggcaaggggccttgcgggtggacaggaggatcatgccctcagagatctcagaagattagcaaccccgtctacagaatgcagcacaagattgttacttctctcgattggagatgttgcccagggtactcaggacctaaatgtcagctaagagcccaggaacagcagagccttattcataccaaccaggcagaatctcacacagccgtgggacgtggagttgccgagcagcaacagcagcaaggatgcggcgaccccgaagtgatgcagaagatgactgaccaggtgaactatcaagctatgaaactgacactgctgcagaagaagattgacaatatcagcttgacagtaaacgacgttcggaatacatactccagtctggagggaaaggtttcagaagataaaagcagagagttccagagtctcctgaagggcctgaaaagtaagtcaatcaacgtgctgatcagagatatcgtaagggagcagttcaagatctttcaaaatgatatgcaggaaacagttgcccagctgttcaagactgttagctctctctctgaggatcttgagtctacccgtcaaatcatccaaaaggtgaacgaatctgttgtttccattgctgcacagcaaaagtttgtactggtacaggagaaccgaccaactcttaccgatatcgtagaactgcgtaaccacatagtgaacgtccgccaagaaatgaccctaacgtgtgagaaaccaataaaggagcttgaagtgaaacagacacacttagaaggagcactggaacaggaacactctcgcagtatcttgtactacgagagtctgaacaaaaccctaagcaaactaaaggaagtccacgaacaactcctgtcgactgagcaagtgagtgaccagaagaacgccccagccgctgaaagcgtaagcaacaatgtgacagagtatatgagcaccctccacgagaatattaaaaagcaatccctgatgatgttgcagatgttcgaagatttgcatattcaagaatctaagatcaacaaccttaccgtgagcctggagatggagaaagaaagcctgcgcggtgaatgcgaggacatgctgtccaagtgcagaaacgattttaaatttcagctgaaagataccgaggagaatctacacgtgctgaaccaaacactcgccgaggtgctcttccctatggataataaaatggacaaaatgagtgagcaactgaacgatctgacctacgacatggagatattgcaacctttactcgagcagggcgcttcactgagacagaccatgacatatgagcaacctaaggaagcaatagtcattcggaagaaaattgagaacctcacatccgctgtgaattccctgaacttcatcattaaggaactcaccaaacgtcacaacctacttcgtaatgaggtacagggccgagatgacgcactcgaaagacgcataaatgagtatgcactcgaaatggaggacggcttaaataaaacgatgaccatcataaacaacgccatcgatttcatccaagacaactatgcattgaaggaaaccttatcaacaatcaaagacaatagcgagatccaccataaatgtactagtgatatggaaacaattctcacctttatcccccagttccaccgtctcaatgattctatccagacacttgtaaatgataatcagagatacaactttgtgctgcaggtagccaagacattagcaggaatccctcgtgacgaaaagcttaaccaaagtaactttcaaaaaatgtatcaaatgtttaacgaaaccacctcacaggtcagaaagtaccaacagaatatgagccacctggaggagaagttgctgctcaccactaagatcagcaagaattttgagaccagactgcaggacattgaatctaaagtgactcagactctaataccatactatatcagtgtgaagaagggcagtgttgttaccaacgaacgcgatcaggctctacaattacaagtcctgaatagtcggttcaaggccctcgaagccaagtctattcacctttcaattaacttcttctctttgaataaaaccttacacgaagttcttactatgtgtcacaatgcctccacttctgtttccgagttgaatgccaccattcctaagtggattaagcacagcctgcctgatatccagctgctgcaaaaaggcttaaccgagtttgtggagcctattatccagattaagacacaagccgcgctctctaaccttacatgttgtattgatagaagtctcccaggctctttagcgaacgtggtgaagagtcagaagcaagtaaaaagtttaccgaagaagattaacgcgctcaaaaaaccaacggtgaacctcacaaccgtgttaatcggaaggacacagaggaacacagacaacatcatttatccagaagagtactcatcttgttcacgccacccctgccaaaacggaggtacttgcattaacggtcgtaccagctttacctgtgcttgtcggcacccttttaccggagacaactgcaccattaagctcgtcgaagaaaacgctctggcccccgacttctctaaggggtcttatcgctatgcccctatggttgcttttttcgcatctcacacctacggcatgacaatcccaggccccattctatttaacaacctagacgtaaattatggcgcctcatacacccctcggacaggaaaattcagaataccatatttaggcgtgtatgtcttcaaatataccatcgaatcgttctctgcgcacatatccgggttccttgtggtggatggtatcgataagctggcatttgaatccgaaaacataaactctgaaatccattgcgaccgcgtgctgaccggcgacgcactgctcgagttaaattacggccaggaggtgtggctcaggctcgctaaaggaacaatccctgccaaatttccccctgttacaacattttctggctacctactctatagaacctag

SEQ ID NO: 172081 - DNA, 3687 bp, Artificial Sequence
  derived and/or modified sequence
atgaaaggcgcacgcctgttcgtcctgcttagcagcttatggagcggtggaatcggcctgaacaattctaagcacagctggaccattcccgaagatggcaacagccagaaaaccatgccctccgcttctgtgcctccgaacaagatccagagcttgcagattttacccacgacgagagtgatgagtgccgagatcgctaccacacctgaagccagaacttctgaggactccctgctaaagtccacacttcccccttccgagacatccgcacccgccgagggcgttaggaatcagactctgaccagcacagaaaaggctgagggcgtggtgaaactgcagaatttgacactccccacgaatgcatctattaagttcaatccaggtgctgagtccgtggtcctgagtaattctacactgaaattcttacaatctttcgccaggaaaagtaacgagcaggcaacgtccctgaacaccgtgggcgggacaggagggatcggaggggtgggcggtacaggcggggtgggcaacagggcacccagggaaacatatctctcccggggcgatagctcttcctctcagcgtaccgactaccagaagagcaattttgagaccacccgaggtaaaaattggtgtgcctacgtccacactagactgagccctactgtgatacttgataatcaggtgacttatgtgcccggcgggaaaggcccctgcggatggacaggaggaagctgcccccaacgctcacaaaagatatcaaaccccgtgtatcggatgcaacataaaattgttacatcactggactggaggtgctgtccagggtatagcggacccaagtgccagctgcgcgcgcaggaacaacaatctctgattcatacaaaccaggccgagtcccacacagccgtggggcggggcgtggcagagcagcagcagcagcagggatgcggggatcctgaagtgatgcagaaaatgacagatcaggttaactaccaagcgatgaagcttacacttctccagaaaaaaatcgataacatttcactcacagtcaacgatgtaagaaacacatactcttctctcgaggggaaagtctctgaggacaagtccagagaattccagagtctgctcaaaggcttaaagtcaaagtctataaatgtacttatcagggatatcgtcagggagcagtttaaaatcttccagaatgatatgcaagaaaccgtggctcagctatttaaaaccgtcagctcactgtccgaagacctagagtcaacccggcagataatccagaaggtcaacgaaagtgtcgttagcattgcagcccagcagaaattcgtgctcgtccaggaaaatcgtcctaccctcactgatattgtcgagttacggaaccacatcgtgaatgtcagacaggagatgactcttacatgtgagaagccgattaaggaactggaggtgaaacaaacgcatctagagggagccctagaacaggaacattcacgtagcattctgtattatgaatctctcaataagactctctccaagctgaaagaagtgcacgagcagttattgtcaaccgagcaagtttctgatcaaaaaaatgctcctgcagcagagtccgtctctaataacgtcaccgagtatatgtcaaccttgcacgagaatattaagaaacagtctctgatgatgctccaaatgtttgaggatcttcatatccaagaaagcaaaataaacaatttaaccgtgtctcttgagatggagaaagaatctctccgtggcgaatgtgaggacatgctgagtaaatgtcgcaatgactttaaattccaactcaaggacaccgaggagaatttacacgtgttgaaccaaacactcgctgaggtactctttcccatggataataaaatggataagatgagtgagcagcttaacgatctcacctatgacatggaaattctacagccactactcgaacagggggcatctctgaggcaaactatgacatatgagcagccaaaagaagcaatcgttatcaggaaaaaaatagagaatttaacttcagccgtcaacagcctgaatttcattatcaaagagctgaccaagcgacacaacttgttgagaaacgaagtgcaaggaagagacgatgcactggaaagacgcataaacgaatacgcactggaaatggaagacggccttaataagactatgaccattataaacaatgccatcgacttcattcaggacaattacgctctgaaagaaaccttgtctacgataaaggacaacagcgagattcatcacaagtgtacttccgacatggagactatccttacattcataccgcagtttcatagactgaacgattccatccaaacgctagttaacgataatcagcgatacaatttcgtgttgcaagtagcaaagactctggccggcatcccgcgcgacgaaaaattgaaccagagcaatttccaaaagatgtaccagatgtttaatgagacaacttctcaagttcgcaaatatcaacagaacatgtcccacctagaggagaagctacttttaactacaaagatttctaaaaatttcgaaacgcggttgcaggacattgagtcaaaagttactcagaccctcataccatactacatttccgtgaagaaaggctccgtagtaaccaacgagcgagaccaggccttacaactccaggtcctcaactctcgtttcaaggcactcgaagccaaatccatccatttgtccataaacttttttagtcttaataagactctccacgaggttctcaccatgtgtcacaatgcctctactagcgtcagtgaattaaacgcaaccattcctaagtggataaagcattccctccccgacattcaactcctgcaaaaaggtctgacagaattcgtcgaaccaatcatccagataaagacacaagccgcacttagtaacttaacatgctgtatcgatagatcactcccggggtcactggctaacgtcgtgaaatcccaaaagcaggttaagtccctcccaaagaagatcaatgctcttaaaaaacctacagttaatctcacaaccgtgctgataggtcgtacacaaagaaataccgacaatatcatatacccagaagaatattcttcctgcagccgacacccgtgccaaaacggaggcacctgtattaacggcagaacttccttcacatgtgcttgtcgccatccttttacaggagataattgcacaataaagctggtagaagagaacgcacttgccccagatttctccaagggatcctatagatatgcgcctatggtcgccttctttgcctctcatacctacggaatgacaatcccaggaccaatcctctttaataaccttgatgtcaactatggggcatcctatacaccacggacaggtaagtttcgcattccctacctaggcgtctatgttttcaagtatacgatagagtcatttagcgctcacatatccggatttttagtcgtggatggcatcgacaaactcgcgtttgaatccgagaatataaattctgaaattcactgcgatcgcgttctgacgggagacgccctgctagaacttaattacggccaggaagtttggctgaggctcgcaaaaggcaccattcctgcaaaattcccccccgtcactactttttcagggtacctattatacagaacctag

SEQ ID NO: 172082 - DNA, 1596 bp, Artificial Sequence
  derived and/or modified sequence
atgaagggggcacgattatttgtactgctcagcagtctatggtcaggcggaataggccttaataacagcaaacattcttggactatcccagaggacgggaactcccagaagaccatgccatccgcttccgtcccacccaacaagattcagtccctccaaatccttccgaccactcgtgtcatgtctgctgaaatcgcaacaacacctgaaaaagctgaaggggtcgtaaagctgcagaacctgaccctgccaacaaacgcgtccatcaaattcaaccctggagccgaaagcgttgtcctcagcaattccacacttaaattccttcagtcttttgctaggaagagcaacgaacaagccacaagtctgaacacagtaggcggtaccgggggaattggcggggtgggcggaacaggcggcgtgggaaatcgggcccccagggagacatacctttcccgtggtgacagctccagctcacagcgaacagattatcagaaatctaattttgaaactacccgtggcaagaactggtgtgcttatgttcacactcgactctcacccactgtgatccttgataatcaagtaacctacgtccccggaggtaaagggccctgtgggtggacaggaggaagttgccctcagagaagccagaaaattagcaaccccgtctacaggatgcagcataaaatcgtgacctccctagactggaggtgctgcccaggatattctggccccaaatgtcagctgcgggcacaagaacagcagagtttgatccacactaaccaggcagagtcccacacagcagtaggcaggggcgtggcagaacagcaacagcagcaggggtgcggggatcccgaagtgatgcagaaaatgaccgaccaggtgaactaccaagccatgaaactgactctgttacagaaaaaaattgataacatatcgctcaccgtcaatgacgtaagaaatacttactcctctctggaagggaaggtcagcgaagataagtctagggagttccagtctctgctgaaggaggaatattctagctgctcacgccacccttgccagaacggcggcacgtgtatcaatggcagaacctcgtttacttgtgcgtgtagacacccctttaccggcgacaactgtacgataaagttagtggaggaaaacgctttggcaccagattttagcaaaggatcatataggtatgcccctatggtcgccttctttgcatctcatacctacggaatgacgatccctggacctatcctgttcaataacctggacgtaaactacggtgccagttacacaccaaggacaggaaaatttaggattccttatctgggagtttacgttttcaaatacaccatcgagagcttctcagcccatatatctggtttcctggtcgttgacggcatagataagctagcattcgaatctgagaatatcaactctgaaatccattgcgatcgagtcttaacaggagatgctctccttgaacttaactatggacaggaggtctggctccggctggctaagggcaccattcctgctaagttccccccagtgaccaccttcagcggctatctcctttatagaacctag

SEQ ID NO: 172083 - DNA, 4967 bp, Artificial Sequence
  derived and/or modified sequence
cagctatcaaaaaggccataaggattttgtccccaaatttcacatgagctaccttgcttcaaactactgagatgaagggggcaagattatttgtccttctttctagtttatggagtgggggcattgggcttaacaacagtaagcattcttggactatacctgaggatgggaactctcagaagactatgccttctgcttcagttcctccaaataaaatacaaagtttgcaaatactgccaaccactcgggtcatgtcggcggagatagctacaactccagaggcaagaacttctgaagacagtcttcttaaatcaacactgcctccctcagaaacaagtgcacctgctgagggtgtgagaaatcaaactctcacatccacagagaaagcagaaggagtggtcaagttacagaatcttaccctcccaaccaacgctagcatcaagttcaatcctggagcagaatcagtggtcctttccaattctacactgaaatttcttcagagctttgccagaaagtcaaatgaacaagcaacttctctaaacacagttggaggcactggaggcattggaggcgttggaggcactggaggcgtgggaaatcgagccccacgggaaacatacctcagccggggtgacagcagttccagccaaagaactgactaccaaaaatcaaatttcgaaacaactagaggaaagaattggtgtgcttatgtacataccaggttatctcccacagtgatattggacaaccaggtcacttatgtcccaggtgggaaaggaccttgtggctggaccggtggatcctgtcctcagagatctcagaagatatccaatcctgtctataggatgcaacataaaattgtcacctcattggattggaggtgctgtcctggatacagtgggccgaaatgtcaactaagagcccaggaacagcaaagtttgatacacaccaaccaggctgaaagtcatacagctgttggcagaggagtagctgagcagcagcagcagcaaggctgtggtgacccagaagtgatgcaaaaaatgactgatcaggtgaactaccaggcaatgaaactgactcttctgcagaagaagattgacaatatttctttgactgtgaatgatgtaaggaacacttactcctccctagaaggaaaagtcagcgaagataaaagcagagaatttcaatctcttctaaaaggtctaaaatccaaaagcattaatgtactgataagagacatagtaagagaacaatttaaaatttttcaaaatgacatgcaagagactgtagcacagctcttcaagactgtatcaagtctatcagaggacctcgaaagcaccaggcaaataattcaaaaagttaatgaatctgtggtttcaatagcagcccagcaaaagtttgttttggtgcaagagaatcggcccactttgactgatatagtggaactaaggaatcacattgtgaatgtaaggcaagaaatgactcttacatgtgagaagcctattaaagaactagaagtaaagcagactcatttagaaggtgctctagaacaggaacactcaagaagcattctgtattatgaatccctcaataaaactctttctaaattgaaggaagtacatgagcagcttttatcaactgaacaggtatcagaccagaagaatgctccagctgctgagtcagttagcaataatgtcactgagtacatgtctactttacatgaaaatataaagaagcagagtttgatgatgctgcaaatgtttgaagatttgcacattcaagaaagcaagattaacaatctcaccgtctctttggagatggagaaagagtctctcagaggtgaatgtgaagacatgttatccaaatgcagaaatgattttaaatttcaacttaaggacacagaagagaatttacatgtgttaaatcaaacattggctgaagttctctttccaatggacaataagatggacaaaatgagtgagcaactaaatgatttgacttatgatatggagatccttcaacccttgcttgagcagggagcatcactcagacagacaatgacatatgaacaaccaaaggaagcaatagtgataaggaaaaagatagaaaatctgactagtgctgtcaatagtctaaattttattatcaaagaacttacaaaaagacacaacttacttagaaatgaagtacagggtcgtgatgatgccttagaaagacgtatcaatgaatatgccttagaaatggaagatggcctcaataagacaatgactattataaataatgctattgatttcattcaagataactatgccctaaaagagactttaagtactattaaggataatagtgagatccatcataaatgtacctccgatatggaaactattttgacatttattcctcagttccaccgtctgaatgattctattcagactttggtcaatgacaatcagagatataactttgttttgcaagtcgccaagacccttgcaggtattcccagagatgagaaactaaatcagtccaacttccaaaagatgtatcaaatgttcaatgaaaccacttcccaagtgagaaaataccagcaaaatatgagtcatttggaagaaaaactactcttaactaccaagatttccaaaaattttgagactcggttgcaagacattgagtctaaagttacccagacgctcataccttattatatttcagttaaaaaaggcagtgtagttacaaatgagagagatcaggctcttcaactgcaagtattaaattccagatttaaggcgttggaagcaaaatctatccatctttcaattaacttcttttcgcttaacaaaactctccacgaagttttaacaatgtgtcacaatgcttctacaagtgtgtcagaactgaatgctaccatccctaagtggataaaacattccctgccagatattcaacttcttcagaaaggtctaacagaatttgtggaaccaataattcaaataaaaactcaagctgccctatctaatttaacttgttgtatagatcgatcgttgcctggtagtctggcaaatgttgtcaagtctcagaagcaagtaaaatcattgccaaagaaaattaacgcacttaagaaaccaacggtaaatcttaccacagtcctgataggccggactcaaagaaacacggacaacataatatatcctgaggagtattcaagctgtagtcggcatccgtgccaaaatgggggcacgtgcataaatggaagaactagctttacctgtgcctgcagacatccttttactggtgacaactgcactatcaagcttgtggaagaaaatgctttagctccagatttttccaaaggatcttacagatatgcacccatggtggcattttttgcatctcatacgtatggaatgactatacctggtcctatcctgtttaataacttggatgtcaattatggagcttcatataccccaagaactggaaaatttagaattccgtatcttggagtatatgttttcaagtacaccatcgagtcatttagtgctcatatttctggatttttagtggttgatggaatagacaagcttgcatttgagtctgaaaatattaacagtgaaatacactgtgatagggttttaactggggatgccttattagaattaaattatgggcaggaagtctggttacgacttgcaaaaggaacaattccagccaagtttccccctgttactacatttagtggctatttattatatcgtacataagttagtatgaaaaacagactatcacctttattgagaaacagccagtgttttcatttatctttgcttgcacatctgctctgttttggtttttctacaggaaatgaaaatcaacttgtttttttaatatgagtaaacttgtatgtctattttataaaattatttgaatattgtttaatgtctgaatatgaaagagttcttgatcctaaagaaatttagtggcacagaaaacaaagtgaatttgttagcataattattcctattcttatttcttcattttaagtcattgcaatggaaagtaatattataaaatggtaattacaacatattatcagtcacagttttctttccaattaaacacttaacttttgttattccctgtatataaatatataacacacattttctagattcacaaatttaaataaattactcaaaaaatgaaaattgattttgtaaacttttatttttactctttacgttgagttgatcaattttccatactaagattttcattcagaatcaaaattaagaaagttggactgaaaatatgaaaaatgcttaactattgttctcttcctataattctctaattataacatagtaatttacatgtagttggacatgtacactcaagtctaagaatatatgagtggatcatttaccgccccccgccccacaacatctataaggggcaaaaagtctttttctaataagtattcttctatggtagtacctacagatctgcccttcttcttctaaagggtaagtcataatctgtgtaatactacaatttatgggatgctcactatgccctgtttctcttctaaacaatttacatgtaatgtctcattcctcacaataacccttgtaaagtgggcatgattaccatgatttttatagttgaagaacctaagacacagagaccaaggcccatgagctcatagggctgaggcaggatttggaatcaggccatgtcttctccagagcccacatccatcctttctctatattgcctcccacagatgtgctaaaatttatttaactaatcctttatcctctatttgtgttgtctcccattttttattattacaatattactgtggtgaacatgcttaaaaatacattccttggatatctgacaacgtgtttctgaaaaacagattttcataagtaataataaaaataataataaaaaagttttggtatggt

SEQ ID NO: 172084 - DNA, 3687 bp, Artificial Sequence
  derived and/or modified sequence
atgaagggcgccagactgttcgtgctgctgagcagcctgtggagcggcggcatcggcctgaacaacagcaagcacagctggaccatccccgaggacggcaacagccagaagaccatgcccagcgccagcgtgccccccaacaagatccagagcctgcagatcctgcccaccaccagagtgatgagcgccgagatcgccaccacccccgaggccagaaccagcgaggacagcctgctgaagagcaccctgccccccagcgagaccagcgcccccgccgagggcgtgagaaaccagaccctgaccagcaccgagaaggccgagggcgtggtgaagctgcagaacctgaccctgcccaccaacgccagcatcaagttcaaccccggcgccgagagcgtggtgctgagcaacagcaccctgaagttcctgcagagcttcgccagaaagagcaacgagcaggccaccagcctgaacaccgtgggcggcaccggcggcatcggcggcgtgggcggcaccggcggcgtgggcaacagagcccccagagagacctacctgagcagaggcgacagcagcagcagccagagaaccgactaccagaagagcaacttcgagaccaccagaggcaagaactggtgcgcctacgtgcacaccagactgagccccaccgtgatcctggacaaccaggtgacctacgtgcccggcggcaagggcccctgcggctggaccggcggcagctgcccccagagaagccagaagatcagcaaccccgtgtacagaatgcagcacaagatcgtgaccagcctggactggagatgctgccccggctacagcggccccaagtgccagctgagagcccaggagcagcagagcctgatccacaccaaccaggccgagagccacaccgccgtgggcagaggcgtggccgagcagcagcagcagcagggctgcggcgaccccgaggtgatgcagaagatgaccgaccaggtgaactaccaggccatgaagctgaccctgctgcagaagaagatcgacaacatcagcctgaccgtgaacgacgtgagaaacacctacagcagcctggagggcaaggtgagcgaggacaagagcagagagttccagagcctgctgaagggcctgaagagcaagagcatcaacgtgctgatcagagacatcgtgagagagcagttcaagatcttccagaacgacatgcaggagaccgtggcccagctgttcaagaccgtgagcagcctgagcgaggacctggagagcaccagacagatcatccagaaggtgaacgagagcgtggtgagcatcgccgcccagcagaagttcgtgctggtgcaggagaacagacccaccctgaccgacatcgtggagctgagaaaccacatcgtgaacgtgagacaggagatgaccctgacctgcgagaagcccatcaaggagctggaggtgaagcagacccacctggagggcgccctggagcaggagcacagcagaagcatcctgtactacgagagcctgaacaagaccctgagcaagctgaaggaggtgcacgagcagctgctgagcaccgagcaggtgagcgaccagaagaacgcccccgccgccgagagcgtgagcaacaacgtgaccgagtacatgagcaccctgcacgagaacatcaagaagcagagcctgatgatgctgcagatgttcgaggacctgcacatccaggagagcaagatcaacaacctgaccgtgagcctggagatggagaaggagagcctgagaggcgagtgcgaggacatgctgagcaagtgcagaaacgacttcaagttccagctgaaggacaccgaggagaacctgcacgtgctgaaccagaccctggccgaggtgctgttccccatggacaacaagatggacaagatgagcgagcagctgaacgacctgacctacgacatggagatcctgcagcccctgctggagcagggcgccagcctgagacagaccatgacctacgagcagcccaaggaggccatcgtgatcagaaagaagatcgagaacctgaccagcgccgtgaacagcctgaacttcatcatcaaggagctgaccaagagacacaacctgctgagaaacgaggtgcagggcagagacgacgccctggagagaagaatcaacgagtacgccctggagatggaggacggcctgaacaagaccatgaccatcatcaacaacgccatcgacttcatccaggacaactacgccctgaaggagaccctgagcaccatcaaggacaacagcgagatccaccacaagtgcaccagcgacatggagaccatcctgaccttcatcccccagttccacagactgaacgacagcatccagaccctggtgaacgacaaccagagatacaacttcgtgctgcaggtggccaagaccctggccggcatccccagagacgagaagctgaaccagagcaacttccagaagatgtaccagatgttcaacgagaccaccagccaggtgagaaagtaccagcagaacatgagccacctggaggagaagctgctgctgaccaccaagatcagcaagaacttcgagaccagactgcaggacatcgagagcaaggtgacccagaccctgatcccctactacatcagcgtgaagaagggcagcgtggtgaccaacgagagagaccaggccctgcagctgcaggtgctgaacagcagattcaaggccctggaggccaagagcatccacctgagcatcaacttcttcagcctgaacaagaccctgcacgaggtgctgaccatgtgccacaacgccagcaccagcgtgagcgagctgaacgccaccatccccaagtggatcaagcacagcctgcccgacatccagctgctgcagaagggcctgaccgagttcgtggagcccatcatccagatcaagacccaggccgccctgagcaacctgacctgctgcatcgacagaagcctgcccggcagcctggccaacgtggtgaagagccagaagcaggtgaagagcctgcccaagaagatcaacgccctgaagaagcccaccgtgaacctgaccaccgtgctgatcggcagaacccagagaaacaccgacaacatcatctaccccgaggagtacagcagctgcagcagacacccctgccagaacggcggcacctgcatcaacggcagaaccagcttcacctgcgcctgcagacaccccttcaccggcgacaactgcaccatcaagctggtggaggagaacgccctggcccccgacttcagcaagggcagctacagatacgcccccatggtggccttcttcgccagccacacctacggcatgaccatccccggccccatcctgttcaacaacctggacgtgaactacggcgccagctacacccccagaaccggcaagttcagaatcccctacctgggcgtgtacgtgttcaagtacaccatcgagagcttcagcgcccacatcagcggcttcctggtggtggacggcatcgacaagctggccttcgagagcgagaacatcaacagcgagatccactgcgacagagtgctgaccggcgacgccctgctggagctgaactacggccaggaggtgtggctgagactggccaagggcaccatccccgccaagttcccccccgtgaccaccttcagcggctacctgctgtacagaacctag

SEQ ID NO: 172085 - DNA, 1596 bp, Artificial Sequence
  derived and/or modified sequence
atgaagggcgccagactgttcgtgctgctgagcagcctgtggagcggcggcatcggcctgaacaacagcaagcacagctggaccatccccgaggacggcaacagccagaagaccatgcccagcgccagcgtgccccccaacaagatccagagcctgcagatcctgcccaccaccagagtgatgagcgccgagatcgccaccacccccgagaaggccgagggcgtggtgaagctgcagaacctgaccctgcccaccaacgccagcatcaagttcaaccccggcgccgagagcgtggtgctgagcaacagcaccctgaagttcctgcagagcttcgccagaaagagcaacgagcaggccaccagcctgaacaccgtgggcggcaccggcggcatcggcggcgtgggcggcaccggcggcgtgggcaacagagcccccagagagacctacctgagcagaggcgacagcagcagcagccagagaaccgactaccagaagagcaacttcgagaccaccagaggcaagaactggtgcgcctacgtgcacaccagactgagccccaccgtgatcctggacaaccaggtgacctacgtgcccggcggcaagggcccctgcggctggaccggcggcagctgcccccagagaagccagaagatcagcaaccccgtgtacagaatgcagcacaagatcgtgaccagcctggactggagatgctgccccggctacagcggccccaagtgccagctgagagcccaggagcagcagagcctgatccacaccaaccaggccgagagccacaccgccgtgggcagaggcgtggccgagcagcagcagcagcagggctgcggcgaccccgaggtgatgcagaagatgaccgaccaggtgaactaccaggccatgaagctgaccctgctgcagaagaagatcgacaacatcagcctgaccgtgaacgacgtgagaaacacctacagcagcctggagggcaaggtgagcgaggacaagagcagagagttccagagcctgctgaaggaggagtacagcagctgcagcagacacccctgccagaacggcggcacctgcatcaacggcagaaccagcttcacctgcgcctgcagacaccccttcaccggcgacaactgcaccatcaagctggtggaggagaacgccctggcccccgacttcagcaagggcagctacagatacgcccccatggtggccttcttcgccagccacacctacggcatgaccatccccggccccatcctgttcaacaacctggacgtgaactacggcgccagctacacccccagaaccggcaagttcagaatcccctacctgggcgtgtacgtgttcaagtacaccatcgagagcttcagcgcccacatcagcggcttcctggtggtggacggcatcgacaagctggccttcgagagcgagaacatcaacagcgagatccactgcgacagagtgctgaccggcgacgccctgctggagctgaactacggccaggaggtgtggctgagactggccaagggcaccatccccgccaagttcccccccgtgaccaccttcagcggctacctgctgtacagaacctag

SEQ ID NO: 172086 - DNA, 3687 bp, Artificial Sequence
  derived and/or modified sequence
atgaagggcgctcgactgttcgttctccttagcagcctgtggtccgggggtatcggcctcaataatagcaagcactcttggaccattcctgaggacggcaacagccagaaaactatgcctagtgctagcgtgccacccaacaaaatacagagcttacagatccttccaactacgagagttatgagcgctgagatcgccacaacacctgaagcgcgcacgagcgaagactccttgcttaaatctaccctccctccgagcgaaaccagtgcacctgccgagggtgtgagaaaccaaaccctgacatccaccgagaaagccgaaggtgtggtcaagcttcaaaatcttacccttcccactaacgcttctatcaagttcaatcccggcgccgaatcagtggtattatccaattctacgttgaaatttctgcaatctttcgcccgcaagtctaatgagcaggctaccagtctgaacactgtaggcggaaccggagggattggtggggtgggcggcactggcggcgtcggaaacagggcccctcgggaaacctatttgagccgaggcgactccagtagttcgcaacgcacagattatcagaaaagcaacttcgaaaccacccgtgggaaaaattggtgtgcttacgtgcatacaagactctcacctaccgttattttagataatcaggtgacctacgtacccggaggcaaagggccatgcggatggactggagggtcttgccctcaaaggagccagaagatctctaacccagtctataggatgcaacataagatagttacatcccttgactggaggtgttgtccgggatactcaggacctaaatgtcagttgcgagcgcaggaacagcagtccctgatccataccaaccaagccgagtcccacactgcggtggggaggggggtcgccgagcagcagcagcagcagggatgtggagacccggaagtgatgcagaaaatgacggaccaggtgaactaccaagccatgaagctgactctcctgcagaaaaaaatcgataatatctccctcaccgttaatgacgtgcggaacacctacagttctttggaggggaaggtttccgaagataagtcaagagaattccagtcactgctgaagggcctcaagtcaaagtccattaacgtgctgataagagacatcgttagagaacaatttaagatcttccagaacgacatgcaggagactgttgctcaactttttaagacagtgtcctctttatccgaagatttggaatcaacgcggcagatcatccagaaagtcaatgaaagcgttgtcagcattgccgcccagcaaaagtttgtacttgtgcaggagaacaggcccacattgactgatattgtagagttgagaaatcacattgttaacgttcggcaggagatgactctaacttgcgaaaagcccataaaggagctggaagtcaagcaaacccacttagagggcgccctcgagcaagaacattcacgttctatcttatactacgaaagtctaaacaaaactttatcaaaactaaaggaggtgcatgaacagcttctaagcactgaacaggtgagtgaccaaaagaatgccccggccgctgaaagcgtgagtaataacgttacggagtacatgagcactttgcatgagaatattaagaaacaaagtctgatgatgctgcaaatgttcgaggaccttcatatccaggaatccaaaatcaataacctgacggtgagccttgaaatggagaaggagtcactgagaggagaatgtgaggacatgctctctaaatgtcggaatgattttaagtttcagctgaaggacaccgaagaaaaccttcatgtgctcaaccaaacattagcggaggttctgttccctatggataataaaatggacaagatgtcagagcagttaaatgacctcacttatgacatggaaatactgcaacctctgttggagcaaggtgcttccttgagacaaactatgacatatgaacagcccaaagaggcaattgtaattagaaaaaaaatcgaaaatctgacgagcgccgtgaactccctcaacttcattatcaaggagctcaccaagaggcataacttgttgcgcaatgaagttcagggacgagacgatgctctagagcgacggatcaacgagtacgccctggaaatggaagatggcctcaacaaaaccatgactattatcaacaatgccatcgacttcatccaggataactatgctctcaaggagactctgtccaccataaaagacaactctgaaattcatcacaagtgcacctctgacatggagactattctcactttcattcctcagttccatcgtcttaacgacagcatacaaacattagtgaacgacaaccagcgctataatttcgtgctccaggtagcgaagacacttgctgggattcctcgagacgagaagctcaatcagtctaattttcaaaaaatgtatcagatgttcaatgaaacgacatcccaggtacgcaagtatcagcagaatatgtcccatttagaagaaaagcttctcttaacaactaagatttctaagaacttcgagacacggctgcaggacatagagtccaaagtaacccagactttgatcccctactatatcagcgtgaagaaggggagcgtggtcactaacgagagggaccaggccctgcaattacaggtgctgaatagtcgatttaaggctctggaggcaaaatcaatccacctctctatcaacttcttctccttgaacaagactctgcacgaggtgctgactatgtgtcataacgcgagcacatcagtcagcgagcttaacgccacaatccccaaatggatcaaacattctctacctgatatccagctgttgcagaaagggctgaccgagttcgtcgaaccgatcatacagattaaaactcaggccgcccttagtaatcttacctgctgtattgacagatcccttcccgggagcctggcgaacgtggtcaaatcacagaagcaggtgaagagccttcccaagaagattaacgccttgaagaagccaacagtgaatttgaccaccgttcttataggcaggacccaacgaaatacagacaatattatatatcctgaagagtactctagttgttctaggcatccatgccagaatggcggcacctgcataaacggcagaacaagctttacatgcgcctgtagacatccttttactggggataactgcacaatcaagctcgtcgaggagaatgcgcttgccccggacttctcaaaagggtcttatcgatacgcccccatggttgcgtttttcgccagccatacctatggtatgactattccaggaccaatcctgtttaataaccttgatgtgaattacggagctagctacaccccacggactggcaaattcaggatcccttatctgggcgtctatgtgtttaaatataccatcgaatctttctcggcgcacatctctgggtttttagtcgtcgacggaatcgacaaattggcctttgagtcagaaaacatcaacagcgagatccattgtgatcgggtacttaccggagatgctcttttagagctgaattacggccaggaggtgtggctgagactcgcgaaaggaactatccctgctaaattcccaccggtgactacatttagtggatatcttctatatcgcacatag

SEQ ID NO: 172087 - DNA, 3687 bp, Artificial Sequence
  derived and/or modified sequence
atgaaaggtgcgagacttttcgtcctgctctccagcctctggagcggcggtattggcttaaacaacagtaaacattcatggaccatacccgaagacggtaattctcagaaaacaatgccgtctgcctcagtgcctcctaataaaattcagtctctccaaatcctgcctaccacgcgggtcatgtctgccgaaatcgccaccactcccgaggcacgcacctcagaggactcactgcttaaaagcaccctcccaccttccgagacgtcagccccagccgaaggagttcgtaaccagaccttaaccagcactgagaaagctgaaggagtcgtcaagttgcagaacttgactctacctacaaatgcatccatcaagttcaacccaggcgcggaatccgtggtgttgtctaacagcactttgaaattcctgcagagctttgctcgcaagtcaaacgagcaggcaacttccctcaatacagtgggcggcactggagggatcgggggcgtaggagggacaggtggagtgggcaacagggcaccacgcgaaacatacctgagccgaggtgactccagtagctcccaacgcacagactatcagaaatccaattttgaaactaccaggggtaaaaactggtgtgcctatgtgcacacacgtcttagcccaacagtcatccttgataaccaggtcacttacgtgcctggcgggaaagggccgtgcgggtggacaggcggaagttgtcctcagagatctcagaaaatcagcaatccagtgtataggatgcagcataagatcgtgacttccctggattggcggtgctgccccgggtattcaggccccaagtgtcagctcagggctcaggagcagcaaagcctgatccacaccaaccaggctgaatcccataccgctgtgggccgaggtgtggctgaacaacagcaacagcaaggatgcggagacccggaggtcatgcagaaaatgaccgaccaggtgaattaccaggcgatgaagctcacactgctccagaagaaaatcgataatatctcactgacagtaaatgacgtcagaaatacttactcatctctcgagggaaaggtgagtgaggacaaatcccgggagtttcagtcgctcctgaaggggctgaagagtaagagcattaacgttcttatcagggatattgtgagggagcaattcaagatttttcagaatgatatgcaggaaacggtcgcacagctgtttaaaactgtgagctccttgtccgaggatcttgaaagcacaaggcaaatcattcagaaagtcaacgagtccgtcgtatcaatcgccgcccaacagaagttcgttctggtccaggagaacaggccgaccctgacggacattgtcgagctgcgtaatcacatcgtaaatgtcagacaggaaatgacactaacgtgcgagaagccaattaaggagctggaggtcaaacagacccacctagaaggggctttggaacaggaacattcccgctcaatactctactacgagagtctgaacaaaaccctctccaaactgaaggaagtccacgagcaacttctctctactgagcaggtcagcgatcaaaagaatgctccggcagccgaatcggtgtctaacaacgttactgagtatatgagcacactccatgagaacataaagaagcaatccttaatgatgctgcagatgtttgaggatctccatattcaagagagtaagatcaacaacctgactgtaagtttagagatggagaaggaatcgctgaggggtgaatgtgaagatatgctgtctaagtgtagaaacgactttaaattccaactgaaggacaccgaagagaaccttcacgtgctcaaccaaactttagcagaagttttgtttccaatggacaataaaatggataagatgagtgagcaactgaacgatctaacatacgacatggagatactgcagcctctcctggaacagggcgcctcactgagacaaacaatgacgtacgaacagcccaaagaggccattgtcatccgcaagaaaatcgagaacttgacatccgcggtaaattctctcaatttcatcatcaaggagctgaccaaaagacataacctgcttcgaaacgaggtgcaaggccgcgacgatgccctggaacgaagaattaatgagtacgccctagagatggaagatggcttgaacaaaacaatgacaatcataaataatgctattgactttatacaggataactacgccttgaaagaaaccctgtctaccatcaaggataattccgagattcatcataagtgtacctctgatatggagacaatattaaccttcatacctcaattccaccggctgaatgattctatccagaccctggtaaacgacaaccagcggtacaacttcgttctgcaagtggcgaaaactctggctggcattccgcgggacgaaaagctgaatcagtcaaatttccagaagatgtatcaaatgttcaatgagacaacaagccaggtccgtaagtatcaacagaacatgtcccacctcgaagagaaactgctgctgacaactaagatttctaagaattttgaaacacggcttcaagatatagaatcaaaggtgacacaaacactgatcccatactatatcagcgtaaagaaggggtcagtggtgacaaatgaacgagaccaggccctgcagctgcaggtactgaactctaggtttaaagcactagaggcaaagagcatccatctatctatcaacttcttctcactgaacaagaccctgcacgaggttcttaccatgtgccacaacgcctcgacttcggtgagcgaactcaatgccacaatacctaagtggatcaagcactccttgcccgacatccaactcctgcaaaagggattaacagaatttgttgagcctatcatccagatcaagacgcaagctgctctgtccaatctcacctgctgtatcgaccgcagtctgccaggatcattggccaacgtggttaaaagtcagaaacaggtgaagtcactccctaagaagataaacgctctcaagaagcctacggtaaacttaactacagtcctgataggccggacccagcggaacactgataacatcatttatcctgaggagtactcatcctgttccagacacccctgtcagaatgggggtacgtgtattaatggacggaccagctttacttgcgcgtgtcggcaccccttcactggtgacaactgcacaatcaaattggtcgaagagaacgccctggcacccgacttctcaaagggcagttacagatacgcccctatggtggcatttttcgccagtcacacttacggtatgaccatccctggtccaatcttatttaataacctcgatgtgaattacggcgcttcttatacccctcggactgggaagtttaggataccttaccttggggtgtacgtgttcaaatataccatagagtcattctcagcgcatatctccgggttcctggtcgtggacggtattgacaagctggccttcgagtccgagaacatcaatagcgaaattcattgtgatcgggttcttacgggggacgccctcctagagctgaattatgggcaggaggtttggttgcgcctggcgaaaggaaccatccccgccaagtttcctcctgtgacaacattcagtggttaccttctgtatcgaacctag

SEQ ID NO: 172088 - DNA, 1596 bp, Artificial Sequence
  derived and/or modified sequence
atgaaaggagcccggttgtttgtgctgctatcatccctctggtccgggggaattggccttaacaactccaaacattcctggaccatacctgaagatgggaattcccagaaaacgatgccctccgcgtcagtgccacccaataaaatccaatctctgcaaattctccccacaactcgggtgatgagcgctgagattgccactacccctgagaaggctgagggtgtagtgaagctgcaaaacttgacactgccgactaatgccagtataaagttcaatcccggtgctgagtctgtggtgctctccaactcgactctgaagttcctgcagagtttcgcacgaaaaagtaacgagcaagcaacctcgctcaatactgtgggcggaactggggggattggaggggtcggtgggaccggaggcgttggtaaccgagcaccccgtgagacttacctatccaggggagactcttctagctcccaacgtacagactatcagaaaagcaacttcgaaactactcgcggaaagaattggtgcgcatatgtacacactagattgtcacccaccgtcatcctggataatcaggtgacttacgtaccaggaggaaagggaccttgtgggtggaccgggggcagttgtcctcagcggtcccaaaagattagcaatcccgtgtataggatgcagcataagatcgtgacctctctggactggcggtgctgccccggctacagcgggcccaagtgccagttgagggcccaggaacagcagtctcttatccataccaaccaggctgagagccataccgcggtgggccgaggtgtcgcagagcagcagcagcagcaaggctgtggggaccctgaggtgatgcagaagatgactgaccaagtgaactatcaggctatgaagctgactctcctccagaagaagatagacaatattagtctcaccgttaacgatgtcagaaacacctactccagtctagaaggcaaagtctccgaagataagtcacgggaattccagagtcttcttaaggaggagtacagtagctgttccaggcacccctgtcaaaatggtggtacctgcataaacggacgtaccagttttacctgtgcctgtagacatccttttacaggggacaactgtacgatcaagttggttgaggagaatgccctggcacccgactttagcaagggctcatacaggtacgcccctatggtggctttcttcgccagtcacacctatggtatgacaatcccggggcctattctgttcaacaacctggacgtgaattacggggcatcttatacccctcgaactgggaagtttaggataccctacttaggtgtgtatgtgttcaagtatacaatcgaatccttctccgcccatatttctgggttcctcgttgtcgacggaattgacaagttggcttttgaaagcgagaatattaacagcgagatccattgtgatagggtgctcacaggcgacgcactgcttgaactgaattatggtcaggaggtctggctacgccttgcaaagggcaccattcctgcgaagttccctccagtgacgaccttctcgggttatctgctgtatagaacctag

SEQ ID NO: 172089 - DNA, 3687 bp, Artificial Sequence
  derived and/or modified sequence
atgaagggggcccggctgtttgtgctgctgagcagcctgtggagcggcggcatcggcctgaacaacagcaagcacagctggaccatcccagaagatggcaacagccagaagaccatgcccagcgcctctgtgccccccaacaagatccagagcctgcagatcctgcccaccaccagggtgatgtctgctgagatcgccaccaccccagaggcccggaccagcgaggacagcctgctgaagagcaccctgccccccagcgagaccagcgccccagctgagggcgtgaggaaccagaccctgaccagcacagagaaggccgagggcgtggtgaagctgcagaacctgaccctgcccaccaatgccagcatcaagttcaaccctggagctgagagcgtggtgctgagcaacagcaccctgaagttcctgcagagctttgccaggaagagcaatgagcaggccaccagcctgaacacagtgggcggcaccggcggcattggaggagtgggcggcactggaggagtgggcaacagagccccccgggagacctacctgagcagaggagacagcagcagcagccagaggacagactaccagaagagcaactttgagaccacccggggcaagaactggtgtgcctacgtgcacacccggctgagccccaccgtcatcctggacaaccaggtgacctacgtgcctgggggcaagggcccctgtggctggacaggaggcagctgcccccagaggagccagaagatcagcaaccctgtgtacaggatgcagcacaagatcgtgaccagcctggactggcgctgctgccccggctacagcggccccaagtgccagctgcgggcccaggagcagcagagcctcatccacaccaaccaggccgagagccacacagctgtgggccggggcgtggccgagcagcagcagcagcagggctgtggggaccctgaggtgatgcagaagatgacagaccaggtgaactaccaggccatgaagctgaccctgctgcagaagaagattgacaacatcagcctgactgtgaatgatgtgaggaacacctacagcagcctggagggcaaggtgtctgaggacaagagccgggagttccagagcctgctgaagggcctgaagagcaagagcatcaacgtgctgatccgggacatcgtgcgggagcagttcaagatcttccagaatgacatgcaggagaccgtggcccagctgttcaagacagtgagcagcctgtctgaggacctggagagcacccggcagatcatccagaaggtgaatgaatctgtggtgtccattgctgcccagcagaagtttgtgctggtgcaggagaaccggcccaccctgacagacatcgtggagctgaggaaccacatcgtgaatgtgcggcaggagatgaccctgacctgtgagaagcccatcaaggagctggaggtgaagcagacccacctggagggcgccctggagcaggagcacagccgcagcatcctgtactatgagagcctgaacaagaccctgagcaagctgaaggaggtgcatgagcagctgctgagcacagagcaggtgtctgaccagaagaatgccccagctgctgagagcgtgagcaacaacgtgacagagtacatgagcaccctgcacgagaacatcaagaagcagagcctgatgatgctgcagatgtttgaggacctgcacatccaggagagcaagatcaacaacctgactgtgtccctggagatggagaaggagagcctgcggggagaatgtgaggacatgctgagcaagtgcagaaatgacttcaagttccagctgaaggacacagaggagaacctgcacgtgctgaaccagaccctggccgaggtgctcttccccatggacaacaagatggacaagatgtctgagcagctgaatgacctgacctatgacatggagatcctgcagcccctgctggagcagggcgccagcctgcggcagaccatgacctatgagcagcccaaggaggccatcgtcatcaggaagaagattgagaacctgaccagcgctgtgaacagcctgaacttcatcatcaaggagctgaccaagaggcacaacctgctgagaaatgaggtgcagggcagagatgatgccctggagcggcgcatcaatgaatatgccctggagatggaggatggcctgaacaagaccatgaccatcatcaacaatgccatcgacttcatccaggacaactatgccctgaaggagaccctgagcaccatcaaggacaacagcgagatccaccacaagtgcaccagtgacatggagaccatcctgaccttcatcccccagttccaccggctgaatgacagcatccagaccctggtgaatgacaaccagcgctacaactttgtgctgcaggtggccaagaccctggccggcatccccagagatgagaagctgaaccagagcaacttccagaagatgtaccagatgtttaatgagaccaccagccaggtgaggaagtaccagcagaacatgagccacctggaggagaagctgctgctgaccaccaagatcagcaagaactttgagacccggctgcaggacatcgagagcaaggtgacccagaccctcatcccctactacatctctgtgaagaagggctctgtggtgaccaatgaaagagaccaggccctgcagctgcaggtgctgaacagccgcttcaaggccctggaggccaagagcatccacctgagcatcaacttcttcagcctgaacaagaccctgcacgaggtgctgaccatgtgccacaatgccagcacctctgtgtctgagctgaatgccaccatccccaagtggatcaagcacagcctgcctgacatccagctgctgcagaagggcctgacagaatttgtggagcccatcatccagatcaagacccaggccgccctgagcaacctgacctgctgcatcgacaggagcctgcccggcagcctggccaacgtggtgaagagccagaagcaggtgaagagcctgcccaagaagatcaatgccctgaagaagcccaccgtgaacctgaccaccgtgctgattggccgcacccagaggaacacagacaacatcatctacccagaggagtacagcagctgcagccgccacccctgccagaatggaggcacctgcatcaatggccgcaccagcttcacctgtgcctgccgccaccccttcaccggggacaactgcaccatcaagctggtggaggagaatgccctggccccagacttcagcaagggcagctaccgctatgcccccatggtggccttctttgccagccacacctacggcatgaccatccctggccccatcctcttcaacaacctggatgtgaactacggggccagctacacccccaggacaggcaagttccgcatcccctacctgggcgtgtatgtgttcaagtacaccatcgagagcttcagcgcccacatcagcggcttcctggtggtggatggcatcgacaagctggcctttgaaagtgagaacatcaacagcgagatccactgtgacagagtgctgactggagatgccctgctggagctgaactacggccaggaggtgtggctgcggctggccaagggcaccatcccagccaagtttcctcctgtgaccaccttcagcggctacctgctgtaccgcacctag

SEQ ID NO: 172090 - DNA, 1596 bp, Artificial Sequence
  derived and/or modified sequence
atgaagggggcccggctgtttgtgctgctgagcagcctgtggagcggcggcatcggcctgaacaacagcaagcacagctggaccatcccagaagatggcaacagccagaagaccatgcccagcgcctctgtgccccccaacaagatccagagcctgcagatcctgcccaccaccagggtgatgtctgctgagatcgccaccaccccagagaaggccgagggcgtggtgaagctgcagaacctgaccctgcccaccaatgccagcatcaagttcaaccctggagctgagagcgtggtgctgagcaacagcaccctgaagttcctgcagagctttgccaggaagagcaatgagcaggccaccagcctgaacacagtgggcggcaccggcggcattggaggagtgggcggcactggaggagtgggcaacagagccccccgggagacctacctgagcagaggagacagcagcagcagccagaggacagactaccagaagagcaactttgagaccacccggggcaagaactggtgtgcctacgtgcacacccggctgagccccaccgtcatcctggacaaccaggtgacctacgtgcctgggggcaagggcccctgtggctggacaggaggcagctgcccccagaggagccagaagatcagcaaccctgtgtacaggatgcagcacaagatcgtgaccagcctggactggcgctgctgccccggctacagcggccccaagtgccagctgcgggcccaggagcagcagagcctcatccacaccaaccaggccgagagccacacagctgtgggccggggcgtggccgagcagcagcagcagcagggctgtggggaccctgaggtgatgcagaagatgacagaccaggtgaactaccaggccatgaagctgaccctgctgcagaagaagattgacaacatcagcctgactgtgaatgatgtgaggaacacctacagcagcctggagggcaaggtgtctgaggacaagagccgggagttccagagcctgctgaaggaggagtacagcagctgcagccgccacccctgccagaatggaggcacctgcatcaatggaagaaccagcttcacctgtgcctgccgccaccccttcaccggggacaactgcaccatcaagctggtggaggagaatgccctggccccagacttcagcaagggcagctaccgctatgcccccatggtggccttctttgccagccacacctacggcatgaccatccctggccccatcctcttcaacaacctggatgtgaactatggagccagctacacccccaggacaggcaagttccgcatcccctacctgggcgtgtatgtgttcaagtacaccatcgagagcttcagcgcccacatcagcggcttcctggtggtggatggcatcgacaagctggcctttgaaagtgagaacatcaacagcgagatccactgtgacagagtgctgactggagatgccctgctggagctgaactacggccaggaggtgtggctgcggctggccaagggcaccatcccagccaagttcccccctgtgaccaccttcagcggctacctgctgtaccgcacctag

SEQ ID NO: 172091 - DNA, 3687 bp, Artificial Sequence
  derived and/or modified sequence
atgaagggcgcccggctgttcgtgctgctgagcagcctgtggagcggggggattggtttaaacaattcaaagcattcttggaccatcccagaagacgggaactcccagaaaactatgcccagtgcgtccgtcccgcccaataagatacagtcattgcagatcttaccaactacacgggtgatgagtgctgagattgctacgacccccgaggctcgaacttccgaagattcactgcttaagtcaactttgccgccaagcgaaacgtccgctccggcagagggagtcaggaaccagaccctcacctcaacggagaaggctgaaggagttgttaagttgcagaacctgacactcccgacgaatgcttccattaagttcaatccgggcgcagagtccgtcgtgttgagcaatagcaccctcaagttcttacaaagcttcgcccggaagtcgaacgaacaagcaaccagtctcaacactgtcggaggaacgggcggcattggaggtgtggggggcacgggcggagtgggaaatagagccccaagggaaacctatttgagcagaggggacagttcaagttcccaaaggacagactaccagaagagcaactttgagaccacaagagggaagaactggtgcgcctacgtgcatacccgcctatctccaacagtcattcttgacaatcaagtgacatacgttcctggcggcaagggaccatgcgggtggacaggtggcagctgcccacagcggtcccagaagatcagcaacccagtgtaccgtatgcaacacaagatcgttacatctcttgactggaggtgctgtcctggctatagcggccccaagtgtcagctgcgggcccaggaacagcagtcccttattcacacaaaccaggccgagtcacacacagcagttggtcgtggggtagcagaacagcagcagcagcaagggtgcggagatccggaagtgatgcaaaagatgacagatcaagtgaattaccaggctatgaagctgaccctattacaaaagaagatcgacaacattagcctgaccgttaatgacgtgcgcaatacctattcttcactggagggcaaggtttcggaggacaagagcagagagttccagtcccttctaaaagggttgaagtctaagtcgatcaatgtattgatccgggacattgttcgggagcaattcaagatttttcagaacgatatgcaggaaactgtggctcagctgttcaaaaccgtatcttcactttctgaggacctggagtccacgcggcagattatccagaaagtcaacgagagcgtagtgagcattgcagcccaacagaagtttgttctagtgcaggaaaatagacctacattaaccgacattgtcgagctgcggaaccacatagtcaatgtgcgacaagagatgactctgacttgcgaaaaacctattaaagagttggaagtcaagcagacacaccttgaaggcgcactggagcaagaacactcgcggagtatcctgtactatgagagcctgaacaagaccctgtcaaagctcaaggaggtgcacgagcagttgctttcaacagagcaggtgagcgaccagaagaatgcacccgccgcagaaagcgtgtccaataatgtgacagaatacatgagtacgttacacgaaaacattaagaaacagtctctgatgatgttgcagatgttcgaggacctgcatatccaggaaagtaaaattaataatctaactgtcagcctcgaaatggagaaagaatccctgagaggcgaatgcgaggatatgctttcaaaatgccgaaatgatttcaaattccagctgaaagacaccgaagagaacctgcacgtgctgaaccagacactggccgaagtgcttttccccatggacaataaaatggacaaaatgagtgaacagttgaatgacctaacctatgatatggaaatactgcagccgctgctcgagcagggtgctagtctcagacagaccatgacttatgagcagccaaaggaagccatcgttattaggaagaaaatcgagaatctaaccagcgccgtgaactccctgaactttatcatcaaggaacttaccaaaagacacaatctgttaaggaatgaggtgcagggcagggatgatgcactggagagacgaatcaatgaatacgctctagagatggaagatggcctgaacaagaccatgacaataatcaataatgcgatcgattttatccaggataattacgctttgaaagagaccctttccaccatcaaggacaatagcgagatccatcataaatgtacatcggacatggagacaatcctgacctttataccccaatttcaccgtctaaatgacagcatacagactttagttaacgataatcaaagatacaattttgtcttgcaggtggccaagacccttgccggaattccgagagatgagaagctcaaccagtctaactttcagaaaatgtaccagatgtttaacgagactacctctcaagtccgcaagtaccagcaaaacatgtcacacctggaggagaagctactcttgacgaccaagatctcaaaaaatttcgagacccgtctccaggatatcgagtcaaaagtgactcaaactttgatcccctattatatttccgttaagaagggatccgttgtcaccaatgagcgcgaccaagcccttcaattacaggtcctcaattccagatttaaagccctggaagcaaagtctatccacctcagcatcaatttcttttctctgaataaaacactccacgaagtgctgaccatgtgccacaacgcctcaacgtccgtaagtgagctgaatgcaaccatacctaagtggatcaaacattctctgccagatattcagctgctccagaagggcctgacagaattcgtggagccaatcatacagatcaagacgcaggctgccctgtccaatttgacatgctgcatcgaccggtccctgcctggatctctcgctaatgtggtcaaaagtcaaaagcaggtcaagtccttacctaagaaaatcaacgccctgaagaaaccaaccgtgaacctgaccacagtcctgatcgggcggactcagcgcaataccgacaatataatttatccggaggaatacagtagctgctctcggcatccttgccaaaatggaggcacttgcataaatgggcggacatcgtttacgtgcgcctgccggcacccctttacaggggacaattgcacaattaaactagtcgaggagaacgccctggccccagacttctcaaaaggaagctaccgttatgcgccaatggtcgccttcttcgcgtcccatacgtatggaatgactatccctggcccaattctgttcaacaatcttgatgttaactatggtgcatcttacacgcctcggaccggcaagttccgaattccttaccttggagtctacgtgttcaagtacaccatagagagcttcagtgcacatattagcggtttcctggttgttgacggaattgataaattggcattcgaaagcgagaacatcaattcagaaattcactgcgacagagtgctcaccggggacgcacttctcgagctcaactacggacaggaagtttggttacgactggctaaagggacaatcccagcaaaattcccccctgttacgacatttagtggttatttgctgtacaggacatag

SEQ ID NO: 172092 - DNA, 3687 bp, Artificial Sequence
  derived and/or modified sequence
atgaagggcgcccggctgttcgtgctgctgagcagcctgtggagcgggggcatcgggctgaacaattcaaagcattcgtggactatcccggaggatggtaattcccagaaaactatgccaagcgcatccgttccgccaaataaaattcagagtcttcaaattctgccgaccacaagggtgatgagtgctgagatcgccacaactccagaagcccgaacgtccgaagatagtctgttgaagtcaaccctccctcctagcgagaccagcgccccagctgagggggtgcgcaaccaaaccttaacttctacagagaaggcagaaggcgtggtgaagctgcagaacctgacgctacccaccaatgcctcaattaaattcaacccaggagcagaaagcgtggtcttaagcaattccactctcaagttcttacagagcttcgcaagaaaatccaatgagcaagcgacaagcttaaacacggttgggggaacaggaggaatagggggggtcggcggaaccgggggagtgggaaatcgagctcctagagagacctaccttagccgaggcgactcaagttcctcacagagaacggattaccagaagtctaatttcgaaaccacacggggaaagaattggtgcgcatacgtccataccagactgtcacctaccgtgatccttgataaccaggtcacatatgtgccaggcggaaagggtccttgtggatggaccggcgggtcctgtccccagcgctcccagaagatttcaaacccagtctatcggatgcaacacaaaattgttactagcctcgactggagatgctgcccaggctacagcgggcctaaatgccagctcagagctcaggaacagcagtccctgatccataccaaccaggccgagagccataccgccgtgggtaggggggtggctgagcagcagcagcaacagggatgcggagaccctgaagttatgcagaagatgactgatcaggtgaattaccaggcaatgaaattgaccttgcttcagaagaaaatcgataacatctccctgactgtcaatgatgtgcgaaatacttattccagtttggagggcaaagtgagcgaggataaaagccgcgagtttcaaagcctgttgaaaggccttaagagcaagagtattaacgttctcatccgggatatcgtgcgggagcaatttaagatcttccaaaacgacatgcaagagactgtcgctcaactgttcaaaaccgtatcttcactctcagaggacctggaatctacaaggcagattatccagaaggtcaacgagagcgtcgtgtccatcgccgctcaacaaaaatttgtcctggttcaggaaaatcggcccacgctgacagacattgttgaattgagaaaccacattgttaatgtgcggcaagagatgacattaacctgtgaaaaacccatcaaagagctggaagtgaagcagacccatctggaaggtgcactcgagcaggaacactccaggagcattctctattacgaatcactgaacaaaactctgtcaaagctcaaagaagtgcacgaacagttactgtccacagagcaggtttcagatcagaaaaatgccccagccgcagaaagtgtgtctaataatgtgaccgaatacatgtcaactttgcatgagaacattaaaaaacaatccctgatgatgctgcagatgttcgaagatttgcacatacaggaatctaaaataaataacctgacagtgagcctggaaatggagaaggaatcactccggggtgaatgtgaagatatgttatccaagtgtagaaatgactttaagttccagctgaaagataccgaggagaatcttcatgttctgaaccagactctcgccgaagtgctgttccctatggataacaaaatggacaaaatgtccgagcagttgaacgatctcacctacgacatggagatactacagcctctgcttgagcagggcgcatctcttcggcagaccatgacatacgaacagcctaaggaagccatcgtcatacggaagaagattgaaaatttgacctcagccgtgaattcactaaacttcattatcaaggaactaacaaaaaggcacaacctcttgcggaacgaggtgcagggcagggatgatgctctggaacgaaggattaacgagtacgcccttgaaatggaagatggactcaacaaaactatgactatcatcaataacgccatcgattttattcaggataattacgctttgaaggaaacgcttagtacaatcaaggataattctgaaatacaccataagtgcacatcggacatggagaccatcctgacctttatcccccaatttcacagacttaatgacagcatccaaaccctggtgaatgataatcagcgttataacttcgtgctgcaggttgccaagacattggccgggattccgcgagacgagaaactgaatcagtctaactttcagaaaatgtaccagatgttcaatgaaaccacgtcccaggtccgcaagtaccaacagaacatgtctcatttggaggagaagctgctgctgaccaccaagatttctaagaattttgaaaccagactgcaggacattgagtctaaggtgacacaaacactgatcccatattacatctctgtgaagaagggatccgtagtgacaaatgaacgtgaccaggcccttcagctccaggtgctgaattctaggtttaaagctctggaggccaaatccatccacttatccatcaattttttttcgctcaacaaaactctgcacgaggttctaacaatgtgccacaacgcgagcaccagcgttagcgagctaaacgccactataccaaagtggattaaacactccttgcccgacatccagttgctgcagaagggcctgactgagttcgtcgagccgattatccagattaagactcaagccgccctgtctaacctaacgtgctgcatcgaccgcagcctgcctgggtccctcgccaatgtggtcaaatcccagaaacaggtcaagtcgctgccaaagaaaatcaacgcactgaaaaagccgactgttaacttgactacagtgcttatagggcggactcagcgtaataccgataacattatttaccccgaggagtatagcagttgcagtaggcatccctgccaaaacggagggacttgcataaatggacgtacaagctttacttgcgcctgtcggcacccatttacgggtgataactgtactataaagttggtcgaggagaacgccctggcgcccgacttttcaaagggctcttatcgctacgcacctatggtggcattcttcgcttctcacacatacggcatgacgataccgggacccattctgttcaataacctggatgtcaattacggtgcgagttatacacctaggaccgggaaattcaggatcccttatctcggagtgtatgtgtttaaatatacaattgagtcattttccgcgcatatatctggattcttggtggttgatggcatcgacaagctcgcatttgaatcggagaacatcaactctgagattcattgcgatagagtgcttactggcgacgccctgcttgagttaaattatgggcaggaggtctggctgaggctggcaaaaggtaccatcccagctaaattcccccctgtcaccaccttttctggctatctgctttatagaacttag

SEQ ID NO: 172093 - DNA, 1596 bp, Artificial Sequence
  derived and/or modified sequence
atgaagggcgcccggctgttcgtgctgctgagcagcctgtggagcgggggtattggcctgaataactctaagcactcatggactatccctgaggatggtaacagtcagaaaacaatgccctctgcttccgtccctcccaataagattcagtctctgcagatactgcccaccacgagagtgatgagtgccgaaatagcaaccacacctgagaaggcagagggtgtcgtcaagctgcagaatttgactctgcctaccaatgctagcatcaaattcaatccaggcgcagagtccgttgtgctctctaactccaccctgaagttcttgcaatcgttcgccagaaaaagcaatgaacaggccacaagcctgaacacagtcgggggcactggtggtatcgggggggtaggcggcactggaggtgtgggcaaccgcgcccctagagagacctacctcagtcgaggagacagctctagcagtcagaggacagattaccagaagtctaattttgaaaccacacggggaaaaaactggtgtgcttatgtgcacaccagactgtcacccactgtgattctggataaccaggtgacttatgtaccaggaggcaaggggccgtgtgggtggaccggcggcagttgtcctcagaggagccagaaaatcagtaatcctgtataccgcatgcaacataagatagttacctctctggactggaggtgctgtccgggctacagtgggccaaagtgccagcttcgtgcacaggaacaacaaagcctaatccacaccaatcaggctgaatcccacacagcggtcggcaggggggtcgctgaacagcaacagcagcagggttgtggggatcccgaggtaatgcagaagatgaccgaccaagtaaattatcaagccatgaagttgactctgttacaaaagaagatagacaacatcagcttaaccgtaaacgacgtaaggaacacctacagttcgcttgaaggaaaagtttctgaggataagtctcgcgagtttcagtccctcctaaaggaggagtacagcagttgtagtagacatccttgtcagaacggcggcacatgcatcaacggcaggacctcttttacttgcgcatgcagacaccctttcaccggagacaactgcaccataaagctagtggaggagaatgcccttgctccagacttcagcaagggttcctaccgatacgctccgatggtggcattctttgcttctcacacatacgggatgaccatacctgggcctattctgtttaataatctcgacgtgaattatggtgctagctatacaccgcgtacagggaagttccgaatcccttatctgggtgtctacgtctttaaatatacaatagagagcttcagcgcccacatctcagggttcctcgtggtcgacggtatcgacaaactggcattcgaaagcgagaatataaactccgaaatccactgcgaccgcgtgttgaccggagacgccctcctggaactgaattacggtcaagaggtctggctcagactggctaagggaacaatcccagctaaatttccacccgtcactacattttccggatacttgctctaccggacgtag

SEQ ID NO: 172094 - RNA, 3687 nt, Artificial Sequence
  derived and/or modified sequence
augaagggagcacgccuguuugucuugcucagcagucucuggaguggugguauugggcuaaauaacucuaagcauucguggaccauccccgaggaugggaacucucagaagacaaugcccucugccagcgugccacccaacaagauccagucccugcaaauccugccuaccaccagagugaugucugcugagaucgccaccacccccgaggcccgcacgagugaggauucacugcuaaaaaguacucucccaccauccgaaaccagcgcaccugcagaaggcgugagaaaccaaacccuuacaagcacagaaaaagcagagggcgucgugaaacuucagaauuugacccugccuacaaacgccuccauaaaguuuaacccuggagccgagagcguugugcuguccaacuccacucucaaguuccuacaguccuucgcaagaaaaucaaacgagcaggccaccagccuuaauacagugggcggaaccgguggcauuggaggcguuggugggaccgggggggucgggaacagggcuccgagggaaacuuaccugagcagaggcgacaguuccuccagccaaagaacagacuaccaaaagucuaauuuugagacaacucgggggaaaaauuggugugccuacgugcauacacgccucuccccaaccgugaucuuagauaaccaggugacauacgugccagggggcaaaggacccugcggguggaccggcggauccuguccacagaggucacagaaaaucucuaacccgguguauaggaugcagcacaagauugugacgagccuggacuggcgauguuguccaggauacaguggcccgaagugccagcugagagcccaagagcagcaaagucuuauucauaccaaucaagcugagucccauacggcuguggggcggggugucgccgaacaacaacagcaacagggauguggggauccugaagugaugcagaaaaugacagaucaggucaacuaccaggccaugaaacuuacccugcugcagaaaaaaaucgauaauauaagucugaccguaaaugacgugcgcaacaccuacaguucucuggaaggcaagguuagugaggauaagucaagagaauuccagucucucuugaagggccucaaaagcaaaucgaucaacgugcucauaagagacaucgugagggagcaguucaagauauuccagaacgauaugcaggaaacaguugcccagcuguucaagacuguuagcucucucucugaggaucuugagucuacccgucaaaucauccaaaaggugaacgaaucuguuguuuccauugcugcacagcaaaaguuuguacugguacaggagaaccgaccaacucuuaccgauaucguagaacugcguaaccacauagugaacguccgccaagaaaugacccuaacgugugagaaaccaauaaaggagcuugaagugaaacagacacacuuagaaggagcacuggaacaggaacacucucgcaguaucuuguauuacgaaaguuugaauaagacauuguccaaauugaaagaggugcacgaacagcugcuuuccacggagcagguguccgaccaaaagaacgcgccugcggcugagaguguaucaaacaacgucacagaauauaugucaacccuucaugagaacaucaaaaagcagucccugaugaugcuucaaauguuugaggaccugcacauucaagaaucuaaaaucaauaaucugacagucucacuggaaauggagaaagagagcuugagaggcgagugcgaagauauguugucuaagugucggaacgauuucaaguuccagcuuaaggacacggaagaaaaccugcacguccugaaccagacucucgccgaggugcuguuuccaauggauaauaaaauggauaagaugagcgagcagcugaacgaucuaaccuacgauauggagauucugcagccucugcucgaacaaggugcaucccugaggcagacuaugacauaugaacagccgaaggaggcuaucgugauccgcaagaaaaucgaaaaucuuacauccgccgugaacucucucaacuucaucaucaaagaacugacaaaacgccacaaucuucuuagaaaugagguucagggcagggacgacgcgcuggagagacgaauuaaugaguaugcucuggaaauggaggauggccugaacaagacaaugacaauaaucaacaacgccaucgacuuuauccaagacaacuacgcacuuaaagagacucugaguaccaucaaggacaacucagaaauucaucacaaauguacuucugauauggaaacgauucuuaccuucauuccccaauuucacagacuaaaugacucaauacagacacucgugaacgacaaccagcgguacaauuuugugcuacagguugcuaaaacacuggccggaauuccgcgcgacgagaagcugaaccagucaaauuuccagaagauguaucagauguuuaacgagaccaccucacagguucggaaauaucagcagaacaugucgcaccuggaagagaaauugcuccuuacgaccaaaaucagcaaaaacuucgagacuagacugcaggacaucgagucuaagguuacgcagacgcucauuccauauuauauuucaguaaaaaagggcucugucguuaccaacgaacgggaccaggcacugcagcuccagguccugaauagcagguucaaggcguuggaagcaaaaucaauucaccugucuaucaacuucuucucgcugaacaaaacacuucaugaggugcugacaaugugccauaacgcuucgaccuccgucucugaguugaacgccacuauaccgaaauggaucaagcacagccuucccgauauccagcuucuccagaaaggauuaacagaauucguggagccuauaauacagaucaagacccaagcggcacucuccaaucugaccugcugcaucgaccguucgcugcccgggucauuggcaaacgugguuaagucccagaagcaagugaaaucacugccuaagaaaaucaaugccuugaaaaagcccacugucaaccucaccacagugcugauuggacggacgcagaggaauacggauaacaucauuuacccugaggaauacucauccugcuccagacacccaugccagaauggggguacauguauuaacggucguacuucauuuacgugugccugccgacacccauucaccggugauaauugcaccauuaaacugguugaggagaaugcccuggcccccgacuucuccaaagguucauaccgcuacgcuccaaugguugcauuuuuugcuucucauacuuacggcaugacuauacccgggccuauucuuuuuaauaaucuggacgugaacuacggcgcuuccuauacaccgcggaccgguaaguucaggauuccguaccuggguguauauguauucaaguauacaauugaaagcuucagcgcucauaucucuggauucuuggucguggacgguaucgauaaacuugcuuucgagucugaaaacauaaacagcgaaauucauugcgauaggguguuaacaggugacgcauuacucgaacugaauuacggucaggaaguguggcuucgccuggcuaaggggaccauccccgccaaguuuccgcccgugacaacguuuucuggauaccugcuuuacagaaccuag

SEQ ID NO: 172095 - RNA, 3687 nt, Artificial Sequence
  derived and/or modified sequence
augaagggcgccagacucuuuguccuuuuauccucacucuggaguggcgggauaggccugaauaacucuaaacacagcuggaccauccccgaagacggcaauagccagaagaccaugccaucugccaguguaccaccuaauaagauacagucucugcagauccuucccacaacccgcguuaugagcgccgagaucgcuacaacuccugaggcucggacgagugaggauagcuugcugaagucuacccugcccccaucagagacaucugcuccugcagaaggcguuaggaaccagacgcucaccagcacagaaaaggcugagggcguggugaaacugcagaauuugacacuccccacgaaugcaucuauuaaguucaauccaggugcugaguccgugguccugaguaauucuacacugaaauucuuacaaucuuucgccaggaaaaguaacgagcaggcaacgucccugaacaccgugggcgggacaggagggaucggaggggugggcgguacaggcggggugggcaacagggcacccagggaaacauaucucucccggggcgauagcucuuccucucagcguaccgacuaccagaagagcaacuuugagaccacccgcgguaagaauuggugugcuuaugugcacacucgacugucacccacagucauucuggauaaucaagugaccuacgucccuggaggaaaagggccuuguggcuggaccggcgggagcugcccacagcgcagucagaaaauauccaaucccguuuacaggaugcagcacaaaaucgugacuucucuggacuggcgguguugccccggauacucaggcccuaaaugucagcuucgggcccaggaacagcagucacuuauccacacuaaccaagcagaaagucacaccgccguuggccguggcguagccgaacagcagcagcagcaaggcuguggggaccccgaaguuaugcagaagaugacggaucaagugaauuaccaagcuaugaagcugacccugcugcagaagaagaucgacaauaucagucucacagugaacgauguccgaaacaccuauagcucccuggagggcaagguuuccgaggacaagagucgggaauuccagagcuugcugaaaggacugaagaguaaguccaucaacguccugauaagagacaucgugcgcgagcaguucaaaauuuuccaaaaugauaugcaggagacuguggcccagcucuuuaaaacugugaguagccuaucugaagaccuugagucgacccgccaaaucauccaaaagguuaacgagucaguugugagcauugcagcccagcaaaaauucgugcugguacaggaaaaccgcccuacucucacagacauuguggagcuucguaaccacauugugaacgugcgccaggaaaugacccuuacaugcgaaaaaccuauuaaagaacucgaggucaagcaaacccaucuggaaggagcccuugagcaggaacacagccggucaauacuguauuaugaauccuugaauaagacccuuaguaaacuuaaagaagugcacgagcaguugcugagcacggaacaagucagcgaccaaaagaaugccccugcagcagagucggucucuaacaacguuaccgaguauaugucuacuuuacaugagaacauuaaaaagcaaagcuugaugauguugcaaauguuugaagaccugcauauccaagagucuaagauaaauaaucucacaguuucacuugagauggagaaagagucucuucgcggcgaaugugaagacauguugaguaagugucgaaacgauuuuaaauuucagcucaaagacacagaagaaaauuugcacguccuuaaucagacgcuggccgagguuuuauucccaauggacaacaaaauggauaagaugucggaacaauuaaaugaucugacauaugacauggaaauucugcagccacuguuggagcagggcgcuuccuugcggcaaacaaugacuuacgaacagccaaaagaggccaucguuauccggaagaagauugaaaaucuuacaucugcugugaauuccuugaacuuuaucauuaaagagcugaccaaacggcacaauuuguugaggaacgagguccaggggcgcgacgacgccuuggagagacgcauuaaugaauacgcccuugaaauggaagacggccugaauaagaccaugacaauuaucaacaaugcuauugauuucauucaagacaacuacgcacucaaagagacccuguccacgauuaaagauaauuccgaaauucaucauaaauguacuuccgacauggagacuaucuuaacauucaucccucaguuucaucgguugaacgacucgauacaaacccuggugaacgauaaucagagauauaauuuugucuuacaagucgcaaaaacacuugccggcaucccacgcgacgaaaaacuaaaccagucaaauuuccagaaaauguaucagauguucaaugagacuaccagccaggugcgcaaauaccaacagaacaugagucaccuggaggagaaauugcugcugacuacuaaaaucuccaaaaauuuugaaacuagacuucaggacauugagucuaagguuacucaaacccucaucccauauuauaucuccgucaagaagggcucaguggugacuaaugaaagagaucaggcauugcaacugcaagugcuuaacucuagauuuaaggcucuugaggccaagaguauacaccuaaguauuaacuuuuucuccuugaauaagacccugcacgagguccuuacuaugugccauaacgcaaguaccuccgucuccgaacugaacgcaacgauaccuaaauggaucaagcacucccugcccgauauucaguugcugcagaagggacugaccgaguuuguugaaccuaucauccagauaaagacucaggcagcucuuuccaaucuuacauguuguauugacaggaguuuacccgguucgcuagcaaacguggugaagagccagaagcaagucaaauccuugccaaaaaagaucaacgcccugaaaaaaccaacuguaaaccugacuacuguccugauuggacgcacccaacggaacacagauaacauuaucuauccugaggaauacagcagcugcagccggcauccgugccagaacggcgggacuugcaucaaugggcggaccucuuucacgugugcuugucggcacccuuucaccggcgacaauuguacuaucaaacugguggaagagaaugcgcuagcucccgauuuuucuaaaggaucauauagguaugcaccaauggucgcuuucuucgcaagccacacuuacggcaugaccaucccaggcccaauacuguuuaauaaccucgaugucaauuacggagcaucuuauacucccagaacagggaaguuccgcauaccauaucugggugucuauguuuuuaaguacaccaucgaguccuuuagugcacacauauccggauuucuuguuguggacggaaucgauaaacuggccuucgagucagaaaauauuaauuccgagauccauugugauagaguucuaaccggggacgcacugcuggaguuaaacuaugggcaagaaguguggcugagauuggcgaaggguacaauaccugcgaaguucccaccaguaacaacauucucugguuaccuucuguaccggacauag

SEQ ID NO: 172096 - RNA, 1596 nt, Artificial Sequence
  derived and/or modified sequence
augaaaggggcccggcuguuugugcugcucucuagccuguggagcggggguaucggucugaauaauagcaagcacucuuggaccauaccggaagacgguaacagccagaagaccaugcccucugcaucagugccccccaacaaaauccagucccuucagauucucccaaccacaagggugaugagugccgaaaucgcaacaacaccagaaaaggcggagggggucgugaaguugcagaaccugacucucccuacuaaugcuucuaucaaguucaauccuggcgccgagagcguuguucuuaguaacucuacacugaaguuucugcaauccuucgcuagaaagaguaacgagcaggcgacuucccugaacaccgugggcggcacaggggguaucgggggggugggaggaacagguggcguugggaacagagcaccacgcgagacauaccugucaaggggagacuccuccuccucacagcgaaccgacuaccagaaaaguaauuucgagaccacucggggaaaaaauuggugcgcuuacgugcauaccagacugucacccaccgugauacuggacaaucaaguaacauauguaccaggugggaaggggccuugcgguuggacuggggggaguugcccucaacgaucccaaaagauuaguaaucccgucuacagaaugcaacacaaaauugucaccagccuugacuggcgaugcugccccggauauagcggcccuaagugucaguugagggcacaggaacagcaaaguuuaauccacacaaaucaggcugaaucucacacagcagugggcagaggaguggcagagcagcagcagcagcaaggauguggcgaccccgaggugaugcagaagaugacugaccaagugaauuaucaggccaugaaacuaacacuucugcagaagaagaucgacaacauuucuuuaaccguaaacgacguacggaauacauacagcucccucgagggcaagguaagcgaggacaagucaagggaguuucagagucuccuaaaggaagaguacucuagcuguucccggcauccaugccagaauggcggaaccugcaucaauggccguacauccuuuaccugcgccuguaggcaccccuuuacuggcgauaauugcaccauuaagcuggucgaagaaaaugcccuugccccggacuucaguaaaggaucuuaccgcuacgcaccuaugguagccuuuuuugcuucccacacuuacggcaugacaauaccagggccuauccuguucaacaaucuggacgugaacuacggagcuucauacaccccucggacaggcaaauuccgcauucccuaucuggguguuuacguguuuaaguauaccauugaaagcuuuucugcgcauaucuccggguucuuggugguagaugggauugacaaacucgcauuugaaagcgaaaacauuaacagcgaaauccacugcgauagggugcuuaccggcgaugcauuguuagaauugaauuauggucaggaagucuggcuccgccuugcuaaagggaccauacccgccaaguuuccuccuguaacuaccuucagcggauaccugcuuuaccggaccuag

SEQ ID NO: 172097 - RNA, 3687 nt, Artificial Sequence
  derived and/or modified sequence
augaaaggugcccgauuguuuguuuuacuguccucauuauggaguggcggaauuggccuuaauaacucaaagcacagcuggacaauaccagaggauggcaauucccaaaagacaaugccuucagccucagucccccccaacaagauccaguccuugcagauucugccaaccacccgaguuaugagcgcugaaauugccacaacuccagaagcccgcaccagcgaagauuccuuacugaaaucuacacugccuccuucugagacauccgccccugcagaagguguacggaaccagacccugacgagcacggaaaaagcagaaggcguuguuaaacuacaaaauuugacucucccuaccaaugccucaauaaaauucaacccaggagccgagagcgugguccuguccaacuccacuuuaaaguuucuucaguccuuugcgcgaaagucaaaugagcaagcuaccucacucaacacagucgggggaacgggaggaauaggcggcgucggggggacaggggggguggggaaucgggcaccuagagaaacuuauuuaucacggggggauuccucauccagccagagaacugacuaucagaaauccaauuucgaaacuacaaggggaaaaaauuggugugcauacgugcacacacgguuaaguccuacggugauucuugacaaucagguuacguauguaccggguggcaaggggccuugcggguggacaggaggaucaugcccucagagaucucagaagauuagcaaccccgucuacagaaugcagcacaagauuguuacuucucucgauuggagauguugcccaggguacucaggaccuaaaugucagcuaagagcccaggaacagcagagccuuauucauaccaaccaggcagaaucucacacagccgugggacguggaguugccgagcagcaacagcagcaaggaugcggcgaccccgaagugaugcagaagaugacugaccaggugaacuaucaagcuaugaaacugacacugcugcagaagaagauugacaauaucagcuugacaguaaacgacguucggaauacauacuccagucuggagggaaagguuucagaagauaaaagcagagaguuccagagucuccugaagggccugaaaaguaagucaaucaacgugcugaucagagauaucguaagggagcaguucaagaucuuucaaaaugauaugcaggaaacaguugcccagcuguucaagacuguuagcucucucucugaggaucuugagucuacccgucaaaucauccaaaaggugaacgaaucuguuguuuccauugcugcacagcaaaaguuuguacugguacaggagaaccgaccaacucuuaccgauaucguagaacugcguaaccacauagugaacguccgccaagaaaugacccuaacgugugagaaaccaauaaaggagcuugaagugaaacagacacacuuagaaggagcacuggaacaggaacacucucgcaguaucuuguacuacgagagucugaacaaaacccuaagcaaacuaaaggaaguccacgaacaacuccugucgacugagcaagugagugaccagaagaacgccccagccgcugaaagcguaagcaacaaugugacagaguauaugagcacccuccacgagaauauuaaaaagcaaucccugaugauguugcagauguucgaagauuugcauauucaagaaucuaagaucaacaaccuuaccgugagccuggagauggagaaagaaagccugcgcggugaaugcgaggacaugcuguccaagugcagaaacgauuuuaaauuucagcugaaagauaccgaggagaaucuacacgugcugaaccaaacacucgccgaggugcucuucccuauggauaauaaaauggacaaaaugagugagcaacugaacgaucugaccuacgacauggagauauugcaaccuuuacucgagcagggcgcuucacugagacagaccaugacauaugagcaaccuaaggaagcaauagucauucggaagaaaauugagaaccucacauccgcugugaauucccugaacuucaucauuaaggaacucaccaaacgucacaaccuacuucguaaugagguacagggccgagaugacgcacucgaaagacgcauaaaugaguaugcacucgaaauggaggacggcuuaaauaaaacgaugaccaucauaaacaacgccaucgauuucauccaagacaacuaugcauugaaggaaaccuuaucaacaaucaaagacaauagcgagauccaccauaaauguacuagugauauggaaacaauucucaccuuuaucccccaguuccaccgucucaaugauucuauccagacacuuguaaaugauaaucagagauacaacuuugugcugcagguagccaagacauuagcaggaaucccucgugacgaaaagcuuaaccaaaguaacuuucaaaaaauguaucaaauguuuaacgaaaccaccucacaggucagaaaguaccaacagaauaugagccaccuggaggagaaguugcugcucaccacuaagaucagcaagaauuuugagaccagacugcaggacauugaaucuaaagugacucagacucuaauaccauacuauaucagugugaagaagggcaguguuguuaccaacgaacgcgaucaggcucuacaauuacaaguccugaauagucgguucaaggcccucgaagccaagucuauucaccuuucaauuaacuucuucucuuugaauaaaaccuuacacgaaguucuuacuaugugucacaaugccuccacuucuguuuccgaguugaaugccaccauuccuaaguggauuaagcacagccugccugauauccagcugcugcaaaaaggcuuaaccgaguuuguggagccuauuauccagauuaagacacaagccgcgcucucuaaccuuacauguuguauugauagaagucucccaggcucuuuagcgaacguggugaagagucagaagcaaguaaaaaguuuaccgaagaagauuaacgcgcucaaaaaaccaacggugaaccucacaaccguguuaaucggaaggacacagaggaacacagacaacaucauuuauccagaagaguacucaucuuguucacgccaccccugccaaaacggagguacuugcauuaacggucguaccagcuuuaccugugcuugucggcacccuuuuaccggagacaacugcaccauuaagcucgucgaagaaaacgcucuggcccccgacuucucuaaggggucuuaucgcuaugccccuaugguugcuuuuuucgcaucucacaccuacggcaugacaaucccaggccccauucuauuuaacaaccuagacguaaauuauggcgccucauacaccccucggacaggaaaauucagaauaccauauuuaggcguguaugucuucaaauauaccaucgaaucguucucugcgcacauauccggguuccuugugguggaugguaucgauaagcuggcauuugaauccgaaaacauaaacucugaaauccauugcgaccgcgugcugaccggcgacgcacugcucgaguuaaauuacggccaggagguguggcucaggcucgcuaaaggaacaaucccugccaaauuucccccuguuacaacauuuucuggcuaccuacucuauagaaccuag

SEQ ID NO: 172098 - RNA, 3687 nt, Artificial Sequence
  derived and/or modified sequence
augaaaggcgcacgccuguucguccugcuuagcagcuuauggagcgguggaaucggccugaacaauucuaagcacagcuggaccauucccgaagauggcaacagccagaaaaccaugcccuccgcuucugugccuccgaacaagauccagagcuugcagauuuuacccacgacgagagugaugagugccgagaucgcuaccacaccugaagccagaacuucugaggacucccugcuaaaguccacacuucccccuuccgagacauccgcacccgccgagggcguuaggaaucagacucugaccagcacagaaaaggcugagggcguggugaaacugcagaauuugacacuccccacgaaugcaucuauuaaguucaauccaggugcugaguccgugguccugaguaauucuacacugaaauucuuacaaucuuucgccaggaaaaguaacgagcaggcaacgucccugaacaccgugggcgggacaggagggaucggaggggugggcgguacaggcggggugggcaacagggcacccagggaaacauaucucucccggggcgauagcucuuccucucagcguaccgacuaccagaagagcaauuuugagaccacccgagguaaaaauuggugugccuacguccacacuagacugagcccuacugugauacuugauaaucaggugacuuaugugcccggcgggaaaggccccugcggauggacaggaggaagcugcccccaacgcucacaaaagauaucaaaccccguguaucggaugcaacauaaaauuguuacaucacuggacuggaggugcuguccaggguauagcggacccaagugccagcugcgcgcgcaggaacaacaaucucugauucauacaaaccaggccgagucccacacagccguggggcggggcguggcagagcagcagcagcagcagggaugcggggauccugaagugaugcagaaaaugacagaucagguuaacuaccaagcgaugaagcuuacacuucuccagaaaaaaaucgauaacauuucacucacagucaacgauguaagaaacacauacucuucucucgaggggaaagucucugaggacaaguccagagaauuccagagucugcucaaaggcuuaaagucaaagucuauaaauguacuuaucagggauaucgucagggagcaguuuaaaaucuuccagaaugauaugcaagaaaccguggcucagcuauuuaaaaccgucagcucacuguccgaagaccuagagucaacccggcagauaauccagaaggucaacgaaagugucguuagcauugcagcccagcagaaauucgugcucguccaggaaaaucguccuacccucacugauauugucgaguuacggaaccacaucgugaaugucagacaggagaugacucuuacaugugagaagccgauuaaggaacuggaggugaaacaaacgcaucuagagggagcccuagaacaggaacauucacguagcauucuguauuaugaaucucucaauaagacucucuccaagcugaaagaagugcacgagcaguuauugucaaccgagcaaguuucugaucaaaaaaaugcuccugcagcagaguccgucucuaauaacgucaccgaguauaugucaaccuugcacgagaauauuaagaaacagucucugaugaugcuccaaauguuugaggaucuucauauccaagaaagcaaaauaaacaauuuaaccgugucucuugagauggagaaagaaucucuccguggcgaaugugaggacaugcugaguaaaugucgcaaugacuuuaaauuccaacucaaggacaccgaggagaauuuacacguguugaaccaaacacucgcugagguacucuuucccauggauaauaaaauggauaagaugagugagcagcuuaacgaucucaccuaugacauggaaauucuacagccacuacucgaacagggggcaucucugaggcaaacuaugacauaugagcagccaaaagaagcaaucguuaucaggaaaaaaauagagaauuuaacuucagccgucaacagccugaauuucauuaucaaagagcugaccaagcgacacaacuuguugagaaacgaagugcaaggaagagacgaugcacuggaaagacgcauaaacgaauacgcacuggaaauggaagacggccuuaauaagacuaugaccauuauaaacaaugccaucgacuucauucaggacaauuacgcucugaaagaaaccuugucuacgauaaaggacaacagcgagauucaucacaaguguacuuccgacauggagacuauccuuacauucauaccgcaguuucauagacugaacgauuccauccaaacgcuaguuaacgauaaucagcgauacaauuucguguugcaaguagcaaagacucuggccggcaucccgcgcgacgaaaaauugaaccagagcaauuuccaaaagauguaccagauguuuaaugagacaacuucucaaguucgcaaauaucaacagaacaugucccaccuagaggagaagcuacuuuuaacuacaaagauuucuaaaaauuucgaaacgcgguugcaggacauugagucaaaaguuacucagacccucauaccauacuacauuuccgugaagaaaggcuccguaguaaccaacgagcgagaccaggccuuacaacuccagguccucaacucucguuucaaggcacucgaagccaaauccauccauuuguccauaaacuuuuuuagucuuaauaagacucuccacgagguucucaccaugugucacaaugccucuacuagcgucagugaauuaaacgcaaccauuccuaaguggauaaagcauucccuccccgacauucaacuccugcaaaaaggucugacagaauucgucgaaccaaucauccagauaaagacacaagccgcacuuaguaacuuaacaugcuguaucgauagaucacucccggggucacuggcuaacgucgugaaaucccaaaagcagguuaagucccucccaaagaagaucaaugcucuuaaaaaaccuacaguuaaucucacaaccgugcugauaggucguacacaaagaaauaccgacaauaucauauacccagaagaauauucuuccugcagccgacacccgugccaaaacggaggcaccuguauuaacggcagaacuuccuucacaugugcuugucgccauccuuuuacaggagauaauugcacaauaaagcugguagaagagaacgcacuugccccagauuucuccaagggauccuauagauaugcgccuauggucgccuucuuugccucucauaccuacggaaugacaaucccaggaccaauccucuuuaauaaccuugaugucaacuauggggcauccuauacaccacggacagguaaguuucgcauucccuaccuaggcgucuauguuuucaaguauacgauagagucauuuagcgcucacauauccggauuuuuagucguggauggcaucgacaaacucgcguuugaauccgagaauauaaauucugaaauucacugcgaucgcguucugacgggagacgcccugcuagaacuuaauuacggccaggaaguuuggcugaggcucgcaaaaggcaccauuccugcaaaauucccccccgucacuacuuuuucaggguaccuauuauacagaaccuag

SEQ ID NO: 172099 - RNA, 1596 nt, Artificial Sequence
  derived and/or modified sequence
augaagggggcacgauuauuuguacugcucagcagucuauggucaggcggaauaggccuuaauaacagcaaacauucuuggacuaucccagaggacgggaacucccagaagaccaugccauccgcuuccgucccacccaacaagauucagucccuccaaauccuuccgaccacucgugucaugucugcugaaaucgcaacaacaccugaaaaagcugaaggggucguaaagcugcagaaccugacccugccaacaaacgcguccaucaaauucaacccuggagccgaaagcguuguccucagcaauuccacacuuaaauuccuucagucuuuugcuaggaagagcaacgaacaagccacaagucugaacacaguaggcgguaccgggggaauuggcggggugggcggaacaggcggcgugggaaaucgggcccccagggagacauaccuuucccguggugacagcuccagcucacagcgaacagauuaucagaaaucuaauuuugaaacuacccguggcaagaacuggugugcuuauguucacacucgacucucacccacugugauccuugauaaucaaguaaccuacguccccggagguaaagggcccuguggguggacaggaggaaguugcccucagagaagccagaaaauuagcaaccccgucuacaggaugcagcauaaaaucgugaccucccuagacuggaggugcugcccaggauauucuggccccaaaugucagcugcgggcacaagaacagcagaguuugauccacacuaaccaggcagagucccacacagcaguaggcaggggcguggcagaacagcaacagcagcaggggugcggggaucccgaagugaugcagaaaaugaccgaccaggugaacuaccaagccaugaaacugacucuguuacagaaaaaaauugauaacauaucgcucaccgucaaugacguaagaaauacuuacuccucucuggaagggaaggucagcgaagauaagucuagggaguuccagucucugcugaaggaggaauauucuagcugcucacgccacccuugccagaacggcggcacguguaucaauggcagaaccucguuuacuugugcguguagacaccccuuuaccggcgacaacuguacgauaaaguuaguggaggaaaacgcuuuggcaccagauuuuagcaaaggaucauauagguaugccccuauggucgccuucuuugcaucucauaccuacggaaugacgaucccuggaccuauccuguucaauaaccuggacguaaacuacggugccaguuacacaccaaggacaggaaaauuuaggauuccuuaucugggaguuuacguuuucaaauacaccaucgagagcuucucagcccauauaucugguuuccuggucguugacggcauagauaagcuagcauucgaaucugagaauaucaacucugaaauccauugcgaucgagucuuaacaggagaugcucuccuugaacuuaacuauggacaggaggucuggcuccggcuggcuaagggcaccauuccugcuaaguuccccccagugaccaccuucagcggcuaucuccuuuauagaaccuag

SEQ ID NO: 172100 - protein, 381 aa, Artificial Sequence
  derived and/or modified sequence
MSGVVRTLSRCLLPAEAGGARERRAGSGARDAEREARRRSRDIDALLARERRAVRRLVKILLLGAGESGKSTFLKQMRIIHGREFDQKALLEFRDTIFDNILKGSRVLVDARDKLGIPWQYSENEKHGMFLMAFENKAGLPVEPATFQLYVPALSALWRDSGIREAFSRRSEFQLGESVKYFLDNLDRIGQLNYFPSKQDILLARKATKGIVEHDFVIKKIPFKMVDVGGQRSQRQKWFQCFDGITSILFMVSSSEYDQVLMEDRRTNRLVESMNIFETIVNNKLFFNVSIILFLNKMDLLVEKVKTVSIKKHFPDFRGDPHRLEDVQRYLVQCFDRKRRNRSKPLFHHFTTAIDTENVRFVFHAVKDTILQENLKDIMLQ

SEQ ID NO: 172101 - DNA, 1146 bp, Artificial Sequence
  derived and/or modified sequence
atgagcggagtcgtccggactctgagtcggtgcctgttgccagccgaggctggcggagccagagaaagaagagcaggtagcggtgctagggacgccgagcgagaagcgaggcgacgctctcgggatatcgacgccctgctggcgcgagaacgccgagcagtgcgacgcttagtcaagatactattactgggagccggagaaagtggtaagtcaacttttctgaagcagatgcgtatcattcacggcagggagttcgatcagaaggcattgcttgaatttcgtgacacgatctttgacaacatcctgaaggggtctcgtgtattggtggatgcccgggataaacttggtatcccatggcagtatagtgagaatgagaaacacggcatgttcctgatggcatttgagaacaaggccggtctccccgtggagcctgcaactttccagttgtacgtgcctgcactttcagcactttggagggacagcggaatccgcgaagctttctcccggaggtccgagtttcagttaggcgagtcagtgaagtactttctggacaacttggacagaatcggccagcttaactactttccaagcaaacaggatatcctcctggcccggaaggcaaccaaaggaattgtcgaacacgattttgtcattaagaaaattccattcaagatggtggacgtaggaggacagcgatcccagcgccaaaagtggttccagtgctttgacgggatcacttcaattctgttcatggtcagttcttcggagtatgaccaggttctgatggaagaccgtaggactaacagactggtggagagcatgaatattttcgaaaccatagtgaataacaaactctttttcaacgtctcaatcatcctttttctgaacaaaatggacctgcttgttgaaaaggtgaagaccgtatcaattaagaagcacttcccagactttcgaggtgatcctcaccggctggaggatgtccaaaggtatcttgtgcagtgcttcgatcgcaagcgaaggaatcgcagcaagcctctatttcatcactttaccaccgctatagatacggagaatgtgcgcttcgtctttcatgcagtcaaggacacaatcctgcaagaaaacctgaaagacatcatgcttcagtag

SEQ ID NO: 172102 - DNA, 4378 bp, Artificial Sequence
  derived and/or modified sequence
ggcgacgagtgcgggcctcggagcgactgcagcggcggcggcggacgcggcctgaggcgagcggcggggcgtggggcggtgcctcggcccgggctcgccctcgccggcgggagcgtccatggcccccgggcgccggcggggcgcggccgcggcctgaggggccatgtccggggtggtgcggaccctcagccgctgcctgctgccggccgaggccggcggggcccgcgagcgcagggcgggcagcggcgcgcgcgacgcggagcgcgaggcccggaggcgtagccgcgacatcgacgcgctgctggcccgcgagcggcgcgcggtccggcgcctggtgaagatcctgctgctgggcgcgggcgagagcggcaagtccacgttcctcaagcagatgcgcatcatccacggccgcgagttcgaccagaaggcgctgctggagttccgcgacaccatcttcgacaacatcctcaagggctcaagggttcttgttgatgcacgagataagcttggcattccttggcagtattctgaaaatgagaagcatgggatgttcctgatggccttcgagaacaaggcggggctgcctgtggagccggccaccttccagctgtacgtcccggccctgagcgcactctggagggattctggcatcagggaggctttcagccggagaagcgagtttcagctgggggagtcggtgaagtacttcctggacaacttggaccggatcggccagctgaattactttcctagtaagcaagatatcctgctggctaggaaagccaccaagggaattgtggagcatgacttcgttattaagaagatcccctttaagatggtggatgtgggcggccagcggtcccagcgccagaagtggttccagtgcttcgacgggatcacgtccatcctgttcatggtctcctccagcgagtacgaccaggtcctcatggaggacaggcgcaccaaccggctggtggagtccatgaacatcttcgagaccatcgtcaacaacaagctcttcttcaacgtctccatcattctcttcctcaacaagatggacctcctggtggagaaggtgaagaccgtgagcatcaagaagcacttcccggacttcaggggcgacccgcacaggctggaggacgtccagcgctacctggtccagtgcttcgacaggaagagacggaaccgcagcaagccactcttccaccacttcaccaccgccatcgacaccgagaacgtccgcttcgtgttccatgctgtgaaagacaccatcctgcaggagaacctgaaggacatcatgctgcagtgagcgaggaagccccggggtttgtcgtcgttgagcagcccccacggctgtcggtcagactcttgggtgtgtgttgtctgtgtggtccttgagtgggtttctcggatccgtgccctggaatacctggctcaggaatgctgtcagaccagccagccagcgagctctaggcaaaaggacatggaaactgtcacgttagctactgaatcctgggggcgagtgaaactactgaaaatccgagtgatgatgttgtgaatacggaacacctaatcacacagcttgctttgcttttacagaaacgttcctctttttctgacgcagtttaattgaggaccgtgttgtgtgtgtatgtgtgtacacacgctctgtctttaatgacagaaacacaaaaaccagctggccttgcagacggcttttctaactcacaagtcttccctgagacagactaacctgaaagctttgcctaacagtagcttgtagagatccagtgcacgccgatgctgctaaactcagtgcctgagcccggccctgcagccccagccgcagtgtctgaaggccacctcccaaagggagcacgttgccttttcaaactcccgtgccgatttcctaagagcccctagtccaagcctctcagatgaagctgaggagccgtgcctaggatcccttcccagctctgaggacgggctgcagagctctgcaggtgtggattcaccttacgcccctacagcaggctcagcccttcccaccctgccccatgcccagcagcacaacacggagtgagacaggatgcccacggtgactgccgctccgtccgtgcacacacagcggtgctcttctccccttagccacccactgcccaacccaacggcaaagacacagaaaccaggtccccttgcagacggctctcccatcttcctgcaagtcatctgctcacacacagttggcagcacatagcgtttccttctttcagaaacattcctcttctggggcttcagaaagctggcaaggccactagcagagcttttgttaatgccccagctgcttggcgagctaacagctgacctttcgggaagcccacagacgctggaggaatcttgagtttctccaaactgccgctccaccagtgcctttggacagccgtgcctgttcgccgctctccctaagtctgattctcatcgaggcccctcgcttctatgactgtgcttgcagaagagtaaacactctcggatgccgctgtcctgggggagcccgcgggagcctgtgaatgttgatacgagctggccagtcctgggcccagctcacttgtccagctacctgccaggtggctttcactgtgtttaaaatacattgcattccaagctggtcccctctgtgtatcactctactgagaaatcctgcctagtgtgttttgggatgtgtcctagcatttacaagaaaatgaaaagcgtcctcttaattggcacccgaatgttgctgtggctcagtcacatatcccagggccctcgtcccgaggccgtgctgccccgagccccgagcccctctgcagctcacccttggcttgttttccgcaaacccggtaaacgcaagcccttggggcagatgcagaagcagaagagggaggggaaacctgcctctgggtcaccctgttagcacagcgttctcatcgggagacagcatggaactctctctcgcagtgctcgaggctgtgtgtcagtgtttgctgggcttgtggctccttttttggctggataaagaagtcgctgtttttgtactgcttctgtggctcttcacagacctcacggatgtgaccggagatgagtgccgatgaccacgttttaaaggagaaagagagctcctggtggggccctcggggtggtctcaggtcccatttgcagtctgcaacagtgacgcgcagcccggtccggagcgtggtgagctttgtttgccttctgggtcagctttcgctgtgtctcctgtgtgtgttagaatccagagcccagaggaagtgcaagcgggtcctccgccaacggggagagcctcttcgcggcgctgttggcgacagcagcgctgtgattcgcgtagcaggggagttgtttgaaacaccttcctgagtagtccggccttgtcaatgagtgcttgttttcctttaaacagtctgacatatttactcgtcactttcaaaccagaagcatgagaggaaggagatattgtggggtccgtttaactcgatagaaagcgcagggggatggcccccggcgcgggctcttgacccgctcagcgctgaccccaccgccctggccgaggcacttggccttgctgagctggacttcctcctcctcctcctcatgaccggggtgaattagaacgtttttaaagacacccccttccaaattctgtaacacattgtaattggagaagaaggaaactctgcaaggctaaactgtcattcacaacttggctacacatagactctagtcagttttgtctccagaaccttaggcttttgtattttttaattttaatttcactgttaatccttattgtcttttttattaagatgttggaaaagcaggaggtagttgtgcctcaattattgcaaaaatgtaacaataaagttcctcaaaataagatctgttcctcatagctatactgtgtacacataagacgcatatagggttttactgaaatctatttttaactcttatgttcgtagagaaattgtttcaaggattttgagtcataggtctgtaatttatagagatctctagaattcttattgtaattttcctacttctttgataaaagaaaaataagtcagattgttaactccaagattgaaaaaaaaaactcttgaaagaagattattagttgtaactaatttaggggttctgggcacagacatctaacctggtattgtaaggcagaggctcccattggaatggtagtggtccgggtcagttgttcatggtgtaagctttgcacagtgtattaacattgggagggtctggcttgaaaatttggccaccctcagcctctgaatgtttattaaaataaatttagtctttctttgcttaa

SEQ ID NO: 172103 - DNA, 1146 bp, Artificial Sequence
  derived and/or modified sequence
atgtctggagtggtgaggaccctgagccgctgcctgctgcctgctgaggccggcggggcccgggagaggagagctggcagcggggccagagatgctgagcgggaggcccggcggcgcagccgggacattgatgccctgctggcccgggagaggagagctgtgcggcggctggtgaagatcctgctgctgggcgctggggagagcggcaagagcaccttcctgaagcagatgaggatcatccacggccgggagtttgaccagaaggccctgctggagttccgggacaccatctttgacaacatcctgaagggcagccgggtgctggtggatgcccgggacaagctgggcatcccctggcagtacagtgaaaatgagaagcacggcatgttcctgatggcctttgagaacaaggccggcctgcctgtggagcccgccaccttccagctgtatgtgcctgccctgagcgccctgtggagggacagcggcatccgggaggccttcagcagaagaagtgagttccagctgggggagagcgtgaagtacttcctggacaacctggacagaattggccagctgaactacttccccagcaagcaggacatcctgctggccaggaaggccaccaagggcatcgtggagcatgactttgtgatcaagaagatccccttcaagatggtggatgtgggcggccagaggagccagaggcagaagtggttccagtgctttgatggcatcaccagcatcctcttcatggtgagcagcagtgaatatgaccaggtgctgatggaggacaggaggaccaaccggctggtggagagcatgaacatctttgagaccatcgtgaacaacaagctgttcttcaacgtgtccatcatcctcttcctgaacaagatggacctgctggtggagaaggtgaagacagtgtccatcaagaagcacttcccagacttccggggggacccccaccggctggaggatgtgcagcgctacctggtgcagtgctttgacaggaagagaagaaacagaagcaagcccctcttccaccacttcaccacagccatcgacacagaaaatgtgcgctttgtgttccacgctgtgaaggacaccatcctgcaggagaacctgaaggacatcatgctgcagtag

SEQ ID NO: 172104 - DNA, 1146 bp, Artificial Sequence
  derived and/or modified sequence
atgagcggcgtggtgcggaccctgagccggtgcctgctgcccgccgaggctgggggagcccgggagcgaagggcaggatccggagccagagacgccgagcgcgaagctcgacggcgcagtagagacattgatgcacttctggcccgtgaaaggagggctgtgcgcagacttgtgaagattctcctccttggagcgggcgagtccggcaaaagtaccttcctcaaacagatgcggataatccatggcagggagtttgaccagaaagctctcttggaattccgggacaccatctttgataatattctgaagggctcacgggtgttggtagacgcacgagacaaactgggtattccgtggcaatacagcgaaaacgagaagcacggcatgttccttatggccttcgagaacaaagctggcctgccggttgagccagccacttttcagctatacgtacctgccctttctgctctatggagggattccggtataagggaggccttttcaaggagaagtgaatttcagttaggtgagagtgtcaaatacttcttagacaatctggataggatagggcagctgaactacttccctagcaagcaggacatcctgctcgcccggaaagccacaaaagggatcgtagaacatgactttgtgataaagaaaatacctttcaagatggttgatgtaggtggacagagaagtcagaggcaaaaatggtttcagtgtttcgacggtatcacctccatcctgtttatggtgtcgagctccgagtacgaccaggtgcttatggaggaccggcgcacgaatagattggttgagtccatgaacatatttgaaaccatcgtgaacaacaaattattttttaacgtctccattatcctgttcttaaacaaaatggacctcttagtcgagaaggtgaagaccgtctcaataaagaaacacttcccagatttcaggggcgacccacatagactcgaagatgttcaaaggtatctggttcagtgctttgacagaaaaaggagaaatcgtagcaaaccgctgtttcaccacttcaccacggctattgacactgagaacgtgcgcttcgttttccacgctgtgaaggacaccatactgcaggagaacctgaaggacatcatgctccagtag

SEQ ID NO: 172105 - DNA, 1146 bp, Artificial Sequence
  derived and/or modified sequence
atgagcggcgtcgttagaactcttagcagatgcctattaccagcagaggcgggaggggcaagggagcgcagagctggaagcggagccagagacgccgagcgagaggccaggcggaggagcagagacatagatgccctgctggctcgagaaagacgggctgtgaggcggctcgtgaaaattttactgctaggagcgggtgagtccggcaaaagcacgttcctgaagcaaatgcggatcatccacgggagggaattcgaccagaaggccctgctagagttcagggatacaatctttgataatatcctcaaaggttcccgcgtgctggtagatgccagggataagctgggtattccatggcagtatagcgagaacgagaagcatggcatgttcttgatggccttcgaaaataaggcagggctgcccgttgaacctgctacgtttcagctgtatgtgcccgctctgtccgctctctggagagattcgggtatccgggaagccttcagccgaagatctgagtttcagctgggcgaatctgtcaaatattttctggacaacttggacagaatcggccaactgaattactttccatctaagcaggatatccttcttgctaggaaggccaccaaaggaatagtagaacacgactttgtaatcaagaagatccccttcaaaatggtggatgtgggcggacagagaagccaaaggcaaaaatggttccagtgtttcgatggcataacgtccattctgtttatggttagcagttcggagtacgaccaggtccttatggaagatcggagaaccaaccgtctggttgagagcatgaatatctttgaaacgatagtcaataacaagctgttctttaacgtttcaattatccttttcttgaacaagatggatctgttggtggagaaggtgaaaacggtgtccattaaaaagcatttccccgatttcagaggcgatccccatcgcctggaagatgtccagaggtatttggttcaatgttttgacagaaagcggaggaaccgtagtaaacctctatttcatcacttcacgactgcaatcgataccgagaacgttcgctttgtgttccacgcggttaaggataccatcctccaagagaacttgaaggatatcatgctgcagtag

SEQ ID NO: 172106 - DNA, 1146 bp, Artificial Sequence
  derived and/or modified sequence
atgagcggcgtggtgagaaccctgagcagatgcctgctgcccgccgaggccggcggcgccagagagagaagagccggcagcggcgccagagacgccgagagagaggccagaagaagaagcagagacatcgacgccctgctggccagagagagaagagccgtgagaagactggtgaagatcctgctgctgggcgccggcgagagcggcaagagcaccttcctgaagcagatgagaatcatccacggcagagagttcgaccagaaggccctgctggagttcagagacaccatcttcgacaacatcctgaagggcagcagagtgctggtggacgccagagacaagctgggcatcccctggcagtacagcgagaacgagaagcacggcatgttcctgatggccttcgagaacaaggccggcctgcccgtggagcccgccaccttccagctgtacgtgcccgccctgagcgccctgtggagagacagcggcatcagagaggccttcagcagaagaagcgagttccagctgggcgagagcgtgaagtacttcctggacaacctggacagaatcggccagctgaactacttccccagcaagcaggacatcctgctggccagaaaggccaccaagggcatcgtggagcacgacttcgtgatcaagaagatccccttcaagatggtggacgtgggcggccagagaagccagagacagaagtggttccagtgcttcgacggcatcaccagcatcctgttcatggtgagcagcagcgagtacgaccaggtgctgatggaggacagaagaaccaacagactggtggagagcatgaacatcttcgagaccatcgtgaacaacaagctgttcttcaacgtgagcatcatcctgttcctgaacaagatggacctgctggtggagaaggtgaagaccgtgagcatcaagaagcacttccccgacttcagaggcgacccccacagactggaggacgtgcagagatacctggtgcagtgcttcgacagaaagagaagaaacagaagcaagcccctgttccaccacttcaccaccgccatcgacaccgagaacgtgagattcgtgttccacgccgtgaaggacaccatcctgcaggagaacctgaaggacatcatgctgcagtag

SEQ ID NO: 172107 - protein, 1761 aa, Artificial Sequence
  derived and/or modified sequence
MQFQLTLFLHLGWLSYSKAQDDCNRGACHPTTGDLLVGRNTQLMASSTCGLSRAQKYCILSYLEGEQKCFICDSRFPYDPYDQPNSHTIENVIVSFEPDREKKWWQSENGLDHVSIRLDLEALFRFSHLILTFKTFRPAAMLVERSTDYGHNWKVFKYFAKDCATSFPNITSGQAQGVGDIVCDSKYSDIEPSTGGEVVLKVLDPSFEIENPYSPYIQDLVTLTNLRINFTKLHTLGDALLGRRQNDSLDKYYYALYEMIVRGSCFCNGHASECRPMQKMRGDVFSPPGMVHGQCVCQHNTDGPNCERCKDFFQDAPWRPAADLQDNACRSCSCNSHSSRCHFDMTTYLASGGLSGGVCEDCQHNTEGQHCDRCRPLFYRDPLKTISDPYACIPCECDPDGTISGGICVSHSDPALGSVAGQCLCKENVEGAKCDQCKPNHYGLSATDPLGCQPCDCNPLGSLPFLTCDVDTGQCLCLSYVTGAHCEECTVGYWGLGNHLHGCSPCDCDIGGAYSNVCSPKNGQCECRPHVTGRSCSEPAPGYFFAPLNFYLYEAEEATTLQGLAPLGSETFGQSPAVHVVLGEPVPGNPVTWTGPGFARVLPGAGLRFAVNNIPFPVDFTIAIHYETQSAADWTVQIVVNPPGGSEHCIPKTLQSKPQSFALPAATRIMLLPTPICLEPDVQYSIDVYFSQPLQGESHAHSHVLVDSLGLIPQINSLENFCSKQDLDEYQLHNCVEIASAMGPQVLPGACERLIISMSAKLHDGAVACKCHPQGSVGSSCSRLGGQCQCKPLVVGRCCDRCSTGSYDLGHHGCHPCHCHPQGSKDTVCDQVTGQCPCHGEVSGRRCDRCLAGYFGFPSCHPCPCNRFAELCDPETGSCFNCGGFTTGRNCERCIDGYYGNPSSGQPCRPCLCPDDPSSNQYFAHSCYQNLWSSDVICNCLQGYTGTQCGECSTGFYGNPRISGAPCQPCACNNNIDVTDPESCSRVTGECLRCLHNTQGANCQLCKPGHYGSALNQTCRRCSCHASGVSPMECPPGGGACLCDPVTGACPCLPNVTGLACDRCADGYWNLVPGRGCQSCDCDPRTSQSSHCDQLTGQCPCKLGYGGKRCSECQENYYGDPPGRCIPCDCNRAGTQKPICDPDTGMCRCREGVSGQRCDRCARGHSQEFPTCLQCHLCFDQWDHTISSLSKAVQGLMRLAANMEDKRETLPVCEADFKDLRGNVSEIERILKHPVFPSGKFLKVKDYHDSVRRQIMQLNEQLKAVYEFQDLKDTIERAKNEADLLLEDLQEEIDLQSSVLNASIADSSENIKKYYHISSSAEKKINETSSTINTSANTRNDLLTILDTLTSKGNLSLERLKQIKIPDIQILNEKVCGDPGNVPCVPLPCGGALCTGRKGHRKCRGPGCHGSLTLSTNALQKAQEAKSIIRNLDKQVRGLKNQIESISEQAEVSKNNALQLREKLGNIRNQSDSEEENINLFIKKVKNFLLEENVPPEDIEKVANGVLDIHLPIPSQNLTDELVKIQKHMQLCEDYRTDENRLNEEADGAQKLLVKAKAAEKAANILLNLDKTLNQLQQAQITQGRANSTITQLTANITKIKKNVLQAENQTREMKSELELAKQRSGLEDGLSLLQTKLQRHQDHAVNAKVQAESAQHQAGSLEKEFVELKKQYAILQRKTSTTGLTKETLGKVKQLKDAAEKLAGDTEAKIRRITDLERKIQDLNLSRQAKADQLRILEDQVVAIKNEIVEQEKKYARCYS

SEQ ID NO: 172108 - DNA, 5285 bp, Artificial Sequence
  derived and/or modified sequence
atgcaatttcagctcaccctgttcttgcaccttggctggcttagttattcgaaagcccaggatgattgtaatcggggagcctgccatccaacaactggcgaccttttagtaggtcgcaatacccagctgatggcctctagcacgtgtgggctttctagagctcagaagtactgcattctttcctatctggaaggggaacagaaatgcttcatttgtgatagtcggtttccctacgacccctacgaccagccgaattcgcacaccatagaaaacgtgatcgtgagcttcgagccggacagagaaaagaagtggtggcagtcagagaatggtctagaccacgtcagcattcgcctggacctagaggctctctttagattttcacacctgatacttacattcaaaacttttcgtcccgctgccatgctcgtggagcgaagtactgattatgggcataactggaaggtttttaaatacttcgccaaggattgtgctacctccttccctaacattacaagtggccaggcccagggggtgggcgatatcgtttgtgatagtaaatattcagatatcgaaccttccacagggggagaagtggtgctcaaagtacttgacccatcttttgaaatcgagaacccatacagtccttatattcaggatctagtcacactgaccaacctgagaataaactttaccaagcttcatacccttggggacgcactcctgggcagaagacagaacgattccctggataagtactattacgcgttgtatgagatgatagttcgaggtagttgtttctgtaacggccacgcctcggaatgcagacccatgcagaaaatgcgcggagacgtgtttagccctcccggtatggtccacggtcaatgcgtgtgtcaacataatactgacggacctaattgcgaacgttgtaaggattttttccaggacgctccatggagacccgctgccgatctacaggacaacgcatgtagaagttgcagttgcaatagtcatagcagccggtgtcacttcgatatgacaacatacctggcaagtggaggccttagcggaggggtatgtgaggactgtcagcataacaccgaaggtcagcactgtgatcggtgcagacctctgttttaccgcgacccacttaaaacgataagcgacccatatgcgtgtattccatgcgaatgcgaccctgacggaactatatcggggggtatttgtgtgagccattccgatcctgcgttgggatctgtggcgggtcagtgtctctgtaaggagaacgtcgaaggggcaaagtgcgatcagtgcaaacccaaccactacggattatcggctacagacccactgggttgccagccttgcgattgtaatccattgggatcattaccttttctgacgtgcgatgtagacaccggacagtgcttatgcctgtcatacgttaccggcgcacactgtgaggaatgtaccgttggatattgggggctgggtaatcaccttcacggatgcagtccatgcgactgcgacatcggcggagcctatagcaatgtttgctctcccaaaaatggccagtgcgaatgcaggccacatgtgacagggaggtcgtgtagtgagccagcccctggatacttttttgcgccactcaatttctacttgtacgaggcagaggaggcaactaccttacaggggctggccccattgggctctgaaacatttgggcagtctcctgcagtgcacgtggtgctgggagagcccgtgcccggaaacccagtgacctggacaggaccaggattcgctcgcgtgcttcctggtgcaggcctccggtttgccgtgaataacatcccgtttccagtcgatttcacaatcgccatccactatgagacacagtctgcagcggattggacagtccagatagtggtgaatccaccagggggttctgaacactgcattcctaagacattacaatctaagcctcagtcattcgcactgcctgctgccactcgaatcatgttgttgccaacccccatttgtctcgaaccagacgtgcagtactctatcgatgtctacttctcacaacccttacagggtgaatcccacgcccactcccatgttttagttgattctttaggactgattcctcagatcaatagcctcgaaaacttctgctccaagcaggacctggatgagtaccaactccacaattgcgttgaaattgccagcgccatgggccctcaggtactgcccggtgcttgtgaacggctgataatctctatgtccgcgaaacttcacgatggggctgtggcttgcaaatgccatccccagggatctgtggggtcatcttgctcccgtctcggaggacagtgtcagtgcaagcccctggtcgtggggaggtgctgcgatcgctgttccaccggctcctatgatctcggacaccatggttgtcatccctgtcattgtcacccgcagggaagcaaggacacggtctgtgaccaggtcacgggacagtgtccttgccatggagaggtgagtggtcgtcgctgcgacagatgccttgccggatactttggcttcccaagctgccacccttgtccttgcaataggtttgcagagctgtgtgatcccgagaccggttcctgtttcaattgtggcggattcaccacgggccgaaactgtgagcggtgtatcgacgggtattacgggaatcccagcagcggccagccatgtcgcccttgcctgtgtcccgatgacccctcttccaatcaatactttgctcactcttgctaccagaatctctggtccagtgacgtgatttgcaattgcctgcagggatacaccggaactcagtgcggtgaatgttctactgggttctacggaaacccacgaatctccggagcaccgtgccaaccctgcgcttgcaacaataatatcgacgtgaccgacccagaaagctgttcccgcgtcaccggtgaatgcctgaggtgtctgcacaatacacagggagccaactgtcaattatgcaagcctggtcactatggcagcgctttgaaccagacctgtagaagatgttcttgtcacgcctcaggcgttagtcctatggaatgcccccctgggggtggcgcatgcctgtgtgacccggttactggagcgtgcccctgcttgcccaatgtaactgggctggcttgtgaccgatgcgccgacggctattggaatcttgtgccagggagaggctgtcagtcctgtgactgtgaccccaggaccagccagagtagccactgcgatcagctcaccggacagtgtccgtgcaagctcgggtacggcggtaaaaggtgcagcgaatgccaggagaattattacggagatccccctgggcgatgcattccttgtgattgcaatcgggctggcactcagaagccaatttgtgatcccgacactgggatgtgcagatgtcgggagggtgtgagtggtcagaggtgcgaccggtgtgccagggggcacagtcaggagttccctacatgccttcagtgtcacctttgctttgaccagtgggatcacaccatttctagcctcagcaaggcagtgcaaggtctgatgcgcttggccgcaaacatggaggacaaacgagagacactgcctgtttgcgaggccgattttaaagacttgagggggaacgtatctgaaattgagaggatccttaagcaccctgtgttcccttcggggaagtttcttaaggtgaaggactaccacgattctgtgaggcgacagatcatgcagttgaatgaacagttaaaggcagtgtacgaattccaggacctcaaggatacaattgagcgtgccaagaacgaagccgaccttctccttgaggatctgcaagaggagatcgaccttcagtcttccgtactcaatgcctcaatagctgactcctccgagaacatcaaaaaatactatcacatttcatcctcggccgagaaaaagatcaatgaaacatcttcgaccattaatacctcggcgaacacccgaaacgatctgttaactatactcgacaccctgaccagcaagggaaacctgagccttgaacgactgaagcagatcaagatccctgacatacagatacttaacgagaaagtgtgtggcgacccagggaacgtgccctgtgtgccactgccctgcggcggtgccctctgcacaggccgtaagggccatcggaaatgcaggggaccagggtgccacggtagcctgaccctatccaccaatgccctgcaaaaagctcaggaggctaagagcatcatccgaaatcttgacaagcaagtgaggggactcaaaaatcaaatcgaatccatatctgagcaagctgaggtgtcaaaaaacaatgccctgcaacttcgcgagaagctcgggaacattcgtaaccagtcagactccgaggaagagaatattaacctttttattaagaaggtgaaaaacttcctgctggaggaaaatgtgccgccagaggacatcgaaaaggtggctaacggcgtgctggacatccacctgcctattcccagtcagaacctgacggatgagctggtgaagatacagaaacatatgcaactgtgtgaagattatagaactgacgagaatcgccttaacgaagaagcagatggcgctcagaagcttttggtcaaggcaaaggctgccgaaaaggccgctaatattctcctcaacttggataagacattgaaccaactgcagcaggcccagattacccagggacgggctaattccacaatcacccagctcaccgctaatatcacgaagatcaagaagaatgtcctccaggccgaaaaccagacacgtgaaatgaagtccgagcttgagctcgcgaaacagcgtagcggcctggaagacggactgtcgctgctgcagacgaagttgcaaaggcaccaggaccacgctgtcaacgctaaggtacaggcagagagtgctcagcaccaggcaggctcacttgagaaggaattcgttgaactgaaaaaacagtatgctatcctgcagcggaagacatccacaaccgggctgacaaaagagaccctgggaaaggtgaagcagctcaaagacgctgccgagaaattggcgggagataccgaagcgaagatacgcagaattaccgacctggagcgcaagatccaggacctcaatctctcccgccaggcgaaggcggaccagctacgcatcctcgaagaccaagtggtcgccataaaaaatgaaatcgttgaacaggagaaaaagtatgccagatgctactcgta

SEQ ID NO: 172109 - DNA, 5286 bp, Artificial Sequence
  derived and/or modified sequence
atgcagttccaacttacgttgtttcttcacttgggttggctgagctacagcaaagctcaggatgattgcaatagaggcgcgtgccaccctacgaccggggacctgttagtgggccggaacacgcagctgatggcttcctcaacatgtggactcagcagggctcagaaatactgcatactctcatacttagaaggtgaacagaagtgcttcatttgcgatagcagatttccatatgacccatacgatcaaccaaactctcatactatcgagaatgtaattgtgtcctttgagcccgacagggaaaagaagtggtggcagtcggagaacggtctggatcacgtttctattaggctggacctcgaagcactgttccgcttttctcacctgatcctgactttcaagacctttaggcctgcagctatgctcgtggagaggtctactgactacggacacaactggaaggtttttaaatatttcgctaaggactgcgccacatcgttcccaaacattacttccgggcaggcccagggcgtgggtgatatcgtctgcgattcaaagtattccgacatcgagccctctaccggaggtgaagtcgtgcttaaagttctagatccctcttttgagatcgagaacccatatagtccgtacatccaagacttagtgactttgacaaatctcagaatcaacttcacaaaacttcacactctcggggacgctctacttgggcgcaggcagaacgactccctagacaagtactattacgctctgtacgaaatgatcgtccgcggttcgtgcttctgtaacggccatgcctcagaatgccgaccaatgcaaaaaatgaggggcgatgtgtttagccctcccgggatggtacacggccagtgtgtgtgccagcacaataccgatggtccaaactgcgagcggtgtaaagatttcttccaggacgcgccatggcggcctgccgccgacttgcaggacaacgcctgtcgatcctgttcctgtaattcccattcatccagatgtcatttcgatatgaccacttacctggcttcaggcggactttccggaggcgtgtgcgaagattgtcagcacaacacagaaggccagcactgtgaccgctgccggcctctcttctaccgggaccctttgaagaccatcagcgacccttatgcctgtattccatgcgagtgcgacccggatggtactatttcaggtgggatttgtgtttctcatagcgaccctgcattaggatctgtggcaggccagtgtctgtgtaaggaaaatgttgaaggggcaaagtgcgatcagtgtaagcccaaccactacggcctgagcgcaaccgaccccctgggctgccagccttgtgactgtaaccccctgggatctctgcctttcctgacctgcgatgtcgacacaggacaatgcctatgtttatcatacgttacaggtgctcactgtgaagaatgtaccgtcggctactggggactgggcaaccaccttcatggttgttcgccctgcgactgtgacataggcggcgcgtacagtaatgtgtgctctcccaaaaacgggcagtgcgagtgtaggccacacgtcacaggaaggagttgctccgaacccgccccaggttatttcttcgcaccactcaacttttatctctacgaggcagaggaggccactactcttcaaggactggcacccttagggagcgaaacattcggccagtctcccgctgtacatgttgtcttgggggaacccgtacctgggaacccagtgacatggactggccccggttttgccagggtgttgcctggcgctggactgcggttcgccgtgaacaacatccctttccctgtagattttaccatagctattcactacgagacacagtctgcggctgactggactgtccagatcgttgtgaatccaccaggaggctccgagcactgcataccaaaaaccctccagtcaaaaccccaatcattcgcattgcccgctgccaccagaataatgctacttcccacacccatttgtctggaaccagatgtacagtactctatagacgtttacttttcccagcctctacaaggtgagagccacgctcattcccacgtgcttgtggactctctaggactcattccacagattaacagtctcgaaaacttctgctcaaagcaagacctggacgaatatcagctgcacaattgcgtggagatcgcatccgcgatgggccctcaggtgctacccggggcttgtgaaaggcttatcatcagtatgtctgcgaaactgcacgatggggccgtggcctgtaaatgccatccccaaggctcagtggggagtagctgtagcagactgggtggccagtgccagtgcaagcctctggttgtcggacggtgttgcgaccgctgctcaaccggaagctatgatctaggccatcacggctgtcacccttgtcactgccacccccagggttccaaggatacggtctgtgatcaggttactgggcagtgtccttgtcacggcgaagtgtctggacggagatgtgacagatgcctggcgggatactttggctttccttcatgccacccatgcccctgtaatcggttcgcagagctgtgcgatcccgagacaggttcatgctttaattgtggagggtttacaacaggccgcaattgcgagcgctgcattgacggatactatggcaatccttcctctggtcaaccctgtcgaccctgcctgtgcccagatgacccctcgtccaaccagtattttgctcacagttgttaccagaatctgtggtccagtgatgttatttgcaattgcctgcagggctacactggaactcagtgtggcgaatgctcaaccgggttttatggcaaccccagaatctcaggcgccccatgccaaccctgcgcctgcaacaacaacatcgatgttacagaccctgagtcttgtagtagggtgacaggtgaatgtctcaggtgtctgcacaacactcagggggccaattgccaactgtgtaaaccgggacactatgggtccgctctgaaccagacttgccggagatgctcttgccacgcatctggagtcagcccgatggagtgccctcctggcggaggagcttgtctatgtgatcctgtgactggggcgtgcccctgtctccctaacgtgaccgggttagcctgcgatcggtgcgccgacggatactggaacctagttccgggccggggatgccaatcgtgtgattgcgaccccagaacaagccaatcatcccattgcgatcagttaacaggtcaatgcccatgtaagctgggatatggcggcaaaaggtgctcggagtgccaggaaaattactacggcgaccctcccggccggtgcattccctgcgattgcaacagggccgggacccaaaaacccatttgcgaccccgataccggcatgtgtcggtgtagagagggtgtttccggccagagatgtgatcgttgcgcccgtggccattcccaggagttccctacttgcttgcagtgccacttatgctttgaccagtgggatcacaccatttcgagcctctccaaggcggttcaagggctgatgcggctggctgccaatatggaggacaagagggaaacactgccagtgtgtgaagcagacttcaaggacctacggggtaacgtgtccgagatcgaacgaatcctgaagcacccagtgttcccctccggcaaattcttgaaggtaaaggactatcacgattcggttcgccgccagatcatgcagctgaacgagcagcttaaggccgtctacgaattccaagacctgaaagataccatcgagagggccaagaatgaggcagacctgttactagaagatctgcaggaagagatcgacttgcagtcctcggttcttaacgcctctatcgctgacagctctgaaaatatcaaaaaatactaccatatttcctcttcagccgagaagaaaattaacgagacttccagtaccattaacacttcagccaacacacggaacgacctcctaactatcctcgacaccctgactagtaaaggcaatctaagcttggagcggttgaaacagatcaaaatacctgacattcagatcctcaacgaaaaagtctgtggggatcccggtaacgtgccgtgcgtgcctctgccgtgcgggggggcgctctgtacggggcgcaaagggcacaggaaatgcaggggacccgggtgccacggcagtttgacgctgtctacgaatgccctgcagaaagcccaggaggcaaaaagtattatccgtaatctggacaagcaggtacggggactcaaaaaccaaatcgaaagcatttcggagcaggctgaggtgtctaaaaataacgccctccaattgcgagagaaactcgggaacataagaaaccaatcagactcagaagaagaaaacattaacctgttcattaagaaagtcaaaaatttcctgctggaggaaaatgtcccaccagaagatattgagaaagtggcgaacggcgtgctcgacattcacctgccgatcccaagtcaaaacctgacagacgagctggtgaaaattcagaagcatatgcagctctgtgaggactaccggacagacgagaaccgcttgaatgaggaagccgatggggctcagaagctgctggtcaaggctaaggctgccgagaaagctgccaacattttactcaatctagataagactctcaaccagttgcaacaagctcagattacacagggtcgggccaattctaccatcacacagctgaccgcaaacatcacaaaaatcaagaagaatgttttgcaggctgagaatcagacacgcgagatgaagagtgagctggaactcgcaaaacagcgttcaggcctcgaagacggccttagcttgttgcagacaaaactccagcggcatcaggaccacgccgtcaacgctaaagtgcaggccgaatccgctcagcatcaggcgggttctctcgaaaaagaattcgtcgaactgaaaaagcagtacgctatcctccaacgcaaaacatcaactaccggactcaccaaggagacattaggaaaggttaaacagctgaaggacgcagctgaaaagcttgctggcgacaccgaggcgaagatcagaaggatcactgatctggagcgcaagatccaagaccttaacctgtcacgacaggcaaaggctgaccagctgcggatattagaggatcaggttgtcgctattaaaaatgaaattgtggaacaggagaagaagtatgcccgctgctactcttag

SEQ ID NO: 172110 - DNA, 5286 bp, Artificial Sequence
  derived and/or modified sequence
atgcaatttcagcttacccttttcctccacctgggatggttatcctattcaaaagcccaagatgactgtaatcggggcgcctgtcacccaacaaccggtgatcttctagtcggcagaaatacccaactcatggcctccagcacctgtggactttcacgcgcgcagaagtattgcatcctcagctatctggaaggggagcagaagtgcttcatttgcgatagtagattcccttacgacccttatgaccagcctaactctcacactatagagaacgtcattgtgtcgttcgaaccggaccgcgaaaagaagtggtggcaatccgaaaacggtctggaccacgtcagcattagactcgatctcgaagccctctttagattctctcacttaatccttactttcaagacatttcgtccggcagccatgctagtcgagaggagcacagattacggccataactggaaagtttttaagtactttgccaaggactgcgctaccagtttcccaaatatcacatcaggtcaagctcagggggtgggggacatagtctgcgatagcaagtattcagatattgagcccagcacaggaggtgaagtcgtattaaaagttcttgacccaagtttcgagatcgaaaatccttactcaccttacattcaagatcttgtgacccttacaaacctcagaataaatttcacaaagctgcacactttgggggacgccttactcggaaggagacagaacgactctctagataaatactactatgccttatacgagatgatagtcagaggttcctgtttttgcaacgggcacgccagcgagtgtaggcccatgcagaaaatgcgaggggatgtgttctcacctccaggtatggttcatgggcagtgcgtgtgccagcacaatacggatggcccaaactgtgagagatgcaaggactttttccaggacgccccgtggagacccgccgcagacctccaggacaatgcgtgccgttcctgcagctgcaattcccactcgagcagatgccactttgatatgactacctacctggcttctggtggcttaagtggaggagtatgcgaggattgccagcataacactgaaggacagcattgcgaccggtgtagacctctgttctatcgagaccctctaaagactataagtgacccttatgcctgcattccctgcgagtgtgacccagacggtactatttcaggtgggatttgtgtttctcatagcgaccctgcattaggatctgtggcaggccagtgtctgtgtaaggaaaatgttgaaggggcaaagtgcgatcagtgtaagcccaaccactacggcctgagcgcaaccgaccccctgggctgccagccttgtgactgtaaccccctgggatctctgcctttcctgacctgcgatgtcgacacaggacaatgcctatgtttatcatacgttacaggtgctcactgtgaagaatgtaccgtcggctactggggactgggcaaccaccttcatggttgttcgccctgcgactgtgacataggcggcgcgtacagtaatgtgtgctctcccaaaaacgggcagtgcgagtgtaggccacacgtcacaggaaggagttgctccgaacccgccccaggttatttcttcgcaccactcaacttttatctctacgaggcagaggaggccactactcttcaaggactggcacccttagggagcgaaacattcggccagtctcccgctgtacatgttgtcttgggggaacccgtacctgggaacccagtgacatggactggccccggttttgccagggtgctgcctggggctgggttgcgttttgccgtaaacaacattccattccctgtcgactttactattgccatccactatgaaactcaatccgccgctgattggactgttcagatcgtagttaacccacctggtggttctgaacactgtataccaaagaccctgcagtcgaaaccgcaatcatttgccctgcctgccgcgaccagaataatgttgctgcccacacccatctgtcttgagcctgacgttcagtactctattgatgtatatttttcccagcccctgcagggcgagtcacacgcccactctcacgttctggtggactccttgggactaattccacagattaattcgctcgagaatttttgttcaaaacaggacctagacgagtaccagctccacaactgtgtggaaattgcatcagctatgggaccccaggtactgccgggtgcctgcgaaagactgataataagcatgagtgctaaactgcacgatggagcagtagcttgtaaatgccaccctcagggatccgtcggttcgtcatgcagccggctcggtggacagtgccagtgtaagcccttagtcgtgggcagatgttgtgatcgttgttccacagggagttacgatttaggtcatcacggatgtcacccctgtcattgtcaccctcagggctccaaagatactgtttgcgatcaagttaccggacagtgcccttgccatggcgaggtgtccggcagacgctgtgataggtgcttggcaggatattttgggtttcctagctgccatccatgtccatgtaacagatttgcagagctgtgcgacccagagaccggctcatgcttcaactgtggcggcttcactacaggcagaaactgcgaaagatgtatagatggttattacggcaatccctcatctggccagccctgcagaccatgcctgtgtcctgacgacccctctagcaaccaatactttgcccactcatgctatcaaaatttgtggtcaagtgatgttatttgcaactgccttcaaggctacacaggtacccagtgcggcgaatgctcaacggggttttacggaaaccccaggatttccggcgccccatgtcagccatgtgcctgtaacaataatatagatgtgacagaccctgaaagttgttctcgagtgaccggagaatgtttgcggtgcctccacaatacacaaggtgcgaactgccaactatgcaagcctggccattatgggtcagcgttaaaccaaacatgtaggcgctgttcatgccacgccagcggtgtatctcccatggaatgtccacccggcggcggagcttgcctgtgcgaccctgtgaccggcgcgtgtccatgtttgccaaacgtgactggattagcctgcgatagatgcgctgatggatattggaatctcgtacctgggcgtggatgtcaaagctgcgactgtgaccctagaaccagtcaatccagtcattgcgatcagttaacgggtcagtgcccttgcaaattgggctacggaggtaaaagatgttcggagtgtcaggagaattactacggtgatcccccgggaagatgtatcccctgtgactgcaaccgagctggcacacagaaacctatatgcgaccccgacaccggcatgtgcagatgcagggaaggtgtgtctgggcagagatgcgaccgttgtgctaggggacactctcaggaatttcccacttgcttacaatgccatttgtgcttcgatcagtgggatcataccatctcctccttgagtaaagccgtgcagggcctgatgagacttgccgccaacatggaggataagagagagacattgcccgtctgcgaagccgatttcaaggacctccggggcaacgtgagcgagatcgagcgaatcctaaaacaccctgtgtttccatccggcaaatttctgaaagtcaaagattatcatgactcagtgcgcaggcaaatcatgcaacttaatgaacaactcaaggctgtctacgagttccaggacctcaaggatacaatcgaacgtgccaaaaacgaggcggatttattattagaggacctgcaagaggagatcgatttgcagtcatcagtcctgaatgcttctatagctgactcctccgaaaacataaagaaatactaccatatttcaagtagcgccgagaagaagataaatgaaactagcagtaccattaatacaagcgcaaatacacggaatgacttactaaccatcctggataccctaaccagcaagggcaatctgtcacttgaacgcctcaaacaaatcaagattcctgatatccaaattctcaatgaaaaagtctgtggagacccgggtaatgtgccatgcgtccctttgccctgcggaggggcactctgcaccggaagaaagggccatcgcaagtgtagagggccgggctgtcacgggtcactgaccctctctactaatgctctccaaaaagcccaggaggctaaatccatcatacgcaacctggataagcaagtgaggggattaaagaatcagattgagtccatcagtgaacaggctgaagtgtctaaaaataatgctctacagctcagagagaaattgggaaatatacgaaaccaaagtgatagcgaagaagaaaatatcaatttattcatcaaaaaagtaaagaatttccttctggaagagaatgttccacccgaggatatcgaaaaagttgcaaatggggtactggacattcacctccctatccctagtcaaaacctgacggacgagctagttaaaatccagaagcacatgcaactctgtgaagactaccgcaccgacgaaaaccgcctgaatgaggaagcagatggtgcccagaaattgctcgttaaagccaaagcagccgagaaagcagcgaatattttactgaatctggacaaaaccctaaatcaacttcaacaggctcagataactcagggaagagccaattccactatcacacagcttacagcaaacatcactaagattaagaagaacgtgctgcaggccgaaaatcagactcgagaaatgaaatccgaactggaacttgcaaaacaaaggagtgggctcgaggatgggttgtcactgctccaaaccaaacttcagagacaccaagaccatgccgtgaatgcaaaggtgcaggccgaaagcgcgcagcaccaagctggaagtctggaaaaggaattcgtggaactcaagaaacaatatgccatcctgcagagaaaaacatcgaccaccggactcaccaaagaaactttagggaaggtgaagcagctaaaagacgcggcagagaaactagccggagatacggaagcgaagatcagaagaatcacagacctcgaaagaaagatacaggaccttaatctgagccgacaagctaaagccgaccagctccgaattctggaagaccaagttgtggctattaaaaacgaaatcgtagagcaggagaagaaatacgcccgctgttactcctag

SEQ ID NO: 172111 - DNA, 5857 bp, Artificial Sequence
  derived and/or modified sequence
acatgccccgtttgctgcctgaacctctccacaaagactcccagatcctgaattgaatttaatcatctcctgacaaaagaatgcaatttcaactgaccctttttttgcaccttgggtggctcagttactcaaaagctcaagatgactgcaacaggggtgcctgtcatcccaccactggtgatctcctggtgggcaggaacacgcagcttatggcttcttctacctgtgggctgagcagagcccagaaatactgcatcctcagttacctggagggggaacaaaaatgcttcatctgtgactctagatttccatatgatccgtatgaccaacccaacagccacaccattgagaatgtcattgtaagttttgaaccagacagagaaaagaaatggtggcaatctgaaaatggtcttgatcatgtcagcatcagactggacttagaggcattatttcggttcagccaccttatcctgacctttaagacttttcggcctgctgcaatgttagttgaacgttccacagactatggacacaactggaaagtgttcaaatattttgcaaaagactgtgccacttcctttcctaacatcacatctggccaggcccagggagtgggagacattgtttgtgactccaaatactcggatattgaaccctcaacaggtggagaggttgttttaaaagttttggatcccagttttgaaattgaaaacccttatagcccctacatccaagaccttgtgacattgacaaacctgaggataaactttaccaagctccacacccttggggatgctttgcttggaaggaggcaaaatgattcccttgataaatactactatgctctgtacgagatgattgttcggggaagctgcttttgcaatggccatgctagcgaatgtcgccctatgcagaagatgcggggagatgttttcagccctcctggaatggttcacggtcagtgtgtgtgtcagcacaatacagatggtccgaactgtgagagatgcaaggacttcttccaggatgctccttggaggccagctgcagacctccaggacaacgcttgcagatcgtgcagctgtaatagccactccagccgctgtcactttgacatgactacgtacctggcaagcggtggcctcagcgggggcgtgtgtgaagactgccagcacaacactgaggggcagcactgcgaccgctgcagacccctcttctacagggacccgctcaagaccatctcagatccctacgcgtgcattccttgtgaatgtgaccccgatgggaccatatctggtggcatttgtgtgagccactctgatcctgccttagggtctgtggccggccagtgcctttgtaaagagaacgtggaaggagccaaatgcgaccagtgcaaacccaaccactacggactaagcgccaccgaccccctgggctgccagccctgcgactgtaacccccttgggagtctgccattcttgacctgtgatgtggatacaggccaatgcttgtgcctgtcatatgtcaccggagcacactgcgaagaatgcactgttggatactggggcctgggaaatcatctccatgggtgttctccctgtgactgtgatattggaggtgcttattctaacgtgtgctcacccaagaatgggcagtgtgaatgccgcccacatgtcactggccgtagctgctctgaaccagcccctggctacttctttgctcctttgaatttctatctctacgaggcagaggaagccacaacactccaaggactggcgcctttgggctcggagacgtttggccagagtcctgctgttcacgttgttttaggagagccagttcctgggaaccctgttacatggactggacctggatttgccagggttctccctggggctggcttgagatttgctgtcaacaacattccctttcctgtggacttcaccattgccattcactatgaaacccagtctgcagctgactggactgtccagattgtggtgaacccccctggagggagtgagcactgcatacccaagactctacagtcaaagcctcagtcttttgccttaccagcggctacgagaatcatgctgcttcccacacccatctgtttagaaccagatgtacaatattccatagatgtctatttttctcagcctttgcaaggagagtcccacgctcattcacatgtcctggtggactctcttggccttattccccaaatcaattcattggagaatttctgcagcaagcaggacttagatgagtatcagcttcacaactgtgttgaaattgcctcagcaatgggacctcaagtgctcccgggtgcctgtgaaaggctgatcatcagcatgtctgccaagctgcatgatggggctgtggcctgcaagtgtcacccccagggctcagtcggatccagctgcagccgacttggaggccagtgccagtgtaaacctcttgtggtcgggcgctgctgtgacaggtgctcaactggaagctatgatttggggcatcacggctgtcacccatgtcactgccatcctcaaggatcaaaggacactgtatgtgaccaagtaacaggacagtgcccctgccatggagaggtgtctggccgccgctgtgatcgctgcctggcaggctactttggatttcccagctgccacccttgcccttgtaataggtttgctgaactttgtgatcctgagacagggtcatgcttcaattgtggaggctttacaactggcagaaactgtgaaaggtgtattgatggttactatggaaatccttcttcaggacagccctgtcgtccttgcctgtgtccagatgatccctcaagcaatcagtattttgcccattcctgttatcagaatctgtggagctcagatgtaatctgcaattgtcttcaaggttatacgggtactcagtgtggagaatgctctactggtttctatggaaatccaagaatttcaggagcaccttgccaaccatgtgcctgcaacaacaacatagatgtaaccgatccagagtcctgcagccgggtaacaggggagtgccttcgatgtttgcacaacactcagggcgcaaactgccagctctgcaaaccaggtcactatggatcagccctcaatcagacctgcagaagatgctcctgccatgcttccggcgtgagtcccatggagtgtccccctggtgggggagcttgcctctgtgaccctgtcactggtgcatgtccttgtctgccgaatgtcacaggcctggcctgtgaccgttgtgctgatggatactggaatctggtccctggcagaggatgtcagtcatgtgactgtgaccctaggacctctcaaagtagccactgtgaccagcttacaggccagtgtccgtgtaaattaggttacggcgggaaacgttgcagtgagtgccaggaaaattattatggtgatccacctgggcgatgcattccatgtgattgtaacagggcaggtacccagaagcccatctgtgatccagacacaggcatgtgccgctgccgggagggtgtcagcggccagagatgtgatcgctgtgcccggggacacagccaggaattccctacttgtcttcaatgtcacttgtgctttgatcagtgggaccacaccatttcttccctctccaaagcggtgcaagggttaatgagactggctgctaacatggaagataaaagagagaccctgcctgtctgtgaggcagacttcaaagacctcagagggaacgtgtctgaaatagaaaggattttgaaacatcctgttttcccatctgggaaattcttaaaagtcaaggattatcatgactctgttagaagacaaatcatgcagctaaatgaacaactgaaagcagtgtatgaatttcaagatctgaaagatacaatagaaagagcaaagaatgaagcagacctcttacttgaagaccttcaggaagaaattgatttgcaatccagtgtccttaatgcaagcattgcggactcctcagaaaacatcaagaaatattatcacatatcatcatctgctgaaaagaaaattaatgaaactagttccaccattaatacctctgcaaatacaaggaatgacttacttaccatcttagatacactaacctcaaaaggaaacttgtcattggaaagattaaagcagattaagataccagatatccaaatattgaatgaaaaggtgtgcggagatccaggaaatgtgccatgtgtgcccttgccctgtggcggtgctctctgcacgggccggaaggggcacaggaagtgtaggggtcccggctgtcacggctccctgaccctctcaacgaatgccctccaaaaagcccaggaagcaaaatccattattcgtaatttggacaaacaggttcgtgggttgaaaaatcagatcgaaagtataagtgaacaggcagaagtctccaaaaacaatgccttacagctgagggaaaaactgggaaatataagaaaccaaagtgactctgaagaagaaaacatcaatcttttcatcaaaaaagtgaaaaactttttgttagaggaaaacgtgcctccagaagacatcgagaaggttgcgaatggtgtgcttgacattcacctaccaattccatcccaaaatctaaccgatgaacttgtcaaaatacagaaacatatgcaactctgtgaggattacaggacagatgaaaacaggttaaatgaagaagcagatggagcccaaaagcttttggtgaaggccaaagcagctgagaaagcagcaaatattctattaaatcttgacaaaacattgaaccagttacaacaagctcaaatcactcaaggacgggcaaactctaccattacacagctgactgccaatataacaaaaataaaaaagaatgtgctgcaggctgaaaatcaaaccagggaaatgaagagtgagctggagttagcaaagcagcgatcagggctggaggatggactttccctgctgcagaccaagttgcaaaggcatcaagaccacgctgtcaatgcgaaagttcaggctgaatctgcccaacaccaggctgggagtcttgagaaggaatttgttgagctgaaaaaacaatatgctattctccaacgtaagacaagcactacaggactaacaaaggagacattaggaaaagttaaacagctaaaagatgcggcagaaaaattggctggagatacagaggccaagataagaagaataacagatttagaaaggaaaatccaagatttgaatctaagtagacaagcaaaagctgatcaactgagaatattggaagatcaagttgttgccattaaaaatgaaattgttgaacaagaaaaaaaatatgctaggtgctatagctaggcagagttaaagagcaaaagcttgtgcctttgtttctggtttctgatgtacaagcccctggggctctgttgaacctgtgaaatactgacaatgtcttctaccttccttccccacaccctgtccttattagacacctgctcagtgtggctggaggttgaaatgccaccaggaaaatgccacttcataattgaaaggggaaagtaatgaaattgtctctggtttcagaaacttttcctcttaccttcctttctctttcctaacttaaaaataacagtttccatataacaagtagaaatttaagtaagtactctactaactaataatcatttcagtcagataaacctaaacattaaataaatatctccaatattaggatggaatacatatgtatggcatgtactagattgtcctatattttatgtttatttggatttgcttttatttgtaaaattattcttttctgaataaactgcatacaattcaaaatgcaa

SEQ ID NO: 172112 - DNA, 5286 bp, Artificial Sequence
  derived and/or modified sequence
atgcagttccagctgaccctgttcctgcacctgggctggctgagctacagcaaggcccaggacgactgcaacagaggcgcctgccaccccaccaccggcgacctgctggtgggcagaaacacccagctgatggccagcagcacctgcggcctgagcagagcccagaagtactgcatcctgagctacctggagggcgagcagaagtgcttcatctgcgacagcagattcccctacgacccctacgaccagcccaacagccacaccatcgagaacgtgatcgtgagcttcgagcccgacagagagaagaagtggtggcagagcgagaacggcctggaccacgtgagcatcagactggacctggaggccctgttcagattcagccacctgatcctgaccttcaagaccttcagacccgccgccatgctggtggagagaagcaccgactacggccacaactggaaggtgttcaagtacttcgccaaggactgcgccaccagcttccccaacatcaccagcggccaggcccagggcgtgggcgacatcgtgtgcgacagcaagtacagcgacatcgagcccagcaccggcggcgaggtggtgctgaaggtgctggaccccagcttcgagatcgagaacccctacagcccctacatccaggacctggtgaccctgaccaacctgagaatcaacttcaccaagctgcacaccctgggcgacgccctgctgggcagaagacagaacgacagcctggacaagtactactacgccctgtacgagatgatcgtgagaggcagctgcttctgcaacggccacgccagcgagtgcagacccatgcagaagatgagaggcgacgtgttcagcccccccggcatggtgcacggccagtgcgtgtgccagcacaacaccgacggccccaactgcgagagatgcaaggacttcttccaggacgccccctggagacccgccgccgacctgcaggacaacgcctgcagaagctgcagctgcaacagccacagcagcagatgccacttcgacatgaccacctacctggccagcggcggcctgagcggcggcgtgtgcgaggactgccagcacaacaccgagggccagcactgcgacagatgcagacccctgttctacagagaccccctgaagaccatcagcgacccctacgcctgcatcccctgcgagtgcgaccccgacggcaccatcagcggcggcatctgcgtgagccacagcgaccccgccctgggcagcgtggccggccagtgcctgtgcaaggagaacgtggagggcgccaagtgcgaccagtgcaagcccaaccactacggcctgagcgccaccgaccccctgggctgccagccctgcgactgcaaccccctgggcagcctgcccttcctgacctgcgacgtggacaccggccagtgcctgtgcctgagctacgtgaccggcgcccactgcgaggagtgcaccgtgggctactggggcctgggcaaccacctgcacggctgcagcccctgcgactgcgacatcggcggcgcctacagcaacgtgtgcagccccaagaacggccagtgcgagtgcagaccccacgtgaccggcagaagctgcagcgagcccgcccccggctacttcttcgcccccctgaacttctacctgtacgaggccgaggaggccaccaccctgcagggcctggcccccctgggcagcgagaccttcggccagagccccgccgtgcacgtggtgctgggcgagcccgtgcccggcaaccccgtgacctggaccggccccggcttcgccagagtgctgcccggcgccggcctgagattcgccgtgaacaacatccccttccccgtggacttcaccatcgccatccactacgagacccagagcgccgccgactggaccgtgcagatcgtggtgaacccccccggcggcagcgagcactgcatccccaagaccctgcagagcaagccccagagcttcgccctgcccgccgccaccagaatcatgctgctgcccacccccatctgcctggagcccgacgtgcagtacagcatcgacgtgtacttcagccagcccctgcagggcgagagccacgcccacagccacgtgctggtggacagcctgggcctgatcccccagatcaacagcctggagaacttctgcagcaagcaggacctggacgagtaccagctgcacaactgcgtggagatcgccagcgccatgggcccccaggtgctgcccggcgcctgcgagagactgatcatcagcatgagcgccaagctgcacgacggcgccgtggcctgcaagtgccacccccagggcagcgtgggcagcagctgcagcagactgggcggccagtgccagtgcaagcccctggtggtgggcagatgctgcgacagatgcagcaccggcagctacgacctgggccaccacggctgccacccctgccactgccacccccagggcagcaaggacaccgtgtgcgaccaggtgaccggccagtgcccctgccacggcgaggtgagcggcagaagatgcgacagatgcctggccggctacttcggcttccccagctgccacccctgcccctgcaacagattcgccgagctgtgcgaccccgagaccggcagctgcttcaactgcggcggcttcaccaccggcagaaactgcgagagatgcatcgacggctactacggcaaccccagcagcggccagccctgcagaccctgcctgtgccccgacgaccccagcagcaaccagtacttcgcccacagctgctaccagaacctgtggagcagcgacgtgatctgcaactgcctgcagggctacaccggcacccagtgcggcgagtgcagcaccggcttctacggcaaccccagaatcagcggcgccccctgccagccctgcgcctgcaacaacaacatcgacgtgaccgaccccgagagctgcagcagagtgaccggcgagtgcctgagatgcctgcacaacacccagggcgccaactgccagctgtgcaagcccggccactacggcagcgccctgaaccagacctgcagaagatgcagctgccacgccagcggcgtgagccccatggagtgcccccccggcggcggcgcctgcctgtgcgaccccgtgaccggcgcctgcccctgcctgcccaacgtgaccggcctggcctgcgacagatgcgccgacggctactggaacctggtgcccggcagaggctgccagagctgcgactgcgaccccagaaccagccagagcagccactgcgaccagctgaccggccagtgcccctgcaagctgggctacggcggcaagagatgcagcgagtgccaggagaactactacggcgacccccccggcagatgcatcccctgcgactgcaacagagccggcacccagaagcccatctgcgaccccgacaccggcatgtgcagatgcagagagggcgtgagcggccagagatgcgacagatgcgccagaggccacagccaggagttccccacctgcctgcagtgccacctgtgcttcgaccagtgggaccacaccatcagcagcctgagcaaggccgtgcagggcctgatgagactggccgccaacatggaggacaagagagagaccctgcccgtgtgcgaggccgacttcaaggacctgagaggcaacgtgagcgagatcgagagaatcctgaagcaccccgtgttccccagcggcaagttcctgaaggtgaaggactaccacgacagcgtgagaagacagatcatgcagctgaacgagcagctgaaggccgtgtacgagttccaggacctgaaggacaccatcgagagagccaagaacgaggccgacctgctgctggaggacctgcaggaggagatcgacctgcagagcagcgtgctgaacgccagcatcgccgacagcagcgagaacatcaagaagtactaccacatcagcagcagcgccgagaagaagatcaacgagaccagcagcaccatcaacaccagcgccaacaccagaaacgacctgctgaccatcctggacaccctgaccagcaagggcaacctgagcctggagagactgaagcagatcaagatccccgacatccagatcctgaacgagaaggtgtgcggcgaccccggcaacgtgccctgcgtgcccctgccctgcggcggcgccctgtgcaccggcagaaagggccacagaaagtgcagaggccccggctgccacggcagcctgaccctgagcaccaacgccctgcagaaggcccaggaggccaagagcatcatcagaaacctggacaagcaggtgagaggcctgaagaaccagatcgagagcatcagcgagcaggccgaggtgagcaagaacaacgccctgcagctgagagagaagctgggcaacatcagaaaccagagcgacagcgaggaggagaacatcaacctgttcatcaagaaggtgaagaacttcctgctggaggagaacgtgccccccgaggacatcgagaaggtggccaacggcgtgctggacatccacctgcccatccccagccagaacctgaccgacgagctggtgaagatccagaagcacatgcagctgtgcgaggactacagaaccgacgagaacagactgaacgaggaggccgacggcgcccagaagctgctggtgaaggccaaggccgccgagaaggccgccaacatcctgctgaacctggacaagaccctgaaccagctgcagcaggcccagatcacccagggcagagccaacagcaccatcacccagctgaccgccaacatcaccaagatcaagaagaacgtgctgcaggccgagaaccagaccagagagatgaagagcgagctggagctggccaagcagagaagcggcctggaggacggcctgagcctgctgcagaccaagctgcagagacaccaggaccacgccgtgaacgccaaggtgcaggccgagagcgcccagcaccaggccggcagcctggagaaggagttcgtggagctgaagaagcagtacgccatcctgcagagaaagaccagcaccaccggcctgaccaaggagaccctgggcaaggtgaagcagctgaaggacgccgccgagaagctggccggcgacaccgaggccaagatcagaagaatcaccgacctggagagaaagatccaggacctgaacctgagcagacaggccaaggccgaccagctgagaatcctggaggaccaggtggtggccatcaagaacgagatcgtggagcaggagaagaagtacgccagatgctacagctag

SEQ ID NO: 172113 - DNA, 5286 bp, Artificial Sequence
  derived and/or modified sequence
atgcagttccaactcacgctgttcttacacctgggatggctgagttactcaaaggctcaagacgactgcaatcgaggcgcgtgtcaccccaccacaggcgacttgctggtcggtcgcaacactcagcttatggcgagttccacgtgcgggctcagccgcgctcagaagtattgtatcctgtcgtacttggagggcgaacagaagtgctttatttgcgattcacgctttccctatgacccatacgaccagccgaatagccacactatcgagaatgtcatcgttagttttgaaccggatcgagagaaaaaatggtggcagtcagagaacggtctcgatcacgtgagcattcgtctggatctcgaggccctattccgcttctcacacttaatcctaacgttcaagacgttccgccccgcagcaatgctagtggaacgcagcacagattatggacataactggaaggtcttcaagtacttcgctaaggactgtgcaacatctttccctaacattacttccgggcaggcccagggcgttggagacatcgtctgcgactccaaatacagtgacattgaaccatccaccgggggagaggtcgtgctgaaggtcctcgatcctagctttgagattgagaatccatactctccttacatccaggatcttgtcactctcaccaacctgcgcatcaactttaccaaactccacacgttgggagacgcactgctaggtagacgacagaacgacagtctcgacaagtactactatgcactgtatgaaatgatcgtacgggggagctgcttctgtaacgggcacgcatcagagtgtcggccaatgcagaagatgaggggcgatgtgttctctccacctggcatggtacacggccagtgcgtctgccagcacaacactgacgggcccaactgtgagcgctgtaaagacttttttcaagatgcaccgtggcgccccgcggcagatctgcaggataacgcttgccggagttgttcatgcaactctcactcctcgcgatgtcatttcgacatgaccacctaccttgctagtggcggcttgtccggcggcgtgtgtgaggactgccagcataacactgaaggacagcactgcgatcgctgtcggcccctcttttaccgcgaccccctgaaaaccatctccgacccctatgcttgtattccctgcgaatgtgatcccgatggtactatatctgggggcatttgtgtgagtcatagcgatccagccttgggcagtgtagccgggcaatgcctctgtaaggagaatgtcgagggcgctaagtgcgatcaatgtaagccgaaccactacggcctgagcgccaccgatccacttgggtgtcaaccctgtgattgcaatccgctcggatctctgccattccttacctgcgacgtggacactggccagtgcttgtgtctcagttatgtcacaggagcccattgcgaagagtgcacagttggctactggggtcttggaaatcacctgcacggctgtagtccgtgtgactgtgatataggaggcgcgtattctaatgtctgttcgcccaagaatggccagtgtgagtgtcgccctcacgtcactgggcgctcttgctccgagcccgccccaggctattttttcgcccctctcaacttttacctatacgaggccgaggaagccacgacattgcaaggactcgcccccctagggtctgaaacctttggccagagtcctgcagttcacgtggtgttgggcgagccagtcccaggaaaccctgtgacatggaccggccctggcttcgctcgggtcctgccgggggcaggactccgatttgcggtaaataatatcccatttcccgtggacttcacaatcgccattcattatgagacacagtccgccgccgattggactgtgcagatcgtcgtgaacccaccaggcgggagcgagcattgcatacctaagaccttacagtccaagccccaatcctttgccttgcctgctgccaccagaatcatgctgctgcccactcctatatgcctggaacccgatgtgcagtattccattgacgtctacttttcccagcccctacagggggagagtcacgcacactcgcatgtgcttgtggactccctgggactgatcccccagattaactccttggaaaatttctgcagcaaacaagatctggatgagtaccaattacacaactgtgtggagatagcctcagctatgggcccacaggtactcccaggtgcctgcgaaaggctaattatttctatgagcgcaaaattgcatgacggagccgtggcctgcaagtgccacccacaaggctcggtaggctccagttgcagtcggctgggcggccagtgccagtgcaagcccctcgttgtcggccgctgttgtgaccggtgcagcaccggctcatatgatttgggccatcatggttgccatccttgtcactgtcatccacagggaagcaaagacacagtctgtgaccaggtgactggccagtgtccctgtcatggtgaagttagtggccggcggtgcgacaggtgcctcgctggatactttggatttcctagttgtcatccctgcccctgtaatcgctttgccgaactgtgcgacccggagactgggtcttgctttaactgcggtggttttacaacaggccggaattgcgaacgatgtatagatggctattatgggaatccgtctagtggacagccttgcaggccctgcctatgccctgatgatccatcttctaatcagtattttgcccattcttgctaccagaatctgtggagcagcgacgtgatctgcaattgcctccaaggctacaccggcacacagtgcggcgaatgttcgacaggcttctatggcaatccgaggatttcaggagcaccctgtcagccttgcgcttgtaacaataatatcgacgtgaccgaccccgagtcatgctcccgagtgactggcgagtgcctgcgctgtctgcataacacgcagggcgcaaattgtcaactgtgtaaacctggacactacggaagcgcgctgaaccagacttgccggagatgctcttgccacgcttccggcgtgagccccatggagtgtccaccgggcggaggcgcctgtctgtgtgacccagtgactggggcctgcccatgcctccctaatgtcacgggacttgcttgtgatagatgtgctgatggctactggaacctggttcccggtcgcggctgtcagtcttgcgactgcgaccctcgcacaagccagtcttcacactgcgatcagctcactggccaatgcccgtgcaagctcggctacggaggcaagaggtgttctgagtgtcaggagaactactatggagatcctcccggccgctgcatcccgtgtgactgtaaccgggccgggacccagaaaccaatatgcgacccggacacaggcatgtgtcgatgccgcgaaggtgtttccggccaacgttgtgatcggtgcgccaggggacacagtcaggaatttcccacatgccttcaatgccacttgtgcttcgaccagtgggaccacacaatcagttccctcagcaaagctgtgcaggggctgatgcgactggccgcaaacatggaagataagcgggagactctcccagtctgtgaggctgactttaaggacctgcgaggaaacgtgtcagaaattgagcgcatcctgaagcaccccgtgtttccctccgggaagtttctcaaggtaaaggactaccacgactcagtacgtcgccagatcatgcagctaaatgagcagttgaaggctgtgtacgagttccaggacctgaaggacaccatcgaaagagcgaagaacgaggcagacctcctgctggaggacctgcaggaggaaattgacctccagtcctctgtgttgaacgctagcattgctgattcaagcgagaacataaaaaagtattatcacatctcctcatctgctgaaaagaagattaacgagaccagctcgacgataaacacctccgccaacactagaaacgacctgctgaccatccttgacacccttacctccaagggcaacttaagcctggagcgcttgaaacaaataaagataccagacattcagattctgaatgagaaagtatgcggtgaccccggcaacgtgccctgcgtccctctgccatgcggcggagcattgtgtaccggccggaaaggccatcggaagtgcagaggaccgggttgtcacgggagcttgaccctgtcgaccaacgccctccaaaaagcacaggaagctaagtccattatcaggaacttagataagcaggtgcgcggtttgaagaatcaaatcgaaagtatttccgaacaggctgaggtaagcaagaacaatgccctgcagctccgtgaaaagctcgggaatattcgtaaccaaagcgactctgaggaggagaacatcaatctgttcataaaaaaggtaaagaactttctactcgaggagaatgtgccccctgaagatatagaaaaagtggcgaatggtgtcttggacatccatttgcccattccttcacagaaccttactgatgaactggtaaagatacagaaacacatgcagctatgcgaggactatagaaccgatgaaaaccggctcaacgaagaggccgacggggcccaaaagctcctggtaaaggctaaggctgctgagaaggccgctaatatcctactaaacctagacaagacgctgaatcagctgcagcaggcccagattacccagggtcgggccaatagtaccataacacaattaacagccaacatcactaaaattaagaagaatgtgttgcaggctgaaaatcaaaccagggagatgaagtccgagctggaactggcgaaacagcggtcaggattggaagacggtctgagcctgctacagaccaaacttcagcgccaccaggatcacgctgtgaacgccaaggtgcaggccgagtcagcacagcatcaggccggcagtctcgaaaaggaattcgtcgaactgaagaagcagtacgccattctgcaaaggaagacgtcaaccaccggtctcactaaggaaacgctcggaaaagttaagcagctgaaagacgccgcagagaagctagctggagacactgaggccaagataaggcgcataacagatcttgagagaaaaatccaggatctgaacctcagtcggcaggcaaaggccgatcagttgaggattttagaagatcaagtagtggccattaaaaacgagattgtggaacaggaaaagaaatacgctaggtgctattcttag

SEQ ID NO: 172114 - DNA, 5286 bp, Artificial Sequence
  derived and/or modified sequence
atgcagttccagctgaccctcttcctgcacctgggctggctgagctacagcaaggcccaggatgactgcaacagaggagcctgccaccccaccaccggggacctgctggtgggcaggaacacccagctgatggccagcagcacctgtggcctgagccgggcccagaagtactgcatcctgagctacctggagggggagcagaagtgcttcatctgtgacagccgcttcccctatgacccctatgaccagcccaacagccacaccattgaaaatgtgattgtgtcctttgagccagaccgggagaagaagtggtggcagagtgaaaatggcctggaccacgtgtccatccggctggacctggaggccctcttccgcttcagccacctgatcctgaccttcaagaccttccggcctgctgccatgctggtggagaggagcacagattatggccacaactggaaggtgttcaagtactttgccaaggactgtgccaccagcttccccaacatcaccagcggccaggcccagggcgtgggggacatcgtgtgtgacagcaagtacagcgacatcgagcccagcactggaggagaggtggtgctgaaggtgctggaccccagctttgaaattgagaacccctacagcccctacatccaggacctggtgaccctgaccaacctgcgcatcaacttcaccaagctgcacaccctgggagatgccctgctgggccggcggcagaatgacagcctggacaagtactactatgccctgtatgagatgattgtgcggggcagctgcttctgcaatggccacgcctctgaatgtcggcccatgcagaagatgagaggagatgtgttcagccccccaggcatggtgcacggccagtgtgtgtgccagcacaacacagatggccccaactgtgagcgctgcaaggacttcttccaggatgccccctggaggcctgctgctgacctgcaggacaatgcctgccgcagctgcagctgcaacagccacagcagccgctgccactttgacatgaccacctacctggccagcggcggcctgtctggaggagtgtgtgaggactgccagcacaacacagagggccagcactgtgaccgctgccggcccctcttctacagagaccccctgaagaccatcagtgacccctatgcctgcatcccctgtgaatgtgaccctgatggcaccatcagcggcggcatctgtgtgagccacagcgaccctgccctgggctctgtggccggccagtgcctgtgcaaggaaaatgtggagggcgccaagtgtgaccagtgcaagcccaaccactacggcctgagcgccacagaccccctgggctgccagccctgtgactgcaaccccctgggcagcctgcccttcctgacctgtgatgtggacaccggccagtgcctgtgcctgtcctatgtgactggagcccactgtgaggagtgcaccgtgggctactggggcctgggcaaccacctgcacggctgcagcccctgtgactgtgacatcggcggggcctacagcaatgtgtgcagccccaagaatggccagtgtgagtgccggccccacgtgacaggccgcagctgcagcgagcccgcccctggctacttctttgcccccctgaacttctacctgtatgaagctgaggaggccaccaccctgcagggcctggcccccctgggcagcgagaccttcggccagagccctgctgtgcacgtggtgctgggggagcctgtgcccggcaaccctgtgacctggacaggccctggctttgcccgggtgctgcctggagctggcctgcgctttgctgtgaacaacatccccttccctgtggacttcaccatcgccatccactatgagacccagagcgctgctgactggacagtgcagatcgtggtgaaccccccaggcggcagcgagcactgcatccccaagaccctgcagagcaagccccagagctttgccctgcctgctgccacccgcatcatgctgctgcccacccccatctgcctggagccagatgtgcagtacagcattgatgtgtacttcagccagcccctgcagggcgagagccacgcccacagccacgtgctggtggacagcctgggcctcatcccccagatcaacagcctggagaacttctgcagcaagcaggacctggatgagtaccagctgcacaactgtgtggagatcgccagcgccatgggcccccaggtgctgcccggggcctgtgagcggctcatcatctccatgtctgccaagctgcatgatggagctgtggcctgcaagtgccacccccagggctctgtgggcagcagctgcagccggctgggcggccagtgccagtgcaagcccctggtggtgggccgctgctgtgaccgctgcagcacaggcagctatgacctgggccaccacggctgccacccctgccactgccacccccagggcagcaaggacacagtgtgtgaccaggtgacaggccagtgcccctgccacggggaggtgtctggaagaagatgtgaccgctgcctggccggctacttcggcttccccagctgccacccctgcccctgcaacagatttgctgagctgtgtgaccctgagaccggcagctgcttcaactgtggcggcttcaccactggaagaaactgtgagcgctgcattgatggctactacggcaaccccagcagcggccagccctgccggccctgcctgtgcccagatgaccccagcagcaaccagtactttgcccacagctgctaccagaacctgtggagcagtgatgtgatctgcaactgcctgcagggctacacaggcacccagtgtggagaatgttccacaggcttctacggcaacccccgcatcagcggggccccctgccagccctgtgcctgcaacaacaacattgatgtgacagatcctgagagctgcagccgggtgactggagagtgcctgcgctgcctgcacaacacccagggcgccaactgccagctgtgcaagccaggccactacggcagcgccctgaaccagacctgccgccgctgcagctgccacgccagcggcgtgagccccatggagtgccccccaggcggcggggcctgcctgtgtgaccctgtgactggagcctgcccctgcctgcccaacgtgacaggcctggcctgtgacagatgtgctgatggctactggaacctggtgcccggccggggctgccagagctgtgactgtgaccccaggaccagccagagcagccactgtgaccagctgaccggccagtgcccctgcaagctgggctatggaggcaagcgctgcagcgagtgccaggagaactactacggggaccccccaggccgctgcatcccctgtgactgcaacagagctggcacccagaagcccatctgtgaccctgacaccggcatgtgccgctgccgggagggcgtgtctggccagagatgtgacagatgtgcccggggccacagccaggagttccccacctgcctgcagtgccacctgtgctttgaccagtgggaccacaccatcagcagcctgagcaaggctgtgcagggcctgatgaggctggccgccaacatggaggacaagcgggagaccctgcctgtgtgtgaggccgacttcaaggacctgcggggaaatgtgtctgaaattgagcgcatcctgaagcaccctgtgttccccagcggcaagttcctgaaggtgaaggactaccatgacagcgtgcggcggcagatcatgcagctgaatgagcagctgaaggctgtgtatgagttccaggacctgaaggacaccatcgagcgggccaagaatgaggccgacctgctgctggaggacctgcaggaggagattgacctgcagagctctgtgctgaatgccagcattgctgacagcagcgagaacatcaagaagtactaccacatcagcagcagcgctgagaagaagatcaatgagaccagcagcaccatcaacaccagcgccaacaccagaaatgacctgctgaccatcctggacaccctgaccagcaagggcaacctgagcctggagcggctgaagcagatcaagatcccagacatccagatcctgaatgagaaggtgtgtggggaccctggaaatgtgccctgtgtgcccctgccctgtggcggggccctgtgcaccggcaggaagggccacaggaagtgccggggccctggctgccacggcagcctgaccctgagcaccaatgccctgcagaaggcccaggaggccaagagcatcatccggaacctggacaagcaggtgcggggcctgaagaaccagatcgagagcatcagcgagcaggccgaggtgtccaagaacaatgccctgcagctgcgggagaagctgggcaacatccggaaccagagcgacagcgaggaggagaacatcaacctcttcatcaagaaggtgaagaacttcctgctggaggagaatgtgcccccagaagatattgagaaggtggccaacggggtgctggacatccacctgcccatccccagccagaacctgacagatgagctggtgaagatccagaagcacatgcagctgtgtgaggactacagaacagatgaaaatcggctgaatgaggaggctgatggagcccagaagctgctggtgaaggccaaggctgctgagaaggccgccaacatcctgctgaacctggacaagaccctgaaccagctgcagcaggcccagatcacccagggccgggccaacagcaccatcacccagctgacagccaacatcaccaagatcaagaagaatgtgctgcaggccgagaaccagacccgggagatgaagtctgagctggagctggccaagcagaggagcggcctggaggatggcctgagcctgctgcagaccaagctgcagaggcaccaggaccatgctgtgaatgccaaggtgcaggccgagagcgcccagcaccaggccggcagcctggagaaggagtttgtggagctgaagaagcagtatgccatcctgcagaggaagaccagcaccaccggcctgaccaaggagaccctgggcaaggtgaagcagctgaaggatgctgctgagaagctggccggggacacagaggccaagatccgccgcatcacagacctggagaggaagatccaggacctgaacctgagccggcaggccaaggctgaccagctgcgcatcctggaggaccaggtggtggccatcaagaatgaaattgtggagcaggagaagaagtatgcccgctgctacagctag

SEQ ID NO: 172115 - DNA, 5286 bp, Artificial Sequence
  derived and/or modified sequence
atgcagttccagctgaccctgttcctgcacctgggctggctgagctatagcaaagctcaagatgactgtaatcgtggtgcatgccacccaacaaccggggacctgcttgtgggaagaaatacacaactcatggcaagttcaacatgtggactaagccgcgcacaaaaatactgtatactatcatacttagaaggggagcagaaatgttttatctgtgatagccgattcccctacgacccatatgatcagccaaatagtcatacaatagagaacgtgatcgtgtcttttgagcccgacagggagaaaaagtggtggcagtcagaaaatggcctggaccatgtttccattcgtctagatttggaagcactgttccgattcagtcatcttatattgacattcaaaacctttagacctgctgccatgctcgtcgaacgcagtacagactacgggcacaattggaaggtttttaagtacttcgctaaggattgcgccactagtttcccaaatattacttccggccaggcgcagggcgtgggggatattgtgtgtgatagcaagtactccgacattgagccctctactggcggcgaagtagtgcttaaggtgctggacccctcattcgagatcgagaacccttactccccttatattcaagacttggttactctgaccaacctgcgaattaattttactaagcttcacactctcggagatgcactgctcggtagaaggcagaatgatagcctggacaagtactattatgcactgtacgagatgattgtgagaggatcatgcttctgcaatgggcacgcttctgagtgtcgaccaatgcagaaaatgagaggcgatgtgttctcacctcccggcatggtgcatgggcagtgtgtatgtcagcacaacacagacgggcctaactgcgagcgatgtaaggatttttttcaggatgccccatggagaccagcagccgacctccaagacaatgcatgtcgtagctgcagttgcaacagccactcctcccgctgccatttcgatatgactacttatctcgctagtggagggctttcagggggggtctgtgaggactgtcagcacaacactgaaggacagcattgcgatcggtgtaggcccctgttttacagggatcctcttaagacaatatccgacccctatgcttgcattccgtgtgaatgcgaccctgacggaaccatctctggaggtatttgtgtcagccactcagaccccgctcttggctcagtggccgggcaatgtttatgtaaggagaatgttgagggtgcaaagtgcgaccagtgcaagcccaatcactacggccttagtgctactgacccattgggatgtcagccctgtgactgtaatcccctggggagcctgccgtttctgacatgtgatgtcgacactggtcagtgtttgtgcttgtcttatgtgacaggtgctcattgcgaagagtgcaccgtgggctactggggcctgggcaatcatctgcacggatgtagcccatgtgactgtgacatcggtggcgcctactccaatgtgtgcagtcctaagaatggacaatgtgagtgtaggccccacgtcactggcagaagctgttccgagcccgccccaggatacttcttcgccccccttaacttctacttgtacgaggcagaggaggccactaccctccagggcctcgccccgttaggctccgagacctttggccagtcccccgccgtccatgtggtgctcggagaacccgtgccagggaatcctgttacatggactggtccgggcttcgcaagggtgctcccaggtgccggactgcgtttcgccgtgaacaacattccctttccagtcgatttcacaattgcaattcactacgaaacccagtctgccgccgactggacagttcagatcgtggtgaatccccctgggggctccgagcattgcatccccaaaaccctacagtcaaagccacaaagcttcgctctccccgccgccacgagaatcatgctcttgccaacccctatttgtcttgagcctgatgtgcagtatagcatcgacgtgtatttcagccaaccccttcaaggcgaaagccacgcacattcacacgtgctggtggatagcttgggactcatccctcagataaactcactcgaaaacttttgctcaaagcaggatttggatgagtaccagctgcacaactgtgtggagatcgccagcgctatgggacctcaagtgttgccgggcgcctgtgagaggctcattataagcatgagcgccaaactgcatgacggcgccgtcgcctgcaaatgccatccacagggaagcgtgggatcttcttgttctcgacttgggggccaatgtcaatgtaaacctctggtggtgggcaggtgttgtgatcgttgttctactggcagctacgatctcgggcaccacggatgccatccttgccactgccacccacagggatcaaaggacacagtctgcgatcaggtgacgggccaatgcccctgccatggagaggtgagtggtaggaggtgcgaccggtgcctggctggatacttcggctttccgtcctgccatccctgcccctgtaaccgtttcgccgagctgtgcgaccccgagactggctcttgcttcaattgtggcggattcactacagggcgaaattgtgagcggtgtatcgacggatactatggcaacccgagcagcggccagccttgccggccctgcctctgccctgacgacccgtcaagcaaccagtatttcgctcacagctgctaccagaatctctggtcaagtgacgtgatctgcaactgcctccagggctacaccggtacacagtgtggtgaatgttccactggattttacggcaaccccagaattagcggtgctccatgccagccctgtgcatgcaacaataatatcgatgtcaccgatcccgagagttgctcacgagtcactggcgagtgcctccgctgtctgcataatacacagggagctaactgccagctgtgtaaaccaggacattacggttctgctctcaatcagacttgtcggcggtgttcttgccacgcctctggggttagcccaatggagtgccccccaggaggaggtgcctgcctatgcgaccctgtaactggagcatgcccttgcctgcccaatgtgacaggtctggcatgtgaccggtgtgcggacggctattggaacctcgtcccaggcaggggatgtcagtcctgcgactgtgacccgcggacctcccagtcttcccattgcgaccaactcaccgggcagtgtccttgcaaactggggtatggcggaaagaggtgcagcgaatgtcaggaaaattactacggcgaccctccaggcagatgtatcccatgtgactgtaacagggcgggcactcagaaaccgatttgcgacccagataccggaatgtgcaggtgtcgcgagggtgtttctggacagcgttgcgatcggtgcgctcgaggacattcccaggaattcccgacttgcctgcaatgtcatttatgttttgatcagtgggaccacaccatcagctccctatccaaggcagtgcaaggcctgatgcggctcgccgccaatatggaagataaacgggagacacttccagtctgcgaggccgacttcaaggacctgaggggaaacgtatcagaaatcgagcgaatactcaaacacccagtgttcccctctggcaagtttctcaaggtcaaggattaccatgattctgtacggcgccagattatgcagctgaatgaacaacttaaagccgtttatgaattccaggatctcaaggatacgatcgagagggccaaaaatgaagctgatctgctgctcgaggacttacaagaagaaatcgatttgcagagctccgtgctcaacgccagcatcgccgactcatccgaaaacataaagaagtattatcacattagcagttctgcagaaaaaaaaatcaacgagacatcctctactattaacacctccgcgaatacacgtaatgacctgcttaccatactggatacgctcacttctaagggtaacttaagcttggagcgactcaagcaaatcaagatccccgacatacagatcttaaatgagaaggtgtgcggggaccctggcaatgtcccctgtgttccgctgccatgcggtggagccctatgcactggccgaaagggccaccgcaagtgcagggggccgggttgtcacggttccctgacgttgagcactaatgctttacagaaagcacaagaggcaaaatctatcattcgtaatctcgataagcaagtccgcggactgaagaaccagattgagagcatctctgaacaggccgaggtgagcaagaataacgctctccagttgagagagaagttggggaacatcagaaaccaatctgattccgaagaggagaatatcaatcttttcattaaaaaagtcaagaacttccttctggaggaaaacgttccacccgaggacattgagaaggtggccaatggcgtgcttgacatacatctgccaatcccgtcccagaacttgactgacgaattggtaaagatccagaagcatatgcagctatgtgaggactaccgtactgacgagaatcgccttaacgaagaggctgacggggcccagaagttgctcgtcaaggcaaaggcagccgaaaaggccgccaacatcctcctcaacctggataaaacacttaaccagttacaacaggcccagatcacacagggacgagccaattccacaatcacccagctcacagccaatattacaaagatcaagaagaacgtgcttcaagcagagaaccagacccgggaaatgaaatccgagctggaattggccaagcaaaggtccgggcttgaagacggcttatccctgctgcaaacaaagctgcagcgccaccaggatcatgccgtgaacgccaaggtgcaggccgaaagtgcacagcatcaggctggaagcctcgagaaggaattcgtggaattgaagaagcagtacgcaattcttcagcggaagacgtctacaacagggctgacgaaggaaactctcggcaaggttaaacagttgaaagacgccgccgagaagctggctggtgacaccgaagcgaagattaggaggatcaccgacctggaaaggaaaatacaggatctcaacttgtcccgccaagccaaggcagaccagctacgtattcttgaggatcaggtagttgcgatcaagaatgaaattgttgaacaggaaaagaagtatgctaggtgttactcgtag

SEQ ID NO: 172116 - DNA, 5858 bp, Artificial Sequence
  derived and/or modified sequence
cacatgccccgtttgctgcctgaacctctccacaaagactcccagatcctgtagaattgaatttaatcatctcctgacaaaagaatgcaatttcaactgaccctttttttgcaccttgggtggctcagttactcaaaagctcaagatgactgcaacaggggtgcctgtcatcccaccactggtgatctcctggtgggcaggaacacgcagcttatggcttcttctacctgtgggctgagcagagcccagaaatactgcatcctcagttacctggagggggaacaaaaatgcttcatctgtgactctagatttccatatgatccgtatgaccaacccaacagccacaccattgagaatgtcattgtaagttttgaaccagacagagaaaagaaatggtggcaatctgaaaatggtcttgatcatgtcagcatcagactggacttagaggcattatttcggttcagccaccttatcctgacctttaagacttttcggcctgctgcaatgttagttgaacgttccacagactatggacacaactggaaagtgttcaaatattttgcaaaagactgtgccacttcctttcctaacatcacatctggccaggcccagggagtgggagacattgtttgtgactccaaatactcggatattgaaccctcaacaggtggagaggttgttttaaaagttttggatcccagttttgaaattgaaaacccttatagcccctacatccaagaccttgtgacattgacaaacctgaggataaactttaccaagctccacacccttggggatgctttgcttggaaggaggcaaaatgattcccttgataaatactactatgctctgtacgagatgattgttcggggaagctgcttttgcaatggccatgctagcgaatgtcgccctatgcagaagatgcggggagatgttttcagccctcctggaatggttcacggtcagtgtgtgtgtcagcacaatacagatggtccgaactgtgagagatgcaaggacttcttccaggatgctccttggaggccagctgcagacctccaggacaacgcttgcagatcgtgcagctgtaatagccactccagccgctgtcactttgacatgactacgtacctggcaagcggtggcctcagcgggggcgtgtgtgaagactgccagcacaacactgaggggcagcactgcgaccgctgcagacccctcttctacagggacccgctcaagaccatctcagatccctacgcgtgcattccttgtgaatgtgaccccgatgggaccatatctggtggcatttgtgtgagccactctgatcctgccttagggtctgtggccggccagtgcctttgtaaagagaacgtggaaggagccaaatgcgaccagtgcaaacccaaccactacggactaagcgccaccgaccccctgggctgccagccctgcgactgtaacccccttgggagtctgccattcttgacctgtgatgtggatacaggccaatgcttgtgcctgtcatatgtcaccggagcacactgcgaagaatgcactgttggatactggggcctgggaaatcatctccatgggtgttctccctgtgactgtgatattggaggtgcttattctaacgtgtgctcacccaagaatgggcagtgtgaatgccgcccacatgtcactggccgtagctgctctgaaccagcccctggctacttctttgctcctttgaatttctatctctacgaggcagaggaagccacaacactccaaggactggcgcctttgggctcggagacgtttggccagagtcctgctgttcacgttgttttaggagagccagttcctgggaaccctgttacatggactggacctggatttgccagggttctccctggggctggcttgagatttgctgtcaacaacattccctttcctgtggacttcaccattgccattcactatgaaacccagtctgcagctgactggactgtccagattgtggtgaacccccctggagggagtgagcactgcatacccaagactctacagtcaaagcctcagtcttttgccttaccagcggctacgagaatcatgctgcttcccacacccatctgtttagaaccagatgtacaatattccatagatgtctatttttctcagcctttgcaaggagagtcccacgctcattcacatgtcctggtggactctcttggccttattccccaaatcaattcattggagaatttctgcagcaagcaggacttagatgagtatcagcttcacaactgtgttgaaattgcctcagcaatgggacctcaagtgctcccgggtgcctgtgaaaggctgatcatcagcatgtctgccaagctgcatgatggggctgtggcctgcaagtgtcacccccagggctcagtcggatccagctgcagccgacttggaggccagtgccagtgtaaacctcttgtggtcgggcgctgctgtgacaggtgctcaactggaagctatgatttggggcatcacggctgtcacccatgtcactgccatcctcaaggatcaaaggacactgtatgtgaccaagtaacaggacagtgcccctgccatggagaggtgtctggccgccgctgtgatcgctgcctggcaggctactttggatttcccagctgccacccttgcccttgtaataggtttgctgaactttgtgatcctgagacagggtcatgcttcaattgtggaggctttacaactggcagaaactgtgaaaggtgtattgatggttactatggaaatccttcttcaggacagccctgtcgtccttgcctgtgtccagatgatccctcaagcaatcagtattttgcccattcctgttatcagaatctgtggagctcagatgtaatctgcaattgtcttcaaggttatacgggtactcagtgtggagaatgctctactggtttctatggaaatccaagaatttcaggagcaccttgccaaccatgtgcctgcaacaacaacatagatgtaaccgatccagagtcctgcagccgggtaacaggggagtgccttcgatgtttgcacaacactcagggcgcaaactgccagctctgcaaaccaggtcactatggatcagccctcaatcagacctgcagaagatgctcctgccatgcttccggcgtgagtcccatggagtgtccccctggtgggggagcttgcctctgtgaccctgtcactggtgcatgtccttgtctgccgaatgtcacaggcctggcctgtgaccgttgtgctgatggatactggaatctggtccctggcagaggatgtcagtcatgtgactgtgaccctaggacctctcaaagtagccactgtgaccagcttacaggccagtgtccgtgtaaattaggttacggcgggaaacgttgcagtgagtgccaggaaaattattatggtgatccacctgggcgatgcattccatgtgattgtaacagggcaggtacccagaagcccatctgtgatccagacacaggcatgtgccgctgccgggagggtgtcagcggccagagatgtgatcgctgtgcccggggacacagccaggaattccctacttgtcttcaatgtcacttgtgctttgatcagtgggaccacaccatttcttccctctccaaagcggtgcaagggttaatgagactggctgctaacatggaagataaaagagagaccctgcctgtctgtgaggcagacttcaaagacctcagagggaacgtgtctgaaatagaaaggattttgaaacatcctgttttcccatctgggaaattcttaaaagtcaaggattatcatgactctgttagaagacaaatcatgcagctaaatgaacaactgaaagcagtgtatgaatttcaagatctgaaagatacaatagaaagagcaaagaatgaagcagacctcttacttgaagaccttcaggaagaaattgatttgcaatccagtgtccttaatgcaagcattgcggactcctcagaaaacatcaagaaatattatcacatatcatcatctgctgaaaagaaaattaatgaaactagttccaccattaatacctctgcaaatacaaggaatgacttacttaccatcttagatacactaacctcaaaaggaaacttgtcattggaaagattaaagcagattaagataccagatatccaaatattgaatgaaaaggtgtgcggagatccaggaaatgtgccatgtgtgcccttgccctgtggcggtgctctctgcacgggccggaaggggcacaggaagtgtaggggtcccggctgtcacggctccctgaccctctcaacgaatgccctccaaaaagcccaggaagcaaaatccattattcgtaatttggacaaacaggttcgtgggttgaaaaatcagatcgaaagtataagtgaacaggcagaagtctccaaaaacaatgccttacagctgagggaaaaactgggaaatataagaaaccaaagtgactctgaagaagaaaacatcaatcttttcatcaaaaaagtgaaaaactttttgttagaggaaaacgtgcctccagaagacatcgagaaggttgcgaatggtgtgcttgacattcacctaccaattccatcccaaaatctaaccgatgaacttgtcaaaatacagaaacatatgcaactctgtgaggattacaggacagatgaaaacaggttaaatgaagaagcagatggagcccaaaagcttttggtgaaggccaaagcagctgagaaagcagcaaatattctattaaatcttgacaaaacattgaaccagttacaacaagctcaaatcactcaaggacgggcaaactctaccattacacagctgactgccaatataacaaaaataaaaaagaatgtgctgcaggctgaaaatcaaaccagggaaatgaagagtgagctggagttagcaaagcagcgatcagggctggaggatggactttccctgctgcagaccaagttgcaaaggcatcaagaccacgctgtcaatgcgaaagttcaggctgaatctgcccaacaccaggctgggagtcttgagaaggaatttgttgagctgaaaaaacaatatgctattctccaacgtaagacaagcactacaggactaacaaaggagacattaggaaaagttaaacagctaaaagatgcggcagaaaaattggctggagatacagaggccaagataagaagaataacagatttagaaaggaaaatccaagatttgaatctaagtagacaagcaaaagctgatcaactgagaatattggaagatcaagttgttgccattaaaaatgaaattgttgaacaagaaaaaaaatatgctaggtgctatagctaggcagagttaaagagcaaaagcttgtgcctttgtttctggtttctgatgtacaagcccctggggctctgttgaacctgtgaaatactgacaatgtcttctaccttccttccccacaccctgtccttattagacacctgctcagtgtggctggaggttgaaatgccaccaggaaaatgccacttcataattgaaaggggaaagtaatgaaattgtctctggtttcagaaacttttcctcttaccttcctttctctttcctaacttaaaaataacagtttccatataacaagtagaaatttaagtaagtactctactaactaataatcatttcagtcagataaacctaaacattaaataaatatctccaatattaggatggaatacatatgtatggcatgtactagattgtcctatattttatgtttatttggatttgcttttatttgtaaaattattcttttctgaataaactgcatacaattcaaaatg

SEQ ID NO: 172117 - DNA, 5286 bp, Artificial Sequence
  derived and/or modified sequence
atgcagtttcagctaaccctgttcctccacctaggctggctatcttattcgaaggcccaggacgattgtaatcgcggggcttgtcacccaaccacaggcgacctgctagtcggacgcaacacgcagttgatggccagcagcacatgtggactctcccgggcccagaagtactgtatactcagctacctcgagggagagcagaagtgctttatctgtgactcacgctttccttacgacccatacgatcagcctaactcccacaccattgagaacgtcatcgtgagctttgagcctgacagggaaaagaagtggtggcaatccgaaaacgggctcgatcacgtgtcaatccggctcgacttagaagctctctttcgatttagccacctgatcctgacatttaaaaccttcaggccggctgcaatgctggtggagagatccaccgattacggccacaattggaaggtgtttaaatacttcgcaaaggactgtgctaccagcttcccgaatatcacctcaggccaggcccagggcgtcggtgacattgtgtgtgactcgaaatacagcgacattgaaccttctaccggcggagaagtggtcctcaaagtgctcgacccctcattcgagatagaaaatccatacagcccatatatccaggacttggtcaccctcactaatctgaggataaactttactaaactgcataccctcggcgatgctctacttggacggcgtcagaacgatagtctcgataaatattactatgccctatatgaaatgatcgtccgcggtagctgcttttgtaacggccacgcctcagagtgccggccaatgcagaaaatgaggggcgacgtcttttcccctcctggcatggttcatggacagtgcgtatgccagcataacaccgacggacccaattgcgagcgctgtaaagatttttttcaggatgcaccttggcgcccagctgccgatcttcaagacaatgcttgccgatcttgttcttgtaatagtcattccagcaggtgccacttcgacatgacaacgtaccttgcatccggcggcctcagcggaggcgtgtgcgaggattgccagcataacacagaggggcagcattgcgacagatgtcgcccgctgttctacagagatccgctgaagacgatctctgatccgtatgcctgcataccctgtgagtgtgatcctgacggaactatttccggcggcatttgtgtatcgcacagcgacccagccctcggcagcgttgcaggccagtgcctgtgcaaagagaacgtggagggcgccaagtgtgaccagtgtaaacctaatcattacggactctccgccacagatccactgggttgccagccatgtgactgcaaccctcttggttcattgcccttcttgacttgtgatgtcgacacaggacaatgtttgtgtctgtcctacgtcacaggagcccattgtgaggagtgcactgtggggtattggggcctgggcaaccatctccacggatgctcaccctgcgactgtgatattggtggcgcatactctaatgtgtgctcccccaaaaacggtcagtgcgaatgcagacctcatgtgactggccgctcgtgttctgaacccgcaccgggatacttctttgcacctctgaacttctacctctatgaagctgaagaggccaccaccctgcagggactggcgccactgggcagcgaaactttcggacagtccccagcagttcatgtcgtcttgggggagcctgtccctggaaatccagtaacgtggacaggtcccggctttgctagagtgctcccaggtgccggtctgcgattcgccgtcaacaacatcccttttccagtggattttaccattgccattcattatgaaacccagagtgccgctgattggactgtacagattgtagtgaaccctcctggtgggtcggagcattgtattccaaaaacactgcagtccaagccccaatcattcgctcttcctgcagcaaccagaataatgcttctacctacccctatctgcctagagcccgacgtccaatattcaattgacgtgtacttctctcagccactccagggtgagagccacgcccactcacatgtgctcgtggactctctcggcctgattccccagatcaattctctcgaaaacttctgtagcaagcaggacttagacgagtatcaacttcacaattgcgttgaaatcgcttctgcgatgggaccgcaggtgctcccaggagcctgcgagcgcctcatcatatccatgagtgccaagctgcatgacggcgccgtggcgtgtaagtgccacccccaggggagtgtcggctcaagttgctctaggcttgggggtcagtgtcaatgcaagcctttggtcgtgggaaggtgctgtgatcgttgcagcacaggcagctatgacctgggccatcatggatgtcacccctgtcactgtcacccgcagggatcaaaggatactgtgtgcgatcaggtcactggccaatgcccctgtcatggagaagtatctggaagacggtgcgatagatgcctggctggatatttcgggttccccagctgccatccttgcccttgtaatcgtttcgccgagctttgtgatcctgagactggctcgtgctttaattgcggcggcttcacgactggcagaaactgcgagagatgtatcgacggctattacggtaatccatcgagtgggcagccttgtagaccttgcttatgtcctgacgatcccagttccaaccaatacttcgcccacagctgttatcagaatctttggtctagtgacgtgatctgcaactgtctccagggctacacaggcactcagtgtggcgagtgttctactgggttttatggcaatccccggattagcggagccccctgccaaccatgtgcctgcaataataacatcgacgtgacagacccagagtcttgttcccgtgtcaccggagaatgcctgagatgtcttcacaatacacagggggcaaactgtcagctgtgtaaacccggacattacggttctgccctcaaccaaacctgcaggcggtgttcctgtcacgcatccggggtgtccccaatggaatgcccacccggagggggagcatgtctttgcgaccctgtaaccggcgcgtgtccgtgcctgcccaatgtcaccggcctggcctgcgaccgctgcgctgatggctattggaatttagttcctggtcgtgggtgtcaatcttgcgactgtgaccccaggacgagtcagtcgtcacactgcgatcagctgactggccaatgcccctgcaagttggggtacggggggaagaggtgtagtgaatgtcaagaaaattattacggcgacccccctggaagatgcattccatgcgactgcaaccgcgctggtactcagaagccaatctgtgaccctgacacaggcatgtgccgctgtagggagggcgttagtggccagcgctgcgatagatgtgcacggggccatagccaagaatttccaacatgcctgcagtgccatctgtgctttgatcagtgggaccacactatttcctcactctcaaaggctgtgcagggccttatgaggttggcagctaatatggaggacaaacgcgagactttacccgtgtgcgaagccgactttaaggacctgaggggaaacgtttccgagattgagcgcattctgaaacaccccgtgtttccttctggcaaattcctgaaggtgaaagactaccatgactcagtccgccgccagattatgcaactcaacgagcagcttaaggcagtgtatgagttccaagatctcaaagacaccatcgagcgcgccaaaaatgaggcagacctgctgctcgaggacctgcaggaagagatcgacctgcagtcttccgtactgaatgcttcgatcgcagattcttctgagaatataaagaagtattatcatatctcttcttctgctgaaaagaaaatcaatgagaccagctccaccataaatactagtgccaatacacgtaatgacctgctaaccatactggacactctgacctccaaaggcaatctcagcctggaacgcctgaagcagatcaagattccagacatacagatcctgaatgaaaaggtatgtggcgacccggggaacgtgccgtgcgtgccgttgccatgcggaggtgcactctgcacaggaaggaagggccacagaaagtgcaggggaccaggttgccatgggagtctcaccctgtctacaaacgctttgcagaaagctcaggaggccaagtctataatccgtaatttagataagcaggtaagaggcttaaagaaccagatcgagtcaataagcgagcaagcggaggtttcaaagaacaacgcccttcagctgagagaaaaattaggcaatattcgcaatcagtctgactctgaggaggagaatattaatttgttcatcaagaaagtgaagaattttctgttggaggagaacgtgcctcctgaggacatcgagaaagttgccaacggggtgctcgacatccacctgcctattccttctcagaacctgaccgacgagctggtgaaaatacagaaacacatgcaactatgtgaagattacagaaccgacgagaacaggctgaacgaggaggccgacggagcacagaaactcctggtgaaggctaaggccgccgagaaagccgcgaatatcttactcaacctcgataagacacttaaccagctccaacaggcccaaataacacagggaagagcaaattctaccattacccagctcaccgccaatataaccaagattaagaaaaacgtcttgcaggcagaaaaccagacaagggagatgaaatccgaactcgagctcgctaaacagagatctggcctagaggacggcctttcactcttgcaaacgaaacttcagcgacaccaggaccatgcagtgaatgccaaagtccaggccgaatccgcccagcaccaggcgggctccctggaaaaggaatttgtagagttaaaaaaacaatatgcaatcctgcagcgaaaaacgtctaccaccggactgaccaaagaaacacttggcaaggtcaaacagctgaaggacgcagccgaaaaactggctggagatactgaggcaaaaatcaggcggatcactgatctggagaggaagatccaggatttgaacttaagccggcaagccaaggccgatcagctgaggatcctggaagaccaggtggtcgctatcaagaacgagatagtggagcaggaaaagaaatacgcacgttgctatagttag

SEQ ID NO: 172118 - DNA, 5286 bp, Artificial Sequence
  derived and/or modified sequence
atgcagttccagctgaccctgttcctgcacctgggctggctgagctactctaaggcacaagatgattgtaaccgtggcgcctgtcaccccactacaggagacttactggtggggcgcaacacccagttaatggcttcatcaacatgtggcttaagtcgggcgcagaagtactgtattttgtcctaccttgagggtgagcagaagtgctttatctgcgattcccggtttccttatgacccctatgatcagcctaatagtcatactatagaaaatgtgatcgtatctttcgaacctgaccgggagaagaagtggtggcagtcagagaatggcctcgaccacgtcagcatacgactcgatctcgaggcactctttcgcttctcccatctgatcctgacctttaagactttcagaccagcagccatgctcgtggagaggtcaacagactacggacacaattggaaagtttttaaatattttgctaaggattgcgctacaagttttcctaacataactagcgggcaggctcagggagtgggggatattgtgtgtgattcgaagtactcagacattgagcccagcaccggaggagaggttgtgcttaaggtcttggatcctagctttgagatcgagaatccatactccccttacatccaagatcttgttacactcaccaatttacggataaacttcaccaagctgcacaccctgggcgacgccctgttaggccggaggcagaacgactccctggataagtattactacgccctatacgagatgatcgttcggggttcatgcttctgcaacgggcatgctagcgagtgtcggcctatgcagaagatgcggggggacgtcttcagtccccccgggatggttcacggacaatgcgtctgccaacataatacggatgggcccaactgcgagcggtgtaaggatttctttcaggatgccccctggaggcccgccgccgacctgcaagataatgcgtgtagaagttgttcctgcaattctcatagtagtagatgtcactttgacatgactacgtacctcgcctccggggggctgtcaggcggcgtatgcgaagactgccagcacaatacagagggccaacattgcgaccgctgcagaccactgttttaccgggacccgctgaaaactatctccgacccctacgcctgtatcccttgtgaatgcgatcccgatgggacaattagtggcggcatatgcgttagccatagtgatccagcgctaggcagcgtggcaggacagtgcttgtgtaaagaaaacgttgaaggggcgaagtgcgaccagtgtaaacccaaccattatggactgtccgcgaccgatccccttggctgtcaaccttgcgattgcaatcccctcggaagcctgccattcctcacctgcgatgtggacacggggcagtgcctttgtcttagttatgtgactggagcccactgtgaggagtgtacagtaggctattgggggctgggcaatcatctgcacggatgctctccatgcgattgtgatataggtggcgcctacagcaacgtctgctcccctaaaaacgggcagtgtgaatgccggccgcacgtgactggcaggtcatgttctgaacctgctccaggatacttttttgctccgttgaatttttatttgtatgaggccgaggaggccacaacccttcaagggctggcacccttgggatccgaaacttttggtcagtccccagccgtgcatgtggtgctgggcgaaccagtgcccggtaacccagtcacctggaccggacctggcttcgcaagagtgctcccaggagctggtctgcggttcgctgtgaacaatattcccttccctgtcgattttaccattgctattcattacgaaacacagagtgccgccgactggactgtccagatcgtggtgaaccccccaggcggcagtgaacactgcattccgaagactctccagtccaagccccagtctttcgccctgccagcagctacacggataatgctactgccaactccaatctgtttagagcctgatgtgcagtacagcattgatgtctatttctcccagcctctgcaaggggaatcccacgcccatagccacgtgctggtggatagcctgggactcattcctcagattaattcccttgagaacttctgttcaaaacaggatcttgatgagtaccaactgcataattgtgtggagatagccagcgctatgggccctcaggtgctgcccggagcctgtgaacggctcattatctccatgtccgcaaaactgcacgatggcgcagtagcctgcaaatgccatcctcaaggtagcgtgggcagctcatgtagccggttgggcggacagtgccaatgcaagcctctggtagtgggccgttgttgtgacagatgctcaacaggctcatacgacctgggccaccatggatgccatccttgccattgccacccccagggcagcaaggacaccgtctgtgaccaggttacagggcagtgcccttgccacggggaggtgtctggccgcagatgcgaccggtgccttgctggctacttcggtttcccatcttgtcacccttgcccttgcaataggtttgccgaactgtgcgatcctgagactggctcctgcttcaactgcggagggttcacaacaggcaggaactgtgagcgctgtatcgatgggtactacggcaaccctagcagcggccagccctgccgaccgtgcctgtgtccagatgatccaagctcgaatcagtacttcgctcacagctgttatcagaacttatggagctcagatgtgatctgcaattgccttcaaggctacacagggacacaatgcggggagtgttccactggattctatggcaacccacgcatatccggcgcgccctgtcagccatgtgcctgcaacaataatatcgacgtcaccgatcctgagtcatgcagccgggtgactggtgaatgtcttcggtgtctacataacactcaaggggctaattgtcagctttgtaagcccgggcactatggcagcgccttgaaccagacatgtcggcggtgctcttgccacgctagcggggtctccccaatggaatgtccaccgggagggggggcctgcctgtgcgaccccgtgacaggcgcctgtccctgcctacccaacgtcaccggattggcttgcgaccgttgtgcagacggttactggaacctggtgcccggccgtggttgccagtcgtgtgactgcgatccccggacctctcagagcagtcattgtgatcaattgacgggccagtgtccatgcaagctcggctatggggggaaaaggtgcagcgaatgtcaagagaattactatggggatccccccggccggtgcatcccttgcgattgtaacagagccggaacccagaagccaatctgcgaccctgacactgggatgtgccgttgtcgagagggagtgagtggccaacggtgtgatcggtgtgcccgggggcactcccaggagttccccacctgtttgcaatgccacctgtgctttgatcaatgggatcatacgatctcgtcgctgtccaaagcagtgcagggactgatgcgactcgcggccaacatggaagataaacgagagaccttgcctgtttgtgaggcggatttcaaggaccttagaggtaatgtttccgagatcgagaggatcctcaaacatcccgtatttccctctgggaagtttctgaaggtgaaggactaccacgatagtgtccgccgtcagattatgcagctgaacgaacagctgaaggctgtatatgagttccaagacttaaaggatacaatcgagagagccaagaatgaagccgatctgctcctcgaagatctccaggaggagatcgatttacaaagtagtgtgctgaacgcttccatcgcggacagttccgagaatatcaaaaaatactatcatatctccagctcagctgagaagaagatcaatgagactagctctacaatcaatacgagcgctaacactcggaatgacctgttgaccattctggatacactgaccagtaaaggtaatctctctctagaacggctcaaacagatcaaaatacccgacattcagattttaaatgagaaggtttgcggcgatcccgggaacgtcccttgtgttcctctgccgtgcgggggagccttatgcacaggtcggaaaggtcatagaaaatgtaggggaccgggatgccacgggtctctcacactttctactaacgccctccagaaagcccaggaagctaaaagcattattaggaacctggacaagcaggtcaggggactgaagaaccaaatcgagtccatttcggagcaggccgaagtctcaaagaataatgctctgcagctgagagaaaagttaggcaacatccgtaatcagtctgactccgaggaagagaacatcaacctcttcatcaaaaaagtgaagaattttttgctagaagaaaatgtgcctccagaggacattgaaaaggtggctaacggcgtcttggacatacacctccccatccctagtcagaatcttactgatgagctggtcaagattcagaaacacatgcagctttgtgaggactatcggactgatgagaaccgcctgaacgaggaagccgatggggcccaaaagctgctcgttaaggcaaaagccgcagagaaagcagcgaatatcctcctcaacttagacaagacacttaatcagcttcaacaggcccagattacccaaggccgcgctaactctacaatcacacaattaaccgcaaacatcacaaaaattaagaagaacgtgctacaggctgagaaccagactagggagatgaagtctgaactggagctcgccaagcagcggtcaggcttagaagacggactatcactattacaaaccaagcttcagagacatcaagaccacgccgtgaatgctaaggttcaggccgaatctgcccaacatcaggcggggagcctggagaaggagttcgtggaactcaaaaagcagtatgctatccttcaacgaaagactagcactactgggctgacgaaggagactcttggcaaagtgaagcagctgaaggacgcggcagagaaactggcaggggataccgaggcgaagatacgcaggattaccgaccttgagaggaaaatccaggacttgaacctttcacgccaggcgaaggcagaccagcttagaattctcgaagaccaggtggtagcaattaaaaacgagattgtggaacaggaaaaaaaatatgcgaggtgctattcatag

SEQ ID NO: 172119 - DNA, 5285 bp, Artificial Sequence
  derived and/or modified sequence
atgcaatttcagctgactctcttcctgcatctgggctggctgtcctattccaaggctcaggacgactgcaatagaggggcatgccatcctaccaccggcgatctcctggtcggacgtaacactcagctgatggcctcctccacatgcgggctgagtcgcgcacaaaaatattgtatcctcagctatctggagggcgagcaaaaatgctttatctgtgacagcagatttccatacgacccgtatgaccagccaaattctcataccatagagaatgtcattgttagtttcgagcctgacagagaaaaaaaatggtggcaaagtgaaaacgggctggaccatgttagcatccgccttgacttggaggctttattccggttcagtcacttaatcctgacatttaagacttttaggccagcggcaatgctggtggagcgctcaactgattacggccacaattggaaggtgttcaagtattttgcgaaagactgcgcgacatcgtttcccaatattaccagcgggcaagcccagggagttggggatattgtatgcgactctaagtacagtgatatagaaccgtcaactggaggtgaggtggtactgaaggtgcttgacccctcttttgaaattgaaaacccttattcaccttatattcaggacctggtgactctgactaacctgaggatcaacttcacaaaactgcacacgttgggagatgccctgcttggacgtagacagaatgattctctcgacaagtattactatgcattatatgagatgattgttaggggctcatgtttttgcaatgggcatgccagcgaatgtaggcctatgcagaagatgcggggagacgtgttttcccccccaggcatggtgcacggccagtgtgtgtgtcaacacaataccgacggcccaaattgtgaaaggtgtaaggatttcttccaggatgcaccttggaggcctgctgcagatctgcaggacaatgcctgcagaagctgctcctgtaattcccattccagcaggtgccatttcgacatgacaacgtatctggcttctgggggattatctggcggtgtgtgcgaggattgtcagcacaacacggaagggcagcactgcgaccggtgtcgacctctgttttacagagatcctttgaaaaccatttccgacccatatgcatgcattccatgcgagtgtgacccagatggtacaatctctggaggaatctgtgttagccactctgatccggcactgggctctgtggccggacaatgcctctgcaaggagaatgttgagggagctaaatgcgaccagtgcaagccgaatcactacgggttgtctgctacagatcccctcggctgtcaaccatgcgactgtaatcctttaggatcgcttcccttcttgacatgtgacgttgataccggccagtgcctctgtctgtcttacgtgaccggggctcattgcgaggagtgcactgtgggctattggggactcgggaatcatcttcatgggtgctctccctgcgactgcgatattggcggtgcttactccaatgtgtgttcgcccaagaacggccaatgcgagtgtcgccctcacgttacaggtcggagttgcagcgaacctgctccaggctacttctttgccccactgaatttttacttgtatgaagctgaggaggccaccacgctgcaagggctagctccgctcgggtccgagacgtttggtcagtctccagctgtacacgtggttctgggggagccagtcccagggaacccagtgacctggaccgggcctgggtttgctcgggttctgcctggagccggtcttaggttcgcagtgaacaacatcccatttcccgtcgactttactatcgcaatccactacgagacacagtccgcggctgattggacagtacaaattgtagtgaatcctccgggaggtagcgagcactgtattccaaagaccctacagtccaaaccacagagtttcgccctccctgctgccacgcggattatgctgctgcccacccctatttgtttggagccggatgtgcaatattcaattgacgtatatttttcacagccgctgcagggggaatctcacgctcactcacatgtgctggtcgattctctgggcctcatccctcagattaactctctggagaacttttgcagtaagcaggacctggacgaataccagctgcataattgcgtcgagatcgcaagcgcaatgggccctcaagtgttacctggagcctgcgaacgcttaatcatctccatgagcgccaaactgcatgatggagccgtggcctgtaagtgtcatccacagggaagcgtgggctccagttgcagtagattaggtggtcaatgtcagtgtaagcccctggtcgtgggcagatgttgcgataggtgctcgaccggctcttatgatctaggtcaccacggttgtcatccttgtcattgccatccgcaggggagcaaggatactgtgtgtgaccaggtaacaggccagtgtccgtgtcatggagaggtgagtggcaggaggtgcgaccgctgtctcgccggttactttgggttcccatcgtgtcatccctgtccttgtaaccggtttgcagaactgtgtgacccagagacaggatcctgctttaactgtggaggctttaccactgggcgtaactgtgagcgttgtatcgatggatattacggtaatccttcctcggggcagccttgtagaccctgcctctgtccagatgatccttcttctaatcagtacttcgcacattcctgttatcagaacctgtggagtagcgatgtcatctgtaattgcctccagggatatactggcactcagtgtggtgagtgttctacaggattctatggcaatccccgtatcagtggcgctccatgccagccctgtgcgtgtaacaacaacatcgatgtgaccgatcccgaaagctgttccagggttactggcgaatgtctgaggtgcttgcacaatacccagggcgcaaactgtcagctgtgcaaacccggacactacggctcggccctgaaccagacctgccggaggtgcagctgccatgcttctggagtcagtccaatggagtgtccccctggcggtggagcctgcttgtgcgatcccgtgactggagcatgtccctgcctacccaatgtaacaggtctagcttgcgatcggtgcgccgacggctattggaaccttgtgcccggacgcggatgtcagtcatgcgattgcgatccgagaacgagccagagtagccactgcgaccagctgaccggccagtgtccgtgcaaattaggctacggaggaaaaaggtgtagcgagtgccaggagaattattacggagatccaccgggaaggtgtatcccctgtgactgtaatcgcgctggaacccaaaaacccatttgcgacccggatactggtatgtgccgttgcagagaaggggtgtccggtcaaaggtgtgaccggtgcgccagaggacactcccaggaatttcccacctgtctgcagtgtcatctctgttttgatcagtgggaccacacaattagcagcttaagtaaggctgtccagggtctcatgcggcttgcggctaacatggaagataaacgtgagactctgccagtgtgcgaagctgatttcaaagacctgcgagggaacgtcagtgaaattgaacgaatcttgaagcacccagtgttcccctccgggaaatttctcaaagtgaaagactatcatgattccgttcgccgtcaaatcatgcagctgaacgaacagcttaaagccgtctatgagtttcaggatttaaaagacactattgaacgggcaaagaacgaggctgatctgttgctggaagatcttcaggaagaaattgaccttcagtcctccgtgcttaatgctagcatcgctgactccagcgagaacatcaagaagtattaccacatatcttcttctgccgagaagaagatcaatgaaactagcagtaccattaacacctctgcgaatactagaaacgaccttttgactatcctggacaccctcacatcaaagggaaacctctcactggaaaggctaaagcagattaagatccctgacatacagatactaaacgagaaagtgtgcggcgaccctggtaacgtcccgtgtgtcccccttccgtgtggaggggctctgtgcacaggcagaaaaggacatcgaaaatgcagggggcctggttgtcatgggtccctcaccctgtcaactaacgcgctccaaaaagcgcaggaggccaaatctatcatccgcaacctggacaagcaggtgcgcggtctgaagaaccagattgagagcatttctgagcaggccgaagtcagtaaaaataacgctctgcaacttagagagaaacttggtaatatcaggaaccagtctgacagcgaggaggagaatattaaccttttcataaaaaaggtaaagaattttctactggaagagaacgttccacctgaagacatcgagaaagtcgctaatggggttctggatatacacctgccgattccctcccagaacctgaccgacgagcttgtgaaaattcagaagcatatgcagctgtgtgaagattatcgaacagacgagaaccggttaaacgaagaggccgacggtgcccagaagctcctagtgaaggccaaggccgctgaaaaagccgcaaatattctgttgaatctggacaagactctgaaccagctacaacaggcccagattacccaagggcgtgccaattcaaccataacgcaactgaccgctaatattactaaaatcaagaagaatgtgcttcaggccgagaaccagacaagggaaatgaaatccgaattggagcttgcaaagcagagaagtgggctggaggatggcttgtcattgttgcaaacgaagctacagcggcatcaggaccatgcagttaatgccaaggtccaggccgaaagcgcccagcaccaagccggtagtctggagaaggagtttgtagaactgaagaagcagtacgccatcctccaacgcaaaacatctactacggggctgactaaagaaaccttgggcaaagtcaagcagttgaaagatgctgccgaaaagctcgctggagacactgaagctaagatcagacggatcaccgatttagagcgaaaaatccaggacctgaatctcagccgtcaggctaaggctgatcagctccggatactcgaagatcaggtggtcgccataaaaaatgagatcgtggagcaggagaaaaagtacgcgcgttgctacagtta

SEQ ID NO: 172120 - DNA, 5286 bp, Artificial Sequence
  derived and/or modified sequence
atgcagttccagttaaccctctttctgcacttaggatggctgagttactccaaggcccaggacgactgcaaccgaggtgcttgccaccctactaccggagacctcctcgtcgggagaaatacccagttaatggcttcatccacttgcggactttctagggctcagaagtattgcatactgtcttatctggagggagaacagaagtgttttatttgtgatagcagatttccatacgacccctacgaccagcctaattcccataccattgaaaatgttattgtaagtttcgaacccgatcgggagaaaaaatggtggcagtcagagaacgggttggatcacgttagcattcgattggatctggaggcacttttccgtttttcccatctcatcctcacttttaaaacttttaggcccgccgccatgctggtggagagaagtacagattacgggcataactggaaggtctttaagtattttgcaaaagattgtgcgacttctttcccaaacataacctcgggccaagctcagggtgtcggcgacatcgtatgcgactccaaatacagcgatatcgaaccatctaccgggggcgaagttgtcctaaaagtactggacccctccttcgaaatagaaaacccatattccccgtatatccaggacctggttaccttgactaacctaagaataaatttcactaagttgcataccctgggcgacgccctgcttggaaggcggcaaaatgattcactagataagtattactatgctctttatgagatgattgtgcgtgggtcttgcttttgcaatggccacgcctccgaatgccgccccatgcagaaaatgcgtggggacgttttttccccccccggtatggtgcacggacagtgcgtctgtcaacataatacggatgggcccaattgcgagagatgtaaagatttttttcaagacgctccctggagaccagcagccgatttgcaggataatgcctgtcgctcttgttcttgtaactctcacagctcccgctgccactttgacatgaccacatatctggcttcaggtggtctcagtgggggcgtatgcgaagattgtcagcacaatacggagggtcagcactgtgatcgatgccgtccccttttttaccgcgaccctctcaagacaatcagcgacccgtatgcctgtataccttgcgaatgcgatcctgatggtacaattagtggaggcatttgtgtcagccactctgaccccgctctgggatcagttgcagggcagtgcctgtgcaaagaaaacgtggaaggagctaaatgtgatcagtgcaagccgaaccattatgggctttccgctacagaccctctcggatgtcagccttgcgattgtaatccattgggtagtttaccctttctgacgtgcgatgtggataccgggcagtgtctctgtctgagctacgtcaccggtgcacactgcgaggaatgcacggtgggttactgggggctcggtaatcatctgcatggctgctccccctgcgactgtgacattggaggagcttacagcaatgtgtgctcccctaagaatggtcaatgtgaatgtcggcctcacgtcacaggccgttcctgctccgagcccgctccgggctatttttttgcgcccctgaacttttacctttatgaggcagaagaggcaacaacgttgcagggtcttgcccccctgggtagtgaaactttcggtcaatcgcctgccgtccacgtggtacttggtgaaccagtgcctggaaatccagtgacttggacagggccgggattcgcgcgcgtgctaccaggagccgggttacgattcgccgtcaataacattccttttccagttgacttcaccattgccatccattacgagacccagtctgcggctgactggaccgttcaaatcgtcgtgaatcctcctggcggctccgagcactgcatccccaagaccctccagtctaagccacagagcttcgctctgcccgctgctactcgaataatgctattgccaacccctatttgcctggagcctgatgtgcaatatagcatcgatgtctacttctcccagcccctgcagggagaatcacacgcccattctcatgtcctggtggacagtctcggtctcataccccagattaactctctggaaaacttttgctcaaaacaggatctcgacgaatatcaattgcacaattgcgtggaaatcgctagcgctatggggccgcaagttctgccaggcgcctgtgaaaggctgatcatatcaatgtctgctaagctgcatgatggtgctgtcgcctgtaaatgtcacccacaagggtcggtgggctcctcctgttcacggctaggcggccagtgccagtgtaagccgctggtggtagggcgttgctgcgacagatgcagtacaggcagctacgaccttgggcaccacggatgtcacccctgccactgtcatccccaggggtccaaagatacagtgtgtgatcaggtgactggtcagtgcccgtgtcacggtgaggtttcaggccgccggtgtgaccgctgtttggccggctattttggctttccttcatgtcacccttgcccttgcaaccggtttgccgaactttgcgaccccgaaacaggctcctgttttaactgtggaggtttcacaacaggtcgcaattgtgagaggtgcatagatgggtattacgggaatccttctagcggtcaaccgtgtaggccatgcctgtgtcctgatgacccttccagcaaccagtacttcgcccatagctgttaccagaatctgtggtcttcggatgtcatatgcaattgtctccagggttataccggaacacaatgcggggaatgcagtactggtttctacggaaaccctcgcatctctggcgctccttgtcagccatgtgcctgcaataacaacatcgatgtcactgatcctgagagttgcagccgagtcacgggggagtgcttaaggtgtctccacaatacacaaggcgccaattgtcagttgtgcaaacctggccactatggcagtgctctgaatcagacttgtcgtcgatgctcctgccacgcttccggcgtatctcccatggaatgtccccccgggggcggtgcatgcctttgcgatccagtgactggtgcctgcccctgtctccccaatgtaaccggcctcgcatgtgaccggtgtgccgacgggtactggaatctggtgccggggagaggctgccaatcatgtgattgcgaccccaggacttctcagagtagccattgcgatcaattgactggtcagtgtccttgcaagctgggctacggagggaaacggtgttcagagtgtcaggagaactactacggtgacccaccaggcaggtgtatcccctgtgactgtaaccgtgccgggacccaaaagcccatttgcgatcctgataccgggatgtgtcgctgtagagagggcgtgtcgggacagagatgtgatagatgtgcccgtggccactctcaagagtttcccacttgtctgcaatgtcatctgtgctttgaccaatgggaccataccatctcgtctttgagtaaggccgtgcagggactcatgcggttagctgctaacatggaggataagagagaaactctgcctgtgtgcgaggccgattttaaggatttaagggggaatgtatcagaaatcgaaaggattctcaaacaccccgtattccctagtggcaagttcttaaaagtgaaggactaccatgactctgtgcggaggcagattatgcaacttaatgagcaactgaaggcggtgtacgaattccaggatctaaaagatactatcgaaagggcgaaaaacgaggcggacctcctccttgaggacctgcaagaagaaattgatctgcagagctcagtgctgaacgcttccatagcggacagctccgagaatattaaaaagtattaccacatctccagcagtgcagagaagaagattaatgaaacgtcatccaccataaatacaagcgcaaataccagaaatgatctcctcacaattctggacactctaactagtaaaggaaatctatccctggagcgactgaaacagatcaaaattcctgatatccaaattctgaacgagaaagtgtgtggcgaccctggtaacgttccctgtgttccactaccttgcgggggtgccctctgcaccggacgcaaaggtcacaggaagtgtcggggaccaggatgccacggcagtttgaccctctcaaccaacgctcttcagaaagcccaggaggctaaaagtatcattcgcaaccttgacaagcaggtgcgcggccttaagaatcagatagaatcgattagcgagcaggcagaagtctcgaagaacaatgcattacaattacgagagaagctcggaaacataaggaatcagtcagatagcgaagaggagaacattaacctgttcattaaaaaggtgaaaaacttcctgctggaggaaaacgtgcctcctgaggacattgagaaagtagctaacggcgtgttggacatccacctgccaatcccaagccagaatcttacagacgaactggtgaaaattcagaagcacatgcagctgtgcgaggattacagaactgacgagaaccggctcaatgaggaggcagacggagctcaaaaattgctcgttaaggcaaaggccgcggaaaaggccgccaacatcttattaaatctggataaaactttgaatcagctgcagcaggctcagatcacacaaggccgagccaatagtaccatcacgcagttgaccgctaacattaccaagattaagaagaacgtgcttcaggcggaaaaccagacacgtgagatgaaatctgagctggagctcgccaaacaacggtccggcctggaggatggattatcactcttgcagacaaagttgcagcggcaccaggatcatgcggtaaacgcaaaagtgcaggctgagtccgcacagcaccaagcaggaagcctcgaaaaggagtttgtggaattgaagaaacagtacgcaattctccagcggaaaacgtctacgacgggcctgactaaggagacactcggcaaagtcaagcagctgaaggatgccgccgaaaagctggcaggggatacagaggccaagattcggcgtatcactgaccttgagaggaaaattcaggatttaaatctgagtcgacaggctaaagccgatcaactccggatccttgaggaccaggtggtcgctataaaaaacgagattgtggagcaggagaaaaagtatgctcgctgctactcttag

SEQ ID NO: 172121 - DNA, 5286 bp, Artificial Sequence
  derived and/or modified sequence
atgcagttccagttaaccctctttctgcacttaggatggctgagttactccaaggcccaggacgactgcaaccgaggtgcttgccaccctactaccggagacctcctcgtcgggagaaatacccagttaatggcttcatccacttgcggactttctagggctcagaagtattgcatactgtcttatctggagggagaacagaagtgttttatttgtgatagcagatttccatacgacccctacgaccagcctaattcccataccattgaaaatgttattgtaagtttcgaacccgatcgggagaaaaaatggtggcagtcagagaacgggttggatcacgttagcattcgattggatctggaggcacttttccgtttttcccatctcatcctcacttttaaaacttttaggcccgccgccatgctggtggagagaagtacagattacgggcataactggaaggtctttaagtattttgcaaaagattgtgcgacttctttcccaaacataacctcgggccaagctcagggtgtcggcgacatcgtatgcgactccaaatacagcgatatcgaaccatctaccgggggcgaagttgtcctaaaagtattggacccttcctttgagatcgagaacccctattcgccatatatacaggatttggttactcttaccaacctccggatcaactttaccaaactccataccttgggtgatgctctattgggccggcgtcaaaatgactccctggacaaatattattacgcgctgtatgaaatgatcgtgcgtggttcatgtttttgtaacggtcacgcttcagaatgccgtcctatgcagaaaatgcggggagacgtctttagtcctcccgggatggtccatggacagtgcgtatgccagcataacaccgatggacctaactgcgaacgatgcaaagatttctttcaagatgctccctggcggcccgcagcagatctgcaggataacgcttgtaggtcctgcagttgtaacagtcactccagccgatgtcattttgacatgaccacctatcttgctagcggaggtctgagcggcggcgtgtgcgaggattgtcagcacaataccgaaggacagcactgcgacagatgtcggcctcttttttatagagatcccctaaagactatatcagacccatatgcgtgtataccatgtgaatgcgaccctgatggcaccatttccgggggcatctgcgtgagccacagcgatcccgcactgggctccgtagctggtcagtgtctctgtaaagagaacgtcgagggggctaaatgcgatcaatgtaaacctaatcactacggcttgtctgcgaccgatccactaggctgtcaaccgtgcgattgcaacccactggggagtttgccattcttaacttgtgacgtggacacagggcagtgtttgtgcctgagctacgtgactggagctcactgtgaagaatgtactgttggttattggggtctggggaatcaccttcatggctgttccccatgtgattgcgatattggcggcgcttacagtaacgtgtgctcccccaagaatggccagtgcgaatgccgccctcacgtcaccggacggagttgttccgaacccgctcctggatacttcttcgcccccctgaacttttatctgtacgaagctgaagaagcgaccaccctgcaaggattagctccgctgggctcagaaaccttcggtcagtcacccgctgtccacgtagtgctcggtgaaccagtacccggaaacccagtcacctggaccggccccggtttcgcccgggtgcttcccggcgcaggcctgcgctttgcagttaataacatacccttcccagttgattttacaatagccatacactacgagacccagagtgccgcggattggaccgtccaaattgtcgtgaatcccccaggcggctccgagcactgtatcccaaaaaccctccaaagtaagccccagtcatttgctttacctgccgctacgcgcataatgcttctgcctacacccatctgcttagaacctgatgtgcagtatagtatcgatgtatacttcagtcagcccttgcagggggagtctcacgcacatagtcacgtactcgtcgattccctcggactgatcccacagatcaattccttagaaaatttttgttccaaacaggacttagatgaataccagctacacaattgtgtggagattgccagcgctatgggcccacaagtgctgcctggagcttgtgaacgtctgatcatatccatgagtgcaaaactgcatgatggtgccgtggcttgcaaatgccatcctcaaggttcagtcggtagttcatgttcgaggctaggcggtcaatgccagtgcaaaccactcgtagtcggccgctgttgtgatcggtgttcaacgggttcttatgacttaggtcaccacggttgtcacccttgtcattgccacccacaagggtcaaaagacacagtgtgtgatcaggtcaccggtcagtgtccttgccacggtgaggtttctggtaggagatgtgatcgttgcttagcaggttatttcggtttcccctcctgtcacccttgtccgtgcaataggtttgccgagctttgcgaccccgagactggttcttgcttcaattgcggcggttttaccactggaagaaattgtgagcgatgcattgatggctactatggaaacccgtcctcgggtcagccctgtaggccatgtctatgcccagatgacccttcttctaatcaatactttgcccactcctgctaccagaacttgtggagctccgacgtgatttgtaactgtttacaaggttatactggaacacagtgtggcgagtgtagcaccggtttttacggaaaccctagaataagcggcgccccctgccagccatgcgcctgtaataacaatattgatgtgacagaccccgaatcttgctcgcgagtgacaggtgaatgcctgcgttgtctgcataatactcaaggcgctaactgtcagctatgtaaacctggacattacggctcagccctgaatcagacctgcagaaggtgttcttgccatgcttccggagttagcccgatggaatgtccaccaggaggaggagcttgcctctgcgacccagtaacgggtgcttgcccgtgtttacccaatgttacaggtttggcttgtgatcgttgtgccgacggttattggaatttggtccctggccgaggttgccaatcgtgcgactgtgacccgcgcacctcccagagttctcattgcgaccagctcacagggcagtgtccatgtaaactcggatacggtggtaagcgatgttcagaatgtcaagaaaattattacggggatcccccaggaagatgcattccctgcgactgcaatagagccggcactcaaaagccaatctgtgaccctgacacaggcatgtgccgctgtagggaaggcgttagtggccagagatgcgaccggtgcgccaggggccatagtcaagaatttccgacatgcttgcagtgccacctctgcttcgatcaatgggatcataccatcagctcacttagtaaagctgttcagggactaatgaggctggccgcaaacatggaggacaaaagagaaaccctgccagtgtgtgaagctgattttaaagacctcagaggtaatgtgagtgaaattgaacgcatattaaaacaccctgtttttcccagtggaaagttcctgaaggtgaaagactaccacgactcagttcggagacagattatgcagctaaacgagcaactgaaggccgtgtacgagtttcaggacctgaaagatacaatcgagcgagccaaaaatgaagctgacctacttctcgaggatttacaggaagaaattgacttgcaatcctctgtgctgaacgcatcaatagccgatagttctgagaatataaaaaaatactaccatatctcaagttccgcggaaaagaagatcaacgaaacttcaagcaccataaacaccagcgcgaacaccagaaacgatctcctcacaatccttgacacgttgacatctaaagggaatctgagcctggaacgtcttaagcagatcaaaatccccgatattcaaatactgaatgagaaagtatgtggcgatccggggaacgtgccgtgcgttcctctgccttgtggaggcgctctctgcactggaagaaagggccaccgtaagtgtaggggacctggttgtcatggatcgctcactctatcaacgaatgctctgcaaaaagcccaagaggccaaaagcatcatacgcaacctggataagcaggtcagggggctgaagaatcaaatcgagagcatctctgaacaggcggaggtaagcaagaataatgctctgcaactaagagaaaaactgggaaacatcaggaaccagtccgacagcgaagaggagaatatcaacctgtttatcaagaaagtcaaaaattttcttttggaggagaacgtgccacctgaggatatcgagaaagtagcaaatggcgtgcttgatattcacctccccatcccaagccagaacttaaccgacgaactggttaagatacagaaacatatgcaactctgcgaagactacagaactgatgagaaccggttgaatgaagaagcagatggggcgcaaaaacttctggtcaaggcaaaggccgccgaaaaagccgcaaacatcctattaaacctagataaaacactgaaccagctgcagcaagcacagatcactcaaggtcgagctaactcaaccattacccagctgacggctaatattacgaagattaaaaagaacgttcttcaggcagaaaaccagaccagagagatgaagtccgagctggagttagcaaaacaacgcagtggcctggaagatggattgagcttactgcagacaaagctgcagcggcatcaggatcatgcagttaacgccaaagtgcaggcagagtccgcccaacaccaggcaggaagtttggaaaaagaatttgtggaattaaagaaacagtacgccatcctacaaagaaagactagtacaactggccttacaaaagaaacgctgggaaaagtgaagcagctcaaggacgcagccgaaaaattagcgggcgacacagaagcaaagatcagacgcatcacagacttggaacgaaaaattcaggacttgaatctatctcgccaggctaaagcagaccagttgcgcatcttggaagatcaggttgtagcgatcaaaaacgaaatcgtggaacaggagaaaaaatatgcccgatgttactcctag

SEQ ID NO: 172122 - RNA, 5286 nt, Artificial Sequence
  derived and/or modified sequence
augcaguuccaacuuacguuguuucuucacuuggguuggcugagcuacagcaaagcucaggaugauugcaauagaggcgcgugccacccuacgaccggggaccuguuagugggccggaacacgcagcugauggcuuccucaacauguggacucagcagggcucagaaauacugcauacucucauacuuagaaggugaacagaagugcuucauuugcgauagcagauuuccauaugacccauacgaucaaccaaacucucauacuaucgagaauguaauuguguccuuugagcccgacagggaaaagaagugguggcagucggagaacggucuggaucacguuucuauuaggcuggaccucgaagcacuguuccgcuuuucucaccugauccugacuuucaagaccuuuaggccugcagcuaugcucguggagaggucuacugacuacggacacaacuggaagguuuuuaaauauuucgcuaaggacugcgccacaucguucccaaacauuacuuccgggcaggcccagggcgugggugauaucgucugcgauucaaaguauuccgacaucgagcccucuaccggaggugaagucgugcuuaaaguucuagaucccucuuuugagaucgagaacccauauaguccguacauccaagacuuagugacuuugacaaaucucagaaucaacuucacaaaacuucacacucucggggacgcucuacuugggcgcaggcagaacgacucccuagacaaguacuauuacgcucuguacgaaaugaucguccgcgguucgugcuucuguaacggccaugccucagaaugccgaccaaugcaaaaaaugaggggcgauguguuuagcccucccgggaugguacacggccagugugugugccagcacaauaccgaugguccaaacugcgagcgguguaaagauuucuuccaggacgcgccauggcggccugccgccgacuugcaggacaacgccugucgauccuguuccuguaauucccauucauccagaugucauuucgauaugaccacuuaccuggcuucaggcggacuuuccggaggcgugugcgaagauugucagcacaacacagaaggccagcacugugaccgcugccggccucucuucuaccgggacccuuugaagaccaucagcgacccuuaugccuguauuccaugcgagugcgacccggaugguacuauuucaggugggauuuguguuucucauagcgacccugcauuaggaucuguggcaggccagugucuguguaaggaaaauguugaaggggcaaagugcgaucaguguaagcccaaccacuacggccugagcgcaaccgacccccugggcugccagccuugugacuguaacccccugggaucucugccuuuccugaccugcgaugucgacacaggacaaugccuauguuuaucauacguuacaggugcucacugugaagaauguaccgucggcuacuggggacugggcaaccaccuucaugguuguucgcccugcgacugugacauaggcggcgcguacaguaaugugugcucucccaaaaacgggcagugcgaguguaggccacacgucacaggaaggaguugcuccgaacccgccccagguuauuucuucgcaccacucaacuuuuaucucuacgaggcagaggaggccacuacucuucaaggacuggcacccuuagggagcgaaacauucggccagucucccgcuguacauguugucuugggggaacccguaccugggaacccagugacauggacuggccccgguuuugccaggguguugccuggcgcuggacugcgguucgccgugaacaacaucccuuucccuguagauuuuaccauagcuauucacuacgagacacagucugcggcugacuggacuguccagaucguugugaauccaccaggaggcuccgagcacugcauaccaaaaacccuccagucaaaaccccaaucauucgcauugcccgcugccaccagaauaaugcuacuucccacacccauuugucuggaaccagauguacaguacucuauagacguuuacuuuucccagccucuacaaggugagagccacgcucauucccacgugcuuguggacucucuaggacucauuccacagauuaacagucucgaaaacuucugcucaaagcaagaccuggacgaauaucagcugcacaauugcguggagaucgcauccgcgaugggcccucaggugcuacccggggcuugugaaaggcuuaucaucaguaugucugcgaaacugcacgauggggccguggccuguaaaugccauccccaaggcucaguggggaguagcuguagcagacuggguggccagugccagugcaagccucugguugucggacgguguugcgaccgcugcucaaccggaagcuaugaucuaggccaucacggcugucacccuugucacugccacccccaggguuccaaggauacggucugugaucagguuacugggcaguguccuugucacggcgaagugucuggacggagaugugacagaugccuggcgggauacuuuggcuuuccuucaugccacccaugccccuguaaucgguucgcagagcugugcgaucccgagacagguucaugcuuuaauuguggaggguuuacaacaggccgcaauugcgagcgcugcauugacggauacuauggcaauccuuccucuggucaacccugucgacccugccugugcccagaugaccccucguccaaccaguauuuugcucacaguuguuaccagaaucugugguccagugauguuauuugcaauugccugcagggcuacacuggaacucaguguggcgaaugcucaaccggguuuuauggcaaccccagaaucucaggcgccccaugccaacccugcgccugcaacaacaacaucgauguuacagacccugagucuuguaguagggugacaggugaaugucucaggugucugcacaacacucagggggccaauugccaacuguguaaaccgggacacuauggguccgcucugaaccagacuugccggagaugcucuugccacgcaucuggagucagcccgauggagugcccuccuggcggaggagcuugucuaugugauccugugacuggggcgugccccugucucccuaacgugaccggguuagccugcgaucggugcgccgacggauacuggaaccuaguuccgggccggggaugccaaucgugugauugcgaccccagaacaagccaaucaucccauugcgaucaguuaacaggucaaugcccauguaagcugggauauggcggcaaaaggugcucggagugccaggaaaauuacuacggcgacccucccggccggugcauucccugcgauugcaacagggccgggacccaaaaacccauuugcgaccccgauaccggcaugugucgguguagagaggguguuuccggccagagaugugaucguugcgcccguggccauucccaggaguucccuacuugcuugcagugccacuuaugcuuugaccagugggaucacaccauuucgagccucuccaaggcgguucaagggcugaugcggcuggcugccaauauggaggacaagagggaaacacugccagugugugaagcagacuucaaggaccuacgggguaacguguccgagaucgaacgaauccugaagcacccaguguuccccuccggcaaauucuugaagguaaaggacuaucacgauucgguucgccgccagaucaugcagcugaacgagcagcuuaaggccgucuacgaauuccaagaccugaaagauaccaucgagagggccaagaaugaggcagaccuguuacuagaagaucugcaggaagagaucgacuugcaguccucgguucuuaacgccucuaucgcugacagcucugaaaauaucaaaaaauacuaccauauuuccucuucagccgagaagaaaauuaacgagacuuccaguaccauuaacacuucagccaacacacggaacgaccuccuaacuauccucgacacccugacuaguaaaggcaaucuaagcuuggagcgguugaaacagaucaaaauaccugacauucagauccucaacgaaaaagucuguggggaucccgguaacgugccgugcgugccucugccgugcgggggggcgcucuguacggggcgcaaagggcacaggaaaugcaggggacccgggugccacggcaguuugacgcugucuacgaaugcccugcagaaagcccaggaggcaaaaaguauuauccguaaucuggacaagcagguacggggacucaaaaaccaaaucgaaagcauuucggagcaggcugaggugucuaaaaauaacgcccuccaauugcgagagaaacucgggaacauaagaaaccaaucagacucagaagaagaaaacauuaaccuguucauuaagaaagucaaaaauuuccugcuggaggaaaaugucccaccagaagauauugagaaaguggcgaacggcgugcucgacauucaccugccgaucccaagucaaaaccugacagacgagcuggugaaaauucagaagcauaugcagcucugugaggacuaccggacagacgagaaccgcuugaaugaggaagccgauggggcucagaagcugcuggucaaggcuaaggcugccgagaaagcugccaacauuuuacucaaucuagauaagacucucaaccaguugcaacaagcucagauuacacagggucgggccaauucuaccaucacacagcugaccgcaaacaucacaaaaaucaagaagaauguuuugcaggcugagaaucagacacgcgagaugaagagugagcuggaacucgcaaaacagcguucaggccucgaagacggccuuagcuuguugcagacaaaacuccagcggcaucaggaccacgccgucaacgcuaaagugcaggccgaauccgcucagcaucaggcggguucucucgaaaaagaauucgucgaacugaaaaagcaguacgcuauccuccaacgcaaaacaucaacuaccggacucaccaaggagacauuaggaaagguuaaacagcugaaggacgcagcugaaaagcuugcuggcgacaccgaggcgaagaucagaaggaucacugaucuggagcgcaagauccaagaccuuaaccugucacgacaggcaaaggcugaccagcugcggauauuagaggaucagguugucgcuauuaaaaaugaaauuguggaacaggagaagaaguaugcccgcugcuacucuuag

SEQ ID NO: 172123 - RNA, 5286 nt, Artificial Sequence
  derived and/or modified sequence
augcaauuucagcuuacccuuuuccuccaccugggaugguuauccuauucaaaagcccaagaugacuguaaucggggcgccugucacccaacaaccggugaucuucuagucggcagaaauacccaacucauggccuccagcaccuguggacuuucacgcgcgcagaaguauugcauccucagcuaucuggaaggggagcagaagugcuucauuugcgauaguagauucccuuacgacccuuaugaccagccuaacucucacacuauagagaacgucauugugucguucgaaccggaccgcgaaaagaagugguggcaauccgaaaacggucuggaccacgucagcauuagacucgaucucgaagcccucuuuagauucucucacuuaauccuuacuuucaagacauuucguccggcagccaugcuagucgagaggagcacagauuacggccauaacuggaaaguuuuuaaguacuuugccaaggacugcgcuaccaguuucccaaauaucacaucaggucaagcucagggggugggggacauagucugcgauagcaaguauucagauauugagcccagcacaggaggugaagucguauuaaaaguucuugacccaaguuucgagaucgaaaauccuuacucaccuuacauucaagaucuugugacccuuacaaaccucagaauaaauuucacaaagcugcacacuuugggggacgccuuacucggaaggagacagaacgacucucuagauaaauacuacuaugccuuauacgagaugauagucagagguuccuguuuuugcaacgggcacgccagcgaguguaggcccaugcagaaaaugcgaggggauguguucucaccuccagguaugguucaugggcagugcgugugccagcacaauacggauggcccaaacugugagagaugcaaggacuuuuuccaggacgccccguggagacccgccgcagaccuccaggacaaugcgugccguuccugcagcugcaauucccacucgagcagaugccacuuugauaugacuaccuaccuggcuucugguggcuuaaguggaggaguaugcgaggauugccagcauaacacugaaggacagcauugcgaccgguguagaccucuguucuaucgagacccucuaaagacuauaagugacccuuaugccugcauucccugcgagugugacccagacgguacuauuucaggugggauuuguguuucucauagcgacccugcauuaggaucuguggcaggccagugucuguguaaggaaaauguugaaggggcaaagugcgaucaguguaagcccaaccacuacggccugagcgcaaccgacccccugggcugccagccuugugacuguaacccccugggaucucugccuuuccugaccugcgaugucgacacaggacaaugccuauguuuaucauacguuacaggugcucacugugaagaauguaccgucggcuacuggggacugggcaaccaccuucaugguuguucgcccugcgacugugacauaggcggcgcguacaguaaugugugcucucccaaaaacgggcagugcgaguguaggccacacgucacaggaaggaguugcuccgaacccgccccagguuauuucuucgcaccacucaacuuuuaucucuacgaggcagaggaggccacuacucuucaaggacuggcacccuuagggagcgaaacauucggccagucucccgcuguacauguugucuugggggaacccguaccugggaacccagugacauggacuggccccgguuuugccagggugcugccuggggcuggguugcguuuugccguaaacaacauuccauucccugucgacuuuacuauugccauccacuaugaaacucaauccgccgcugauuggacuguucagaucguaguuaacccaccuggugguucugaacacuguauaccaaagacccugcagucgaaaccgcaaucauuugcccugccugccgcgaccagaauaauguugcugcccacacccaucugucuugagccugacguucaguacucuauugauguauauuuuucccagccccugcagggcgagucacacgcccacucucacguucugguggacuccuugggacuaauuccacagauuaauucgcucgagaauuuuuguucaaaacaggaccuagacgaguaccagcuccacaacuguguggaaauugcaucagcuaugggaccccagguacugccgggugccugcgaaagacugauaauaagcaugagugcuaaacugcacgauggagcaguagcuuguaaaugccacccucagggauccgucgguucgucaugcagccggcucgguggacagugccaguguaagcccuuagucgugggcagauguugugaucguuguuccacagggaguuacgauuuaggucaucacggaugucaccccugucauugucacccucagggcuccaaagauacuguuugcgaucaaguuaccggacagugcccuugccauggcgagguguccggcagacgcugugauaggugcuuggcaggauauuuuggguuuccuagcugccauccauguccauguaacagauuugcagagcugugcgacccagagaccggcucaugcuucaacuguggcggcuucacuacaggcagaaacugcgaaagauguauagaugguuauuacggcaaucccucaucuggccagcccugcagaccaugccuguguccugacgaccccucuagcaaccaauacuuugcccacucaugcuaucaaaauuuguggucaagugauguuauuugcaacugccuucaaggcuacacagguacccagugcggcgaaugcucaacgggguuuuacggaaaccccaggauuuccggcgccccaugucagccaugugccuguaacaauaauauagaugugacagacccugaaaguuguucucgagugaccggagaauguuugcggugccuccacaauacacaaggugcgaacugccaacuaugcaagccuggccauuaugggucagcguuaaaccaaacauguaggcgcuguucaugccacgccagcgguguaucucccauggaauguccacccggcggcggagcuugccugugcgacccugugaccggcgcguguccauguuugccaaacgugacuggauuagccugcgauagaugcgcugauggauauuggaaucucguaccugggcguggaugucaaagcugcgacugugacccuagaaccagucaauccagucauugcgaucaguuaacgggucagugcccuugcaaauugggcuacggagguaaaagauguucggagugucaggagaauuacuacggugaucccccgggaagauguauccccugugacugcaaccgagcuggcacacagaaaccuauaugcgaccccgacaccggcaugugcagaugcagggaaggugugucugggcagagaugcgaccguugugcuaggggacacucucaggaauuucccacuugcuuacaaugccauuugugcuucgaucagugggaucauaccaucuccuccuugaguaaagccgugcagggccugaugagacuugccgccaacauggaggauaagagagagacauugcccgucugcgaagccgauuucaaggaccuccggggcaacgugagcgagaucgagcgaauccuaaaacacccuguguuuccauccggcaaauuucugaaagucaaagauuaucaugacucagugcgcaggcaaaucaugcaacuuaaugaacaacucaaggcugucuacgaguuccaggaccucaaggauacaaucgaacgugccaaaaacgaggcggauuuauuauuagaggaccugcaagaggagaucgauuugcagucaucaguccugaaugcuucuauagcugacuccuccgaaaacauaaagaaauacuaccauauuucaaguagcgccgagaagaagauaaaugaaacuagcaguaccauuaauacaagcgcaaauacacggaaugacuuacuaaccauccuggauacccuaaccagcaagggcaaucugucacuugaacgccucaaacaaaucaagauuccugauauccaaauucucaaugaaaaagucuguggagacccggguaaugugccaugcgucccuuugcccugcggaggggcacucugcaccggaagaaagggccaucgcaaguguagagggccgggcugucacgggucacugacccucucuacuaaugcucuccaaaaagcccaggaggcuaaauccaucauacgcaaccuggauaagcaagugaggggauuaaagaaucagauugaguccaucagugaacaggcugaagugucuaaaaauaaugcucuacagcucagagagaaauugggaaauauacgaaaccaaagugauagcgaagaagaaaauaucaauuuauucaucaaaaaaguaaagaauuuccuucuggaagagaauguuccacccgaggauaucgaaaaaguugcaaaugggguacuggacauucaccucccuaucccuagucaaaaccugacggacgagcuaguuaaaauccagaagcacaugcaacucugugaagacuaccgcaccgacgaaaaccgccugaaugaggaagcagauggugcccagaaauugcucguuaaagccaaagcagccgagaaagcagcgaauauuuuacugaaucuggacaaaacccuaaaucaacuucaacaggcucagauaacucagggaagagccaauuccacuaucacacagcuuacagcaaacaucacuaagauuaagaagaacgugcugcaggccgaaaaucagacucgagaaaugaaauccgaacuggaacuugcaaaacaaaggagugggcucgaggauggguugucacugcuccaaaccaaacuucagagacaccaagaccaugccgugaaugcaaaggugcaggccgaaagcgcgcagcaccaagcuggaagucuggaaaaggaauucguggaacucaagaaacaauaugccauccugcagagaaaaacaucgaccaccggacucaccaaagaaacuuuagggaaggugaagcagcuaaaagacgcggcagagaaacuagccggagauacggaagcgaagaucagaagaaucacagaccucgaaagaaagauacaggaccuuaaucugagccgacaagcuaaagccgaccagcuccgaauucuggaagaccaaguuguggcuauuaaaaacgaaaucguagagcaggagaagaaauacgcccgcuguuacuccuag

SEQ ID NO: 172124 - protein, 738 aa, Artificial Sequence
  derived and/or modified sequence
MEKSRMNLPKGPDTLCFDKDEFMKEDFDVDHFVSDCRKRVQLEELRDDLELYYKLLKTAMVELINKDYADFVNLSTNLVGMDKALNQLSVPLGQLREEVLSLRSSVSEGIRAVDERMSKQEDIRKKKMCVLRLIQVIRSVEKIEKILNSQSSKETSALEASSPLLTGQILERIATEFNQLQFHAVQSKGMPLLDKVRPRIAGITAMLQQSLEGLLLEGLQTSDVDIIRHCLRTYATIDKTRDAEALVGQVLVKPYIDEVIIEQFVESHPNGLQVMYNKLLEFVPHHCRLLREVTGGAISSEKGNTVPGYDFLVNSVWPQIVQGLEEKLPSLFNPGNPDAFHEKYTISMDFVRRLERQCGSQASVKRLRAHPAYHSFNKKWNLPVYFQIRFREIAGSLEAALTDVLEDAPAESPYCLLASHRTWSSLRRCWSDEMFLPLLVHRLWRLTLQILARYSVFVNELSLRPISNESPKEIKKPLVTGSKEPSITQGNTEDQGSGPSETKPVVSISRTQLVYVVADLDKLQEQLPELLEIIKPKLEMIGFKNFSSISAALEDSQSSFSACVPSLSSKIIQDLSDSCFGFLKSALEVPRLYRRTNKEVPTTASSYVDSALKPLFQLQSGHKDKLKQAIIQQWLEGTLSESTHKYYETVSDVLNSVKKMEESLKRLKQARKTTPANPVGPSGGMSDDDKIRLQLALDVEYLGEQIQKLGLQASDIKSFSALAELVAAAKDQATAEQP

SEQ ID NO: 172125 - protein, 679 aa, Artificial Sequence
  derived and/or modified sequence
MVELINKDYADFVNLSTNLVGMDKALNQLSVPLGQLREEVLSLRSSVSEGIRAVDERMSKQEDIRKKKMCVLRLIQVIRSVEKIEKILNSQSSKETSALEASSPLLTGQILERIATEFNQLQFHAVQSKGMPLLDKVRPRIAGITAMLQQSLEGLLLEGLQTSDVDIIRHCLRTYATIDKTRDAEALVGQVLVKPYIDEVIIEQFVESHPNGLQVMYNKLLEFVPHHCRLLREVTGGAISSEKGNTVPGYDFLVNSVWPQIVQGLEEKLPSLFNPGNPDAFHEKYTISMDFVRRLERQCGSQASVKRLRAHPAYHSFNKKWNLPVYFQIRFREIAGSLEAALTDVLEDAPAESPYCLLASHRTWSSLRRCWSDEMFLPLLVHRLWRLTLQILARYSVFVNELSLRPISNESPKEIKKPLVTGSKEPSITQGNTEDQGSGPSETKPVVSISRTQLVYVVADLDKLQEQLPELLEIIKPKLEMIGFKNFSSISAALEDSQSSFSACVPSLSSKIIQDLSDSCFGFLKSALEVPRLYRRTNKEVPTTASSYVDSALKPLFQLQSGHKDKLKQAIIQQWLEGTLSESTHKYYETVSDVLNSVKKMEESLKRLKQARKTTPANPVGPSGGMSDDDKIRLQLALDVEYLGEQIQKLGLQASDIKSFSALAELVAAAKDQATAEQP

SEQ ID NO: 172126 - protein, 622 aa, Artificial Sequence
  derived and/or modified sequence
MSKQEDIRKKKMCVLRLIQVIRSVEKIEKILNSQSSKETSALEASSPLLTGQILERIATEFNQLQFHAVQSKGMPLLDKVRPRIAGITAMLQQSLEGLLLEGLQTSDVDIIRHCLRTYATIDKTRDAEALVGQVLVKPYIDEVIIEQFVESHPNGLQVMYNKLLEFVPHHCRLLREVTGGAISSEKGNTVPGYDFLVNSVWPQIVQGLEEKLPSLFNPGNPDAFHEKYTISMDFVRRLERQCGSQASVKRLRAHPAYHSFNKKWNLPVYFQIRFREIAGSLEAALTDVLEDAPAESPYCLLASHRTWSSLRRCWSDEMFLPLLVHRLWRLTLQILARYSVFVNELSLRPISNESPKEIKKPLVTGSKEPSITQGNTEDQGSGPSETKPVVSISRTQLVYVVADLDKLQEQLPELLEIIKPKLEMIGFKNFSSISAALEDSQSSFSACVPSLSSKIIQDLSDSCFGFLKSALEVPRLYRRTNKEVPTTASSYVDSALKPLFQLQSGHKDKLKQAIIQQWLEGTLSESTHKYYETVSDVLNSVKKMEESLKRLKQARKTTPANPVGPSGGMSDDDKIRLQLALDVEYLGEQIQKLGLQASDIKSFSALAELVAAAKDQATAEQP

SEQ ID NO: 172127 - protein, 427 aa, Artificial Sequence
  derived and/or modified sequence
MGFAMEDTEDISQNHFGHLCIFKWGHWKKDLKYTISMDFVRRLERQCGSQASVKRLRAHPAYHSFNKKWNLPVYFQIRFREIAGSLEAALTDVLEDAPAESPYCLLASHRTWSSLRRCWSDEMFLPLLVHRLWRLTLQILARYSVFVNELSLRPISNESPKEIKKPLVTGSKEPSITQGNTEDQGSGPSETKPVVSISRTQLVYVVADLDKLQEQLPELLEIIKPKLEMIGFKNFSSISAALEDSQSSFSACVPSLSSKIIQDLSDSCFGFLKSALEVPRLYRRTNKEVPTTASSYVDSALKPLFQLQSGHKDKLKQAIIQQWLEGTLSESTHKYYETVSDVLNSVKKMEESLKRLKQARKTTPANPVGPSGGMSDDDKIRLQLALDVEYLGEQIQKLGLQASDIKSFSALAELVAAAKDQATAEQP

SEQ ID NO: 172128 - DNA, 2217 bp, Artificial Sequence
  derived and/or modified sequence
atggaaaagtcgaggatgaaccttccgaaaggtcccgacactctgtgtttcgacaaagacgaattcatgaaggaagacttcgacgtcgaccacttcgtgtccgattgtcggaaaagggttcagttggaggaactccgagatgacctcgagctgtattacaagctgctaaaaactgccatggttgaattaattaataaagactatgctgactttgtgaatttgagcacgaatctcgttgggatggacaaagccctcaatcagctctcagtgccactgggacagctaagagaggaagtactctcactcaggtcaagtgtgtccgagggaattagagccgtcgatgagagaatgagcaaacaggaggacattcgaaaaaagaaaatgtgtgttttgagactcattcaagtgattaggtccgttgaaaagatcgaaaaaatcctgaattctcagagcagtaaggagacaagtgcactggaggcaagctcccccctgctgacaggtcaaatcctggaaagaatcgccacggaatttaaccagctccaattccacgccgtgcagtcaaaaggaatgcctctgctcgacaaggttcgcccacgcattgctggtatcactgctatgctgcagcagagcctggagggcctgcttctggagggattgcagacttctgatgtcgatatcattaggcattgtctcaggacctacgccacaatcgacaagactcgagatgccgaagcccttgtggggcaggtgctggtgaaaccttatatagacgaggtcatcattgagcaattcgtggaatcgcacccaaacggcttgcaggttatgtataacaagctgctggagtttgtaccccatcattgccgccttttgcgcgaggtgaccgggggagcaatctccagcgagaaagggaacacagtgcctggatacgattttctggtgaattccgtctggccacaaattgtccaggggttggaggagaagctgccaagcctctttaatcccggtaaccctgacgcttttcacgagaagtatactatctccatggatttcgttcggaggctggagcggcagtgtggctctcaggcctctgtgaagcggctgcgggcccatcctgcctaccactcattcaacaagaaatggaaccttccggtgtactttcagatcagattcagggaaattgcagggagcctcgaagccgcccttaccgacgttcttgaagatgcgcccgccgaatcaccatattgcctgctagcctcccatcgcacatggagcagcctgagacggtgttggagtgacgaaatgtttcttccactcctagtccataggctgtggaggctaacgttacaaatcctggctcggtattccgtctttgtgaacgagctgtccctcaggcccatcagcaacgagagtcccaaggagattaaaaagccactagtaactggcagcaaggagcccagcattacacagggtaatacagaagaccagggctctgggccctccgaaaccaaaccagtggtgtccatatctaggacccagctggtctatgttgtggctgatttggataagctccaagaacaactcccagagctactcgaaatcattaaaccgaagctggagatgatcggcttcaaaaacttttccagtatatctgcggccttagaagattctcagagcagcttcagcgcttgtgtgcctagcctcagcagtaaaattattcaggatctgtctgactcctgttttggcttcctcaagtctgccctggaagtgccacgcttataccgaaggaccaataaggaggttcccacgacagctagttcctacgttgacagcgctctgaagccgctatttcaacttcagtcagggcataaagataaactgaaacaagccatcatccaacaatggttggaaggtactctctctgagtcgactcacaagtactacgaaacagttagcgacgtgcttaattcagtcaagaaaatggaagagtctctcaagcggctgaagcaggcacggaaaaccactcctgccaatccggtggggccgtccggggggatgagcgatgacgataagatcaggttacagctggccctagatgttgagtatttgggcgagcagatccagaagctggggctccaggcgtcagatatcaaatctttctccgctctcgccgagttagttgcagcagccaaggatcaggctacagctgagcagccctag

SEQ ID NO: 172129 - DNA, 2040 bp, Artificial Sequence
  derived and/or modified sequence
atggtcgagcttatcaacaaggactatgcagactttgtcaacctgtctactaatctcgtaggaatggacaaggcactaaatcagctcagcgtgcccctgggccaactgagagaagaggttctgtccttgagaagtagcgtatccgagggcattcgtgcagtggatgagcggatgagtaaacaggaagatatcagaaagaaaaagatgtgtgtgctgaggttgatacaggtcatacgcagcgtagagaagatcgaaaaaatcttgaattctcagtcatctaaagagacgtccgctctagaggctagctcaccactgctcactggacaaattctcgaacgaattgccaccgaattcaatcagctccagtttcatgccgtgcagtccaagggaatgcctttgctcgataaggtgcgcccgaggatcgcgggcatcacggctatgcttcagcaatcactcgagggactgcttctggaaggtctgcagacctcggacgtcgacattattcgccactgtctccggacgtacgccaccatagacaagacacgtgatgctgaggccctcgtcggacaggtcctggtgaagccatatattgacgaggtgattatcgaacaatttgtggaaagccatcccaacggactgcaggtaatgtacaacaaacttctggagtttgtcccgcaccactgtagacttctacgtgaagtgacaggaggggcgatcagctccgagaagggaaacaccgtccctggatatgatttccttgtcaactcagtctggcctcaaatcgtgcagggactcgaggaaaaacttcctagtctcttcaatcccggcaatcctgacgccttccacgagaaatacaccatctcgatggattttgtgcggcggcttgagcgtcagtgcggctcgcaggcttccgtgaagcgattacgggcacacccggcctaccactccttcaataaaaaatggaaccttcctgtttactttcagatccggtttcgggaaatcgcagggagtctggaggcagctcttaccgacgtgctcgaggatgccccggcggagtcaccatattgcttattggccagccacagaacatggagctctcttagaaggtgctggagtgacgagatgtttctccctttgttggtgcacagactgtggagacttaccctgcagattctggctcgttattcagttttcgtgaacgagctgtcattacggccgatcagcaatgagtcccccaaggagatcaagaaacctctggtcactggctccaaggagcccagtatcacacaggggaatacagaggatcaaggcagcggccccagcgaaaccaaaccagttgtctcaattagcagaacccagcttgtgtatgtggtggctgatctcgataagctacaggagcagcttccagaactgctggagattataaaaccaaaacttgagatgatcgggttcaaaaacttttcgtcaatatccgccgctcttgaagacagtcaatccagttttagcgcttgtgtacccagcctgagctctaagatcatccaagatttgtctgactcttgtttcgggtttctgaaaagcgctctagaggtcccacggctgtataggaggacgaataaggaggtacctaccacagcctcttcatacgtcgactcagctctgaaaccactgttccaacttcaatctggacacaaggacaaactgaaacaagcaattattcagcagtggctggagggaactctttctgagagtactcataaatactatgagaccgtgtccgatgtgttgaacagtgtcaagaaaatggaagagtccctgaagcgtctgaaacaggcaaggaaaactacccccgcgaaccctgtgggaccgtctggcggcatgtctgatgacgataaaatcagattacagttggccctggacgtcgaatacttgggagaacaaatccagaagcttggccttcaggccagcgatataaagtctttctcggctctggcggagctcgtggccgctgccaaagatcaagctactgcggaacaaccatag

SEQ ID NO: 172130 - DNA, 1869 bp, Artificial Sequence
  derived and/or modified sequence
atgtctaagcaggaagatatcagaaaaaagaagatgtgcgtgctcaggctgatccaggtcattaggagcgttgagaagattgaaaagatcctcaacagccagagctccaaagagacaagtgcactggaggccagctcaccgcttctgacagggcagatattggagcgcatcgcaaccgaatttaaccagttacagttccatgctgtgcaaagtaaggggatgccactccttgacaaggtcagacccaggatcgctggtattacagctatgctacagcagtccctagaagggctcctgctcgagggtttgcagacatctgacgttgacatcattcggcactgtctacgtacctacgcgactatcgacaagactagggacgccgaggccctggttggacaggtgctcgttaagccttacatcgacgaggtgataatcgaacagtttgttgagtcgcacccaaatgggctccaggtgatgtacaataagctactggagttcgtacctcatcactgccgcctcctgcgggaagttacaggtggggccatttcttccgagaagggaaacactgtgcctggctatgactttttggtgaattctgtgtggccccagattgttcagggccttgaagaaaaactgcctagtctcttcaatccaggtaatccagatgccttccacgagaagtatactatttccatggacttcgtgcgccggttagagcgtcagtgtggatctcaagcctccgtgaagaggttgcgcgctcaccccgcatatcattcttttaacaagaagtggaatctcccagtgtacttccagataaggttccgagaaattgcaggcagccttgaagcagctttgacagatgtgctggaggatgctcctgctgagagtccctattgccttctcgcctcccataggacatggtctagcctccgaaggtgctggtcagacgagatgttcctgcccctcctggtacataggctctggaggctcaccctccagattttggctaggtactctgttttcgtcaatgaattatccttgaggccaatttctaatgagtctcccaaggaaatcaaaaaaccccttgtcacgggctccaaagagccttctatcacacagggcaatactgaggatcagggtagcggtccttctgagacgaaaccagtagtgagcatctcaagaacgcagctggtgtatgtcgttgcagatctggataaactccaggagcagctgcccgaactgctcgagattattaaacctaagctggaaatgatcggcttcaagaacttttccagtattagcgccgcattggaggatagccagtcatcctttagcgcatgcgttccttctctgtcgagcaagattatacaggatctgtccgactcctgcttcgggttcttaaagagtgctctcgaggtgccaagactgtatagacgaactaataaggaggtgccaaccacagccagttcctatgtggatagcgccttgaagcctctatttcagctgcagtctggacacaaagacaagctgaaacaggctattatccagcaatggttggaaggaaccctatccgagtctactcacaagtattacgaaacagtgtctgatgtcctgaattctgtcaagaaaatggaagagagtcttaagcggctcaagcaggcccggaaaaccaccccagccaaccccgttgggccctccggtggcatgagcgacgatgacaagatcaggctgcagctggctctggacgtggagtatttgggcgagcagatccaaaagctggggcttcaggcttccgatatcaagtcattctctgctctcgccgagttggtcgctgctgctaaggatcaggccacggcagagcagccgtag

SEQ ID NO: 172131 - DNA, 1284 bp, Artificial Sequence
  derived and/or modified sequence
atgggcttcgccatggaggatacagaagacatcagtcaaaaccattttgggcatttatgcatctttaagtgggggcattggaagaaagacttgaagtacacgatctcgatggacttcgtacgacgtctagagcgacaatgcgggagtcaagccagcgtcaagcgcctgcgggcacacccggcctatcactcatttaataaaaagtggaacttgcccgtgtacttccagattaggtttagagagatcgcagggtcactggaagccgcgctcactgacgtactggaggatgcacctgcggagtcgccctactgcctgctggcgtcccatcggacctggtccagcctgcgacgatgttggtccgacgagatgtttttgccactgctggtccacaggctgtggcggctcactttgcagattttggctcggtactcggtgttcgtgaacgagctcagcctgaggcccattagtaatgaatctcccaaggagattaaaaaaccactagttactggatcaaaggaacctagcataacgcagggaaatacagaggatcagggatctgggccttccgaaaccaagccggtcgtctccatatctcgtacgcagttagtctacgtggtggctgacctggacaaactccaggagcagctacccgagctgcttgaaattatcaaaccaaagctggagatgatcggttttaagaatttcagctctatctccgctgccctggaggatagtcaatcaagcttttcggcctgcgttcctagcttgtccagtaaaattatccaggatctgtcagactcttgctttggcttcctgaagagtgcactagaggtccctcgcctatatagacgaactaataaggaggtgccgaccacggcctccagttacgtggactccgcgctgaagccacttttccagctgcagagtggccataaggacaagctcaaacaggcaatcatccagcagtggctggagggaactctatctgaatctacgcataagtactatgaaacagtgtctgacgtccttaattcagtcaaaaaaatggaagagtctttaaagcggttaaagcaagcacgtaagacaactccagcaaatccagtaggcccttcaggagggatgagcgatgacgataaaattagactccaacttgccttggacgttgagtaccttggcgagcaaattcagaaactggggctgcaggccagtgatataaaatcattttctgctctcgcggaactcgttgctgctgccaaggatcaagccactgctgaacagccatag

SEQ ID NO: 172132 - DNA, 2217 bp, Artificial Sequence
  derived and/or modified sequence
atggagaagagcaggatgaacctgcccaagggccctgacaccctgtgctttgacaaggatgagttcatgaaggaggactttgatgtggaccactttgtgtctgactgcaggaagagggtgcagctggaggagctgagagatgacctggagctgtactacaagctgctgaagacagccatggtggagctgatcaacaaggactatgctgactttgtgaacctgagcaccaacctggtgggcatggacaaggccctgaaccagctgtctgtgcccctgggccagctgcgggaggaggtgctgagcctgcggagctctgtgtctgagggcatccgggctgtggatgagaggatgagcaagcaggaggacatcaggaagaagaagatgtgtgtgctgcggctcatccaggtgatccgctctgtggagaagattgagaagatcctgaacagccagagcagcaaggagaccagcgccctggaggccagcagccccctgctgaccggccagatcctggagagaattgccacagagttcaaccagctgcagttccacgctgtgcagagcaagggcatgcccctgctggacaaggtgcggcccagaattgctggcatcacagccatgctgcagcagagcctggagggcctgctgctggagggcctgcagaccagtgatgtggacatcatccgccactgcctgcggacctacgccaccatcgacaagaccagagatgctgaggccctggtgggccaggtgctggtgaagccctacattgatgaagtcatcatcgagcagtttgtggagagccaccccaacggcctgcaggtgatgtacaacaagctgctggagtttgtgccccaccactgccgcctgctgcgggaggtgactggaggagccatcagcagcgagaagggcaacacagtgcccggctatgacttcctggtgaacagcgtgtggccccagatcgtgcagggcctggaggagaagctgcccagcctcttcaaccctggcaacccagatgccttccacgagaagtacaccatctccatggactttgtgcggcggctggagcggcagtgtggcagccaggcctctgtgaagaggctgcgggcccacccagcctaccacagcttcaacaagaagtggaacctgcctgtgtacttccagatccgcttccgggagattgctggcagcctggaggccgccctgacagatgtgctggaggatgccccagctgagagcccctactgcctgctggccagccacaggacctggagcagcctgcggcgctgctggagcgatgagatgttcctgcccctgctggtgcaccggctgtggaggctgaccctgcagatcctggcccgctacagcgtgtttgtgaatgagctgagcctgcggcccatcagcaatgaaagccccaaggagatcaagaagcccctggtgacaggcagcaaggagcccagcatcacccagggcaacacagaggaccagggcagcggccccagcgagaccaagcctgtggtgtccatcagcaggacccagctggtgtatgtggtggccgacctggacaagctgcaggagcagctgcctgagctgctggagatcatcaagcccaagctggagatgattggcttcaagaacttcagcagcatctctgctgccctggaggacagccagagcagcttcagcgcctgtgtgcccagcctgagcagcaagatcatccaggacctgagtgacagctgcttcggcttcctgaagagcgccctggaggtgccccggctgtacagaaggaccaacaaggaggtgcccaccacagccagcagctatgtggacagcgccctgaagcccctcttccagctgcagagcggccacaaggacaagctgaagcaggccatcatccagcagtggctggagggcaccctgtctgagagcacccacaagtactatgaaacagtgtctgatgtgctgaacagcgtgaagaagatggaggagagcctgaagaggctgaagcaggccaggaagaccaccccagccaaccctgtgggccccagcggcggcatgtctgatgatgacaagatccggctgcagctggccctggatgtggagtacctgggggagcagatccagaagctgggcctgcaggccagtgacatcaagagcttcagcgccctggccgagctggtggccgccgccaaggaccaggccacagctgagcagccctag

SEQ ID NO: 172133 - DNA, 2040 bp, Artificial Sequence
  derived and/or modified sequence
atggtggagctgatcaacaaggactatgctgactttgtgaacctgagcaccaacctggtgggcatggacaaggccctgaaccagctgtctgtgcccctgggccagctgcgggaggaggtgctgagcctgcggagctctgtgtctgagggcatccgggctgtggatgagaggatgagcaagcaggaggacatcaggaagaagaagatgtgtgtgctgcggctcatccaggtgatccgctctgtggagaagattgagaagatcctgaacagccagagcagcaaggagaccagcgccctggaggccagcagccccctgctgaccggccagatcctggagcgcatcgccacagagttcaaccagctgcagttccacgctgtgcagagcaagggcatgcccctgctggacaaggtgcggcccagaattgctggcatcacagccatgctgcagcagagcctggagggcctgctgctggagggcctgcagaccagtgatgtggacatcatccgccactgcctgcggacctacgccaccatcgacaagaccagagatgctgaggccctggtgggccaggtgctggtgaagccctacattgatgaggtgatcatcgagcagtttgtggagagccaccccaacggcctgcaggtgatgtacaacaagctgctggagtttgtgccccaccactgccgcctgctgcgggaggtgactggaggagccatcagcagcgagaagggcaacacagtgcccggctatgacttcctggtgaacagcgtgtggccccagatcgtgcagggcctggaggagaagctgcccagcctcttcaaccctggcaacccagatgccttccacgagaagtacaccatctccatggactttgtgcggcggctggagcggcagtgtggcagccaggcctctgtgaagaggctgcgggcccacccagcctaccacagcttcaacaagaagtggaacctgcctgtgtacttccagatccgcttccgggagattgctggcagcctggaggccgccctgacagatgtgctggaggatgccccagctgagagcccctactgcctgctggccagccacaggacctggagcagcctgcggcgctgctggagcgatgagatgttcctgcccctgctggtgcaccggctgtggaggctgaccctgcagatcctggcccgctacagcgtgtttgtgaatgagctgagcctgcggcccatcagcaatgaaagccccaaggagatcaagaagcccctggtgacaggcagcaaggagcccagcatcacccagggcaacacagaggaccagggcagcggccccagcgagaccaagcctgtggtgtccatcagcaggacccagctggtgtatgtggtggccgacctggacaagctgcaggagcagctgcctgagctgctggagatcatcaagcccaagctggagatgattggcttcaagaacttcagcagcatctctgctgccctggaggacagccagagcagcttcagcgcctgtgtgcccagcctgagcagcaagatcatccaggacctgagtgacagctgcttcggcttcctgaagagcgccctggaggtgccccggctgtacagaaggaccaacaaggaggtgcccaccacagccagcagctatgtggacagcgccctgaagcccctcttccagctgcagagcggccacaaggacaagctgaagcaggccatcatccagcagtggctggagggcaccctgtctgagagcacccacaagtactatgagaccgtgtctgatgtgctgaacagcgtgaagaagatggaggagagcctgaagaggctgaagcaggccaggaagaccaccccagccaaccctgtgggccccagcggcggcatgtctgatgatgacaagatccggctgcagctggccctggatgtggagtacctgggggagcagatccagaagctgggcctgcaggccagtgacatcaagagcttcagcgccctggccgagctggtggccgccgccaaggaccaggccacagctgagcagccctag

SEQ ID NO: 172134 - DNA, 1869 bp, Artificial Sequence
  derived and/or modified sequence
atgagcaagcaggaggacatcaggaagaagaagatgtgtgtgctgcggctcatccaggtgatccgctctgtggagaagattgagaagatcctgaacagccagagcagcaaggagaccagcgccctggaggccagcagccccctgctgaccggccagatcctggagagaattgccacagagttcaaccagctgcagttccacgctgtgcagagcaagggcatgcccctgctggacaaggtgcggcccagaattgctggcatcacagccatgctgcagcagagcctggagggcctgctgctggagggcctgcagaccagtgatgtggacatcatccgccactgcctgcggacctacgccaccatcgacaagaccagagatgctgaggccctggtgggccaggtgctggtgaagccctacattgatgaagtcatcatcgagcagtttgtggagagccaccccaacggcctgcaggtgatgtacaacaagctgctggagtttgtgccccaccactgccgcctgctgcgggaggtgactggaggagccatcagcagcgagaagggcaacacagtgcccggctatgacttcctggtgaacagcgtgtggccccagatcgtgcagggcctggaggagaagctgcccagcctcttcaaccctggcaacccagatgccttccacgagaagtacaccatctccatggactttgtgcggcggctggagcggcagtgtggcagccaggcctctgtgaagaggctgcgggcccacccagcctaccacagcttcaacaagaagtggaacctgcctgtgtacttccagatccgcttccgggagattgctggcagcctggaggccgccctgacagatgtgctggaggatgccccagctgagagcccctactgcctgctggccagccacaggacctggagcagcctgcggcgctgctggagcgatgagatgttcctgcccctgctggtgcaccggctgtggaggctgaccctgcagatcctggcccgctacagcgtgtttgtgaatgagctgagcctgcggcccatcagcaatgaaagccccaaggagatcaagaagcccctggtgacaggcagcaaggagcccagcatcacccagggcaacacagaggaccagggcagcggccccagcgagaccaagcctgtggtgtccatcagcaggacccagctggtgtatgtggtggccgacctggacaagctgcaggagcagctgcctgagctgctggagatcatcaagcccaagctggagatgattggcttcaagaacttcagcagcatctctgctgccctggaggacagccagagcagcttcagcgcctgtgtgcccagcctgagcagcaagatcatccaggacctgagtgacagctgcttcggcttcctgaagagcgccctggaggtgccccggctgtacagaaggaccaacaaggaggtgcccaccacagccagcagctatgtggacagcgccctgaagcccctcttccagctgcagagcggccacaaggacaagctgaagcaggccatcatccagcagtggctggagggcaccctgtctgagagcacccacaagtactatgaaacagtgtctgatgtgctgaacagcgtgaagaagatggaggagagcctgaagaggctgaagcaggccaggaagaccaccccagccaaccctgtgggccccagcggcggcatgtctgatgatgacaagatccggctgcagctggccctggatgtggagtacctgggggagcagatccagaagctgggcctgcaggccagtgacatcaagagcttcagcgccctggccgagctggtggccgccgccaaggaccaggccacagctgagcagccctag

SEQ ID NO: 172135 - DNA, 1284 bp, Artificial Sequence
  derived and/or modified sequence
atgggctttgccatggaggacacagaggacatcagccagaaccacttcggccacctgtgcatcttcaagtggggccactggaagaaggacctgaagtacaccatctccatggactttgtgcggcggctggagcggcagtgtggcagccaggcctctgtgaagaggctgcgggcccacccagcctaccacagcttcaacaagaagtggaacctgcctgtgtacttccagatccgcttccgggagattgctggcagcctggaggccgccctgacagatgtgctggaggatgccccagctgagagcccctactgcctgctggccagccacaggacctggagcagcctgcggcgctgctggagcgatgagatgttcctgcccctgctggtgcaccggctgtggaggctgaccctgcagatcctggcccgctacagcgtgtttgtgaatgagctgagcctgcggcccatcagcaatgaaagccccaaggagatcaagaagcccctggtgacaggcagcaaggagcccagcatcacccagggcaacacagaggaccagggcagcggccccagcgagaccaagcctgtggtgtccatcagcaggacccagctggtgtatgtggtggccgacctggacaagctgcaggagcagctgcctgagctgctggagatcatcaagcccaagctggagatgattggcttcaagaacttcagcagcatctctgctgccctggaggacagccagagcagcttcagcgcctgtgtgcccagcctgagcagcaagatcatccaggacctgagtgacagctgcttcggcttcctgaagagcgccctggaggtgccccggctgtacagaaggaccaacaaggaggtgcccaccacagccagcagctatgtggacagcgccctgaagcccctcttccagctgcagagcggccacaaggacaagctgaagcaggccatcatccagcagtggctggagggcaccctgtctgagagcacccacaagtactatgagaccgtgtctgatgtgctgaacagcgtgaagaagatggaggagagcctgaagaggctgaagcaggccaggaagaccaccccagccaaccctgtgggccccagcggcggcatgtctgatgatgacaagatccggctgcagctggccctggatgtggagtacctgggggagcagatccagaagctgggcctgcaggccagtgacatcaagagcttcagcgccctggccgagctggtggccgccgccaaggaccaggccacagctgagcagccctag

SEQ ID NO: 172136 - DNA, 2217 bp, Artificial Sequence
  derived and/or modified sequence
atggagaagagccggatgaacctgcccaagggccccgacaccctgtgctttgataaggacgaatttatgaaagaggattttgacgttgatcattttgtttcggactgtcgcaaaagggtgcagctggaagaattacgggatgacctagaattgtactacaagctgctaaagactgcaatggttgaactgattaacaaggattatgccgatttcgttaacctgagtaccaacctcgttgggatggacaaggccctcaatcagttgtctgtccctctgggacagctacgcgaagaggtgttgtccctgagaagctcagtgtctgaagggatccgcgccgtggatgaacgtatgtcaaagcaggaggacataagaaaaaaaaagatgtgtgtccttaggctcatccaggtgatccgcagcgtggagaaaattgaaaagatcctgaactctcagagttccaaagagacatctgcactggaggccagtagtcccctactcactggacagattctggagcgcattgccactgagtttaaccagctacagtttcacgcagtccaatcaaagggcatgcctctgcttgacaaagtgaggccaaggatcgccggcatcaccgccatgctgcagcagtctctcgaaggcttgttgctggagggactgcagacaagtgatgtcgatatcattcggcactgtctgcgcacttatgctacgattgataagaccagagacgcagaggcactggtggggcaagtgctagttaagccttacattgacgaagtcattatcgagcagttcgtcgagagtcaccctaatggattacaggtcatgtataacaagctgctggagttcgtgccgcaccactgtcggctgctgcgggaggtgaccggcggcgccattagctcagagaaagggaacaccgtcccaggctacgatttcctggtgaactcagtgtggccccagatcgttcaggggctcgaagagaagctgccatccctttttaaccccggcaatcccgatgcctttcatgagaagtataccatttcaatggactttgttcggaggctggagagacagtgtggctctcaagccagcgtgaaaaggctccgcgctcatcctgcctatcactccttcaataagaaatggaaccttccagtgtactttcagatccgcttccgagaaatcgctgggtctctggaggctgccctaacagacgttctcgaggacgcgcccgcagagtcaccttattgccttcttgcaagtcaccgcacatggagcagccttcggcggtgctggagcgacgaaatgttcttgcctctactagttcatagactctggcggttaactctgcagatcttggctcgctatagcgtattcgtgaatgagctctcactgaggccgataagcaatgaatcgcccaaggagataaagaagccactggtgacaggcagtaaagagccgtctatcacacagggcaacacagaggaccagggctccggaccttctgaaaccaagcctgtggtgtccatatccagaactcaactggtgtacgtcgtagccgatctggataagctgcaggagcaactgccagaactattggagatcattaaacctaaactggaaatgattggatttaagaacttttcctctatcagcgcagccctagaggactctcagtcttctttcagtgcttgcgtcccgtcgctgtcctccaagatcattcaggacctgtccgacagttgctttggctttctcaagagtgctctggaggttcccagactataccggcgaacgaacaaagaggttccgacgactgccagtagctatgtcgactcggcactgaagccactgtttcagttacagtcaggccataaggacaagttgaaacaggccataatacagcagtggcttgaaggcactctatctgaaagcactcataaatattacgaaacggtttctgacgtgctcaattctgtgaagaagatggaggaatcactcaaacggttgaagcaggcacgtaaaactacacctgcaaaccctgttggccccagcgggggcatgagcgacgatgataaaatcagactgcagctcgcccttgacgtggagtaccttggagagcagatccagaaactgggcctacaggcctcagacattaagtctttctccgctttggccgaactggttgctgccgctaaggatcaagctacagcagagcagccctag

SEQ ID NO: 172137 - DNA, 2040 bp, Artificial Sequence
  derived and/or modified sequence
atggtggagctgatcaacaaggactacgccgacttcgtgaacctgagtaccaatttggtgggcatggacaaggcactaaatcagctgtctgtgcctctgggacaactccgggaagaggtgctgagcctgagatcttctgtatcagaggggatcagagcagtggatgaaaggatgagtaagcaagaagatattaggaagaagaaaatgtgtgtgctaagactgatacaggtgatccgtagtgtggagaaaatcgaaaagatcctgaatagtcaatcttccaaagaaacctcggccctggaagcaagcagtcccctgcttacaggtcaaattcttgaaagaattgctactgagttcaaccagctccaatttcatgctgttcagagtaaaggcatgcctttactggataaagttaggccacgcattgcaggtattacagctatgctccagcagtctctcgagggcttgctcctagaggggctgcagacctcagatgttgatataatcaggcattgcttgcggacttacgctaccatcgataaaacccgtgacgccgaggccctcgtgggacaggtactggtgaaaccttacattgacgaggtaattatcgagcagttcgtggagtcacacccaaatggcctgcaggtgatgtacaataagctcctggagttcgtcccccatcattgccgcctgctgagggaggtcaccgggggagctatcagcagcgaaaagggcaacaccgtacctggctacgacttccttgtgaattctgtgtggccgcagattgttcaaggacttgaagaaaagctgcctagtctcttcaatcctgggaatcctgatgccttccacgaaaagtatacaattagtatggatttcgtccgcagactcgagcgacagtgcgggtctcaggcctctgttaaaaggctcagagcccatcccgcctatcatagtttcaataaaaaatggaatctgccggtctacttccagatccggttccgcgagatcgcaggttccttggaagccgcgttgaccgatgtcctggaggacgcccctgcagaaagcccttactgcttactggcttctcatcgtacttggtcctctctgagacggtgttggtcagacgagatgttcttgccgctattagtacatcgattgtggcgactgactttacagattctagcccggtacagtgtgtttgtgaacgaattgtctctgagacccatctcaaatgagtcccccaaggaaatcaaaaaaccccttgtaactggatctaaggaaccgagtattacccaagggaacacagaggaccaggggtcggggcccagcgagactaaaccggtggtttccattagccgcacccagttggtgtatgtggttgctgacctcgacaagctccaagagcagctgcctgaactcctggagattatcaaacccaagctggaaatgataggatttaaaaacttctctagcatatcggccgccttagaagacagccagagttccttttcagcttgcgtaccttctctctctagcaaaatcatccaggacctgtccgactcttgtttcggattccttaagtctgcgctggaggttcctcgcttatatcgccggaccaacaaggaagtcccaacaacagcttcatcttacgttgatagcgctctgaagcccctgttccaattgcagtccggtcacaaggataaactgaaacaggccatcatccaacaatggctggagggaacactgagcgaatcaacccacaagtattacgaaactgtctctgatgtcctcaatagcgtaaagaagatggaggagagcttgaaaaggttgaaacaggccagaaaaacaactcctgcaaatcctgtgggaccgtccggtgggatgtcagatgacgataagatcaggctgcagctagccttggatgtggagtacttaggcgagcaaatccagaagctggggctgcaggccagtgatatcaaaagctttagcgccttggcagaactcgtcgccgctgctaaggatcaggctactgcagaacagccctag

SEQ ID NO: 172138 - DNA, 1869 bp, Artificial Sequence
  derived and/or modified sequence
atgagcaagcaggaggacatccggaagaagaagatgtgcgtgctgcgcctaatccaggtcatccgatccgtcgaaaaaattgagaaaatccttaacagccagtccagcaaggaaacgtccgcactggaagcatcaagccctttgctcaccggccagatattagaacgaatcgccaccgaattcaatcaattgcagtttcacgccgtacagtcaaagggcatgccgctgctggacaaggtgcggccccgtatcgcaggcatcacagcgatgctgcagcagagcctggaaggtctgctcctggaaggtctgcagacaagcgatgtcgacattatccgccactgtctccgaacttacgcaacgatcgacaagacccgcgatgcagaggcgttggttggccaggtgctggtgaagccttacattgatgaggtcataatagaacaattcgtggaaagccatcccaacggcttgcaggtgatgtataacaagctactcgagttcgtgccgcaccactgccggcttttgagggaagtgaccggaggcgccattagctcagagaaaggcaataccgttcccggctatgacttcctggtaaacagtgtgtggccacagattgtgcagggactggaagaaaagctgccctccctctttaatccggggaaccctgacgctttccacgaaaagtatactatctccatggactttgtgaggcgcctggagcgccagtgtggctcccaggcttcagtaaagcgcctccgagcgcaccctgcatatcactcgtttaacaagaagtggaatctgccagtgtatttccagatacggttcagggagatcgcaggatctctggaggccgccctcaccgatgtacttgaggacgcccccgccgaatctccctactgtctgctcgcctcccaccggacatggagcagtttgaggagatgttggtcagacgaaatgtttctgccattattagtccaccgactgtggaggctaacgctccagatcttagctcggtatagtgtgtttgtaaacgagctgtcactccggccaatatctaatgaaagcccaaaggaaattaaaaagcctctcgttacagggtccaaggaaccttcaattactcagggaaatacagaagaccagggcagcggaccctccgaaacgaaacccgtcgtttccatttctagaacccagctggtatatgtcgtggccgacctggataaactccaggagcagcttccggaacttctggagattattaaacctaagctggaaatgattggtttcaaaaatttctcgagcatttccgccgcactcgaagactctcagagttcattttccgcctgcgtgccctcgctttcttccaagataatacaggacctgtccgactcctgtttcggcttcttgaagagcgcactggaggtaccgcgactctaccgccgcaccaacaaagaggtgccaaccacagcatctagctacgtcgactcagctttaaaacctctgttccagcttcagtccgggcataaagataaattgaagcaggcaatcatccagcaatggctggaggggacgctttcggagagcacgcataagtattatgagacggtctccgacgtcttaaacagcgtgaagaagatggaggaatccctcaaacggctgaagcaagcccggaaaacgacgcccgccaatccagtaggccctagcgggggtatgagtgatgacgataaaatacgactgcaattagccctggacgtagaatatctgggtgagcagatccaaaaacttggtctccaggctagtgacattaaaagcttcagtgcgttggctgaactcgttgccgctgccaaagaccaggccaccgcagagcagccatag

SEQ ID NO: 172139 - DNA, 1284 bp, Artificial Sequence
  derived and/or modified sequence
atgggcttcgccatggaggacaccgaggacatcagccagaaccacttcgggcatctgtgtatatttaaatggggacattggaagaaggatctgaagtacacgatctcaatggatttcgtgagaaggctcgagaggcagtgtgggtcccaggcctctgtcaagaggctgagagcccatccagcataccactccttcaacaaaaagtggaatcttcctgtgtacttccagatccgattcagagagattgccggaagcctggaggcggcccttactgacgtcctggaagatgcgcctgccgaatctccatactgtctgctggcctctcaccgtacttggtcatcccttcgcagatgttggtcagacgaaatgtttctgcccttactggtccaccgcctgtggagattgaccttgcagattctagctcgctattcagtattcgtgaacgagctgtccctgagacccatttccaacgaatcccccaaggaaattaaaaagcctttagtgacggggtctaaggagcccagtataacacagggcaatactgaggatcaggggtccggaccctcggaaaccaagcccgtagtctccattagtaggacacagctggtatatgtggtggctgacttagacaaattacaggagcagctcccggagctgctcgaaattattaagccaaaattggagatgatcggcttcaagaatttcagctctatctcagccgcccttgaagattcacaatcctccttctctgcctgtgttccaagtctcagcagtaaaatcatccaggatctgtctgactcttgctttgggtttttaaaatcagctcttgaagttccgcggctgtataggagaaccaacaaggaggttccaacaacagccagttcctatgtggacagcgcgctgaagccactgtttcagttacagagcggccacaaagacaaactcaagcaggccattattcagcaatggctggaaggaaccctgagcgagagcacccacaagtattatgagacagtgtccgacgtcttgaactcagtaaagaaaatggaggagagcctcaagcgactgaagcaggctcggaaaacaactcctgctaatcctgtcggcccatccggcggcatgtcggatgacgataagattcgtctgcagcttgccctggacgtggaatatttgggcgaacagatccaaaagctggggttacaggcatccgacattaagtcattctccgccctggctgagctggtagcggctgccaaggatcaggctaccgccgagcagccgtag

SEQ ID NO: 172140 - DNA, 2217 bp, Artificial Sequence
  derived and/or modified sequence
atggagaaaagccgcatgaatctgcccaaaggccctgataccttgtgctttgataaggacgaattcatgaaggaagacttcgacgtggatcactttgtgtcagattgtcggaagcgcgtccagctagaagaactgcgtgacgacctggagctgtattacaaactcctcaagaccgccatggtcgagctgatcaataaggactatgccgattttgtcaacttatctaccaacttagttgggatggacaaggccttgaatcagttgtcagtgcctttagggcagctgagagaggaggttctgagcctgagatcttctgtctccgaggggattcgagctgtcgatgagcgaatgagcaagcaggaggacatcagaaagaagaaaatgtgtgtcctgaggctcattcaggtcattcgaagtgtggaaaagatcgaaaaaattttgaacagtcagtctagcaaagagacttcagcattagaagctagcagcccattattaacaggccagattctggagaggattgctaccgaatttaatcagctccagttccatgccgtgcaatcaaagggtatgcccctgctcgacaaggtgcggcctcgaatcgctggcattactgccatgctgcaacagtcattagagggtctgctcttggaggggctgcagaccagtgatgttgacatcattagacactgcctccgcacctacgccaccatagacaagacccgcgatgccgaagccctcgtgggccaagtgctcgtcaaaccgtacattgacgaggtgatcatcgagcaattcgtagaatcacatccaaatgggttgcaagtgatgtataacaaattgctcgagttcgtccctcatcactgcagacttctcagagaagtgaccggcggagcaatttcatccgagaagggaaatactgttcccggatacgacttcctggtcaacagcgtttggcctcagattgtacaaggattggaagagaaactaccaagcctgtttaaccctggtaatcccgatgcatttcacgagaagtataccatatctatggatttcgtacgtagattagagcggcagtgtggcagtcaggcctctgtgaaaagacttcgtgctcacccggcatatcattctttcaacaaaaagtggaacctgccggtctactttcagatacggtttagggagattgccggttccctcgaggctgcgctgaccgacgttctcgaggacgccccagccgagagtccatactgtctactcgcctctcatagaacgtggagttccctcaggagatgttggtctgacgagatgtttctgccattgctggtgcatagattgtggcgactgaccctccagatactggccagatatagtgttttcgtgaatgagctttccctgagacccatttcgaatgagtcccctaaggaaattaaaaagcccctggttactgggagcaaagagccaagtatcacacagggtaatacggaggatcagggctcagggcctagtgaaaccaagcccgtggtgtcgatctcccgaacccagttagtgtatgtcgtcgctgacctcgataagttacaggaacagctaccagagttactggaaattatcaaaccgaaactcgaaatgatcggcttcaagaacttctccagtataagcgccgcattagaggatagccagagttcattctccgcttgtgtgcctagcttgtcatctaagatcatccaggacctgagcgactcttgcttcggttttttgaagagtgctcttgaagtaccaagactctacaggcgcaccaacaaggaggtgcctaccaccgcttcttcttatgtggatagcgctctcaaacccctattccagttgcagtctggccacaaggataaactcaagcaagctatcattcagcagtggcttgagggaactctaagcgaatccactcataagtactacgagacagtcagtgacgttctgaacagcgtgaagaagatggaggagagcttaaagcgcctgaagcaggctcggaagactaccccagcgaatccagttgggccatcaggaggaatgtcagacgacgataagatccgcctccaacttgctctggacgtggagtatttgggagagcagatccagaagctggggctacaggcgagtgatatcaagtccttttccgcactcgcggaactcgtagccgctgcaaaggatcaagccacagccgagcaaccctag

SEQ ID NO: 172141 - DNA, 2040 bp, Artificial Sequence
  derived and/or modified sequence
atggttgaactgattaataaagactacgcagattttgtaaatctttcgactaacctggtggggatggacaaggctctcaatcagctgagtgtgcccctgggccagttgagagaggaggtgctctcgctgcgatcgagtgtgtctgagggaataagggctgtcgatgagcgtatgagtaagcaggaggacatcagaaagaaaaagatgtgtgtcctgagactcatccaagttatcagatcagttgaaaaaattgagaagatcctgaatagtcagtcaagtaaggaaacctcagcgctcgaagcttcatcccctctcctcaccggccagattctggaacgaatcgcaaccgaattcaatcaattgcagttccacgctgtgcagtcaaaggggatgcctctgcttgacaaagtgcggccaagaattgctggaatcaccgccatgttgcagcagagcctggaaggccttttgctcgaaggcctgcagacatctgacgtggatattattcggcactgtctgagaacatacgccactattgacaaaacacgcgacgcagaggctttggttggtcaagttttagtaaagccatacatcgatgaggtgattatcgaacaattcgtagaatcgcatcccaacggactgcaggtaatgtataataagctcttggaattcgtacctcaccattgtcgactgttgcgggaggttacagggggagccatttcatctgaaaaaggaaatacagtcccaggatatgattttctggtgaatagcgtctggcctcagatcgtccagggcctagaggaaaagctgccctccctgtttaatcccggaaaccccgatgcatttcacgagaaatacacaatcagtatggacttcgtgagaagacttgagcgtcagtgcggttcacaggcgtcggtgaagcgattgagggctcatccagcctaccatagctttaacaagaaatggaaccttcccgtctattttcagattcgttttagagagatagcaggatctctggaggcagctctgacggatgtgctggaagatgcccctgcagagtctccatactgcctgctagcctcccatcggacctggtcgagcctacggagatgttggagcgatgagatgttcctgcccctgttggtgcatcgcctgtggcggctgacattgcagattctcgctaggtactcagtatttgtgaacgaactctccctccgcccaatctctaacgagtctcctaaggagattaaaaaacccctagttaccggcagcaaagagccctccatcactcaaggcaacacggaggaccagggatcgggtcccagcgaaactaaacctgtcgtatcaatttcaaggacccagcttgtgtacgtcgtagccgatctcgataagttgcaggaacagttacccgaacttctggagatcattaagcccaaactcgaaatgattggctttaagaacttctcatctatttctgccgcactggaggactcacagtcctccttctccgcttgtgttccaagcctcagtagtaagatcattcaagatctttctgatagctgttttggcttcctgaaatccgctttggaagtcccacggctgtacaggcggaccaataaggaggttccgacaactgctagcagctacgtcgactctgcattaaagcctctctttcagctgcagagtgggcacaaagacaagcttaagcaggccataattcaacagtggctggagggaactctttccgagtcgacccacaagtattatgagacagtctctgatgttctcaattccgtgaagaagatggaagaatctctgaaacgtctcaagcaggcacgcaaaactacacccgctaatcccgtcgggccatccgggggaatgtccgacgatgataagatcagactccagcttgctctcgacgtggagtatcttggcgagcaaattcagaaactgggtttgcaggcttccgacatcaaatcctttagtgcccttgcagaactagtggccgcagctaaagatcaggccacagccgagcagccctag

SEQ ID NO: 172142 - DNA, 1869 bp, Artificial Sequence
  derived and/or modified sequence
atgagtaagcaggaagacatccggaaaaaaaagatgtgcgtcttgcggctgatccaggttataagatctgttgaaaaaatagagaagattttaaacagccagtcgagtaaagaaacaagtgcgctcgaggcttcttctcctctactcacaggccaaattcttgagcgcatcgccacagagttcaaccagttgcagttccacgccgtccagtccaaaggcatgccacttctggataaggtaaggccccgtattgccggaattacagccatgctgcagcagagcctcgagggtctcctcttggagggcctgcagactagcgatgttgacattattcgtcactgcctcaggacatacgctacgatcgacaagactcgcgatgccgaagccttggtcggacaggtgctggtcaagccatacatcgacgaagttataatcgagcagtttgtagaaagtcaccctaatggactgcaagtgatgtacaataaactcctggagtttgtgccacaccattgccggctgcttagggaggtgaccggcggagctatatcctccgaaaaggggaacaccgttcctggctacgatttcctggtaaattctgtctggcctcagatcgtgcaagggcttgaagagaagctccctagcctgtttaatcccggaaacccggatgctttccacgagaagtatactatcagcatggatttcgtgagacgtctggagcgccaatgtggatcacaagcttctgtgaagcggctaagagcacaccctgcataccacagttttaataaaaagtggaacctcccagtatatttccagatccgatttcgagagattgccggttctcttgaggcagccctgaccgacgtgctggaggacgcccctgctgagagcccatattgcctcctggccagccacaggacctggagttcactccgtcgctgttggtcagacgaaatgtttctgcccctgctcgtacataggctctggaggcttactctccagatactggccagatattctgtctttgtaaacgagttatctttgaggccaatctccaatgagagtcctaaggagatcaaaaaacctctggtgacaggaagcaaagaacctagtatcacccaggggaatacagaggatcaaggatcagggccatcagaaactaaacccgtggtttccatcagcaggacgcaactggtgtacgtggtggcggacctcgataagcttcaagagcagcttcctgagctgctggagattatcaaacctaagctggagatgattgggttcaaaaacttcagctctattagcgcagcacttgaggacagccaaagttctttcagtgcatgcgtgcctagcctatcatctaaaattattcaagatttgtctgatagttgtttcggcttcctgaagtcagcccttgaggtgccgaggctttataggagaaccaacaaagaggtgcccaccacagcttcctcatacgtcgactccgctctgaaaccgctgtttcagctgcaatctggccacaaggataaacttaagcaggccataattcagcagtggctggagggaaccctttctgaatctactcataaatattacgaaacggtctccgatgtattaaattcagtgaagaagatggaagaaagcctcaaaagactgaagcaggcacgaaagaccacacctgccaatcccgtgggaccatcggggggtatgtcagatgatgacaagatccgcctgcagcttgctctggacgtggagtacctgggggagcaaattcagaaactcggacttcaggcatcagacattaaaagtttttccgctttggcggagctcgtcgccgctgctaaagatcaagccactgctgagcagccttag

SEQ ID NO: 172143 - DNA, 1284 bp, Artificial Sequence
  derived and/or modified sequence
atggggttcgccatggaggatactgaggatatctcccaaaaccacttcgggcatctgtgtatcttcaagtggggtcactggaaaaaggatctcaagtacactatcagtatggacttcgtccggaggctggagcgccaatgtgggagccaagcctccgttaaacgactgagggcccaccccgcatatcactcattcaataagaaatggaatcttcccgtgtacttccaaatacggttccgtgagatagcaggaagtcttgaagccgctttgacagatgtactggaagacgcacctgcggagagcccttactgtttgttggcaagccacagaacatggagctccctcagacggtgctggtcggacgagatgttcctaccgctgctagtgcatcggttatggcggttgaccctacagatccttgcgaggtatagcgtgttcgtgaatgagctttctctcagacccatatccaacgaatcaccaaaggaaataaaaaagcctttagtgaccggaagtaaagagccatctatcacacaaggaaatactgaggatcagggcagtggtccatccgagactaagcctgtagtttccatttctaggacacagctcgtatatgttgtcgctgaccttgacaagctgcaggagcagctccctgagctgctggaaataattaagccgaaacttgagatgatcggtttcaagaatttttcatccatctcagccgcactcgaggattcccagagttccttttctgcatgcgttccgtccctgagctccaagattatccaggacctatcagactcatgtttcggcttcctcaagagtgctctggaagtgcccaggctttaccggcgtacgaacaaagaggtgccaactactgcctcctcctacgtggatagtgcactcaaaccactattccagcttcagagtggccacaaggataagcttaagcaggcaatcatacagcagtggctggagggcacattgtctgaaagtacacataagtactacgagaccgtgagtgatgtacttaactccgttaaaaagatggaagagtctttgaaacgcttgaaacaggccaggaagaccactccagccaatcctgtaggtcctagcggcggaatgtcagacgatgataaaatcaggcttcagctggcgcttgatgtggaatatttgggagaacagattcaaaaacttggcctccaggcctctgacattaagtctttctccgccctagctgagttggtggccgctgctaaagaccaggcaacagccgaacagccatag

SEQ ID NO: 172144 - DNA, 2921 bp, Artificial Sequence
  derived and/or modified sequence
agcggacccccctgtgccgtggaaactggcggtggccgcggccgccgagtcggtctgcgcagcctcctgcgttttctcgcttggatcttggcactgagaggcggtggccggcgggatggagaaaagtaggatgaacctgcccaaggggccggacacgctctgcttcgacaaggacgagttcatgaaggaagatttcgatgtcgatcattttgtgtctgactgtaggaagcgggtccagctggaagaactgagagatgacctggagctctactataaacttcttaaaacagccatggtcgaactcatcaacaaggattatgcagattttgtcaatctttcaacaaacttggttggcatggacaaagccctcaaccagctttctgtgcctttgggacaattacgagaagaggttctgagccttagatcgtctgtcagtgaaggaattcgggcagttgatgaacgaatgtctaaacaagaggacattaggaaaaaaaagatgtgtgtattgaggcttatacaagttattcggtcagttgagaaaattgaaaaaatcttaaactctcaaagttctaaagaaacctctgcactagaagcaagcagcccccttttgactggacaaattttggagagaattgccacagaatttaatcagttacagtttcatgctgttcaaagcaaaggcatgcctcttttggacaaagtaagaccgcgtatagctggcattacagccatgttacagcagtcactggaaggtctcctattagaaggccttcagacgtctgacgtcgatataatacggcactgcttgcggacttacgccacgattgacaagacacgggacgcggaggccttagttggccaagtactagtgaaaccatacatagacgaggtgattatagagcagtttgttgaatctcatcccaatggccttcaggtcatgtataataaactcctggagtttgttcctcaccattgccgccttcttcgagaagtcacaggaggtgccatctccagtgaaaaaggcaatactgttcctggatatgactttttggtgaattctgtttggccacaaatagtacaaggattagaagaaaagttaccctcgctttttaatcctgggaatcccgatgcatttcatgagaaatataccataagtatggattttgtcagaagattggaacggcagtgtggatcacaggctagtgtaaagagattaagagcccatcctgcctatcacagcttcaataagaagtggaacttgcctgtttattttcaaataagatttagagaaatagcgggatccttagaagcagcacttacagatgtcctggaagatgccccagctgaaagtccgtattgccttttggcttctcatagaacttggagcagccttaggaggtgttggtcagatgagatgttcttgccattactggtgcatcgcctgtggagactcactctgcagattttggcacgatactctgtgtttgtcaatgagctttcactcaggcccatttctaatgaaagtcccaaggagatcaagaaacctttggtaactggtagcaaagaaccttccatcacccaaggaaacactgaagaccaaggaagtggtccttcggaaacaaagcctgtggtttccatttcccgcactcagctcgtgtatgtggttgcagacctggacaagcttcaggagcagcttccagaactcttggaaataatcaagccaaaacttgaaatgattggctttaagaatttttcttctatctcagcagccctggaggactcccagagctctttttcagcctgtgtgccctccttgagtagcaagatcatccaggatttaagtgactcttgcttcggtttcctaaaaagcgccctggaggttcccaggctttaccgaagaaccaataaggaggtcccaaccacagcttcctcctatgtggacagtgctctgaagcccttattccagcttcagagcggacacaaggataagctcaaacaagcaataattcagcagtggctagaaggcactctcagtgaaagcactcataagtactatgaaaccgtgtcagatgtattaaactctgtgaagaagatggaagagagcctgaaaaggctgaaacaagccagaaaaaccactcccgccaaccccgtcggtcccagtggtggcatgagcgacgacgacaaaatcaggctgcagttggccctagatgttgagtacttgggagagcagatacaaaagttgggactacaagcaagtgacataaaaagcttctcagctctcgcagagcttgttgctgctgccaaggaccaggcaacagcagagcagccttaagcatcttggaagatcccgaggttagattcttaagcaagagaagagttggacttccaggctgaaggggagaaagtgactctgttctcttagcaaccgtctgtagcaaagaagtgcttccagcatcactccagcaacacgcccatgcgtcttctctcagcgtatttgggtcttctttgcccaaaagaacacaaaagcctttttccattgtatggaagatagtttttaagacatttgaaactttctactatagtttacagaacaaattattttatttttattgtaaatcttagtgtggaagagctgatttctaaaatatgattaaagtaaatatatacctatgaatatcaagagtcgtctccctgagcctgtagttggaagtgacgactgtaatggaatgatgtcttgtatagaaatgcccttctctgaaataaagagaactcctgggctttctaaagaggctgcgggaagccatcctccactcccactgtgtgtgagagcagtgcttctgatcctgctgtcaccccgacctctggcaggagccggcgccagtaggaaagacctccttcctaaataaaagaagtgtctccca

SEQ ID NO: 172145 - DNA, 2963 bp, Artificial Sequence
  derived and/or modified sequence
gcacttcgcaatgagtcttttggcgtcaggtttggcgggtgcagcctggagaaagcacttctgtaaaatcgtgcgtgttacatggaaaggcctgaaagttctgggcaagtggttttgagctgcatgtcaaagccactgttacccgttcctgttaccatgcagtgcagtcagattgccagtccccttgtcggaaagaagcttgtggaccggggccttggagctcattaagtgaagatttcgatgtcgatcattttgtgtctgactgtaggaagcgggtccagctggaagaactgagagatgacctggagctctactataaacttcttaaaacagccatggtcgaactcatcaacaaggattatgcagattttgtcaatctttcaacaaacttggttggcatggacaaagccctcaaccagctttctgtgcctttgggacaattacgagaagaggttctgagccttagatcgtctgtcagtgaaggaattcgggcagttgatgaacgaatgtctaaacaagaggacattaggaaaaaaaagatgtgtgtattgaggcttatacaagttattcggtcagttgagaaaattgaaaaaatcttaaactctcaaagttctaaagaaacctctgcactagaagcaagcagcccccttttgactggacaaattttggagagaattgccacagaatttaatcagttacagtttcatgctgttcaaagcaaaggcatgcctcttttggacaaagtaagaccgcgtatagctggcattacagccatgttacagcagtcactggaaggtctcctattagaaggccttcagacgtctgacgtcgatataatacggcactgcttgcggacttacgccacgattgacaagacacgggacgcggaggccttagttggccaagtactagtgaaaccatacatagacgaggtgattatagagcagtttgttgaatctcatcccaatggccttcaggtcatgtataataaactcctggagtttgttcctcaccattgccgccttcttcgagaagtcacaggaggtgccatctccagtgaaaaaggcaatactgttcctggatatgactttttggtgaattctgtttggccacaaatagtacaaggattagaagaaaagttaccctcgctttttaatcctgggaatcccgatgcatttcatgagaaatataccataagtatggattttgtcagaagattggaacggcagtgtggatcacaggctagtgtaaagagattaagagcccatcctgcctatcacagcttcaataagaagtggaacttgcctgtttattttcaaataagatttagagaaatagcgggatccttagaagcagcacttacagatgtcctggaagatgccccagctgaaagtccgtattgccttttggcttctcatagaacttggagcagccttaggaggtgttggtcagatgagatgttcttgccattactggtgcatcgcctgtggagactcactctgcagattttggcacgatactctgtgtttgtcaatgagctttcactcaggcccatttctaatgaaagtcccaaggagatcaagaaacctttggtaactggtagcaaagaaccttccatcacccaaggaaacactgaagaccaaggaagtggtccttcggaaacaaagcctgtggtttccatttcccgcactcagctcgtgtatgtggttgcagacctggacaagcttcaggagcagcttccagaactcttggaaataatcaagccaaaacttgaaatgattggctttaagaatttttcttctatctcagcagccctggaggactcccagagctctttttcagcctgtgtgccctccttgagtagcaagatcatccaggatttaagtgactcttgcttcggtttcctaaaaagcgccctggaggttcccaggctttaccgaagaaccaataaggaggtcccaaccacagcttcctcctatgtggacagtgctctgaagcccttattccagcttcagagcggacacaaggataagctcaaacaagcaataattcagcagtggctagaaggcactctcagtgaaagcactcataagtactatgaaaccgtgtcagatgtattaaactctgtgaagaagatggaagagagcctgaaaaggctgaaacaagccagaaaaaccactcccgccaaccccgtcggtcccagtggtggcatgagcgacgacgacaaaatcaggctgcagttggccctagatgttgagtacttgggagagcagatacaaaagttgggactacaagcaagtgacataaaaagcttctcagctctcgcagagcttgttgctgctgccaaggaccaggcaacagcagagcagccttaagcatcttggaagatcccgaggttagattcttaagcaagagaagagttggacttccaggctgaaggggagaaagtgactctgttctcttagcaaccgtctgtagcaaagaagtgcttccagcatcactccagcaacacgcccatgcgtcttctctcagcgtatttgggtcttctttgcccaaaagaacacaaaagcctttttccattgtatggaagatagtttttaagacatttgaaactttctactatagtttacagaacaaattattttatttttattgtaaatcttagtgtggaagagctgatttctaaaatatgattaaagtaaatatatacctatgaatatcaagagtcgtctccctgagcctgtagttggaagtgacgactgtaatggaatgatgtcttgtatagaaatgcccttctctgaaataaagagaactcctgggctttctaaagaggctgcgggaagccatcctccactcccactgtgtgtgagagcagtgcttctgatcctgctgtcaccccgacctctggcaggagccggcgccagtaggaaagacctccttcctaaataaaagaagtgtctccc

SEQ ID NO: 172146 - DNA, 2784 bp, Artificial Sequence
  derived and/or modified sequence
gtgccgtggaaactggcggtggccgcggccgccgagtcggtctgcgcagcctcctgcgttttctcgcttggatcttggcactgagaggcggtggccggcgggatggagaaaagtaggatgaacctgcccaaggggccggacacgctctgcttcgacaaggacgagttcatgaaggaagatttcgatgtcgatcattttgtgtctgactgtaggaagcgggtccagctggaagaactgagagatgacctggagctctactataaacttcttaaaacagccatggtcgaactcatcaacaaggattatgcagattttgtcaatctttcaacaaacttggttggcatggacaaagccctcaaccagctttctgtgcctttgggacaattacgagaagaggttctgataatgtctgctgtgagttgggactccccatgtctaagccattggagacagggactccatccggatgaacagtagagaagggagttttggcatcattttcaacagaaaagtgtgctaccctgtcctgtccctgctggtccaccccacagtctgtgtcaggcaccccgacttccatgctgtcttaggattgatgaactgtcataaacttcgttgattgcaccattattacctgtagccttagatcgtctgtcagtgaaggaattcgggcagttgatgaacgaatgtctaaacaagaggacattaggaaaaaaaagatgtgtgtattgaggcttatacaagttattcggtcagttgagaaaattgaaaaaatcttaaactctcaaagttctaaagaaacctctgcactagaagcaagcagcccccttttgactggacaaattttggagagaattgccacagaatttaatcagttacagtttcatgctgttcaaagcaaaggcatgcctcttttggacaaagtaagaccgcgtatagctggcattacagccatgttacagcagtcactggaaggtctcctattagaaggccttcagacgtctgacgtcgatataatacggcactgcttgcggacttacgccacgattgacaagacacgggacgcggaggccttagttggccaagtactagtgaaaccatacatagacgaggtgattatagagcagtttgttgaatctcatcccaatggccttcaggtcatgtataataaactcctggagtttgttcctcaccattgccgccttcttcgagaagtcacaggaggtgccatctccagtgaaaaaggcaatactgttcctggatatgactttttggtgaattctgtttggccacaaatagtacaaggattagaagaaaagttaccctcgctttttaatcctgggaatcccgatgcatttcatgagaaatataccataagtatggattttgtcagaagattggaacggcagtgtggatcacaggctagtgtaaagagattaagagcccatcctgcctatcacagcttcaataagaagtggaacttgcctgtttattttcaaataagatttagagaaatagcgggatccttagaagcagcacttacagatgtcctggaagatgccccagctgaaagtccgtattgccttttggcttctcatagaacttggagcagccttaggaggtgttggtcagatgagatgttcttgccattactggtgcatcgcctgtggagactcactctgcagattttggcacgatactctgtgtttgtcaatgagctttcactcaggcccatttctaatgaaagtcccaaggagatcaagaaacctttggtaactggtagcaaagaaccttccatcacccaaggaaacactgaagaccaaggaagtggtccttcggaaacaaagcctgtggtttccatttcccgcactcagctcgtgtatgtggttgcagacctggacaagcttcaggagcagcttccagaactcttggaaataatcaagccaaaacttgaaatgattggctttaagaatttttcttctatctcagcagccctggaggactcccagagctctttttcagcctgtgtgccctccttgagtagcaagatcatccaggatttaagtgactcttgcttcggtttcctaaaaagcgccctggaggttcccaggctttaccgaagaaccaataaggaggtcccaaccacagcttcctcctatgtggacagtgctctgaagcccttattccagcttcagagcggacacaaggataagctcaaacaagcaataattcagcagtggctagaaggcactctcagtgaaagcactcataagtactatgaaaccgtgtcagatgtattaaactctgtgaagaagatggaagagagcctgaaaaggctgaaacaagccagaaaaaccactcccgccaaccccgtcggtcccagtggtggcatgagcgacgacgacaaaatcaggctgcagttggccctagatgttgagtacttgggagagcagatacaaaagttgggactacaagcaagtgacataaaaagcttctcagctctcgcagagcttgttgctgctgccaaggaccaggcaacagcagagcagccttaagcatcttggaagatcccgaggttagattcttaagcaagagaagagttggacttccaggctgaaggggagaaagtgactctgttctcttagcaaccgtctgtagcaaagaagtgcttccagcatcactccagcaacacgcccatgcgtcttctctcagcgtatttgggtcttctttgcccaaaagaacacaaaagcctttttccattgtatggaagatagtttttaagacatt

SEQ ID NO: 172147 - DNA, 1400 bp, Artificial Sequence
  derived and/or modified sequence
agaacatgagcactgccatttaaagagcaccagacttagagtgcctgggtctcagatgggctttgccatggaagacacggaagacatatcacagaaccactttgggcatttatgtatctttaaatggggacattggaagaaagatcttaaatataccataagtatggattttgtcagaagattggaacggcagtgtggatcacaggctagtgtaaagagattaagagcccatcctgcctatcacagcttcaataagaagtggaacttgcctgtttattttcaaataagatttagagaaatagcgggatccttagaagcagcacttacagatgtcctggaagatgccccagctgaaagtccgtattgccttttggcttctcatagaacttggagcagccttaggaggtgttggtcagatgagatgttcttgccattactggtgcatcgcctgtggagactcactctgcagattttggcacgatactctgtgtttgtcaatgagctttcactcaggcccatttctaatgaaagtcccaaggagatcaagaaacctttggtaactggtagcaaagaaccttccatcacccaaggaaacactgaagaccaaggaagtggtccttcggaaacaaagcctgtggtttccatttcccgcactcagctcgtgtatgtggttgcagacctggacaagcttcaggagcagcttccagaactcttggaaataatcaagccaaaacttgaaatgattggctttaagaatttttcttctatctcagcagccctggaggactcccagagctctttttcagcctgtgtgccctccttgagtagcaagatcatccaggatttaagtgactcttgcttcggtttcctaaaaagcgccctggaggttcccaggctttaccgaagaaccaataaggaggtcccaaccacagcttcctcctatgtggacagtgctctgaagcccttattccagcttcagagcggacacaaggataagctcaaacaagcaataattcagcagtggctagaaggcactctcagtgaaagcactcataagtactatgaaaccgtgtcagatgtattaaactctgtgaagaagatggaagagagcctgaaaaggctgaaacaagccagaaaaaccactcccgccaaccccgtcggtcccagtggtggcatgagcgacgacgacaaaatcaggctgcagttggccctagatgttgagtacttgggagagcagatacaaaagttgggactacaagcaagtgacataaaaagcttctcagctctcgcagagcttgttgctgctgccaaggaccaggcaacagcagagcagccttaagcatcttggaagatcccgaggttagattcttaagcaagagaagagttggacttccaggctg

SEQ ID NO: 172148 - DNA, 2217 bp, Artificial Sequence
  derived and/or modified sequence
atggagaagagcagaatgaacctgcccaagggccccgacaccctgtgcttcgacaaggacgagttcatgaaggaggacttcgacgtggaccacttcgtgagcgactgcagaaagagagtgcagctggaggagctgagagacgacctggagctgtactacaagctgctgaagaccgccatggtggagctgatcaacaaggactacgccgacttcgtgaacctgagcaccaacctggtgggcatggacaaggccctgaaccagctgagcgtgcccctgggccagctgagagaggaggtgctgagcctgagaagcagcgtgagcgagggcatcagagccgtggacgagagaatgagcaagcaggaggacatcagaaagaagaagatgtgcgtgctgagactgatccaggtgatcagaagcgtggagaagatcgagaagatcctgaacagccagagcagcaaggagaccagcgccctggaggccagcagccccctgctgaccggccagatcctggagagaatcgccaccgagttcaaccagctgcagttccacgccgtgcagagcaagggcatgcccctgctggacaaggtgagacccagaatcgccggcatcaccgccatgctgcagcagagcctggagggcctgctgctggagggcctgcagaccagcgacgtggacatcatcagacactgcctgagaacctacgccaccatcgacaagaccagagacgccgaggccctggtgggccaggtgctggtgaagccctacatcgacgaggtgatcatcgagcagttcgtggagagccaccccaacggcctgcaggtgatgtacaacaagctgctggagttcgtgccccaccactgcagactgctgagagaggtgaccggcggcgccatcagcagcgagaagggcaacaccgtgcccggctacgacttcctggtgaacagcgtgtggccccagatcgtgcagggcctggaggagaagctgcccagcctgttcaaccccggcaaccccgacgccttccacgagaagtacaccatcagcatggacttcgtgagaagactggagagacagtgcggcagccaggccagcgtgaagagactgagagcccaccccgcctaccacagcttcaacaagaagtggaacctgcccgtgtacttccagatcagattcagagagatcgccggcagcctggaggccgccctgaccgacgtgctggaggacgcccccgccgagagcccctactgcctgctggccagccacagaacctggagcagcctgagaagatgctggagcgacgagatgttcctgcccctgctggtgcacagactgtggagactgaccctgcagatcctggccagatacagcgtgttcgtgaacgagctgagcctgagacccatcagcaacgagagccccaaggagatcaagaagcccctggtgaccggcagcaaggagcccagcatcacccagggcaacaccgaggaccagggcagcggccccagcgagaccaagcccgtggtgagcatcagcagaacccagctggtgtacgtggtggccgacctggacaagctgcaggagcagctgcccgagctgctggagatcatcaagcccaagctggagatgatcggcttcaagaacttcagcagcatcagcgccgccctggaggacagccagagcagcttcagcgcctgcgtgcccagcctgagcagcaagatcatccaggacctgagcgacagctgcttcggcttcctgaagagcgccctggaggtgcccagactgtacagaagaaccaacaaggaggtgcccaccaccgccagcagctacgtggacagcgccctgaagcccctgttccagctgcagagcggccacaaggacaagctgaagcaggccatcatccagcagtggctggagggcaccctgagcgagagcacccacaagtactacgagaccgtgagcgacgtgctgaacagcgtgaagaagatggaggagagcctgaagagactgaagcaggccagaaagaccacccccgccaaccccgtgggccccagcggcggcatgagcgacgacgacaagatcagactgcagctggccctggacgtggagtacctgggcgagcagatccagaagctgggcctgcaggccagcgacatcaagagcttcagcgccctggccgagctggtggccgccgccaaggaccaggccaccgccgagcagccctag

SEQ ID NO: 172149 - DNA, 2040 bp, Artificial Sequence
  derived and/or modified sequence
atggtggagctgatcaacaaggactacgccgacttcgtgaacctgagcaccaacctggtgggcatggacaaggccctgaaccagctgagcgtgcccctgggccagctgagagaggaggtgctgagcctgagaagcagcgtgagcgagggcatcagagccgtggacgagagaatgagcaagcaggaggacatcagaaagaagaagatgtgcgtgctgagactgatccaggtgatcagaagcgtggagaagatcgagaagatcctgaacagccagagcagcaaggagaccagcgccctggaggccagcagccccctgctgaccggccagatcctggagagaatcgccaccgagttcaaccagctgcagttccacgccgtgcagagcaagggcatgcccctgctggacaaggtgagacccagaatcgccggcatcaccgccatgctgcagcagagcctggagggcctgctgctggagggcctgcagaccagcgacgtggacatcatcagacactgcctgagaacctacgccaccatcgacaagaccagagacgccgaggccctggtgggccaggtgctggtgaagccctacatcgacgaggtgatcatcgagcagttcgtggagagccaccccaacggcctgcaggtgatgtacaacaagctgctggagttcgtgccccaccactgcagactgctgagagaggtgaccggcggcgccatcagcagcgagaagggcaacaccgtgcccggctacgacttcctggtgaacagcgtgtggccccagatcgtgcagggcctggaggagaagctgcccagcctgttcaaccccggcaaccccgacgccttccacgagaagtacaccatcagcatggacttcgtgagaagactggagagacagtgcggcagccaggccagcgtgaagagactgagagcccaccccgcctaccacagcttcaacaagaagtggaacctgcccgtgtacttccagatcagattcagagagatcgccggcagcctggaggccgccctgaccgacgtgctggaggacgcccccgccgagagcccctactgcctgctggccagccacagaacctggagcagcctgagaagatgctggagcgacgagatgttcctgcccctgctggtgcacagactgtggagactgaccctgcagatcctggccagatacagcgtgttcgtgaacgagctgagcctgagacccatcagcaacgagagccccaaggagatcaagaagcccctggtgaccggcagcaaggagcccagcatcacccagggcaacaccgaggaccagggcagcggccccagcgagaccaagcccgtggtgagcatcagcagaacccagctggtgtacgtggtggccgacctggacaagctgcaggagcagctgcccgagctgctggagatcatcaagcccaagctggagatgatcggcttcaagaacttcagcagcatcagcgccgccctggaggacagccagagcagcttcagcgcctgcgtgcccagcctgagcagcaagatcatccaggacctgagcgacagctgcttcggcttcctgaagagcgccctggaggtgcccagactgtacagaagaaccaacaaggaggtgcccaccaccgccagcagctacgtggacagcgccctgaagcccctgttccagctgcagagcggccacaaggacaagctgaagcaggccatcatccagcagtggctggagggcaccctgagcgagagcacccacaagtactacgagaccgtgagcgacgtgctgaacagcgtgaagaagatggaggagagcctgaagagactgaagcaggccagaaagaccacccccgccaaccccgtgggccccagcggcggcatgagcgacgacgacaagatcagactgcagctggccctggacgtggagtacctgggcgagcagatccagaagctgggcctgcaggccagcgacatcaagagcttcagcgccctggccgagctggtggccgccgccaaggaccaggccaccgccgagcagccctag

SEQ ID NO: 172150 - DNA, 1869 bp, Artificial Sequence
  derived and/or modified sequence
atgagcaagcaggaggacatcagaaagaagaagatgtgcgtgctgagactgatccaggtgatcagaagcgtggagaagatcgagaagatcctgaacagccagagcagcaaggagaccagcgccctggaggccagcagccccctgctgaccggccagatcctggagagaatcgccaccgagttcaaccagctgcagttccacgccgtgcagagcaagggcatgcccctgctggacaaggtgagacccagaatcgccggcatcaccgccatgctgcagcagagcctggagggcctgctgctggagggcctgcagaccagcgacgtggacatcatcagacactgcctgagaacctacgccaccatcgacaagaccagagacgccgaggccctggtgggccaggtgctggtgaagccctacatcgacgaggtgatcatcgagcagttcgtggagagccaccccaacggcctgcaggtgatgtacaacaagctgctggagttcgtgccccaccactgcagactgctgagagaggtgaccggcggcgccatcagcagcgagaagggcaacaccgtgcccggctacgacttcctggtgaacagcgtgtggccccagatcgtgcagggcctggaggagaagctgcccagcctgttcaaccccggcaaccccgacgccttccacgagaagtacaccatcagcatggacttcgtgagaagactggagagacagtgcggcagccaggccagcgtgaagagactgagagcccaccccgcctaccacagcttcaacaagaagtggaacctgcccgtgtacttccagatcagattcagagagatcgccggcagcctggaggccgccctgaccgacgtgctggaggacgcccccgccgagagcccctactgcctgctggccagccacagaacctggagcagcctgagaagatgctggagcgacgagatgttcctgcccctgctggtgcacagactgtggagactgaccctgcagatcctggccagatacagcgtgttcgtgaacgagctgagcctgagacccatcagcaacgagagccccaaggagatcaagaagcccctggtgaccggcagcaaggagcccagcatcacccagggcaacaccgaggaccagggcagcggccccagcgagaccaagcccgtggtgagcatcagcagaacccagctggtgtacgtggtggccgacctggacaagctgcaggagcagctgcccgagctgctggagatcatcaagcccaagctggagatgatcggcttcaagaacttcagcagcatcagcgccgccctggaggacagccagagcagcttcagcgcctgcgtgcccagcctgagcagcaagatcatccaggacctgagcgacagctgcttcggcttcctgaagagcgccctggaggtgcccagactgtacagaagaaccaacaaggaggtgcccaccaccgccagcagctacgtggacagcgccctgaagcccctgttccagctgcagagcggccacaaggacaagctgaagcaggccatcatccagcagtggctggagggcaccctgagcgagagcacccacaagtactacgagaccgtgagcgacgtgctgaacagcgtgaagaagatggaggagagcctgaagagactgaagcaggccagaaagaccacccccgccaaccccgtgggccccagcggcggcatgagcgacgacgacaagatcagactgcagctggccctggacgtggagtacctgggcgagcagatccagaagctgggcctgcaggccagcgacatcaagagcttcagcgccctggccgagctggtggccgccgccaaggaccaggccaccgccgagcagccctag

SEQ ID NO: 172151 - DNA, 1284 bp, Artificial Sequence
  derived and/or modified sequence
atgggcttcgccatggaggacaccgaggacatcagccagaaccacttcggccacctgtgcatcttcaagtggggccactggaagaaggacctgaagtacaccatcagcatggacttcgtgagaagactggagagacagtgcggcagccaggccagcgtgaagagactgagagcccaccccgcctaccacagcttcaacaagaagtggaacctgcccgtgtacttccagatcagattcagagagatcgccggcagcctggaggccgccctgaccgacgtgctggaggacgcccccgccgagagcccctactgcctgctggccagccacagaacctggagcagcctgagaagatgctggagcgacgagatgttcctgcccctgctggtgcacagactgtggagactgaccctgcagatcctggccagatacagcgtgttcgtgaacgagctgagcctgagacccatcagcaacgagagccccaaggagatcaagaagcccctggtgaccggcagcaaggagcccagcatcacccagggcaacaccgaggaccagggcagcggccccagcgagaccaagcccgtggtgagcatcagcagaacccagctggtgtacgtggtggccgacctggacaagctgcaggagcagctgcccgagctgctggagatcatcaagcccaagctggagatgatcggcttcaagaacttcagcagcatcagcgccgccctggaggacagccagagcagcttcagcgcctgcgtgcccagcctgagcagcaagatcatccaggacctgagcgacagctgcttcggcttcctgaagagcgccctggaggtgcccagactgtacagaagaaccaacaaggaggtgcccaccaccgccagcagctacgtggacagcgccctgaagcccctgttccagctgcagagcggccacaaggacaagctgaagcaggccatcatccagcagtggctggagggcaccctgagcgagagcacccacaagtactacgagaccgtgagcgacgtgctgaacagcgtgaagaagatggaggagagcctgaagagactgaagcaggccagaaagaccacccccgccaaccccgtgggccccagcggcggcatgagcgacgacgacaagatcagactgcagctggccctggacgtggagtacctgggcgagcagatccagaagctgggcctgcaggccagcgacatcaagagcttcagcgccctggccgagctggtggccgccgccaaggaccaggccaccgccgagcagccctag

SEQ ID NO: 172152 - protein, 1375 aa, Artificial Sequence
  derived and/or modified sequence
MEGDRVAGRPVLSSLPVLLLLPLLMLRAAALHPDELFPHGESWGDQLLQEGDDESSAVVKLANPLHFYEARFSNLYVGTNGIISTQDFPRETQYVDYDFPTDFPAIAPFLADIDTSHGRGRVLYREDTSPAVLGLAARYVRAGFPRSARFTPTHAFLATWEQVGAYEEVKRGALPSGELNTFQAVLASDGSDSYALFLYPANGLQFLGTRPKESYNVQLQLPARVGFCRGEADDLKSEGPYFSLTSTEQSVKNLYQLSNLGIPGVWAFHIGSTSPLDNVRPAAVGDLSAAHSSVPLGRSFSHATALESDYNEDNLDYYDVNEEEAEYLPGEPEEALNGHSSIDVSFQSKVDTKPLEESSTLDPHTKEGTSLGEVGGPDLKGQVEPWDERETRSPAPPEVDRDSLAPSWETPPPYPENGSIQPYPDGGPVPSEMDVPPAHPEEEIVLRSYPASGHTTPLSRGTYEVGLEDNIGSNTEVFTYNAANKETCEHNHRQCSRHAFCTDYATGFCCHCQSKFYGNGKHCLPEGAPHRVNGKVSGHLHVGHTPVHFTDVDLHAYIVGNDGRAYTAISHIPQPAAQALLPLTPIGGLFGWLFALEKPGSENGFSLAGAAFTHDMEVTFYPGEETVRITQTAEGLDPENYLSIKTNIQGQVPYVSANFTAHISPYKELYHYSDSTVTSTSSRDYSLTFGAINQTWSYRIHQNITYQVCRHAPRHPSFPTTQQLNVDRVFALYNDEERVLRFAVTNQIGPVKEDSDPTPGNPCYDGSHMCDTTARCHPGTGVDYTCECASGYQGDGRNCVDENECATGFHRCGPNSVCINLPGSYRCECRSGYEFADDRHTCILITPPANPCEDGSHTCAPAGQARCVHHGGSTFSCACLPGYAGDGHQCTDVDECSENRCHPAATCYNTPGSFSCRCQPGYYGDGFQCIPDSTSSLTPCEQQQRHAQAQYAYPGARFHIPQCDEQGNFLPLQCHGSTGFCWCVDPDGHEVPGTQTPPGSTPPHCGPSPEPTQRPPTICERWRENLLEHYGGTPRDDQYVPQCDDLGHFIPLQCHGKSDFCWCVDKDGREVQGTRSQPGTTPACIPTVAPPMVRPTPRPDVTPPSVGTFLLYTQGQQIGYLPLNGTRLQKDAAKTLLSLHGSIIVGIDYDCRERMVYWTDVAGRTISRAGLELGAEPETIVNSGLISPEGLAIDHIRRTMYWTDSVLDKIESALLDGSERKVLFYTDLVNPRAIAVDPIRGNLYWTDWNREAPKIETSSLDGENRRILINTDIGLPNGLTFDPFSKLLCWADAGTKKLECTLPDGTGRRVIQNNLKYPFSIVSYADHFYHTDWRRDGVVSVNKHSGQFTDEYLPEQRSHLYGITAVYPYCPTGRK

SEQ ID NO: 172153 - protein, 969 aa, Artificial Sequence
  derived and/or modified sequence
MEGDRVAGRPVLSSLPVLLLLPLLMLRAAALHPDELFPHGESWGDQLLQEGDDESSAVVKLANPLHFYEARFSNLYVGTNGIISTQDFPRETQYVDYDFPTDFPAIAPFLADIDTSHGRGRVLYRVNGKVSGHLHVGHTPVHFTDVDLHAYIVGNDGRAYTAISHIPQPAAQALLPLTPIGGLFGWLFALEKPGSENGFSLAGAAFTHDMEVTFYPGEETVRITQTAEGLDPENYLSIKTNIQGQVPYVSANFTAHISPYKELYHYSDSTVTSTSSRDYSLTFGAINQTWSYRIHQNITYQVCRHAPRHPSFPTTQQLNVDRVFALYNDEERVLRFAVTNQIGPVKEDSDPTPGNPCYDGSHMCDTTARCHPGTGVDYTCECASGYQGDGRNCVDENECATGFHRCGPNSVCINLPGSYRCECRSGYEFADDRHTCILITPPANPCEDGSHTCAPAGQARCVHHGGSTFSCACLPGYAGDGHQCTDVDECSENRCHPAATCYNTPGSFSCRCQPGYYGDGFQCIPDSTSSLTPCEQQQRHAQAQYAYPGARFHIPQCDEQGNFLPLQCHGSTGFCWCVDPDGHEVPGTQTPPGSTPPHCGPSPEPTQRPPTICERWRENLLEHYGGTPRDDQYVPQCDDLGHFIPLQCHGKSDFCWCVDKDGREVQGTRSQPGTTPACIPTVAPPMVRPTPRPDVTPPSVGTFLLYTQGQQIGYLPLNGTRLQKDAAKTLLSLHGSIIVGIDYDCRERMVYWTDVAGRTISRAGLELGAEPETIVNSGLISPEGLAIDHIRRTMYWTDSVLDKIESALLDGSERKVLFYTDLVNPRAIAVDPIRGNLYWTDWNREAPKIETSSLDGENRRILINTDIGLPNGLTFDPFSKLLCWADAGTKKLECTLPDGTGRRVIQNNLKYPFSIVSYADHFYHTDWRRDGVVSVNKHSGQFTDEYLPEQRSHLYGITAVYPYCPTGRK

SEQ ID NO: 172154 - protein, 1180 aa, Artificial Sequence
  derived and/or modified sequence
TPQTERITHSSISWSFLLRFSRGKLLMLRAAALHPDELFPHGESWGDQLLQEGDDESSAVVKLANPLHFYEARFSNLYVGTNGIISTQDFPRETQYVDYDFPTDFPAIAPFLADIDTSHGRGRVLYREDTSPAVLGLAARYVRAGFPRSARFTPTHAFLATWEQVGAYEEVKRGALPSGELNTFQAVLASDGSDSYALFLYPANGLQFLGTRPKESYNVQLQLPARVGFCRGEADDLKSEGPYFSLTSTEQSVKNLYQLSNLGIPGVWAFHIGSTSPLDNVRPAAVGDLSAAHSSVPLGRSFSHATALESDYNEDNLDYYDVNEEEAEYLPGEPEEALNGHSSIDVSFQSKVDTKPLEESSTLDPHTKEGTSLGEVGGPDLKGQVEPWDERETRSPAPPEVDRDSLAPSWETPPPYPENGSIQPYPDGGPVPSEMDVPPAHPEEEIVLRSYPASGHTTPLSRGTYEVGLEDNIGSNTEVFTYNAANKETCEHNHRQCSRHAFCTDYATGFCCHCQSKFYGNGKHCLPEGAPHRVNGKVSGHLHVGHTPVHFTDVDLHAYIVGNDGRAYTAISHIPQPAAQALLPLTPIGGLFGWLFALEKPGSENGFSLAGAAFTHDMEVTFYPGEETVRITQTAEGLDPENYLSIKTNIQGQVPYVSANFTAHISPYKELYHYSDSTVTSTSSRDYSLTFGAINQTWSYRIHQNITYQVCRHAPRHPSFPTTQQLNVDRVFALYNDEERVLRFAVTNQIGPVKEDSDPTPGNPCYDGSHMCDTTARCHPGTGVDYTCECASGYQGDGRNCVDENECATGFHRCGPNSVCINLPGSYRCECRSGYEFADDRHTCILITPPANPCEDGSHTCAPAGQARCVHHGGSTFSCACLPGYAGDGHQCTDVDECSENRCHPAATCYNTPGSFSCRCQPGYYGDGFQCIPDSTSSLTPCEQQQRHAQAQYAYPGARFHIPQCDEQGNFLPLQCHGSTGFCWCVDPDGHEVPGTQTPPGSTPPHCGPSPEPTQRPPTICERWRENLLEHYGGTPRDDQYVPQCDDLGHFIPLQCHGKSDFCWCVDKDGREVQGTRSQPGTTPACIPTVAPPMVRPTPRPDVTPPSVGTFLLYTQGQQIGYLPLNGTRLQKDAAKTLLSLHVKWISPVGGRAAWLSQWEPPHRPCCSEVDWCREVLEGF

SEQ ID NO: 172155 - DNA, 4128 bp, Artificial Sequence
  derived and/or modified sequence
atggaaggcgaccgcgtcgccggtagaccagtactgtcgagcctcccggtgctactcttactcccattgctgatgctgcgcgctgccgccctgcatcctgatgagttattcccacacggggagtcttggggcgaccagcttttacaggagggtgacgatgagtcatctgccgtcgtgaagctggctaaccctctgcatttctacgaagctaggtttagcaatctgtatgttggtaccaatggcatcatctcaacacaagattttccacgcgagacccagtacgttgactatgacttccccacagacttccctgccatagctcccttcctcgccgacatagacacgagccatggccgcggtcgggtcctgtatagagaagatacatctcccgcagttctgggtctggccgcacggtacgttcgggccgggtttccccgctctgcccgcttcacgcccacccacgcatttttagcaacctgggagcaggtgggcgcctatgaggaagttaagcggggcgctctaccatcaggcgagcttaacacatttcaggcagttttggcctcggacggaagcgactcttatgcactcttcttgtacccagccaacggcctccagttcctggggacacggccaaaggaatcgtataatgtccagctgcaattgccggcaagagtcgggttctgcagaggcgaagctgacgatttgaagtccgaggggccgtacttttctctcacttctacagagcaaagtgtgaagaatctttaccagctttccaatctcggaattcctggagtgtgggcgttccacatcggctctacttctcctctggacaatgtgcgacctgctgctgtgggagatttgagcgccgcccactcctctgtgcccctcgggcgcagcttcagccacgctactgctttggaatctgattacaatgaagacaacctggactactatgatgtcaatgaagaagaagcagaatacctgccaggcgagcccgaagaggccctgaatggacactcatctattgatgtgtccttccagtccaaagtggatactaagcccttagaagaaagctccacccttgatccacacactaaagaagggacgagcctgggcgaagtggggggcccagacctgaagggccaagtggaaccgtgggacgagagagagactagatccccagcccccccagaagtagatcgggattcactggcccctagctgggagacacccccgccatatcctgaaaacggatctatacagccataccctgatgggggcccggtgccttcggagatggatgtgcccccagcccatcctgaagaggaaatcgttttacgctcatatccggcaagtggacatacaacgccgctgtcgcggggaacgtatgaggttgggctcgaggataacatcggttccaacacagaggtcttcacatacaacgccgctaataaagagacgtgcgaacataaccacaggcagtgtagtcgccatgccttttgtaccgattacgcgaccggattttgttgccattgccagtccaaattctacgggaacggaaagcattgccttcccgagggcgctccccatcgggtgaatgggaaggttagcggacacctgcacgtcgggcacaccccggtgcatttcacggatgtggacctccacgcatacatcgtagggaatgacggacgcgcctacaccgcaatcagccacatcccacagcctgctgctcaggcactgttacctcttacccctattggcggtttgtttgggtggctgtttgcacttgaaaagcctgggagtgagaatggtttcagcctggctggagccgcatttacccatgatatggaagttactttctaccccggcgaggaaacggtacgtattactcagactgctgagggtctggatccagagaattatctttctattaagactaatattcagggacaggtgccctatgtgagtgccaattttacggcgcacatttcaccttataaagaattgtatcactactctgacagcactgttacctccacgtctagccgtgactacagtctgaccttcggggccataaatcagacctggagctatcgaatccatcaaaacatcacttatcaagtttgccgccacgcaccaagacacccatccttcccaactacgcagcaactcaatgtggacagagtcttcgccctgtacaacgacgaagagcgagtgctcaggttcgccgtgacaaatcagattgggcctgtcaaggaggactcagatccaaccccaggaaatccgtgttatgacgggagtcacatgtgcgataccaccgcccggtgccaccctggaacaggtgtggactacacttgcgaatgcgcgagcgggtaccagggcgacgggaggaattgcgtcgatgaaaatgaatgcgctacgggatttcaccgatgtggcccaaactcagtgtgtatcaatttaccgggaagttataggtgtgagtgcagatccggatatgaatttgcggatgatcgccatacttgtattctaataacgcctcccgcgaacccttgtgaagatggtagccacacatgtgctcctgccggccaggccaggtgcgtgcaccacggaggctcaacattctcatgtgcgtgtctgccaggctatgctggcgacgggcatcaatgtaccgacgtggatgagtgctctgagaaccgctgtcatccagcagccacctgttacaatactcccggtagctttagctgtagatgtcaaccgggttactacggcgacggatttcagtgcattcccgattccaccagctccctgacaccatgcgaacagcagcaacgccatgctcaagcacagtatgcgtaccccggagcacgctttcacattccacagtgtgatgaacagggcaacttccttccgttacagtgccacggatccacaggattttgttggtgcgttgacccggacggacatgaagtgccaggaactcagacgcctcctggcagtacacctccccactgcggcccaagccccgagcctacgcagcggcctccaacgatttgtgagcggtggcgcgagaacctgctggaacattacgggggcactcctagagacgatcaatacgtaccacagtgtgacgatctgggccatttcataccactccaatgtcatgggaagagcgacttttgttggtgcgtggacaaagatgggcgggaagttcagggtacgcgcagccaacctggcacaacacccgcatgcatccccacagtggcccctccaatggtgcgccccacaccaagaccagacgtgactcccccaagcgtgggtacattcctgctctatactcagggacagcagatcggctatctcccacttaatggaacaaggctgcagaaagacgcagcaaaaactctgttgagtctacacggaagcattattgtcgggattgattatgactgcagagaaaggatggtgtattggactgacgtcgcaggaaggaccatctctcgagctgggctcgagctgggtgcagaaccagagaccatcgtgaattccggactgatttcacctgaggggttggccatcgatcacatccggcggacgatgtattggaccgactctgtcctcgacaaaatcgagtctgctctcctggacgggtccgaacgaaaggtattgttctataccgatctggtcaacccgcgggccatcgcagtcgaccccatccggggcaacctttactggaccgattggaacagagaggcccctaagatcgagacttcctccttggatggtgaaaacaggcgcattctgattaacacagatataggattgcccaatggccttacatttgaccccttcagcaagctgctttgctgggcggatgccggcacgaagaagctcgagtgcactttgcccgatgggacaggtaggagggttattcaaaataacctgaagtacccgttctcgatcgtttcatatgctgaccacttctatcacacagattggaggagggacggcgtggtgagcgttaacaagcactccgggcagttcaccgacgagtacctcccagagcagaggagccacctgtacgggataaccgctgtgtacccatactgtcctacaggtcggaaatag

SEQ ID NO: 172156 - DNA, 2910 bp, Artificial Sequence
  derived and/or modified sequence
atggaaggcgaccgcgtggccgggcgccccgtgctgtctagtttaccagtacttcttctactgcctttgttaatgctgagggcagctgccctccatcccgacgaactatttccacacggagagtcctggggggaccagctgctgcaagaaggtgacgatgagagctcggccgttgtgaaacttgcaaatcctttgcacttctatgaggcccggttcagcaatctctatgtgggcacaaacggaatcatcagcacccaggattttcctagagagactcagtatgtggattatgactttcccaccgatttcccagctatcgcgccatttctggccgatatcgatacgtcacacggccgtgggagggtgctgtatagagtcaacgggaaagtaagcggccacctgcacgtcggccatacccctgtgcacttcacagatgtcgatcttcatgcctacattgtgggaaacgatgggcgagcatacacagctatcagccatatcccccaacccgccgcacaggccctcctcccccttacacctattggcggactgtttggttggctgtttgccctcgagaaaccaggctcagaaaacgggttttcgttggctggggccgccttcactcacgacatggaagtcacattttatcctggcgaggaaaccgtccgcatcacccaaacggctgagggactggaccccgagaactatctctctattaagaccaatattcaaggccaagtgccttatgtgagcgctaacttcaccgctcacatcagcccttataaggaactctaccattattcagactcaacggttacctctaccagcagtagggactattccctcacatttggggcgatcaaccaaacctggtcctatcggatccatcagaatattacctatcaggtttgcagacatgcaccaagacatcctagtttcccaaccacccagcaactgaacgtggaccgggtctttgccctgtataacgacgaggaaagggtgctccggtttgcagtgacaaatcagatcggacctgtaaaggaagacagcgacccaacccctggaaatccctgctacgatgggagtcatatgtgcgacacaactgctagatgccatcccggtactggggtggattacacctgcgaatgtgcatccggctaccaaggcgacggcagaaattgcgtggacgaaaatgaatgtgcgaccggattccaccgctgcggcccaaattccgtttgtatcaatttgcctggctcctatcggtgtgagtgccggtcaggttatgagtttgcagacgacagacatacatgtattctgattactcccccggcgaatccgtgcgaagatggctcccatacctgtgctcccgccggtcaggctcggtgtgttcaccatggaggcagtactttttcttgcgcttgtttgccgggttatgcgggagacggtcatcaatgtacagacgtagatgaatgctccgaaaatcggtgccacccggccgctacgtgctacaacactcctgggagcttctcttgccggtgccagcctggctattacggagatggattccagtgtatacccgatagtacttcttccttgaccccctgtgagcagcagcagagacatgctcaagcacagtacgcttatccaggcgcgcgcttccacattccacaatgcgatgaacaggggaatttccttcctctccagtgccacggttcaactggattctgttggtgcgtggaccccgacgggcacgaggtgcctggcacccagaccccaccaggcagtacccccccccattgcggcccttctcctgagcccacccaacggcctccgacaatctgcgagcgatggcgtgagaacttgctcgagcactatggcgggaccccccgggatgatcagtatgtgccccagtgtgacgacctcggacattttatccccctacaatgccatggaaaatcggacttttgctggtgcgtggataaggacgggagggaggttcagggcactcgatctcagcccggcaccacaccagcctgcatccccaccgtcgcgccccccatggtgcgccccacccctcgtcctgacgtgactcctccttctgttggaacattcctgctttatacacaggggcagcagatcggctatctccctctgaatggtacgagacttcaaaaagatgctgctaaaaccctgctatcactccacggatcaatcatagtcggaattgactacgactgcagagagcgcatggtgtattggaccgatgtggccgggcgcaccataagccgggctgggctggaactgggagctgagccagagactatcgtgaatagcgggttgataagccccgagggactcgcgatcgatcatattcgacggaccatgtactggaccgactccgttcttgataagatcgagagcgccctcttagatggcagtgagcgcaaagtgctcttctacactgatcttgttaatccgagggccatagctgtggatcccattcgtggtaacctgtattggaccgactggaatagagaggcaccaaaaatcgagacgagttctctagacggagagaaccgcaggatcctgattaataccgatattggtctgcctaacggactgacatttgacccattctctaaactgctgtgctgggcagacgctggaaccaagaagttggaatgtacactgccggatggtaccggacgtagagtaatacaaaacaacttaaaatatcccttcagtatagttagctacgctgatcatttctatcacacagattggagacgcgacggtgtggtgagcgttaataagcactccgggcagtttaccgatgagtacctccccgagcagagatcgcacctgtatggcattactgccgtctacccttactgccccaccgggcgtaaatag

SEQ ID NO: 172157 - DNA, 3543 bp, Artificial Sequence
  derived and/or modified sequence
acaccgcaaactgagcggataacccattccagtatcagctggagctttctgctgcgattctcacggggtaaactgctgatgctgagagcggcagcactgcacccagacgagctctttccccacggtgagtcatggggagaccagttgcttcaggagggtgatgacgagtcctccgcagtagtcaagctcgcgaatcccctccatttttacgaggccagattttcaaatctttacgtcggcaccaacgggatcataagtacacaggatttccccagagagacccagtacgtcgattatgacttcccaacagatttccctgcgatcgctcccttccttgcggacatcgatacgagtcacggcagaggtagagtgctatatagggaagacacatcaccagctgtgctggggttggcagcccgctatgttcgggccgggtttccccgttccgcaagattcacccccacacacgcttttctcgcaacatgggaacaggtaggggcctatgaagaggtcaagcgcggcgccctgccctctggcgaactgaatactttccaggctgtgctggcatcagacggcagcgactcttacgcactcttcttataccctgccaacggtctgcaattcttggggacaagacccaaggaatcttacaatgtgcagttgcagctgccggccagagtgggcttttgtcgcggggaagccgacgatcttaaaagcgaggggccttatttctcattgacttcgactgaacaaagcgtgaaaaatctttatcagctctccaacctcgggatcccaggcgtctgggcatttcacattggctccacctctccacttgataacgtcaggcccgcagcagtgggcgatctctccgccgcgcacagctcagtgcccctgggtcgatctttttcgcacgccaccgccctggaaagcgactataatgaggacaatcttgactattatgatgtgaatgaagaggaggccgaatacctgcctggagagcccgaagaggctcttaacggccacagcagcattgatgtctcatttcagagcaaagttgacaccaagccactagaagagagcagcactctggatccccatacaaaagaaggcacctcgctaggggaagtcggtgggcccgacctgaaggggcaggttgaaccatgggacgaaagggagacccgcagccccgcccccccagaagtggatcgcgacagcctggctcccagttgggaaactccgccgccataccccgaaaacggctccatccagccctaccccgatggcggccctgtgccttcggagatggatgtgcctcccgctcatcccgaagaggaaatagtgctcaggtcatacccagcctctgggcatacaactccgctatctcgtggtacatatgaagtgggcctggaagataatatcgggagcaatactgaagtgttcacatataacgccgcaaataaggaaacttgtgaacacaatcataggcagtgttcaagacatgcattttgcactgattatgctaccgggttctgctgccactgtcagagcaagttctacgggaatggaaaacattgtctgcccgaaggcgcaccacaccgagttaacggaaaggtttccgggcatcttcacgtgggtcacacacccgtgcactttacagacgttgacttgcacgcgtacattgtggggaacgatggccgggcctacactgccattagccacatcccccagcctgctgcacaagcgttgctgcccctcactcccatcggtgggctgttcgggtggttgtttgcccttgaaaagccgggatctgagaacggtttcagcttagctggagcagcgttcacacacgacatggaggtcacattctaccctggtgaagaaaccgtgaggattactcagacagccgaaggcctggacccagaaaactacctgtccattaagacaaacattcaagggcaagtcccatatgtgtctgctaacttcacggcccacatcagcccctataaagaactttaccactactctgattctacagttacaagcacatcgagtcgggactactccctcaccttcggcgcaattaaccaaacttggtcctatagaattcatcaaaatatcacttaccaggtctgccgccacgctcccagacatccgagcttcccaaccacccaacagttgaatgtggaccgcgtgttcgctttgtacaatgacgaggaacgtgtgctgcggtttgcagtgaccaatcagatcggcccagtcaaagaagacagtgaccccacacccggtaatccttgctatgatggaagtcacatgtgcgacactaccgctcggtgccacccaggcacaggcgtggactatacatgtgagtgcgcgtcaggctatcaaggcgacggtcggaactgtgtcgatgaaaatgagtgtgccaccggatttcaccgctgtggacctaatagcgtttgcattaacctgcctggttcctaccgctgtgagtgtcggagcgggtatgagtttgcggatgacaggcatacctgtatcttaattacgccaccagctaacccgtgtgaagatgggagccacacttgcgcacccgcgggtcaagcccgctgtgtacaccatggcggatccacatttagttgcgcatgtctgcctgggtatgccggcgacggccatcagtgtaccgacgtggatgaatgttcagaaaacaggtgccaccctgcggctacctgctacaacacacctggatcattctcatgcagatgccagcctggctactacggtgacggattccagtgcatccccgattccacgtccagtttaacgccgtgtgaacagcagcaaagacacgcacaggctcaatacgcgtaccccggtgcaaggtttcacattccccagtgcgacgagcagggaaattttctaccgcttcagtgccacggttccacgggtttttgctggtgcgtggatcccgacggccacgaggtccccggtacacagaccccgcccggaagcactccaccacactgcgggccttcacccgaacctacccagaggccaccgaccatctgtgaaaggtggcgcgaaaatctcttagagcactacgggggcaccccacgcgacgaccagtatgtgccccagtgtgacgacttgggtcacttcatccctctgcagtgtcatgggaagtccgacttctgctggtgtgtggacaaggacgggagagaagtacaggggactcgcagccagccagggacgacccccgcttgcatcccaacggttgctcctccaatggtgaggcccacgcccaggccagatgttactcccccatctgtggggacattcttactctatacccagggtcagcagattgggtatttacctctgaacgggacacggctgcagaaggacgccgccaagactcttctgagcttgcacgtgaagtggattagccctgtgggcgggagggccgcgtggctgtcccagtgggagcctccacacagaccctgctgcagtgaagtggactggtgtagagaagtgctagaggggttttag

SEQ ID NO: 172158 - DNA, 4128 bp, Artificial Sequence
  derived and/or modified sequence
atggagggggacagagtggccggccggcctgtgctgagcagcctgcctgtgctgctgctgctgcccctgctgatgctgcgggctgctgccctgcacccagatgagctgttcccccatggagagagctggggagaccagctgctgcaggagggagatgatgagagcagcgctgtggtgaagctggccaaccccctgcacttctatgaggcccgcttcagcaacctgtatgtgggcaccaacggcatcatcagcacccaggacttcccccgggagacccagtatgtggactatgacttccccacagacttccctgccatcgcccccttcctggccgacatcgacaccagccacggccggggccgggtgctgtaccgggaggacaccagccctgctgtgctgggcctggccgcccgctacgtgcgggccggcttccccaggtctgcccgcttcacccccacccacgccttcctggccacctgggagcaggtgggcgcctatgaggaggtgaagagaggagccctgcccagcggggagctgaacaccttccaggccgtgctggccagtgatggcagtgacagctatgccctcttcctgtacccagccaacggcctgcagttcctgggcacccggcccaaggagagctacaacgtgcagctgcagctgcctgcccgggtgggcttctgccgcggggaggctgatgacctgaagtctgagggcccctacttcagcctgaccagcacagagcagagcgtgaagaacctgtaccagctgagcaacctgggcatccctggggtgtgggccttccacatcggcagcaccagccccctggacaacgtgcggcctgctgctgtgggggacctgtctgctgcccacagctctgtgcccctgggccgctccttcagccacgccacagccctggagagtgactacaatgaagacaacctggactactatgatgtgaatgaggaggaggccgagtacctgcctggagagcctgaggaggccctgaatggccacagcagcattgatgtgtccttccagagcaaggtggacaccaagcccctggaggagagcagcaccctggacccccacaccaaggagggcaccagcctgggggaggtgggcggccctgacctgaagggccaggtggagccctgggatgagcgggagaccaggagccctgcccctcctgaggtggaccgggacagcctggcccccagctgggagaccccaccaccctacccagaaaatggcagcatccagccctacccagatggcggccctgtgcccagcgagatggatgtgcccccagcccaccctgaggaggagatcgtgctgcggagctacccagccagcggccacaccacccccctgagccggggcacctatgaggtgggcctggaggacaacatcggcagcaacacagaggtgttcacctacaatgctgccaacaaggagacctgtgagcacaaccaccggcagtgcagcagacatgccttctgcacagattatgccaccggcttctgctgccactgccagagcaagttctatggaaatggcaagcactgcctgcctgagggcgccccccaccgggtgaatggcaaggtgtctggccacctgcacgtgggccacacccctgtgcacttcacagatgtggacctgcacgcctacatcgtgggcaatgatggccgggcctacacagccatcagccacatcccccagcctgctgcccaggccctgctgcccctgacccccatcggcggcctgtttggctggctgtttgccctggagaagccaggctctgaaaatggcttcagcctggccggggccgccttcacccatgacatggaggtgaccttctacccaggagaggagaccgtgcgcatcacccagacagctgagggcctggaccctgagaactacctgagcatcaagaccaacatccagggccaggtgccctacgtgtctgccaacttcaccgcccacatcagcccctacaaggagctgtaccactacagcgacagcacagtgaccagcaccagcagccgggactacagcctgacctttggagccatcaaccagacctggagctaccgcatccaccagaacatcacctaccaggtgtgcagacatgcccccaggcaccccagcttccccaccacccagcagctgaatgtggacagagtgtttgccctgtacaatgatgaggagcgggtgctgcgctttgctgtgaccaaccagatcggccctgtgaaggaggacagcgaccccaccccaggcaacccctgctatgatggcagccacatgtgtgacaccacagcccgctgccaccctggcaccggggtggactacacctgtgaatgtgccagcggctaccagggagatggaagaaactgtgtggatgaaaatgaatgtgccaccggcttccaccgctgtggccccaacagcgtgtgcatcaacctgcccggcagctaccgctgtgagtgccgcagcggctatgaatttgctgatgacagacacacctgcatcctgatcaccccaccagccaacccctgtgaagatggcagccacacctgtgccccagctggccaggcccgctgtgtgcaccacggcggcagcaccttcagctgtgcctgcctgcccggctatgctggagatggccaccagtgcacagatgtggatgaatgttctgagaaccgctgccaccctgctgccacctgctacaacaccccaggcagcttcagctgccgctgccagcccggctactatggagatggcttccagtgcatcccagacagcaccagcagcctgaccccctgtgagcagcagcagagacatgcccaggcccagtatgcctacccaggggcccgcttccacatcccccagtgtgatgagcagggcaacttcctgcccctgcagtgccacggcagcacaggcttctgctggtgtgtggaccctgatggccacgaggtgcccggcacccagaccccacctggcagcaccccaccccactgcggccccagccctgagcccacccagaggcctcccaccatctgtgagcgctggagggagaacctgctggagcactacggcggcaccccaagagatgaccagtatgtgccccagtgtgatgacctgggccacttcatccccctgcagtgccacggcaagagtgacttctgctggtgtgtggacaaggatggccgggaggtgcagggcaccaggagccagcccggcaccaccccagcctgcatccccaccgtggccccacccatggtgcggcccacccccaggccagatgtgaccccaccttctgtgggcaccttcctgctgtacacccagggccagcagatcggctacctgcccctgaatggcacccggctgcagaaggatgctgccaagaccctgctgagcctgcacggcagcatcatcgtgggcattgattatgactgccgggagaggatggtgtactggacagatgtggccggccgcaccatcagcagagctggcctggagctgggcgctgagcctgagaccatcgtgaacagcggcctcatcagccctgagggcctggccatcgaccacatccggaggaccatgtactggacagattctgtgctggacaagattgagagcgccctgctggatggcagcgagaggaaggtgctcttctacacagacctggtgaacccccgggccatcgctgtggaccccatccggggcaacctgtactggacagactggaaccgggaggcccccaagattgagaccagcagcctggatggagaaaatcgccgcatcctgatcaacacagacatcggcctgcccaacggcctgacctttgaccccttcagcaagctgctgtgctgggcagatgctggcaccaagaagctggagtgcaccctgcctgatggcaccggccggcgggtcatccagaacaacctgaagtaccccttcagcatcgtgtcctatgctgaccacttctaccacacagactggaggagagatggagtggtgtctgtgaacaagcacagcggccagttcacagatgagtacctgcctgagcagaggagccacctgtatggcatcacagctgtgtacccctactgccccaccggcaggaagtag

SEQ ID NO: 172159 - DNA, 2910 bp, Artificial Sequence
  derived and/or modified sequence
atggagggggacagagtggccggccggcctgtgctgagcagcctgcctgtgctgctgctgctgcccctgctgatgctgcgggctgctgccctgcacccagatgagctgttcccccatggagagagctggggagaccagctgctgcaggagggagatgatgagagcagcgctgtggtgaagctggccaaccccctgcacttctatgaggcccgcttcagcaacctgtatgtgggcaccaacggcatcatcagcacccaggacttcccccgggagacccagtatgtggactatgacttccccacagacttccctgccatcgcccccttcctggccgacatcgacaccagccacggccggggccgggtgctgtacagagtgaatggcaaggtgtctggccacctgcacgtgggccacacccctgtgcacttcacagatgtggacctgcacgcctacatcgtgggcaatgatggccgggcctacacagccatcagccacatcccccagcctgctgcccaggccctgctgcccctgacccccatcggcggcctgtttggctggctgtttgccctggagaagccaggctctgaaaatggcttcagcctggccggggccgccttcacccatgacatggaggtgaccttctacccaggagaggagaccgtgcgcatcacccagacagctgagggcctggaccctgagaactacctgagcatcaagaccaacatccagggccaggtgccctacgtgtctgccaacttcaccgcccacatcagcccctacaaggagctgtaccactacagcgacagcacagtgaccagcaccagcagccgggactacagcctgacctttggagccatcaaccagacctggagctaccgcatccaccagaacatcacctaccaggtgtgcagacatgcccccaggcaccccagcttccccaccacccagcagctgaatgtggacagagtgtttgccctgtacaatgatgaggagcgggtgctgcgctttgctgtgaccaaccagatcggccctgtgaaggaggacagcgaccccaccccaggcaacccctgctatgatggcagccacatgtgtgacaccacagcccgctgccaccctggcaccggggtggactacacctgtgaatgtgccagcggctaccagggagatggaagaaactgtgtggatgaaaatgaatgtgccaccggcttccaccgctgtggccccaacagcgtgtgcatcaacctgcccggcagctaccgctgtgagtgccgcagcggctatgaatttgctgatgacagacacacctgcatcctgatcaccccaccagccaacccctgtgaagatggcagccacacctgtgccccagctggccaggcccgctgtgtgcaccacggcggcagcaccttcagctgtgcctgcctgcccggctatgctggagatggccaccagtgcacagatgtggatgaatgttctgagaaccgctgccaccctgctgccacctgctacaacaccccaggcagcttcagctgccgctgccagcccggctactatggagatggcttccagtgcatcccagacagcaccagcagcctgaccccctgtgagcagcagcagagacatgcccaggcccagtatgcctacccaggggcccgcttccacatcccccagtgtgatgagcagggcaacttcctgcccctgcagtgccacggcagcacaggcttctgctggtgtgtggaccctgatggccacgaggtgcccggcacccagaccccacctggcagcaccccaccccactgcggccccagccctgagcccacccagaggcctcccaccatctgtgagcgctggagggagaacctgctggagcactacggcggcaccccaagagatgaccagtatgtgccccagtgtgatgacctgggccacttcatccccctgcagtgccacggcaagagtgacttctgctggtgtgtggacaaggatggccgggaggtgcagggcaccaggagccagcccggcaccaccccagcctgcatccccaccgtggccccacccatggtgcggcccacccccaggccagatgtgaccccaccttctgtgggcaccttcctgctgtacacccagggccagcagatcggctacctgcccctgaatggcacccggctgcagaaggatgctgccaagaccctgctgagcctgcacggcagcatcatcgtgggcattgattatgactgccgggagaggatggtgtactggacagatgtggccggccgcaccatcagcagagctggcctggagctgggcgctgagcctgagaccatcgtgaacagcggcctcatcagccctgagggcctggccatcgaccacatccggaggaccatgtactggacagattctgtgctggacaagattgagagcgccctgctggatggcagcgagaggaaggtgctcttctacacagacctggtgaacccccgggccatcgctgtggaccccatccggggcaacctgtactggacagactggaaccgggaggcccccaagattgagaccagcagcctggatggagaaaatcgccgcatcctgatcaacacagacatcggcctgcccaacggcctgacctttgaccccttcagcaagctgctgtgctgggcagatgctggcaccaagaagctggagtgcaccctgcctgatggcaccggccggcgggtcatccagaacaacctgaagtaccccttcagcatcgtgtcctatgctgaccacttctaccacacagactggaggagagatggagtggtgtctgtgaacaagcacagcggccagttcacagatgagtacctgcctgagcagaggagccacctgtatggcatcacagctgtgtacccctactgccccaccggcaggaagtag

SEQ ID NO: 172160 - DNA, 3543 bp, Artificial Sequence
  derived and/or modified sequence
accccccagacagagcgcatcacccacagcagcatctcctggagcttcctgctgcgcttcagccggggcaagctgctgatgctgcgggctgctgccctgcacccagatgagctgttcccccatggagagagctggggagaccagctgctgcaggagggagatgatgagagcagcgctgtggtgaagctggccaaccccctgcacttctatgaggcccgcttcagcaacctgtatgtgggcaccaacggcatcatcagcacccaggacttcccccgggagacccagtatgtggactatgacttccccacagacttccctgccatcgcccccttcctggccgacatcgacaccagccacggccggggccgggtgctgtaccgggaggacaccagccctgctgtgctgggcctggccgcccgctacgtgcgggccggcttccccaggtctgcccgcttcacccccacccacgccttcctggccacctgggagcaggtgggcgcctatgaggaggtgaagagaggagccctgcccagcggggagctgaacaccttccaggccgtgctggccagtgatggcagtgacagctatgccctcttcctgtacccagccaacggcctgcagttcctgggcacccggcccaaggagagctacaacgtgcagctgcagctgcctgcccgggtgggcttctgccgcggggaggctgatgacctgaagtctgagggcccctacttcagcctgaccagcacagagcagagcgtgaagaacctgtaccagctgagcaacctgggcatccctggggtgtgggccttccacatcggcagcaccagccccctggacaacgtgcggcctgctgctgtgggggacctgtctgctgcccacagctctgtgcccctgggccgctccttcagccacgccacagccctggagagtgactacaatgaagacaacctggactactatgatgtgaatgaggaggaggccgagtacctgcctggagagcctgaggaggccctgaatggccacagcagcattgatgtgtccttccagagcaaggtggacaccaagcccctggaggagagcagcaccctggacccccacaccaaggagggcaccagcctgggggaggtgggcggccctgacctgaagggccaggtggagccctgggatgagcgggagaccaggagccctgcccctcctgaggtggaccgggacagcctggcccccagctgggagaccccaccaccctacccagaaaatggcagcatccagccctacccagatggcggccctgtgcccagcgagatggatgtgcccccagcccaccctgaggaggagatcgtgctgcggagctacccagccagcggccacaccacccccctgagccggggcacctatgaggtgggcctggaggacaacatcggcagcaacacagaggtgttcacctacaatgctgccaacaaggagacctgtgagcacaaccaccggcagtgcagcagacatgccttctgcacagattatgccaccggcttctgctgccactgccagagcaagttctatggaaatggcaagcactgcctgcctgagggcgccccccaccgggtgaatggcaaggtgtctggccacctgcacgtgggccacacccctgtgcacttcacagatgtggacctgcacgcctacatcgtgggcaatgatggccgggcctacacagccatcagccacatcccccagcctgctgcccaggccctgctgcccctgacccccatcggcggcctgtttggctggctgtttgccctggagaagccaggctctgaaaatggcttcagcctggccggggccgccttcacccatgacatggaggtgaccttctacccaggagaggagaccgtgcgcatcacccagacagctgagggcctggaccctgagaactacctgagcatcaagaccaacatccagggccaggtgccctacgtgtctgccaacttcaccgcccacatcagcccctacaaggagctgtaccactacagcgacagcacagtgaccagcaccagcagccgggactacagcctgacctttggagccatcaaccagacctggagctaccgcatccaccagaacatcacctaccaggtgtgcagacatgcccccaggcaccccagcttccccaccacccagcagctgaatgtggacagagtgtttgccctgtacaatgatgaggagcgggtgctgcgctttgctgtgaccaaccagatcggccctgtgaaggaggacagcgaccccaccccaggcaacccctgctatgatggcagccacatgtgtgacaccacagcccgctgccaccctggcaccggggtggactacacctgtgaatgtgccagcggctaccagggagatggaagaaactgtgtggatgaaaatgaatgtgccaccggcttccaccgctgtggccccaacagcgtgtgcatcaacctgcccggcagctaccgctgtgagtgccgcagcggctatgaatttgctgatgacagacacacctgcatcctgatcaccccaccagccaacccctgtgaagatggcagccacacctgtgccccagctggccaggcccgctgtgtgcaccacggcggcagcaccttcagctgtgcctgcctgcccggctatgctggagatggccaccagtgcacagatgtggatgaatgttctgagaaccgctgccaccctgctgccacctgctacaacaccccaggcagcttcagctgccgctgccagcccggctactatggagatggcttccagtgcatcccagacagcaccagcagcctgaccccctgtgagcagcagcagagacatgcccaggcccagtatgcctacccaggggcccgcttccacatcccccagtgtgatgagcagggcaacttcctgcccctgcagtgccacggcagcacaggcttctgctggtgtgtggaccctgatggccacgaggtgcccggcacccagaccccacctggcagcaccccaccccactgcggccccagccctgagcccacccagaggcctcccaccatctgtgagcgctggagggagaacctgctggagcactacggcggcaccccaagagatgaccagtatgtgccccagtgtgatgacctgggccacttcatccccctgcagtgccacggcaagagtgacttctgctggtgtgtggacaaggatggccgggaggtgcagggcaccaggagccagcccggcaccaccccagcctgcatccccaccgtggccccacccatggtgcggcccacccccaggccagatgtgaccccaccttctgtgggcaccttcctgctgtacacccagggccagcagatcggctacctgcccctgaatggcacccggctgcagaaggatgctgccaagaccctgctgagcctgcacgtgaagtggatcagccctgtgggcggccgggccgcctggctgagccagtgggagcccccccaccggccctgctgcagcgaggtggactggtgccgggaggtgctggagggcttctag

SEQ ID NO: 172161 - DNA, 4128 bp, Artificial Sequence
  derived and/or modified sequence
atggagggcgaccgggtggccggccggcccgtgctgagcagcctgccagtgctactgttgttgcctctgctgatgctgcgtgccgctgcacttcaccccgatgagctgtttccacatggggagtcatggggggatcagctccttcaggagggggacgatgagagctcagctgtggtcaagctggcgaatcctctccatttctatgaggcaagattctctaacctctacgtaggaacaaacggtattatctctacacaggatttcccaagagagacacagtatgtcgattatgacttccctacagactttcccgcaattgcccccttcctggccgatatcgacacctcccacggccgtgggcgggttttgtaccgcgaggatacctctccagcggtgctggggttggccgccaggtacgtccgagcagggtttccaaggtctgcacgctttacaccaacccatgcattcctggcaacctgggagcaggtaggagcatatgaggaggtcaaaagaggcgccctacctagtggggaactcaacacttttcaggctgttttggcgtcggacgggtctgacagctatgcgctgtttttatacccggctaatggcctgcaatttctagggacccggccgaaggagagctataacgttcagctccagctcccagcacgcgtaggattctgcagaggagaagctgacgacctaaagagtgaagggccttacttttcactaacaagcactgaacagtcagtgaagaacttgtaccagctgtctaatctgggaatccccggtgtctgggcgttccacatcggttccactagcccactagacaacgtccgacctgctgcagtgggagacctctcagctgcccatagctctgtcccccttggccgcagcttctcacacgccacagccctggaaagcgactacaatgaagacaatcttgattattatgatgtgaatgaagaagaagctgaatatctccctggcgagccagaggaggctttgaacgggcattcctctattgatgtgagctttcaaagtaaggtggacacaaagcccttggaagagtccagcactttggatccacatactaaagagggcaccagtctgggcgaggtggggggaccagatcttaagggccaggtggagccctgggacgaaagggaaacacggtctcccgcaccccctgaagtggacagggacagtctggcgccaagttgggaaacgccacctccctatcccgaaaatggatcaattcagccttaccccgacggggggccagtcccaagcgagatggatgtgcccccggcccacccggaagaagagattgtcctgagaagctatccagcctcaggtcatactaccccgctgagccgggggacctacgaagtcggcctggaggataatattggttcaaacacagaggtgttcacctacaacgctgctaataaggaaacctgcgagcataaccatcgtcagtgttctaggcatgctttttgcacagattatgccacaggcttttgttgtcactgccagagcaaattctacggaaatggaaaacattgcctgcctgagggggctcctcatcgtgttaacggcaaggttagtggtcacttgcatgtgggccacactccggtccattttacggacgtggacctgcacgcctacatcgtcggtaacgatggtcgggcttacaccgccatttctcacatcccccagccagcggctcaggcgttactccctctcaccccaattggcggactgttcgggtggctctttgctttggaaaagccagggagtgagaacgggttcagccttgcaggagccgcctttactcatgatatggaagtcacattctacccaggtgaggagacagttcgaattacacaaacagccgaaggtctcgacccagaaaattacctgagcatcaagacaaatatacagggccaggtcccgtacgttagcgcgaattttactgcacacatttctccatataaggaactgtaccactacagtgatagcactgtgacatccacgtcttcccgggattactctttgacattcggagccatcaaccagacgtggtcttacaggattcatcagaacattacttaccaggtgtgcagacacgctccaagacacccgagtttccctacaacccaacagcttaatgtggacagagttttcgccctttataatgatgaggagcgggtgttacgctttgcagtgaccaatcagattgggcccgtaaaggaagattctgacccaacacctggaaacccatgctacgatggatctcacatgtgtgacaccaccgctaggtgccacccagggactggagttgactatacttgtgaatgcgcctcaggttaccagggagacggcaggaactgcgtcgacgagaatgaatgtgctaccgggtttcaccgatgcggtcccaattctgtttgtataaaccttcccggcagttacagatgcgagtgtagatccggttatgagttcgccgacgaccgccacacatgcatcctgatcaccccacccgcgaatccctgtgaagacggatctcatacttgtgctccagctgggcaggcgagatgcgtccatcatggtgggagtactttctcttgcgcatgcctcccaggctacgcgggagatggtcaccaatgcacagacgtggacgaatgcagcgagaataggtgtcacccggccgcgacttgttacaatactcccggtagcttctcgtgtcgctgccagcctggttattatggtgatggctttcaatgcatcccagactcaacctcatccttgaccccctgcgagcagcagcagagacatgctcaggcacagtacgcctatccaggtgctcggtttcacatcccacaatgcgatgagcagggcaattttctacccttgcagtgtcatggctctactggattctgctggtgtgttgacccagacggacacgaggtgcctggaacccagacaccaccagggagcacacccccacattgcggaccatcacctgaaccaacgcaacggcccccaactatttgcgagagatggcgggaaaacttgctggagcactacggggggacaccccgagatgaccagtatgtcccccagtgcgacgacctggggcattttatcccactgcaatgtcacggaaagtccgacttttgctggtgtgtcgataaggacggtcgcgaggtgcaaggaacacggagtcagcccggaacgacacctgcttgtatcccaacagttgccccaccaatggtgcgccctaccccgcgccccgacgtgacacccccatctgtagggacctttctgttgtacactcaggggcagcagatcggttatctgccactaaatggcaccaggttacagaaagacgctgctaagaccctactctcacttcacgggagtattatcgttggcatagactatgattgtcgagaaaggatggtctattggactgatgtcgcggggcgcacaatcagcagagcaggcctggaactgggcgctgagcccgaaactatcgttaattcaggccttatctcgccggaggggctggcaatcgatcacatccgacgtactatgtactggaccgactcagtgttggacaagatcgagtctgccctgctggatggatccgaacggaaagttctgttttacactgacctggtaaaccccagagccattgccgtggaccccatccggggtaacttatattggaccgactggaaccgggaggccccaaaaatcgagacttcaagtctcgatggtgaaaatcgtagaatcttaatcaacacagatatcggtttgcctaatggactgacgttcgaccctttcagcaagttgctgtgttgggcagatgctggcactaagaagttagagtgcactttgccagatgggacaggcagacgggtgattcagaacaacctgaaatatccgttttctatagtaagctatgctgaccatttttaccatacagattggagaagggacggagtcgtttctgtaaacaaacacagtggccagtttacagacgagtacttgcctgaacagcgcagtcacttgtatgggatcacagcggtgtatccctactgccccacagggagaaagtag

SEQ ID NO: 172162 - DNA, 2910 bp, Artificial Sequence
  derived and/or modified sequence
atggagggcgaccgggtggccggccggcccgtgctgagcagcctgccagtcttgttgctactgccgctgttgatgctacgggcggctgctctgcacccagatgagctgtttcctcacggcgagagctggggtgatcagctcctgcaggaaggtgatgatgagtcatccgccgttgtgaaactcgccaaccctttgcatttctatgaggcccggtttagcaacctctacgttggcaccaacggcattatttcgacacaggacttcccccgggaaacccaatacgtcgactacgattttcctaccgactttccagcaatcgctccttttctcgccgacattgatactagtcatggaagaggcagggtgctatatcgcgtaaatggaaaagtctcaggacacttgcacgtcgggcatacccctgtccacttcactgatgtggacctgcatgcatatatcgttggcaatgacggcagggcctacactgcgatctcacatatcccccagccggcagctcaggcgttgctccccttgacccccatcggtggcctgtttgggtggctgttcgccctcgagaaacccggctcggagaacggctttagcttggcgggcgctgctttcacacacgacatggaggtaaccttttacccgggagaggagactgtgcgtatcacccagacagctgaggggctagacccagagaactacctgtccatcaaaaccaacatccagggccaagtgccttacgtctcagctaacttcaccgctcatatatctccttataaggagctgtaccactacagcgattccaccgtgacatctactagttcccgagactactccctgacatttggcgcaatcaatcagacatggtcttataggatccatcagaacatcacataccaagtatgtaggcacgctccacgtcatccatcttttcccaccacccagcaactcaacgtcgatcgggtcttcgctttgtacaacgatgaggaacgtgtgctgcgcttcgccgtgactaatcaaataggccctgtgaaagaggattctgatccaactcctggtaacccctgctatgatggaagccacatgtgtgataccaccgccagatgtcaccccggaactggggtggattacacctgcgaatgcgcatccggttaccaaggcgacgggcggaactgtgttgacgagaacgaatgcgctacaggattccaccggtgcgggccaaactccgtgtgcatcaacctgcctggtagctaccggtgcgagtgcagaagcggttatgagttcgcagacgaccgacatacatgcattctaatcacgcctccagcaaacccctgtgaagatggcagtcatacttgcgcacccgcaggccaggcgcgttgtgtgcaccacggaggaagtacgtttagttgcgcctgcctgccagggtatgccggtgatggtcatcagtgcacagatgttgacgagtgcagcgaaaataggtgccaccctgccgcaacttgctacaatacgcctgggagctttagctgtaggtgtcaacctgggtattatggagatggttttcagtgcattccagacagtactagttccctcacaccctgcgagcagcagcaacgccatgcccaggcacagtacgcataccctggagctagatttcacattccacagtgcgatgagcaagggaactttcttcccttacagtgccatgggagtacagggttctgttggtgtgtagatcctgatggtcatgaagtcccaggcacacagactcccccaggaagtacacccccacactgtgggccaagcccagaacctacccagagaccccccaccatctgcgagcgatggagagagaacctgttggagcattacggaggcactccccgcgacgaccagtatgtgccccaatgtgatgacctcggtcacttcatccccttgcagtgtcacggcaagagtgacttctgctggtgtgtagataaagacggccgggaagtgcaagggactaggtcccagccagggacaacaccagcctgcatccccaccgtggccccacctatggtgcgacctacgcccagacctgatgtgaccccgccttccgtgggcacattccttctgtatactcaggggcagcagattggctacctgcctctcaacggcaccaggctccaaaaggatgctgccaaaacgctcttatcgctccatgggtcaattattgtgggaattgactacgactgccgggagaggatggtgtactggactgacgtggcaggcagaaccatatctagagctggactggagcttggagccgaaccagaaactatcgtgaactcaggcctcataagcccggaggggttggccatcgaccacatccgaaggacgatgtattggaccgactcggtgctcgacaaaatcgagagtgcactgttggacgggtccgagagaaaagtacttttttacaccgatttagtgaacccacgcgccatcgcagtagatccaatcaggggtaatctgtattggaccgattggaaccgagaggctcccaagatcgagacatccagcctggatggagagaaccgcaggatcctgatcaataccgatatcgggctgccaaacggactgacctttgatcctttctcaaaactgctctgctgggccgacgctggaaccaagaaactggagtgtaccctcccagatggaaccggcagaagggtaatacagaacaacctcaaataccccttcagtattgttagctacgcagaccacttttaccacactgattggcgacgcgacggcgttgtgtctgtgaataagcactcggggcagttcaccgatgagtatcttcccgagcagcgcagccatctctatgggatcactgctgtatacccctactgtccgaccggaagaaagtag

SEQ ID NO: 172163 - DNA, 3543 bp, Artificial Sequence
  derived and/or modified sequence
accccccagaccgagcggatcacccacagcagcatcagctggagcttcctgcttagattttccaggggcaagctgctgatgctgcgtgctgctgctctccacccagacgagctctttccacacggggaaagttggggagatcagctccttcaggagggcgacgacgagtcttctgctgtcgtgaagctggctaatcctttgcacttctacgaagcccggttctccaatctgtacgtcggcacgaacggtatcatctctacacaggacttccctcgggagacacagtacgtcgactatgacttccccaccgacttcccagccatcgctccatttcttgctgacatcgatacctcccacggcagaggccgcgtcctttatagagaggacacctctccagccgtgctagggttggccgcccgttatgtccgcgctgggttcccaagaagcgcaagatttaccccaactcatgctttcctcgccacctgggaacaggtgggcgcatacgaggaggtgaaacggggcgcgctgcccagtggcgaactgaacacgttccaagctgttttggcctccgacggttctgactcttatgcgctctttctctacccagcaaatggactgcagtttttaggcacacggccgaaagagtcatataatgtgcaactgcagttacctgcccgggtgggattttgtagaggtgaggcagacgatctgaaatcagagggcccatactttagcctgacctcgaccgagcagagcgttaagaatctgtatcagttgtccaatctgggaataccaggagtgtgggccttccatatcggttcgacctctcctttagataacgtgcggcccgccgctgtgggcgatctgtctgccgctcattcctcggtgccactggggcgctcattcagccatgccacggctctcgagtcagactataacgaggacaacttggactattatgacgtgaatgaggaagaggccgagtacctgcccggcgagcccgaggaagccctgaatggacatagttcaatcgacgtctcattccagtcaaaagttgacaccaagcccctggaagaaagtagcactctggacccccataccaaggagggaactagtctcggcgaggtgggagggccagacctgaaaggccaggtggagccttgggacgagcgagagacacgctcacctgcaccccctgaggtagacagggactcgctggccccctcttgggagacgccccctccttatcctgaaaatgggagcattcagccttaccccgatggcggaccggtgccttccgagatggatgtgccaccagcacatcctgaggaagaaattgtgctgagaagctatcccgccagtggtcatacaacgccactttccagagggacctacgaagtggggctcgaagacaatattggcagcaacacagaagtgtttacatacaacgcagcaaataaggaaacctgtgagcacaatcaccggcagtgctctcgccacgcattctgtacagattatgctacagggttctgctgtcactgccagtctaagttctatgggaacgggaagcactgcctccctgaaggcgcgccccacagagtcaatggcaaagtgtcgggacacctgcatgtcggccacaccccggttcactttacagatgtggacctccacgcatatatagtcggaaatgatgggagagcatataccgccatctctcacattccccaacccgcagctcaggctcttcttccccttactccaattggtggactgtttggatggctcttcgccttggaaaaacctggcagtgagaacgggttctcactcgctggggctgcctttacgcacgatatggaggttaccttctacccaggcgaagaaactgttcggatcacacagaccgctgagggtctggaccctgagaattacctctccattaagaccaacatacagggccaggtgccttatgtgtcggcaaatttcaccgcccacatttcaccctataaagagttgtaccactattcagattctacagtcacatctacatcttcaagggactacagcctcacattcggcgccatcaatcagacctggagctacaggatccaccagaatatcacctaccaggtgtgtcgccacgcaccccggcacccatctttcccaacaacgcagcagctcaacgtcgaccgagtctttgcactgtacaatgatgaagaaagggtgttgcggttcgccgtcacaaaccagattggccctgttaaggaggacagtgacccaacccccggaaatccctgctacgacggaagccacatgtgtgatactacggctaggtgccaccctgggacaggggtggactacacctgcgagtgtgcctcaggttaccagggtgacggcaggaattgtgttgatgagaacgagtgcgctactggttttcatcgctgcgggcctaactcggtctgtataaacttacccggatcttaccgctgcgagtgccggagcggatatgaattcgccgacgatcggcacacctgtatcctcatcacaccacccgctaatccttgcgaagatggaagtcacacttgcgcgcctgccggacaagcccggtgcgtacaccatggcgggtctacattctcttgtgcctgtttgcctggatatgccggggatgggcatcagtgcaccgatgtcgacgagtgtagtgaaaacagatgtcatccggcagcaacttgctacaatactcctgggagcttcagttgtcgatgtcagcctggctactacggggatggattccagtgcatccccgacagtacctcgagtctgactccctgcgaacagcaacagagacatgcgcaggcccagtacgcttacccaggtgccagatttcatatccctcagtgtgacgagcagggtaactttttgccattgcagtgtcacggatctaccggtttttgttggtgtgtggaccctgacggtcacgaagtccctggcacccagacaccgcccgggagtacccccccacactgcggaccctctccagagcccacacaacgcccccctacgatatgtgaacgatggcgagagaacctgcttgaacattatgggggtacacctcgggatgatcagtatgtgccccagtgcgacgacctgggacactttattccgctccaatgtcatgggaagtccgatttttgttggtgtgtggacaaggacgggcgagaggtgcagggaacacggagccagcccggcactacccccgcttgtatccccacggttgcccctcctatggtcagaccaactcctcggcccgacgtgactccgccctctgtaggtaccttcctgttatacacccaggggcagcagatcggatacttgccactcaatggcacgcggctccaaaaggacgcagcaaaaactctgctgagcctgcacgtgaagtggatctcacctgtcggcggccgagcggcgtggctttcacagtgggaacccccgcatcgtccctgttgttctgaggtggactggtgccgcgaggtgctagagggattttag

SEQ ID NO: 172164 - DNA, 4811 bp, Artificial Sequence
  derived and/or modified sequence
atggagggggaccgggtggccgggcggccggtgctgtcgtcgttaccagtgctactgctgctgccgttgctaatgttgcgggccgcggcgctgcacccagacgagctcttcccacacggggagtcgtggggggaccagctcctgcaggaaggcgacgacgaaagctcagccgtggtgaagctggcgaatcccctgcacttctacgaagcccgattcagcaacctctacgtgggcaccaacggcatcatctccactcaggacttccccagggaaacgcagtatgtggactatgatttccccaccgacttcccggccatcgccccttttctggcggacatcgacacgagccacggcagaggccgagtcctgtaccgagaggacacctcccccgcagtgctgggcctggccgcccgctatgtgcgcgctggcttcccgcgctctgcgcgctttacccccacccacgccttcctggccacctgggagcaggtaggcgcttacgaggaggtcaagcgcggggcgctgccctcgggagagctgaacactttccaggcagttttggcatctgatgggtctgatagctacgccctctttctttatcctgccaacggcctgcagttccttggaacccgccccaaagagtcttacaatgtccagcttcagcttccagctcgggtgggcttctgccgaggggaggctgatgatctgaagtcagaaggaccatatttcagcttgactagcactgaacagtctgtgaaaaatctctatcaactaagcaacctggggatccctggagtgtgggctttccatatcggcagcacttccccgttggacaatgtcaggccagctgcagttggagacctttccgctgcccactcttctgttcccctgggacgttccttcagccatgctacagccctggaaagtgactataatgaggacaatttggattactatgatgtgaatgaggaggaagctgaataccttccgggtgaaccagaggaggcattgaatggccacagcagcattgatgtttccttccaatccaaagtggatacaaagcctttagaggaatcttccaccttggatcctcacaccaaagaaggaacatctctgggagaggtagggggcccagatttaaaaggccaagttgagccctgggatgagagagagaccagaagcccagctccaccagaggtagacagagattcactggctccttcctgggaaaccccaccaccgtaccccgaaaacggaagcatccagccctacccagatggagggccagtgccttcggaaatggatgttcccccagctcatcctgaagaagaaattgttcttcgaagttaccctgcttcaggtcacactacacccttaagtcgagggacgtatgaggtgggactggaagacaacataggttccaacaccgaggtcttcacgtataatgctgccaacaaggaaacctgtgaacacaaccacagacaatgctcccggcatgccttctgcacggactatgccactggcttctgctgccactgccaatccaagttttatggaaatgggaagcactgtctgcctgaaggggcacctcaccgagtgaatgggaaagtgagtggccacctccacgtgggccatacacccgtgcacttcactgatgtggacctgcatgcgtatatcgtgggcaatgatggcagagcctacacggccatcagccacatcccacagccagcagcccaggccctcctccccctcacaccaattggaggcctgtttggctggctctttgctttagaaaaacctggctctgagaacggcttcagcctcgcaggtgctgcctttacccatgacatggaagttacattctacccgggagaggagacggttcgtatcactcaaactgctgagggacttgacccagagaactacctgagcattaagaccaacattcaaggccaggtgccttacgtctcagcaaatttcacagcccacatctctccctacaaggagctgtaccactactccgactccactgtgacctctacaagttccagagactactctctgacttttggtgcaatcaaccaaacatggtcctaccgcatccaccagaacatcacttaccaggtgtgcaggcacgcccccagacacccgtccttccccaccacccagcagctgaacgtggaccgggtctttgccttgtataatgacgaagaaagagtgcttagatttgctgtgaccaatcaaattggcccggtcaaagaggattcagaccccactccggggaatccttgctatgatgggagccacatgtgtgacacaacagcacggtgccatccagggacaggtgtagattacacctgtgagtgcgcatctgggtaccagggagatggacggaactgtgtggatgaaaatgaatgtgcaactggctttcatcgctgtggccccaactctgtatgtatcaacttgcctggaagctacaggtgtgagtgccggagtggttatgagtttgcagatgaccggcatacttgcatcttgatcaccccacctgccaacccctgtgaggatggcagtcatacctgtgctcctgctgggcaggcccggtgtgttcaccatggaggcagcacgttcagctgtgcctgcctgcctggttatgccggcgatgggcaccagtgcactgatgtagatgaatgctcagaaaacagatgtcaccctgcagctacctgctacaatactcctggttccttctcctgccgttgtcaacccggatattatggggatggatttcagtgcatacctgactccacctcaagcctgacaccctgtgaacaacagcagcgccatgcccaggcccagtatgcctaccctggggcccggttccacatcccccaatgcgacgagcagggcaacttcctgcccctacagtgtcatggcagcactggtttctgctggtgcgtggaccctgatggtcatgaagttcctggtacccagactccacctggctccaccccgcctcactgtggaccatcaccagagcccacccagaggcccccgaccatctgtgagcgctggagggaaaacctgctggagcactacggtggcaccccccgggatgaccagtacgtgccccagtgcgatgacctgggccacttcatccccctgcagtgccacggaaagagcgacttctgctggtgtgtggacaaagatggcagagaggtgcagggcacccgctcccagccaggcaccacccctgcgtgtatacccaccgtcgctccacccatggtccggcccacgccccggccagatgtgacccctccatctgtgggcaccttcctgctctatactcagggccagcagattggctacttacccctcaatggcaccaggcttcagaaggatgcagctaagaccctgctgtctctgcatggctccataatcgtgggaattgattacgactgccgggagaggatggtgtactggacagatgttgctggacggacaatcagccgtgctggtctggaactgggagcagagcctgagacgatcgtgaattcaggtctgataagccctgaaggacttgccatagaccacatccgcagaacaatgtactggacggacagtgtcctggataagatagagagcgccctgctggatggctctgagcgcaaggtcctcttctacacagatctggtgaatccccgtgccatcgctgtggatccaatccgaggcaacttgtactggacagactggaatagagaagctcctaaaattgaaacgtcatctttagatggagaaaacagaagaattctgatcaatacagacattggattgcccaatggcttaacctttgaccctttctctaaactgctctgctgggcagatgcaggaaccaaaaaactggagtgtacactacctgatggaactggacggcgtgtcattcaaaacaacctcaagtaccccttcagcatcgtaagctatgcagatcacttctaccacacagactggaggagggatggtgttgtatcagtaaataaacatagtggccagtttactgatgagtatctcccagaacaacgatctcacctctacgggataactgcagtctacccctactgcccaacaggaagaaagtaagtacagtaatgtaaaggaagacttggagtttacaatcagaacctggaccctaaagaacagtgactgcaaaggcaaagaaagtaaaaaaggaattggccattagacgttcctgagcatccaagatgaacattttgtagtgcaaaaagacttttgtgaaaagctgatacctcaatctttactactgtatttttaaaaatgaaggttgttattgcaagtttaaaaaggtaacagaattttaactgttgcttattaaagcaacttcttgtaaacatttatcattaatatttaaaagatcaaattcattcaactaagaattagagtttaagactctaaacctgatttttgccatggattccttctggccaagaaattaaagcacatgtgatcaatataacaatataatcctaaaccttgacagttggagaagccaatgcagaactgatgggaaaggaccaattatttatagtttcccaacaaaagttctaagattttttacctctgcatcagtgcatttctatttatatcaaaaggtgctaaaatgattcaatttgcattttctgatcctgtagtgcctctatagaagtacccacagaaagtaaagtatcacatttataaataccaaagatgtaacaattttaaaattttctagattactccaataaagtgttttaagttttcctatg

SEQ ID NO: 172165 - DNA, 3647 bp, Artificial Sequence
  derived and/or modified sequence
tggaggccggggcgggacgcgttgtgcagcgggtaagcgcacggccgagcgagcatggagggggaccgggtggccgggcggccggtgctgtcgtcgttaccagtgctactgctgctgccgttgctaatgttgcgggccgcggcgctgcacccagacgagctcttcccacacggggagtcgtggggggaccagctcctgcaggaaggcgacgacgaaagctcagccgtggtgaagctggcgaatcccctgcacttctacgaagcccgattcagcaacctctacgtgggcaccaacggcatcatctccactcaggacttccccagggaaacgcagtatgtggactatgatttccccaccgacttcccggccatcgccccttttctggcggacatcgacacgagccacggcagaggccgagtcctgtaccgagtgaatgggaaagtgagtggccacctccacgtgggccatacacccgtgcacttcactgatgtggacctgcatgcgtatatcgtgggcaatgatggcagagcctacacggccatcagccacatcccacagccagcagcccaggccctcctccccctcacaccaattggaggcctgtttggctggctctttgctttagaaaaacctggctctgagaacggcttcagcctcgcaggtgctgcctttacccatgacatggaagttacattctacccgggagaggagacggttcgtatcactcaaactgctgagggacttgacccagagaactacctgagcattaagaccaacattcaaggccaggtgccttacgtctcagcaaatttcacagcccacatctctccctacaaggagctgtaccactactccgactccactgtgacctctacaagttccagagactactctctgacttttggtgcaatcaaccaaacatggtcctaccgcatccaccagaacatcacttaccaggtgtgcaggcacgcccccagacacccgtccttccccaccacccagcagctgaacgtggaccgggtctttgccttgtataatgacgaagaaagagtgcttagatttgctgtgaccaatcaaattggcccggtcaaagaggattcagaccccactccggggaatccttgctatgatgggagccacatgtgtgacacaacagcacggtgccatccagggacaggtgtagattacacctgtgagtgcgcatctgggtaccagggagatggacggaactgtgtggatgaaaatgaatgtgcaactggctttcatcgctgtggccccaactctgtatgtatcaacttgcctggaagctacaggtgtgagtgccggagtggttatgagtttgcagatgaccggcatacttgcatcttgatcaccccacctgccaacccctgtgaggatggcagtcatacctgtgctcctgctgggcaggcccggtgtgttcaccatggaggcagcacgttcagctgtgcctgcctgcctggttatgccggcgatgggcaccagtgcactgatgtagatgaatgctcagaaaacagatgtcaccctgcagctacctgctacaatactcctggttccttctcctgccgttgtcaacccggatattatggggatggatttcagtgcatacctgactccacctcaagcctgacaccctgtgaacaacagcagcgccatgcccaggcccagtatgcctaccctggggcccggttccacatcccccaatgcgacgagcagggcaacttcctgcccctacagtgtcatggcagcactggtttctgctggtgcgtggaccctgatggtcatgaagttcctggtacccagactccacctggctccaccccgcctcactgtggaccatcaccagagcccacccagaggcccccgaccatctgtgagcgctggagggaaaacctgctggagcactacggtggcaccccccgggatgaccagtacgtgccccagtgcgatgacctgggccacttcatccccctgcagtgccacggaaagagcgacttctgctggtgtgtggacaaagatggcagagaggtgcagggcacccgctcccagccaggcaccacccctgcgtgtatacccaccgtcgctccacccatggtccggcccacgccccggccagatgtgacccctccatctgtgggcaccttcctgctctatactcagggccagcagattggctacttacccctcaatggcaccaggcttcagaaggatgcagctaagaccctgctgtctctgcatggctccataatcgtgggaattgattacgactgccgggagaggatggtgtactggacagatgttgctggacggacaatcagccgtgctggtctggaactgggagcagagcctgagacgatcgtgaattcaggtctgataagccctgaaggacttgccatagaccacatccgcagaacaatgtactggacggacagtgtcctggataagatagagagcgccctgctggatggctctgagcgcaaggtcctcttctacacagatctggtgaatccccgtgccatcgctgtggatccaatccgaggcaacttgtactggacagactggaatagagaagctcctaaaattgaaacgtcatctttagatggagaaaacagaagaattctgatcaatacagacattggattgcccaatggcttaacctttgaccctttctctaaactgctctgctgggcagatgcaggaaccaaaaaactggagtgtacactacctgatggaactggacggcgtgtcattcaaaacaacctcaagtaccccttcagcatcgtaagctatgcagatcacttctaccacacagactggaggagggatggtgttgtatcagtaaataaacatagtggccagtttactgatgagtatctcccagaacaacgatctcacctctacgggataactgcagtctacccctactgcccaacaggaagaaagtaagtacagtaatgtaaaggaagacttggagtttacaatcagaacctggaccctaaagaacagtgactgcaaaggcaaagaaagtaaaaaaggaattggccattagacgttcctgagcatccaagatgaacattttgtagtgcaaaaagacttttgtgaaaagctgatacctcaatctttactactgtatttttaaaaatgaaggttgttattgcaagtttaaaaaggtaacagaattttaactgttgcttattaaagcaacttcttgtaaacatttatcattaatatttaaaagatcaaattcattcaactaagaattagagtttaagactctaaacctgatttttgccatggattccttctggccaagaaattaaagcacatgtgatcaatataacaatataatcctaaaccttgacagttggagaagccaatgcagaactgatgggaaaggaccaattatttatagtttcccaacaaaagttctaagattttttacctctgcatcagtgcatttctatttatatcaaaaggtgctaaaatgattcaatttgcattttctgatcctgtagtgcctctatagaagtacccacagaaagtaaagtatcacatttataaataccaaagatgtaacaattttaaaattttctagattactccaataaagtgttttaagttttcctatg

SEQ ID NO: 172166 - DNA, 3543 bp, Artificial Sequence
  derived and/or modified sequence
actccccaaacggagcggatcacacacagtagtatttcatggtctttcctgctgcggttttcccgggggaagttgctaatgttgcgggccgcggcgctgcacccagacgagctcttcccacacggggagtcgtggggggaccagctcctgcaggaaggcgacgacgaaagctcagccgtggtgaagctggcgaatcccctgcacttctacgaagcccgattcagcaacctctacgtgggcaccaacggcatcatctccactcaggacttccccagggaaacgcagtatgtggactatgatttccccaccgacttcccggccatcgccccttttctggcggacatcgacacgagccacggcagaggccgagtcctgtaccgagaggacacctcccccgcagtgctgggcctggccgcccgctatgtgcgcgctggcttcccgcgctctgcgcgctttacccccacccacgccttcctggccacctgggagcaggtaggcgcttacgaggaggtcaagcgcggggcgctgccctcgggagagctgaacactttccaggcagttttggcatctgatgggtctgatagctacgccctctttctttatcctgccaacggcctgcagttccttggaacccgccccaaagagtcttacaatgtccagcttcagcttccagctcgggtgggcttctgccgaggggaggctgatgatctgaagtcagaaggaccatatttcagcttgactagcactgaacagtctgtgaaaaatctctatcaactaagcaacctggggatccctggagtgtgggctttccatatcggcagcacttccccgttggacaatgtcaggccagctgcagttggagacctttccgctgcccactcttctgttcccctgggacgttccttcagccatgctacagccctggaaagtgactataatgaggacaatttggattactatgatgtgaatgaggaggaagctgaataccttccgggtgaaccagaggaggcattgaatggccacagcagcattgatgtttccttccaatccaaagtggatacaaagcctttagaggaatcttccaccttggatcctcacaccaaagaaggaacatctctgggagaggtagggggcccagatttaaaaggccaagttgagccctgggatgagagagagaccagaagcccagctccaccagaggtagacagagattcactggctccttcctgggaaaccccaccaccgtaccccgaaaacggaagcatccagccctacccagatggagggccagtgccttcggaaatggatgttcccccagctcatcctgaagaagaaattgttcttcgaagttaccctgcttcaggtcacactacacccttaagtcgagggacgtatgaggtgggactggaagacaacataggttccaacaccgaggtcttcacgtataatgctgccaacaaggaaacctgtgaacacaaccacagacaatgctcccggcatgccttctgcacggactatgccactggcttctgctgccactgccaatccaagttttatggaaatgggaagcactgtctgcctgaaggggcacctcaccgagtgaatgggaaagtgagtggccacctccacgtgggccatacacccgtgcacttcactgatgtggacctgcatgcgtatatcgtgggcaatgatggcagagcctacacggccatcagccacatcccacagccagcagcccaggccctcctccccctcacaccaattggaggcctgtttggctggctctttgctttagaaaaacctggctctgagaacggcttcagcctcgcaggtgctgcctttacccatgacatggaagttacattctacccgggagaggagacggttcgtatcactcaaactgctgagggacttgacccagagaactacctgagcattaagaccaacattcaaggccaggtgccttacgtctcagcaaatttcacagcccacatctctccctacaaggagctgtaccactactccgactccactgtgacctctacaagttccagagactactctctgacttttggtgcaatcaaccaaacatggtcctaccgcatccaccagaacatcacttaccaggtgtgcaggcacgcccccagacacccgtccttccccaccacccagcagctgaacgtggaccgggtctttgccttgtataatgacgaagaaagagtgcttagatttgctgtgaccaatcaaattggcccggtcaaagaggattcagaccccactccggggaatccttgctatgatgggagccacatgtgtgacacaacagcacggtgccatccagggacaggtgtagattacacctgtgagtgcgcatctgggtaccagggagatggacggaactgtgtggatgaaaatgaatgtgcaactggctttcatcgctgtggccccaactctgtatgtatcaacttgcctggaagctacaggtgtgagtgccggagtggttatgagtttgcagatgaccggcatacttgcatcttgatcaccccacctgccaacccctgtgaggatggcagtcatacctgtgctcctgctgggcaggcccggtgtgttcaccatggaggcagcacgttcagctgtgcctgcctgcctggttatgccggcgatgggcaccagtgcactgatgtagatgaatgctcagaaaacagatgtcaccctgcagctacctgctacaatactcctggttccttctcctgccgttgtcaacccggatattatggggatggatttcagtgcatacctgactccacctcaagcctgacaccctgtgaacaacagcagcgccatgcccaggcccagtatgcctaccctggggcccggttccacatcccccaatgcgacgagcagggcaacttcctgcccctacagtgtcatggcagcactggtttctgctggtgcgtggaccctgatggtcatgaagttcctggtacccagactccacctggctccaccccgcctcactgtggaccatcaccagagcccacccagaggcccccgaccatctgtgagcgctggagggaaaacctgctggagcactacggtggcaccccccgggatgaccagtacgtgccccagtgcgatgacctgggccacttcatccccctgcagtgccacggaaagagcgacttctgctggtgtgtggacaaagatggcagagaggtgcagggcacccgctcccagccaggcaccacccctgcgtgtatacccaccgtcgctccacccatggtccggcccacgccccggccagatgtgacccctccatctgtgggcaccttcctgctctatactcagggccagcagattggctacttacccctcaatggcaccaggcttcagaaggatgcagctaagaccctgctgtctctgcatgtaaagtggatttctcctgtagggggcagggctgcgtggctttcccagtgggagccacctcacaggccctgttgcagtgaggtggactggtgcagggaagtcctggagggtttctga

SEQ ID NO: 172167 - DNA, 4128 bp, Artificial Sequence
  derived and/or modified sequence
atggagggcgatagggtggctgggaggcctgtgttgtcttcactgcccgtcctgctcctattacccttgctgatgctgagagctgcagcccttcaccctgatgaactgttcccccacggcgaaagttggggagatcagttgttgcaagaaggggacgacgagagctctgctgtagtgaagctggccaatcccctgcatttctacgaggctcggttcagcaacttatatgtaggaacaaacggtattatttccacacaggattttcccagggagactcagtacgtggactatgacttccctactgacttcccagccatcgctccttttttagctgacatcgatacctcccatgggaggggcagggtcctgtatcgggaagacacctctcccgcagtcctcgggttggctgcgcgttacgtgcgggcagggttcccacgaagtgcaaggttcaccccaactcacgctttcctggcaacgtgggagcaagtgggggcttatgaggaggtcaaaagaggagcactgccatccggcgagcttaacacttttcaagccgtgctggccagtgatggcagtgactcctacgccctctttctgtacccagccaacggcctgcaattccttggcacccggcctaaggagtcctacaacgtccagcttcaactgccagcaagagtgggattttgtcgtggtgaagccgacgatctgaagtcagaaggcccatacttctcgctgaccagtacagaacagtctgtcaagaacctgtaccagctctccaaccttggaatccctggtgtctgggctttccatattggcagcacttcaccactggacaatgtgcggcctgctgctgtaggggacctgtcagccgctcattcctccgtaccgctgggcaggtccttttctcacgccaccgcactcgagtctgactacaatgaggacaacctggattattatgatgtaaatgaggaggaggccgaatatctgcctggagaaccggaagaggccctcaacgggcacagctcgattgacgtgagcttccaatccaaagtggataccaagcccctggaggagtcaagcacattggatcctcatacaaaggagggaacctccttaggagaggtggggggacctgaccttaagggccaggtggagccatgggacgaacgcgaaacccgcagccccgctcctcccgaagtcgatcgtgatagtctggcgccttcctgggagacgcctcctccatatcctgagaatggctccatccaaccctatccagacggtgggccagtcccatccgagatggatgtccctccggctcacccagaggaggaaatcgtgttgagaagttaccccgcttccgggcacactactcctctgagccggggaacgtacgaagtcggtctggaggataacattggatctaacacagaggtgtttacatacaacgcagcaaataaggagacgtgcgaacacaatcacagacaatgcagcagacacgcattttgtactgattatgctacaggcttttgttgccactgtcagtctaaattctatggtaacgggaaacactgtctacccgagggggctccacatagagtcaatgggaaggttagcggccatctccacgtcggacacacacctgtacactttactgacgttgacctccacgcatacatcgttgggaatgatggacgcgcatataccgcaatctcccatatccctcagcctgctgctcaggcccttttaccgctgacaccgatcggaggcctgttcgggtggctgttcgccctggaaaaacccggttcagagaacggtttcagtctggccggagctgcttttacgcatgacatggaagtgaccttctacccaggagaagaaacggtaagaataactcagacagcagagggattggaccccgagaattatctgtctattaaaacaaatattcagggacaggtgccatacgtgtctgctaacttcacggctcacatctcaccctataaggaactgtaccactatagtgactctactgtcacctccaccagctccagagattattctcttaccttcggtgctatcaatcagacgtggtcctaccgcatccatcagaacataacctatcaagtgtgccggcacgcccctcgtcacccctcttttcccacgacccaacagctcaacgtggacagggtttttgccctgtataatgacgaggaacgggtccttagattcgccgtgacaaaccagattgggccagtgaaagaggatagcgatccaacacctgggaatccgtgttatgacggttctcatatgtgtgacaccaccgccaggtgccatccagggactggagtcgactacacttgcgagtgcgcatctgggtatcagggggacggaagaaactgcgtggacgagaatgagtgtgctacgggctttcatcgatgtgggcctaactccgtgtgtatcaacctgcctgggtcctatcggtgtgaatgccggtccggatacgagtttgcggacgacagacatacttgcattctaataacccccccagctaacccatgtgaggatggcagtcacacttgcgcgcctgccggacaggcccgttgtgtgcaccacgggggttctacatttagctgtgcttgcctccccggttacgccggagatgggcaccagtgcaccgacgtggatgaatgcagcgagaatagatgccatcccgcagcaacctgctacaacactcctggatctttctcctgtagatgccagccaggatactatggcgacggctttcagtgcataccggactcaacatcaagcctcaccccatgtgaacagcagcaaagacatgcccaggcccaatacgcatatcccggagccaggttccacataccgcaatgcgatgaacagggcaacttcctacctctgcagtgtcatgggtccacaggattttgctggtgcgttgacccagacggtcacgaagtacccggaacacaaactcctccgggaagcactcctccacactgcggcccttctcccgaaccaacccagcgcccaccaacaatctgcgagcggtggcgtgagaacctgctcgagcactacggtgggacccctcgcgatgatcaatacgtccctcaatgcgacgacctggggcatttcatccctttgcaatgtcacggcaagtccgatttctgttggtgcgtcgataaggacggtagggaggtgcagggaacccgttcgcagcctggtacaactccagcctgcatccctaccgtcgcaccacccatggttagacccacaccacggcctgatgtgacccccccttctgtcggcacctttctgctgtacacccaggggcaacagattggttaccttccactcaacggcactcgtttgcaaaaagacgccgcaaaaactttgctcagcctccatgggtccattatcgttggaatcgactacgactgccgtgaaagaatggtgtactggacagacgttgccggtcgtactataagccgcgcaggattagagctgggagctgaaccagagacgatcgtgaattccgggctcataagtcccgaaggcctggccatcgatcacatcagacggaccatgtactggaccgattccgtgctcgacaagatcgaaagcgcactgctggatggaagtgaaaggaaagttctcttctacacggatctggtcaatccccgagccatcgcagtggatcccattcggggtaacctgtattggactgattggaaccgggaggcccctaagatcgagacctccagtctggatggtgagaatcggagaattctcatcaacaccgacatcggattgcctaatggtctcacttttgaccctttctccaaactgttgtgctgggccgacgccggaaccaaaaagctcgagtgtactctccctgatgggaccggtcggcgagttatacagaacaatctcaaatatcccttcagcattgttagctatgcagaccatttctatcacacagactggcgcagagacggcgttgtatcagtgaacaagcactctggtcaattcactgacgagtacctccctgaacaacggagtcatctctacggaatcaccgcagtgtacccttactgtcccactggacggaaatag

SEQ ID NO: 172168 - DNA, 2910 bp, Artificial Sequence
  derived and/or modified sequence
atggagggagacagggtggcagggagacccgtgctttctagcctccccgtgttgcttctgctacccctgcttatgctgcgagctgctgccctgcaccccgatgagttgttcccccacggagagtcctggggtgaccagctcctgcaggagggggatgacgagtcttcagctgtggtgaagctggccaatcccctgcacttttacgaagctcgattctctaacctctatgtcggaactaatgggatcatttcgacacaggacttcccgcgagagacacaatatgtagactatgattttcctacagattttcctgcaattgctccattcctggccgacatagatacctcccacggacggggaagggtcctgtatagggtcaacggtaaggtgagcggccatctgcacgtggggcatactccggtgcatttcactgatgtcgacctgcacgcttatatcgtcggtaatgacggcagggcttatacagcaatctcacacatccctcaaccagcggctcaggcgctactgcccctgacccccataggaggtctctttggttggctgttcgcccttgagaagcccggatctgaaaacggctttagcttagccggagcagccttcactcacgacatggaggtcacattttatccgggtgaggaaaccgtcagaattacacagacggctgagggacttgatccagaaaattatttgagcatcaaaacgaatatacagggccaggtgccatacgtctcagctaactttaccgctcatatctctccctataaggaactgtaccactatagcgattcaacagtgacaagtacgagctccagagattactcccttacgttcggagcaataaaccagacatggagttacaggatccaccagaacattacttatcaagtctgccggcatgctccgcgacacccttcatttcctactactcagcaactgaacgtggatcgagtgttcgcgctgtataatgatgaagagcgggtgctcaggttcgccgtgactaaccagattggccctgtaaaagaagacagtgacccaactccgggaaatccttgctacgacggcagccatatgtgcgacactaccgcccgttgtcatcccggtacaggcgtggactatacctgcgagtgcgcctctggctaccaaggagatggacggaactgcgtagacgagaatgagtgcgccaccggcttccatcgctgcggccctaactccgtctgcattaacctgcctggttcttaccgctgtgagtgccgcagtggatacgagttcgctgatgacagacacacttgtatcctgataacacctcctgccaacccctgcgaagacggctcccacacctgtgcaccagccggtcaggccagatgcgttcaccacggaggcagcacttttagttgcgcttgtctacccggatatgctggggacggccaccaatgtaccgatgtggacgagtgtagcgaaaataggtgccatccggctgccacgtgttacaatactcccggttcttttagctgtcgatgtcagccaggttattatggagacggttttcaatgcattcccgattccacgtccagccttacaccctgcgagcagcaacagagacacgcccaggctcagtatgcatatccgggtgcccgatttcacattccccagtgtgacgaacaggggaacttcctccccctacagtgtcatggatcaaccggattttgctggtgcgtggacccggacggacatgaggtcccagggacacaaaccccaccaggatccacaccgcctcactgtgggccttcccctgagcccacacagagacctccaaccatttgtgagaggtggagagagaatctgctggagcactacggaggaactcctcgcgatgaccaatatgtgccccagtgcgacgatctcggtcatttcatccctcttcagtgccatggaaagtccgacttctgttggtgtgtggacaaggatggccgtgaagtccaaggaacgagaagtcagcctgggacaactccggcatgtattcctactgttgcccctccgatggtgcggccaacccctagacctgatgtaactccacctagcgtcggcaccttcttgctctatacacaggggcagcaaatagggtaccttccattaaatggtactcgtctgcagaaggacgccgctaagacactgctatctctccacggcagcattatcgttggaatcgactatgactgcagagagagaatggtgtactggaccgacgtcgccggaaggactatctctagagccggactcgaattgggggcagaacctgagacaattgtcaattccgggctgatctctcccgagggccttgccattgaccacatcagaaggactatgtattggaccgacagtgtgcttgacaaaatcgagagcgccctcttagacggatcggagcgcaaagtgttattctacaccgacctcgtaaaccccagagccattgccgtggacccaatccggggtaatctgtactggacggactggaaccgcgaagcacccaagatagaaacttcctccctggacggtgagaacaggagaatattgatcaacactgatattggcttgcccaatggcctcacattcgatccattctccaagcttctgtgttgggctgatgcaggcactaagaaactggaatgtactcttcctgacggaaccggcagaagagtcattcagaacaacttaaaatatcccttttcaatagtgagctacgcagaccacttctaccacaccgattggaggagagacggagtagtgtctgtaaacaaacatagcggtcagttcaccgatgaatacttgccagagcagcgatcgcatctatatggcattacagccgtatatccgtattgtcctaccggacgcaaatag

SEQ ID NO: 172169 - DNA, 3543 bp, Artificial Sequence
  derived and/or modified sequence
actcctcagaccgagcgtatcacccacagtagtatcagttggagttttctgttgcggtttagcagaggcaaattgttgatgcttagagccgctgcattacatcctgacgaactgtttccccacggtgagtcgtggggagaccaactgctccaggaaggcgacgacgaatcttccgcggtggtcaaactcgccaatccattacacttttacgaagctcggttctccaatctctatgtagggaccaacggcatcatctctacacaggatttccctagggagactcaatatgtggattatgactttcccaccgacttccctgccatcgctccttttcttgctgacatcgacacgtctcatgggagggggagagtactgtatagggaggacactagtccagccgtgctcggcctggcagcgcgttatgtccgcgctgggttcccacgcagcgccagatttacgcctacgcatgcgttcttggctacatgggagcaggtaggagcctatgaagaggtcaaacgaggggctctgccatccggggagctgaataccttccaggccgtcctcgcatcagacggaagcgacagctacgctctgtttctctaccccgcaaacggtctgcaatttctgggcacacggcctaaggagagttacaatgtgcagcttcagcttcccgcacgcgtgggattctgtaggggcgaggccgacgatttgaagagcgagggcccttacttttccctgaccagcactgagcagtctgttaagaacctttaccagcttagcaacctcggcatccctggagtttgggccttccacataggctctacaagccccctggacaacgtgcggcctgctgctgtcggcgacctcagtgccgctcattcctctgtgccactgggaaggtcattttctcatgctaccgctttggaaagtgattacaatgaggataacttagactactacgatgtgaacgaagaggaggccgaatatctgcctggggagccagaagaggcactcaacgggcacagcagcatcgacgtatcttttcaaagcaaggtggataccaaacctctcgaggagagcagtaccctggatccccacactaaggaggggacatcgctaggagaagtgggaggacctgatctcaaaggacaggtagagccctgggacgagagggaaactcgcagtccggctccccctgaggtcgatcgcgattccctagcccctagctgggagactcccccaccctaccctgagaacggttcaatacaaccatatcccgatgggggaccagtgccttccgagatggatgttcctccggcacaccctgaagaggagatcgtgctaagaagttaccccgcatcagggcacacaacacctctcagcaggggaacttacgaggttggcctcgaagataatattggatcgaacaccgaggtgttcacatataacgctgccaataaggagacttgtgaacataaccacagacagtgctcaagacatgcgttttgtacagattacgcaacagggttctgctgccattgtcagagtaaattttacggcaatggcaagcactgtctgcctgaaggggcaccccaccgggtcaacgggaaggtcagcggccaccttcacgttgggcacactcctgtgcactttacggatgtagatctgcatgcatacattgtcggcaatgatgggagggcctacacagctatctcacacatccctcagcccgcagcccaagccctgttgcccctaactccgatcggagggcttttcggatggctgtttgcgttggaaaagcctggatctgagaacggcttttccctggctggggctgctttcacacatgacatggaggtgacattctatccgggtgaagaaaccgttaggatcacccagactgctgagggcctcgaccccgagaactacctatccattaagaccaatatccaggggcaggttccttatgtgtctgccaacttcactgctcatatctctccatacaaagaactgtaccactacagtgattccactgtcacaagcactagctccagagactattctctaaccttcggtgccattaaccagacctggtcttaccggatacaccagaatataacatatcaagtgtgccgacatgcaccaaggcatccctctttccctaccacccaacagctcaatgtggacagagtatttgctctgtacaatgacgaagagcgcgtgcttaggttcgctgtgacaaaccagattggaccagtgaaagaggactctgatccaacacctggcaacccgtgctatgatggctcacatatgtgcgacactaccgcaagatgccaccctggaacaggcgttgactatacctgcgagtgcgcttcggggtatcagggggacggacgaaattgcgtggatgagaatgagtgtgccacaggcttccacagatgtggacccaacagcgtgtgcatcaaccttcctgggagttaccgctgtgaatgccgtagcggctacgagttcgcagacgaccggcatacctgcatactcattacccctccagccaacccctgtgaggatggctctcacacttgcgcacccgctgggcaggctcggtgtgtgcaccacggaggctccacattctcctgcgcctgtctccctggctacgctggcgatggacatcagtgcacggacgttgacgaatgtagcgaaaataggtgccaccccgcagcaacatgctacaacacacctgggtcttttagctgccggtgtcaacctggatactatggcgatggcttccagtgcatccccgacagcacgtcttcccttaccccctgtgaacagcagcagagacatgcccaggcccaatacgcttaccctggagcaagattccacatcccacagtgtgatgaacagggcaactttctcccgctgcagtgccacgggtcaacaggattttgctggtgtgtggaccccgacggacatgaagtccctggaacgcaaacaccacccggatccacaccaccacactgtggccctagtccggaacctacacaaagaccacccacgatttgtgagcgttggagagagaatctactggaacattatggtggtactccaagggatgaccagtatgtgccgcaatgtgatgatttaggtcatttcattcccctacaatgccatggaaaatcagacttctgctggtgtgtagacaaggacgggagggaggtacagggcacgagaagccagcccggaacaacgccggcttgcattccaactgtagctccccctatggttcgcccaacaccaagacctgacgtgactccaccttccgtgggaaccttcctgctatatacccaaggccagcagattggatatctgcctctgaatggaaccaggctacagaaggacgcagctaaaaccctgttatctctgcatgttaagtggattagcccagtgggaggcagggctgcttggctcagccaatgggagccccctcatcggccttgctgtagtgaggtcgactggtgtcgcgaggtgctggaaggcttctag

SEQ ID NO: 172170 - DNA, 4128 bp, Artificial Sequence
  derived and/or modified sequence
atggagggcgacagagtggccggcagacccgtgctgagcagcctgcccgtgctgctgctgctgcccctgctgatgctgagagccgccgccctgcaccccgacgagctgttcccccacggcgagagctggggcgaccagctgctgcaggagggcgacgacgagagcagcgccgtggtgaagctggccaaccccctgcacttctacgaggccagattcagcaacctgtacgtgggcaccaacggcatcatcagcacccaggacttccccagagagacccagtacgtggactacgacttccccaccgacttccccgccatcgcccccttcctggccgacatcgacaccagccacggcagaggcagagtgctgtacagagaggacaccagccccgccgtgctgggcctggccgccagatacgtgagagccggcttccccagaagcgccagattcacccccacccacgccttcctggccacctgggagcaggtgggcgcctacgaggaggtgaagagaggcgccctgcccagcggcgagctgaacaccttccaggccgtgctggccagcgacggcagcgacagctacgccctgttcctgtaccccgccaacggcctgcagttcctgggcaccagacccaaggagagctacaacgtgcagctgcagctgcccgccagagtgggcttctgcagaggcgaggccgacgacctgaagagcgagggcccctacttcagcctgaccagcaccgagcagagcgtgaagaacctgtaccagctgagcaacctgggcatccccggcgtgtgggccttccacatcggcagcaccagccccctggacaacgtgagacccgccgccgtgggcgacctgagcgccgcccacagcagcgtgcccctgggcagaagcttcagccacgccaccgccctggagagcgactacaacgaggacaacctggactactacgacgtgaacgaggaggaggccgagtacctgcccggcgagcccgaggaggccctgaacggccacagcagcatcgacgtgagcttccagagcaaggtggacaccaagcccctggaggagagcagcaccctggacccccacaccaaggagggcaccagcctgggcgaggtgggcggccccgacctgaagggccaggtggagccctgggacgagagagagaccagaagccccgccccccccgaggtggacagagacagcctggcccccagctgggagaccccccccccctaccccgagaacggcagcatccagccctaccccgacggcggccccgtgcccagcgagatggacgtgccccccgcccaccccgaggaggagatcgtgctgagaagctaccccgccagcggccacaccacccccctgagcagaggcacctacgaggtgggcctggaggacaacatcggcagcaacaccgaggtgttcacctacaacgccgccaacaaggagacctgcgagcacaaccacagacagtgcagcagacacgccttctgcaccgactacgccaccggcttctgctgccactgccagagcaagttctacggcaacggcaagcactgcctgcccgagggcgccccccacagagtgaacggcaaggtgagcggccacctgcacgtgggccacacccccgtgcacttcaccgacgtggacctgcacgcctacatcgtgggcaacgacggcagagcctacaccgccatcagccacatcccccagcccgccgcccaggccctgctgcccctgacccccatcggcggcctgttcggctggctgttcgccctggagaagcccggcagcgagaacggcttcagcctggccggcgccgccttcacccacgacatggaggtgaccttctaccccggcgaggagaccgtgagaatcacccagaccgccgagggcctggaccccgagaactacctgagcatcaagaccaacatccagggccaggtgccctacgtgagcgccaacttcaccgcccacatcagcccctacaaggagctgtaccactacagcgacagcaccgtgaccagcaccagcagcagagactacagcctgaccttcggcgccatcaaccagacctggagctacagaatccaccagaacatcacctaccaggtgtgcagacacgcccccagacaccccagcttccccaccacccagcagctgaacgtggacagagtgttcgccctgtacaacgacgaggagagagtgctgagattcgccgtgaccaaccagatcggccccgtgaaggaggacagcgaccccacccccggcaacccctgctacgacggcagccacatgtgcgacaccaccgccagatgccaccccggcaccggcgtggactacacctgcgagtgcgccagcggctaccagggcgacggcagaaactgcgtggacgagaacgagtgcgccaccggcttccacagatgcggccccaacagcgtgtgcatcaacctgcccggcagctacagatgcgagtgcagaagcggctacgagttcgccgacgacagacacacctgcatcctgatcaccccccccgccaacccctgcgaggacggcagccacacctgcgcccccgccggccaggccagatgcgtgcaccacggcggcagcaccttcagctgcgcctgcctgcccggctacgccggcgacggccaccagtgcaccgacgtggacgagtgcagcgagaacagatgccaccccgccgccacctgctacaacacccccggcagcttcagctgcagatgccagcccggctactacggcgacggcttccagtgcatccccgacagcaccagcagcctgaccccctgcgagcagcagcagagacacgcccaggcccagtacgcctaccccggcgccagattccacatcccccagtgcgacgagcagggcaacttcctgcccctgcagtgccacggcagcaccggcttctgctggtgcgtggaccccgacggccacgaggtgcccggcacccagaccccccccggcagcacccccccccactgcggccccagccccgagcccacccagagaccccccaccatctgcgagagatggagagagaacctgctggagcactacggcggcacccccagagacgaccagtacgtgccccagtgcgacgacctgggccacttcatccccctgcagtgccacggcaagagcgacttctgctggtgcgtggacaaggacggcagagaggtgcagggcaccagaagccagcccggcaccacccccgcctgcatccccaccgtggccccccccatggtgagacccacccccagacccgacgtgaccccccccagcgtgggcaccttcctgctgtacacccagggccagcagatcggctacctgcccctgaacggcaccagactgcagaaggacgccgccaagaccctgctgagcctgcacggcagcatcatcgtgggcatcgactacgactgcagagagagaatggtgtactggaccgacgtggccggcagaaccatcagcagagccggcctggagctgggcgccgagcccgagaccatcgtgaacagcggcctgatcagccccgagggcctggccatcgaccacatcagaagaaccatgtactggaccgacagcgtgctggacaagatcgagagcgccctgctggacggcagcgagagaaaggtgctgttctacaccgacctggtgaaccccagagccatcgccgtggaccccatcagaggcaacctgtactggaccgactggaacagagaggcccccaagatcgagaccagcagcctggacggcgagaacagaagaatcctgatcaacaccgacatcggcctgcccaacggcctgaccttcgaccccttcagcaagctgctgtgctgggccgacgccggcaccaagaagctggagtgcaccctgcccgacggcaccggcagaagagtgatccagaacaacctgaagtaccccttcagcatcgtgagctacgccgaccacttctaccacaccgactggagaagagacggcgtggtgagcgtgaacaagcacagcggccagttcaccgacgagtacctgcccgagcagagaagccacctgtacggcatcaccgccgtgtacccctactgccccaccggcagaaagtag

SEQ ID NO: 172171 - DNA, 2910 bp, Artificial Sequence
  derived and/or modified sequence
atggagggcgacagagtggccggcagacccgtgctgagcagcctgcccgtgctgctgctgctgcccctgctgatgctgagagccgccgccctgcaccccgacgagctgttcccccacggcgagagctggggcgaccagctgctgcaggagggcgacgacgagagcagcgccgtggtgaagctggccaaccccctgcacttctacgaggccagattcagcaacctgtacgtgggcaccaacggcatcatcagcacccaggacttccccagagagacccagtacgtggactacgacttccccaccgacttccccgccatcgcccccttcctggccgacatcgacaccagccacggcagaggcagagtgctgtacagagtgaacggcaaggtgagcggccacctgcacgtgggccacacccccgtgcacttcaccgacgtggacctgcacgcctacatcgtgggcaacgacggcagagcctacaccgccatcagccacatcccccagcccgccgcccaggccctgctgcccctgacccccatcggcggcctgttcggctggctgttcgccctggagaagcccggcagcgagaacggcttcagcctggccggcgccgccttcacccacgacatggaggtgaccttctaccccggcgaggagaccgtgagaatcacccagaccgccgagggcctggaccccgagaactacctgagcatcaagaccaacatccagggccaggtgccctacgtgagcgccaacttcaccgcccacatcagcccctacaaggagctgtaccactacagcgacagcaccgtgaccagcaccagcagcagagactacagcctgaccttcggcgccatcaaccagacctggagctacagaatccaccagaacatcacctaccaggtgtgcagacacgcccccagacaccccagcttccccaccacccagcagctgaacgtggacagagtgttcgccctgtacaacgacgaggagagagtgctgagattcgccgtgaccaaccagatcggccccgtgaaggaggacagcgaccccacccccggcaacccctgctacgacggcagccacatgtgcgacaccaccgccagatgccaccccggcaccggcgtggactacacctgcgagtgcgccagcggctaccagggcgacggcagaaactgcgtggacgagaacgagtgcgccaccggcttccacagatgcggccccaacagcgtgtgcatcaacctgcccggcagctacagatgcgagtgcagaagcggctacgagttcgccgacgacagacacacctgcatcctgatcaccccccccgccaacccctgcgaggacggcagccacacctgcgcccccgccggccaggccagatgcgtgcaccacggcggcagcaccttcagctgcgcctgcctgcccggctacgccggcgacggccaccagtgcaccgacgtggacgagtgcagcgagaacagatgccaccccgccgccacctgctacaacacccccggcagcttcagctgcagatgccagcccggctactacggcgacggcttccagtgcatccccgacagcaccagcagcctgaccccctgcgagcagcagcagagacacgcccaggcccagtacgcctaccccggcgccagattccacatcccccagtgcgacgagcagggcaacttcctgcccctgcagtgccacggcagcaccggcttctgctggtgcgtggaccccgacggccacgaggtgcccggcacccagaccccccccggcagcacccccccccactgcggccccagccccgagcccacccagagaccccccaccatctgcgagagatggagagagaacctgctggagcactacggcggcacccccagagacgaccagtacgtgccccagtgcgacgacctgggccacttcatccccctgcagtgccacggcaagagcgacttctgctggtgcgtggacaaggacggcagagaggtgcagggcaccagaagccagcccggcaccacccccgcctgcatccccaccgtggccccccccatggtgagacccacccccagacccgacgtgaccccccccagcgtgggcaccttcctgctgtacacccagggccagcagatcggctacctgcccctgaacggcaccagactgcagaaggacgccgccaagaccctgctgagcctgcacggcagcatcatcgtgggcatcgactacgactgcagagagagaatggtgtactggaccgacgtggccggcagaaccatcagcagagccggcctggagctgggcgccgagcccgagaccatcgtgaacagcggcctgatcagccccgagggcctggccatcgaccacatcagaagaaccatgtactggaccgacagcgtgctggacaagatcgagagcgccctgctggacggcagcgagagaaaggtgctgttctacaccgacctggtgaaccccagagccatcgccgtggaccccatcagaggcaacctgtactggaccgactggaacagagaggcccccaagatcgagaccagcagcctggacggcgagaacagaagaatcctgatcaacaccgacatcggcctgcccaacggcctgaccttcgaccccttcagcaagctgctgtgctgggccgacgccggcaccaagaagctggagtgcaccctgcccgacggcaccggcagaagagtgatccagaacaacctgaagtaccccttcagcatcgtgagctacgccgaccacttctaccacaccgactggagaagagacggcgtggtgagcgtgaacaagcacagcggccagttcaccgacgagtacctgcccgagcagagaagccacctgtacggcatcaccgccgtgtacccctactgccccaccggcagaaagtag

SEQ ID NO: 172172 - DNA, 3543 bp, Artificial Sequence
  derived and/or modified sequence
accccccagaccgagagaatcacccacagcagcatcagctggagcttcctgctgagattcagcagaggcaagctgctgatgctgagagccgccgccctgcaccccgacgagctgttcccccacggcgagagctggggcgaccagctgctgcaggagggcgacgacgagagcagcgccgtggtgaagctggccaaccccctgcacttctacgaggccagattcagcaacctgtacgtgggcaccaacggcatcatcagcacccaggacttccccagagagacccagtacgtggactacgacttccccaccgacttccccgccatcgcccccttcctggccgacatcgacaccagccacggcagaggcagagtgctgtacagagaggacaccagccccgccgtgctgggcctggccgccagatacgtgagagccggcttccccagaagcgccagattcacccccacccacgccttcctggccacctgggagcaggtgggcgcctacgaggaggtgaagagaggcgccctgcccagcggcgagctgaacaccttccaggccgtgctggccagcgacggcagcgacagctacgccctgttcctgtaccccgccaacggcctgcagttcctgggcaccagacccaaggagagctacaacgtgcagctgcagctgcccgccagagtgggcttctgcagaggcgaggccgacgacctgaagagcgagggcccctacttcagcctgaccagcaccgagcagagcgtgaagaacctgtaccagctgagcaacctgggcatccccggcgtgtgggccttccacatcggcagcaccagccccctggacaacgtgagacccgccgccgtgggcgacctgagcgccgcccacagcagcgtgcccctgggcagaagcttcagccacgccaccgccctggagagcgactacaacgaggacaacctggactactacgacgtgaacgaggaggaggccgagtacctgcccggcgagcccgaggaggccctgaacggccacagcagcatcgacgtgagcttccagagcaaggtggacaccaagcccctggaggagagcagcaccctggacccccacaccaaggagggcaccagcctgggcgaggtgggcggccccgacctgaagggccaggtggagccctgggacgagagagagaccagaagccccgccccccccgaggtggacagagacagcctggcccccagctgggagaccccccccccctaccccgagaacggcagcatccagccctaccccgacggcggccccgtgcccagcgagatggacgtgccccccgcccaccccgaggaggagatcgtgctgagaagctaccccgccagcggccacaccacccccctgagcagaggcacctacgaggtgggcctggaggacaacatcggcagcaacaccgaggtgttcacctacaacgccgccaacaaggagacctgcgagcacaaccacagacagtgcagcagacacgccttctgcaccgactacgccaccggcttctgctgccactgccagagcaagttctacggcaacggcaagcactgcctgcccgagggcgccccccacagagtgaacggcaaggtgagcggccacctgcacgtgggccacacccccgtgcacttcaccgacgtggacctgcacgcctacatcgtgggcaacgacggcagagcctacaccgccatcagccacatcccccagcccgccgcccaggccctgctgcccctgacccccatcggcggcctgttcggctggctgttcgccctggagaagcccggcagcgagaacggcttcagcctggccggcgccgccttcacccacgacatggaggtgaccttctaccccggcgaggagaccgtgagaatcacccagaccgccgagggcctggaccccgagaactacctgagcatcaagaccaacatccagggccaggtgccctacgtgagcgccaacttcaccgcccacatcagcccctacaaggagctgtaccactacagcgacagcaccgtgaccagcaccagcagcagagactacagcctgaccttcggcgccatcaaccagacctggagctacagaatccaccagaacatcacctaccaggtgtgcagacacgcccccagacaccccagcttccccaccacccagcagctgaacgtggacagagtgttcgccctgtacaacgacgaggagagagtgctgagattcgccgtgaccaaccagatcggccccgtgaaggaggacagcgaccccacccccggcaacccctgctacgacggcagccacatgtgcgacaccaccgccagatgccaccccggcaccggcgtggactacacctgcgagtgcgccagcggctaccagggcgacggcagaaactgcgtggacgagaacgagtgcgccaccggcttccacagatgcggccccaacagcgtgtgcatcaacctgcccggcagctacagatgcgagtgcagaagcggctacgagttcgccgacgacagacacacctgcatcctgatcaccccccccgccaacccctgcgaggacggcagccacacctgcgcccccgccggccaggccagatgcgtgcaccacggcggcagcaccttcagctgcgcctgcctgcccggctacgccggcgacggccaccagtgcaccgacgtggacgagtgcagcgagaacagatgccaccccgccgccacctgctacaacacccccggcagcttcagctgcagatgccagcccggctactacggcgacggcttccagtgcatccccgacagcaccagcagcctgaccccctgcgagcagcagcagagacacgcccaggcccagtacgcctaccccggcgccagattccacatcccccagtgcgacgagcagggcaacttcctgcccctgcagtgccacggcagcaccggcttctgctggtgcgtggaccccgacggccacgaggtgcccggcacccagaccccccccggcagcacccccccccactgcggccccagccccgagcccacccagagaccccccaccatctgcgagagatggagagagaacctgctggagcactacggcggcacccccagagacgaccagtacgtgccccagtgcgacgacctgggccacttcatccccctgcagtgccacggcaagagcgacttctgctggtgcgtggacaaggacggcagagaggtgcagggcaccagaagccagcccggcaccacccccgcctgcatccccaccgtggccccccccatggtgagacccacccccagacccgacgtgaccccccccagcgtgggcaccttcctgctgtacacccagggccagcagatcggctacctgcccctgaacggcaccagactgcagaaggacgccgccaagaccctgctgagcctgcacgtgaagtggatcagccccgtgggcggcagagccgcctggctgagccagtgggagcccccccacagaccctgctgcagcgaggtggactggtgcagagaggtgctggagggcttctag

SEQ ID NO: 172173 - protein, 156 aa, Artificial Sequence
  derived and/or modified sequence
MSGGLLKALRSDSYVELSQYRDQHFRGDNEEQEKLLKKSCTLYVGNLSFYTTEEQIYELFSKSGDIKKIIMGLDKMKKTACGFCFVEYYSRADAENAMRYINGTRLDDRIIRTDWDAGFKEGRQYGRGRSGGQVRDEYRQDYDAGRGGYGKLAQNQ

SEQ ID NO: 172174 - protein, 153 aa, Artificial Sequence
  derived and/or modified sequence
MSKDLKILCKDPALELSCYRDHQFSGRKFQQEKLLKESSTLNMGNLSFYTTEEKIHELFSRSDIRNIFMGLDKIKKTACGFCFVECHNRADAENAMRFLTGTCLDEWIICTDWDVGFREGQQYGRGKSGGQVRDEFREDFHSGRGGFGRQTQI

SEQ ID NO: 172175 - DNA, 471 bp, Artificial Sequence
  derived and/or modified sequence
atgtcaggtggactgcttaaagccttacgctcagactcatatgtggaactgtcacaatatcgggaccaacactttcgtggagacaacgaagaacaagagaagctgctgaagaagagttgcacgctctacgtcggcaatcttagtttttacaccacagaggaacaaatctatgagttattttctaaatctggggatattaagaagatcatcatgggcctggataagatgaagaagacggcctgcggattttgctttgtcgagtattacagcagggccgacgctgaaaatgccatgcgatacattaacgggaccagattggacgataggattatcagaaccgactgggacgctggctttaaggaaggcagacagtacgggaggggccggtcagggggccaggtaagagatgagtatagacaagattacgatgccggccggggaggatatggtaagctggctcagaatcagtag

SEQ ID NO: 172176 - DNA, 471 bp, Artificial Sequence
  derived and/or modified sequence
atgtctgggggcctgctgaaggccctgcggagtgacagctatgtggagctgagccagtacagagaccagcacttccggggggacaatgaggagcaggagaagctgctgaagaagagctgcaccctgtatgtgggcaacctgtccttctacaccacagaggagcagatctatgagctgttcagcaagagcggggacatcaagaagatcatcatgggcctggacaagatgaagaagacagcctgtggcttctgctttgtggagtactacagcagagcagatgctgaaaatgccatgagatacatcaatggcacccggctggatgaccgcatcatcagaacagactgggatgctggcttcaaggagggccggcagtatggccggggccgcagcggcggccaggtgagagatgagtaccggcaggactatgatgctggccggggcggctacggcaagctggcccagaaccagtag

SEQ ID NO: 172177 - DNA, 471 bp, Artificial Sequence
  derived and/or modified sequence
atgagcggcggcctgctgaaggccctgcggagcgacagctacgtggagctgtcacaatacagggaccagcacttccgcggtgataatgaggaacaggagaaactactcaaaaaaagttgcaccctgtacgtcggcaatctttctttctataccactgaggagcagatttatgagctattttctaaaagtggagatatcaagaaaatcattatggggctggataagatgaagaagactgcctgcggcttctgcttcgtcgagtactactctagagccgacgcagaaaatgcgatgaggtacataaacgggacccgcttggatgacaggattatcagaacagactgggacgccggcttcaaagaggggcgccaatacggcagaggacgcagcggaggccaggtgagggacgaatacagacaagactatgacgcaggccggggaggatatgggaaattagctcagaatcagtag

SEQ ID NO: 172178 - DNA, 471 bp, Artificial Sequence
  derived and/or modified sequence
atgtccggaggactgcttaaagccctgagatcagactcctacgtggagctgtctcaatatcgcgaccagcatttcaggggcgataatgaggagcaggagaagctcttaaagaagagttgtacactctacgtggggaatctgtccttctacacaacagaggaacagatttacgaactatttagcaaatccggtgacatcaagaagatcattatgggcctggacaagatgaaaaagaccgcctgcggcttttgttttgttgagtactactcacgcgcagatgccgagaatgccatgagatatatcaacggcacgagactggatgataggattatacgcacggactgggacgccggatttaaagagggaagacaatacggcagaggacgctcaggaggccaggttagggacgaatatcggcaggattatgatgcgggaagagggggttatgggaaactcgctcagaatcagtag

SEQ ID NO: 172179 - DNA, 2169 bp, Artificial Sequence
  derived and/or modified sequence
aatgagatgctcgcctccgcgcgtttccgcttccgccatcgcggacgcagcctcgtgccgggagtcgccgcattgtggtccgcttctctgcactatgtcgggtggcctcctgaaggcgctgcgcagcgactcctacgtggagctgagccagtaccgggaccagcacttccggggtgacaatgaagaacaagaaaaattactgaagaaaagctgtacgttatatgttggaaatctttctttttacacaactgaagaacaaatctatgaactcttcagcaaaagtggtgacataaagaaaatcattatgggtctggataaaatgaagaaaacagcatgtggattctgttttgtggaatattactcacgcgcagatgcggaaaacgccatgcggtacataaatgggacgcgtctggatgaccgaatcattcgcacagactgggacgcaggctttaaggagggcaggcaatacggccgtgggcgatctgggggccaggttcgggatgagtatcggcaggactacgatgctgggagaggaggctatggaaaactggcacagaaccagtgagtggtgagagctctgtcagtgacaaacactcctttggcctgttgaatttgctgaagaacatcacctaaagtctgcacacgagcccatttttaccaagatttgatcagtgtctttactgagctggaagcctctgaaagttattaaaggacagaatccaaaagaatgcctttaattcttgtctgagaatcttggccatgtgtcagattatcagaacaattttgttaccaggtcagaaattgtgttctttgacaacagattggatctgtaatgttgattagtctttagccataaccactacacttttagaaagacagaaaaatgtaagaatttgtttttaccataatgagtcttaagtaggttcatgatctacattggggcctgggattatttttttaattttaagtttgcatgagatagcctaataaatggaggtggggccaggcatggtggctcacacgtgtaatcccaacactttgggaggctgaggaggaaggatagcttgaggccaggagtttgagactagactgggcaacatagcaagaccccgtctctacaaagcacaacgaaaaacaacaaatggagttgtgctatgttgtattgctttgcacaaaattaggaacaggtgtttgacaattgaatttgttttctgtgaattctaacctctaaaggcatgcttagaggtcaaggaccttcctgtgtagttggtgcaaaagcaatctccacaggacagcactgcttccatgcttcatacatcaggaaatgaggccagaacttgagtatttactaacacgtttttcaaaagatgtcagtgttatacctaaagctaaaaaaaagcaagggtttgtcatagagggaacctctaaataatttcaggggtaggggagatgttgtcaataggaaatgggataaaatatcaagagacaatgaaaacactgccttgacatgaggaccagcaagtttattcttttcattttcagtgatgttgggaatggactgggttttaaaagggagcttgaagagggaatgtttgacagtcacagaaggttcctgcagcagatgcctcttttagccatttctcatttttttcctcaaattttacctactgaggctcaagccttcacagtgagctgatggtctctacagggaggggagtctagggaatttatttggtatttgtaaggcaagaggtgatttctctctaatatatctgagttattgctcatttaaaactgttaagtccagtataattttccctgatatgaaaaaatgtgcatttttttcacttagcaacaaagtaccttctaatttccaatagtccgtgaaagttggggctgaagtacctaagtgtgaatgtctctcccgttaaactgagtgtagaaatctgaatttttaaaagagctgtaactagttgtaagtgcttaggaagaaactttgcaaacatttaatgaggatacactgttcatttttaaaattccttcacactgtaatttaatgtgttttatattcttttgtagtaaaacaacataactcagatttctacaggagacagtggttttattcggattgtcttctgtaataggtttcaataaagctggatgaactta

SEQ ID NO: 172180 - DNA, 471 bp, Artificial Sequence
  derived and/or modified sequence
atgagcggcggcctgctgaaggccctgagaagcgacagctacgtggagctgagccagtacagagaccagcacttcagaggcgacaacgaggagcaggagaagctgctgaagaagagctgcaccctgtacgtgggcaacctgagcttctacaccaccgaggagcagatctacgagctgttcagcaagagcggcgacatcaagaagatcatcatgggcctggacaagatgaagaagaccgcctgcggcttctgcttcgtggagtactacagcagagccgacgccgagaacgccatgagatacatcaacggcaccagactggacgacagaatcatcagaaccgactgggacgccggcttcaaggagggcagacagtacggcagaggcagaagcggcggccaggtgagagacgagtacagacaggactacgacgccggcagaggcggctacggcaagctggcccagaaccagtag

SEQ ID NO: 172181 - DNA, 462 bp, Artificial Sequence
  derived and/or modified sequence
atgagcaaggacctgaagatcctgtgcaaggaccccgccctggagctgagctgctacagagaccaccagttcagcggcagaaagttccagcaggagaagctgctgaaggagagcagcaccctgaacatgggcaacctgagcttctacaccaccgaggagaagatccacgagctgttcagcagaagcgacatcagaaacatcttcatgggcctggacaagatcaagaagaccgcctgcggcttctgcttcgtggagtgccacaacagagccgacgccgagaacgccatgagattcctgaccggcacctgcctggacgagtggatcatctgcaccgactgggacgtgggcttcagagagggccagcagtacggcagaggcaagagcggcggccaggtgagagacgagttcagagaggacttccacagcggcagaggcggcttcggcagacagacccagatctag

SEQ ID NO: 172182 - DNA, 462 bp, Artificial Sequence
  derived and/or modified sequence
atgagcaaagacctgaagatcctttgtaaggacccggccctggaacttagttgttatcgagaccatcaatttagcgggcgcaagttccagcaagagaagctactcaaggagagttcaaccctgaatatgggaaacctgtccttttataccactgaagagaagattcatgagctgttcagtcgcagcgatattagaaatatctttatgggactggataagattaaaaagacggcctgcggattttgctttgtggaatgccataaccgcgccgacgccgaaaacgccatgcgatttctcaccgggacatgcctcgacgagtggatcatttgcaccgactgggacgtgggtttccgggaagggcagcagtatggccggggcaaatccggaggccaggtgcgcgatgaatttagagaggatttccacagcggtaggggcgggtttggaaggcaaactcagatctag

SEQ ID NO: 172183 - DNA, 462 bp, Artificial Sequence
  derived and/or modified sequence
atgagcaaggacctgaagatcctgtgcaaggaccctgccctggagctgagctgctacagagaccaccagttcagcggcaggaagttccagcaggagaagctgctgaaggagagcagcaccctgaacatgggcaacctgtccttctacaccacagaggagaagatccacgagctgttcagcagaagtgacatccggaacatcttcatgggcctggacaagatcaagaagacagcctgtggcttctgctttgtggagtgccacaacagagcagatgctgaaaatgccatgaggttcctgaccggcacctgcctggatgagtggatcatctgcacagactgggatgtgggcttccgggagggccagcagtatggccggggcaagagcggcggccaggtgagagatgagttccgggaggacttccacagcggccggggcggcttcggccggcagacccagatctag

SEQ ID NO: 172184 - DNA, 462 bp, Artificial Sequence
  derived and/or modified sequence
atgagcaaggacctgaagatcctgtgcaaggaccccgccctggagctgagttgttatcgagaccaccagttctcaggtcgcaagtttcaacaggagaaactcctgaaggaatcaagtacccttaacatgggcaacctgtctttctatactaccgaggagaaaattcacgagctgttttccaggagcgacattcggaatatcttcatgggtctggacaagattaagaagacagcatgcggtttttgctttgtggaatgccacaaccgggccgacgctgaaaatgccatgcgtttcctgacaggcacatgtctggatgaatggattatttgtacagattgggatgtagggtttagggagggacagcaatatggaagggggaagtcaggtggccaggtccgagatgagtttagggaggattttcacagtggacggggtggctttggtagacagacccagatttag

SEQ ID NO: 172185 - DNA, 462 bp, Artificial Sequence
  derived and/or modified sequence
atgtccaaagacctgaaaattctatgtaaagaccctgctttggagctgagctgctaccgggaccatcagttcagtggccgtaaatttcagcaggaaaaattactgaaggaaagctccacattgaatatggggaatctttccttttatacaaccgaagagaaaatacatgaactctttagtagatctgatatcaggaatatctttatgggcctggataaaataaagaaaacagcatgtggtttttgctttgtagaatgccataacagagctgatgctgaaaatgccatgcggtttctaactgggacctgcctagatgaatggattatctgcactgattgggatgtcggttttagagagggtcaacagtatggtcgcggtaaatctgggggtcaggtaagggatgagtttcgtgaagattttcattctggtagaggaggctttggaagacagactcagatctag

SEQ ID NO: 172186 - DNA, 462 bp, Artificial Sequence
  derived and/or modified sequence
atgtccaaggacctgaaaatcttgtgcaaggaccctgccctggagctgtcttgttatagggatcaccagttctctggccgaaaatttcaacaggaaaagttactcaaagagtcttctacattgaacatgggcaatctgtccttctacactaccgaagagaagatccatgaactgttcagcagaagtgatatccggaacatctttatgggcctcgacaaaatcaaaaaaactgcgtgtggcttttgctttgtcgagtgccataaccgcgcagacgctgaaaacgctatgaggttcctcaccggaacctgcttagatgagtggataatatgtacagactgggacgtgggcttccgtgaaggacagcagtacgggaggggcaagtccggcggtcaagttcgcgacgagtttagagaagactttcatagcggacgaggcggttttgggagacagacacaaatctag

SEQ ID NO: 172187 - protein, 217 aa, Artificial Sequence
  derived and/or modified sequence
MGSTVPRSASVLLLLLLLRRAEQPCGAELTFELPDNAKQCFHEEVEQGVKFSLDYQVITGGHYDVDCYVEDPQGNTIYRETKKQYDSFTYRAEVKGVYQFCFSNEFSTFSHKTVYFDFQVGDEPPILPDMGNRVTALTQMESACVTIHEALKTVIDSQTHYRLREAQDRARAEDLNSRVSYWSVGETIALFVVSFSQVLLLKSFFTEKRPISRAVHS

SEQ ID NO: 172188 - protein, 173 aa, Artificial Sequence
  derived and/or modified sequence
MGSTVPRSASVLLLLLLLRRAEQPCGAELTFELPDNAKQCFHEEVEQGVKFSLDYQVITGGHYDVDCYVEDPQGNTIYRETKKQYDSFTYRAEVKGVYQFCFSNEFSTFSHKTVYFDFQVGDEPPILPDMGNRVTALTQRFRGAYWKEVDKMVDYMQPGGTPATEGLGRLAPS

SEQ ID NO: 172189 - DNA, 654 bp, Artificial Sequence
  derived and/or modified sequence
atgggcagcaccgtgcccagaagcgccagcgtgctgctgctgctgctgctgctgagaagagccgagcagccctgcggcgccgagctgaccttcgagctgcccgacaacgccaagcagtgcttccacgaggaggtggagcagggcgtgaagttcagcctggactaccaggtgatcaccggcggccactacgacgtggactgctacgtggaggacccccagggcaacaccatctacagagagaccaagaagcagtacgacagcttcacctacagagccgaggtgaagggcgtgtaccagttctgcttcagcaacgagttcagcaccttcagccacaagaccgtgtacttcgacttccaggtgggcgacgagccccccatcctgcccgacatgggcaacagagtgaccgccctgacccagatggagagcgcctgcgtgaccatccacgaggccctgaagaccgtgatcgacagccagacccactacagactgagagaggcccaggacagagccagagccgaggacctgaacagcagagtgagctactggagcgtgggcgagaccatcgccctgttcgtggtgagcttcagccaggtgctgctgctgaagagcttcttcaccgagaagagacccatcagcagagccgtgcacagctag

SEQ ID NO: 172190 - DNA, 654 bp, Artificial Sequence
  derived and/or modified sequence
atgggatcaacagtccccagatccgcatccgtgctgcttctactgctgctgcttcgccgcgctgagcaaccttgcggcgccgaactgacatttgaactccccgataacgctaagcagtgttttcacgaggaagttgagcagggggtaaagttttctctggactaccaagttatcacaggaggacactacgacgtagactgttatgtagaggatccccagggtaataccatttatagggagaccaagaagcagtacgactcgttcacttaccgagctgaggtcaagggggtgtatcagttttgctttagtaacgagttctccacttttagccacaagacagtgtattttgacttccaagtaggcgatgagccaccaatcctgccagatatgggcaacagggtgactgccctgacacagatggaatctgcctgcgttaccattcacgaggctctgaagaccgtgatcgatagccagacccattacagactgcgggaagcccaggatcgggcaagagcagaagatctcaattctagagtgtcatactggtcggtgggtgagaccatcgccttatttgtcgtgagcttttcacaagtcctcctgctcaagtcttttttcacagagaagcgccccatttcacgggcagttcactcctag

SEQ ID NO: 172191 - DNA, 654 bp, Artificial Sequence
  derived and/or modified sequence
atgggcagcacagtgcccaggtctgcctctgtgctgctgctgctgctgctgctgcggcgggcagagcagccctgtggggctgagctgacctttgagctgcctgacaatgccaagcagtgcttccacgaggaggtggagcagggcgtgaagttcagcctggactaccaggtgatcactggaggccactatgatgtggactgctacgtggaggacccccagggcaacaccatctaccgggagaccaagaagcagtatgacagcttcacctacagagctgaggtgaagggcgtgtaccagttctgcttcagcaatgagttcagcaccttcagccacaagacagtgtactttgacttccaggtgggagatgagccccccatcctgcctgacatgggcaacagagtgacagccctgacccagatggagagcgcctgtgtgaccatccacgaggccctgaagacagtgattgacagccagacccactaccgcctgcgggaggcccaggaccgggcccgggcagaggacctgaacagccgggtgtcctactggagcgtgggggagaccatcgccctgtttgtggtgtccttcagccaggtgctgctgctgaagagcttcttcacagagaagaggcccatcagcagagctgtgcacagctag

SEQ ID NO: 172192 - DNA, 654 bp, Artificial Sequence
  derived and/or modified sequence
atgggcagcaccgtgccccggagcgccagcgtgctgctgctgctgctcctgcttcgcagggccgaacaaccatgcggggcagaactgacctttgagctgccagacaacgctaagcagtgtttccacgaagaggttgaacagggagtgaaatttagccttgactatcaggttataacaggtgggcattatgacgttgactgttatgttgaagaccctcagggcaacactatctatcgagagaccaaaaagcagtatgactcgtttacctaccgagctgaggtgaaaggcgtctaccagttctgtttctcaaatgagttctctactttcagccataagaccgtctacttcgattttcaggttggggatgagcccccaatcctgccagatatgggtaatagggttaccgcccttacccagatggagtccgcctgtgtgacaatccatgaggcattaaagaccgttattgatagtcaaacccactaccgcctacgcgaggctcaggacagggcccgcgccgaggacctgaatagtagggtgtcttactggagcgtgggagaaaccatcgccctgttcgtggtgtcgttctcccaggtgctgctactgaagagtttcttcaccgagaagcgtccaatcagtagagccgtgcattcctag

SEQ ID NO: 172193 - DNA, 654 bp, Artificial Sequence
  derived and/or modified sequence
atgggcagcacagtgcctcgtagtgcatccgtgttgctactcttactgctgttgcgacgtgccgaacagccatgcggggcagagctgacctttgagctccctgacaatgccaagcagtgtttccacgaggaggtggagcaaggggtgaaattcagcttggattaccaagtcataaccgggggacattatgatgtagactgttatgttgaagaccctcagggtaacacaatatacagggaaacgaagaaacaatatgatagcttcacttatagggcagaggtcaaaggcgtgtaccaattctgcttctccaacgaattttctactttttcccacaagaccgtgtacttcgatttccaggtgggggatgagcccccaatactccctgatatgggcaaccgtgtgaccgcccttactcaaatggagtcagcttgtgtgaccattcatgaggccctcaaaaccgtaatcgactcacagacccactaccgcctgcgagaagcccaagatcgagcccgtgccgaggacctaaattctagagtgagctattggtctgtgggcgaaactatcgcattatttgtggttagtttttcccaggtgctgttactcaagtcctttttcactgaaaaacgacctatctccagggctgtgcacagctag

SEQ ID NO: 172194 - DNA, 1475 bp, Artificial Sequence
  derived and/or modified sequence
aaggtgcccgggcccactttgagcgcgcggctgcgcactgagccgccggccctcccggaagcgcagagctccgctggtgccacgtctatccccttacatcctcctaggacccggtcggtagtcgtcgccccagcccgccgggggcgcagcgcccgagccgcggccctcgagacgggaccgagagcatcatgggcagcactgtcccgcgctccgcctccgtgctgcttctgctgctgctcctgcgccgggccgagcagccctgcggggccgagctcaccttcgagctgccggacaacgccaagcagtgcttccacgaggaggtggagcagggcgtgaagttctccctggattaccaggtcatcactggaggccactacgatgttgactgctatgtggaggacccccaggggaacaccatctacagagaaacgaagaagcagtacgacagcttcacgtaccgggctgaagtcaagggcgtttatcagttttgcttcagtaatgagttttccaccttctctcacaagaccgtctactttgactttcaagtgggcgatgagcctcccattctcccagacatggggaacagggtcacagctctcacccagatggagtccgcctgcgtgaccatccatgaggctctgaaaacggtgattgactcccagacgcattaccggctgcgggaggcccaggaccgggcccgagcagaagaccttaatagccgagtctcttactggtctgttggcgagacgattgccctgttcgtggtcagcttcagtcaggtgctactgttgaaaagcttcttcacagaaaaacgacccatcagcagggcagtccactcctagccccggcatcctgctctagggcccctcatgccccaggctggagcagctctcctaggtcacagcctgctgggctgggtcgcgtagcccagggtggaggcagaacgatgctgctgtggtagccctttgcctttcatgcccatgcttgattcttgcacctcagcagctgaaggtctcagagaccagtaatcagaaggcatccgactgcattaagtgtgcagcgctgaaaagacatttacaactaggccagggattagccactgtgggagggtggacaggcaatggttcagtggcctggctgttggcaggaactccaagtgcccaggcctcttgggcagcttagggccctgcctctgtttcatgatgcatgggtcatttgtcttgggtgtcctatcccatatggagaagaaaggggctctaagttctggctcttctttctttggggttctctgtacctgaggaaaccaggccctgggtgactttgcagatctgctcaccctcggtgagcaacagtgtcagccatgcaagcaggacagaatggtgactgggtgcccttggtgagctgtgtatttcctaggaggtagaaaactgtgggaaactgtggctaataaaaactaagtgtgagcgtcctggaga

SEQ ID NO: 172195 - protein, 1463 aa, Artificial Sequence
  derived and/or modified sequence
MLLSPSLLLLLLLGAPRGCAEGVAAALTPERLLEWQDKGIFVIQSESLKKCIQAGKSVLTLENCKQANKHMLWKWVSNHGLFNIGGSGCLGLNFSAPEQPLSLYECDSTLVSLRWRCNRKMITGPLQYSVQVAHDNTVVASRKYIHKWISYGSGGGDICEYLHKDLHTIKGNTHGMPCMFPFQYNHQWHHECTREGREDDLLWCATTSRYERDEKWGFCPDPTSAEVGCDTIWEKDLNSHICYQFNLLSSLSWSEAHSSCQMQGGTLLSITDETEENFIREHMSSKTVEVWMGLNQLDEHAGWQWSDGTPLNYLNWSPEVNFEPFVEDHCGTFSSFMPSAWRSRDCESTLPYICKKYLNHIDHEIVEKDAWKYYATHCEPGWNPYNRNCYKLQKEEKTWHEALRSCQADNSALIDITSLAEVEFLVTLLGDENASETWIGLSSNKIPVSFEWSNDSSVIFTNWHTLEPHIFPNRSQLCVSAEQSEGHWKVKNCEERLFYICKKAGHVLSDAESGCQEGWERHGGFCYKIDTVLRSFDQASSGYYCPPALVTITNRFEQAFITSLISSVVKMKDSYFWIALQDQNDTGEYTWKPVGQKPEPVQYTHWNTHQPRYSGGCVAMRGRHPLGRWEVKHCRHFKAMSLCKQPVENQEKAEYEERWPFHPCYLDWESEPGLASCFKVFHSEKVLMKRTWREAEAFCEEFGAHLASFAHIEEENFVNELLHSKFNWTEERQFWIGFNKRNPLNAGSWEWSDRTPVVSSFLDNTYFGEDARNCAVYKANKTLLPLHCGSKREWICKIPRDVKPKIPFWYQYDVPWLFYQDAEYLFHTFASEWLNFEFVCSWLHSDLLTIHSAHEQEFIHSKIKALSKYGASWWIGLQEERANDEFRWRDGTPVIYQNWDTGRERTVNNQSQRCGFISSITGLWGSEECSVSMPSICKRKKVWLIEKKKDTPKQHGTCPKGWLYFNYKCLLLNIPKDPSSWKNWTHAQHFCAEEGGTLVAIESEVEQAFITMNLFGQTTSVWIGLQNDDYETWLNGKPVVYSNWSPFDIINIPSHNTTEVQKHIPLCALLSSNPNFHFTGKWYFEDCGKEGYGFVCEKMQDTSGHGVNTSDMYPMPNTLEYGNRTYKIINANMTWYAAIKTCLMHKAQLVSITDQYHQSFLTVVLNRLGYAHWIGLFTTDNGLNFDWSDGTKSSFTFWKDEESSLLGDCVFADSNGRWHSTACESFLQGAICHVPPETRQSEHPELCSETSIPWIKFKSNCYSFSTVLDSMSFEAAHEFCKKEGSNLLTIKDEAENAFLLEELFAFGSSVQMVWLNAQFDGNNETIKWFDGTPTDQSNWGIRKPDTDYFKPHHCVALRIPEGLWQLSPCQEKKGFICKMEADIHTAEALPEKGPSHSIIPLAVVLTLIVIVAICTLSFCIYKHNGGFFRRLAGFRNPYYPATNFSTVYLEENILISDLEKSDQ

SEQ ID NO: 172196 - DNA, 4392 bp, Artificial Sequence
  derived and/or modified sequence
atgctgctgtccccctctctgctcctcctgctgttactcggtgccccccgcggatgcgcagaaggagtagccgcagcactgacaccggagagacttcttgaatggcaggacaagggtatttttgtcatccagtccgagtcactgaaaaaatgtatccaagctggaaagtccgttctgaccttggaaaattgcaagcaggctaacaaacacatgctctggaaatgggtgagtaaccatggactttttaacataggcggctccggatgcttaggactgaatttttctgcacccgaacagcctctgagcctgtatgaatgtgacagcacactggtgagtctgcgctggcgctgcaaccgtaagatgatcaccggtccacttcagtactcggtacaggtagcccacgataacacagtggtggcgtccaggaagtacatacacaaatggatttcttacggctccggtggaggagatatctgcgagtatctccacaaggacctgcatacgataaagggaaatacccacggcatgccgtgcatgtttccatttcaatacaaccaccagtggcaccacgaatgcacccgtgaaggaagggaggacgacctactgtggtgtgcaaccacatcaaggtacgaaagggacgagaagtggggcttctgccctgatccgacttcagcggaggtcgggtgcgacacgatctgggaaaaagacttaaacagtcacatctgttatcagttcaatttgttatcctccctgagctggagcgaagctcacagcagttgccagatgcagggtggaacgctgcttagcataacagatgagaccgaagaaaactttatacgagaacatatgagttcaaaaactgtcgaagtatggatgggtctcaatcagctggacgaacacgctggatggcaatggtcagacggaacccccctcaactatttgaattggtctccagaagtgaacttcgaaccctttgtggaagatcattgtggtactttctcaagcttcatgccgtccgcctggcggtcgagggactgtgagagtaccttaccatacatctgcaagaagtacctgaaccacattgaccacgagattgtcgaaaaagatgcttggaaatattacgcaactcattgcgagcccggatggaacccctataatcgaaattgttacaaattgcagaaggaggagaagacctggcacgaagctctccgttcctgccaagccgacaacagcgcactcattgacatcaccagcctcgccgaggtggaatttctagtcacactgcttggggacgaaaatgcctctgagacatggattggcctgtctagcaacaaaattccagtgagctttgagtggagcaacgattcctcagttatcttcacgaattggcacactttggaaccccatatatttccaaatcggtcacagctgtgtgttagcgcagaacaaagcgaaggccattggaaggtgaagaattgcgaggagcgtctgttctatatctgcaaaaaggccggccacgtgctttctgatgctgaaagcgggtgtcaggaaggatgggagaggcacggcggattctgctacaagatcgatactgtgctgcgcagctttgatcaggctagtagtggttactattgccctccagctttagtgacgatcaccaacaggttcgagcaggcgttcattacctccctgatatcctctgtagttaagatgaaagactcctacttctggatagccctccaggaccagaatgacacgggcgagtacacatggaaacccgtcggccagaaacctgaacctgtgcagtatactcattggaacactcaccagccgaggtactctggcggctgtgtggcaatgagagggagacacccgttgggcagatgggaagtgaagcattgtagacactttaaagctatgagtctgtgcaagcagcccgtcgaaaatcaggagaaagccgaatacgaagagcggtggccgtttcatccttgctacctggattgggaatccgaacctggactggcatcctgcttcaaggtctttcattcagagaaagttctgatgaagcgaacctggagagaggcagaggccttctgtgaagagttcggagctcacctcgccagcttcgcccacatcgaggaggaaaatttcgtaaacgagctgttacattctaagttcaattggaccgaggagcgacaattttggattggtttcaacaagcggaatccccttaatgcaggcagttgggagtggagtgatcgaacccccgtggtatcctcatttttggacaacacatactttggggaggacgccaggaactgcgcagtgtacaaggccaacaaaaccttgttacccctgcactgcggaagcaaacgggaatggatttgtaagatcccacgggatgtgaaaccaaagatcccattctggtaccagtacgatgtgccctggctcttttaccaggacgcggaatacctgtttcacaccttcgctagcgaatggctcaatttcgagttcgtgtgtagttggttacatagcgacctgctgacgatacactccgcccatgaacaggagtttatccactctaagatcaaggctctcagtaagtatggagcgtcttggtggataggcctgcaggaagaacgagcgaacgatgaattcaggtggagagatggaactcccgtcatctaccaaaactgggatactgggagagagaggacagtgaacaatcagtctcagcgctgtggattcatctcgagtatcactgggctctggggcagtgaagaatgttctgtgtccatgcccagcatctgtaagcggaagaaggtctggctcatcgagaaaaaaaaagatactcccaagcagcatgggacgtgcccaaaaggctggctttacttcaattataagtgcttgctcctgaacattccaaaggacccttcaagttggaaaaactggacacacgcccagcatttctgcgccgaggagggcggcaccctcgtggctatcgagtccgaggtcgagcaggcgttcatcacgatgaacctctttggacaaacgacaagcgtctggattggcctgcagaacgatgattacgaaacttggctcaacgggaagccagtggtttactccaactggtccccgtttgacataataaatataccaagtcataacaccactgaggtgcagaaacacattcccctgtgcgctctgctttccagcaacccaaatttccactttactggtaagtggtattttgaggattgcgggaaagagggatatggatttgtctgtgagaagatgcaggataccagtggccacggcgtgaacacctctgacatgtaccccatgcccaacacgctggaatacggcaaccgtacttacaagattattaacgcgaatatgacttggtatgccgctatcaagacgtgcctgatgcataaagcgcagcttgtttcaattaccgaccaataccatcagagcttcctgaccgtggtgctcaataggctgggctacgcgcattggataggcctgtttaccacggataacggcttgaacttcgactggagtgacgggacaaagagcagcttcacattctggaaggatgaagagtcttccttgttaggcgattgcgtgtttgctgattccaacggaagatggcactcaacagcttgtgaatcattcctccagggtgccatttgtcacgtccctcctgaaacacggcaatcagagcatccagagctgtgctccgagacctccattccatggatcaaatttaagtccaattgttattctttttccacagttctagatagcatgtcttttgaggcggcccatgagttttgcaagaaggagggcagcaacctgctgacaattaaggacgaggctgaaaacgcttttttgctggaggagctgttcgccttcggctcatccgtgcagatggtgtggctgaatgcccagtttgatgggaataacgaaaccataaagtggttcgacggcactccaacggaccagagcaactggggcattcggaaacctgacacagactacttcaagccgcaccattgcgtagccttacgcatccctgagggactctggcagctgagcccctgccaagagaagaaggggtttatttgcaaaatggaggctgatatacacactgccgaagccctcccggaaaagggcccgagccattcgatcattcctttagcagtggtgctaacccttatcgtgattgttgcaatctgcactctatctttttgtatatacaagcacaacgggggtttttttaggaggttggcaggattccgcaacccctactatcccgccacaaatttcagtactgtctatttggaggagaacatccttatctccgacctggaaaagagcgaccagtag

SEQ ID NO: 172197 - DNA, 4392 bp, Artificial Sequence
  derived and/or modified sequence
atgctgctgagccccagcctgctgctgctgctgctgctgggcgccccccggggctgtgccgagggcgtggccgccgccctgaccccagagcggctgctggagtggcaggacaagggcatctttgtgatccagagcgagagcctgaagaagtgcatccaggccggcaagtctgtgctgaccctggagaactgcaagcaggccaacaagcacatgctgtggaagtgggtgagcaaccacggcctcttcaacatcggcggcagcggctgcctgggcctgaacttcagcgcccctgagcagcccctgagcctgtatgaatgtgacagcaccctggtgtccctgcgctggcgctgcaacaggaagatgatcaccggccccctgcagtacagcgtgcaggtggcccatgacaacacagtggtggccagcaggaagtacatccacaagtggatctcctatggcagcggcggcggggacatctgtgagtacctgcacaaggacctgcacaccatcaagggcaacacccacggcatgccctgcatgttccccttccagtacaaccaccagtggcaccatgaatgtacccgggagggccgggaggatgacctgctgtggtgtgccaccaccagccgctatgaaagagatgagaagtggggcttctgcccagaccccaccagcgctgaggtgggctgtgacaccatctgggagaaggacctgaacagccacatctgctaccagttcaacctgctgagcagcctgtcctggagcgaggcccacagcagctgccagatgcagggcggcaccctgctgagcatcacagatgaaacagaggagaacttcatccgggagcacatgagcagcaagacagtggaggtgtggatgggcctgaaccagctggatgagcacgccggctggcagtggagcgatggcacccccctgaactacctgaactggagccctgaggtgaactttgagccctttgtggaggaccactgcggcaccttcagcagcttcatgcccagcgcctggaggagccgggactgtgagagcaccctgccctacatctgcaagaagtacctgaaccacatcgaccatgaaattgtggagaaggatgcctggaagtactatgccacccactgtgagcccggctggaacccctacaacagaaactgctacaagctgcagaaggaggagaagacctggcatgaggccctgcggagctgccaggccgacaacagcgccctgattgacatcaccagcctggccgaggtggagttcctggtgaccctgctgggagatgaaaatgccagcgagacctggattggcctgagcagcaacaagatccctgtgtcctttgagtggagcaatgacagcagcgtcatcttcaccaactggcacaccctggagccccacatcttccccaacagaagccagctgtgtgtgtctgctgagcagagcgagggccactggaaggtgaagaactgtgaggagcggctcttctacatctgcaagaaggccggccacgtgctgagtgatgctgagagcggctgccaggagggctgggagcggcacggcggcttctgctacaagattgacacagtgctgcggagctttgaccaggccagcagcggctactactgccccccagccctggtgaccatcaccaacagatttgagcaggccttcatcaccagcctcatcagctctgtggtgaagatgaaggacagctacttctggatcgccctgcaggaccagaatgacaccggggagtacacctggaagcctgtgggccagaagccagagcctgtgcagtacacccactggaacacccaccagccccgctacagcggcggctgtgtggccatgaggggccgccaccccctgggccgctgggaggtgaagcactgccgccacttcaaggccatgagcctgtgcaagcagcctgtggagaaccaggagaaggccgagtatgaggagcgctggcccttccacccctgctacctggactgggagagcgagcccggcctggccagctgcttcaaggtgttccacagcgagaaggtgctgatgaagaggacctggagggaggccgaggccttctgtgaggagtttggagcccacctggccagctttgcccacatcgaggaggagaactttgtgaatgagctgctgcacagcaagttcaactggacagaggagcggcagttctggattggcttcaacaagaggaaccccctgaatgccggctcctgggagtggagcgacaggacccctgtggtgagcagcttcctggacaacacctactttggagaagatgccaggaactgtgctgtgtacaaggccaacaagaccctgctgcccctgcactgcggcagcaagcgggagtggatctgcaagatccccagagatgtgaagcccaagatccccttctggtaccagtatgatgtgccctggctgttctaccaggatgctgagtacctgttccacacctttgccagcgagtggctgaactttgaatttgtgtgctcctggctgcacagcgacctgctgaccatccacagcgcccacgagcaggagttcatccacagcaagatcaaggccctgagcaaatatggagcctcctggtggattggcctgcaggaggagcgggccaatgatgagttccgctggagagatggcacccctgtgatctaccagaactgggacaccggccgggagaggacagtgaacaaccagagccagagatgtggcttcatcagcagcatcaccggcctgtggggcagcgaggagtgcagcgtgtccatgcccagcatctgcaagaggaagaaggtgtggctgattgagaagaagaaggacacccccaagcagcacggcacctgccccaagggctggctgtacttcaactacaagtgcctgctgctgaacatccccaaggaccccagctcctggaagaactggacccacgcccagcacttctgtgccgaggagggcggcaccctggtggccattgaaagtgaggtggagcaggccttcatcaccatgaacctgtttggccagaccacctctgtgtggattggcctgcagaatgatgattatgagacctggctgaatggcaagcctgtggtgtacagcaactggagcccctttgacatcatcaacatccccagccacaacaccacagaggtgcagaagcacatccccctgtgtgccctgctgagcagcaaccccaacttccacttcaccgggaagtggtactttgaggactgtgggaaggagggctacggctttgtgtgtgagaagatgcaggacaccagcggccatggagtgaacaccagtgacatgtaccccatgcccaacaccctggagtatggcaacagaacctacaagatcatcaatgccaacatgacctggtatgctgccatcaagacctgcctgatgcacaaggcccagctggtgtccatcacagaccagtaccaccagagcttcctgactgtggtgctgaaccggctgggctacgcccactggattggcctcttcaccacagacaatggcctgaactttgactggagcgatggcaccaagagcagcttcaccttctggaaggatgaggagagcagcctgctgggggactgtgtgtttgctgacagcaatggccgctggcacagcacagcctgtgagagcttcctgcagggcgccatctgccacgtgcccccagagacccggcagagcgagcaccctgagctgtgcagcgagaccagcatcccctggatcaagttcaagagcaactgctacagcttcagcacagtgctggacagcatgagctttgaagctgcccacgagttctgcaagaaggagggcagcaacctgctgaccatcaaggatgaagcagaaaatgccttcctgctggaggagctgtttgccttcggcagctctgtgcagatggtgtggctgaatgcccagtttgatggcaacaatgagaccatcaagtggtttgatggcacccccacagaccagagcaactggggcatcaggaagccagacacagactacttcaagccccaccactgtgtggccctgcgcatccctgagggcctgtggcagctgagcccctgccaggagaagaagggcttcatctgcaagatggaggccgacatccacacagctgaggccctgcctgagaagggccccagccacagcatcatccccctggccgtggtgctgaccctcatcgtcatcgtggccatctgcaccctgtccttctgcatctacaagcacaacggcggcttcttccggcggctggccggcttcaggaacccctactacccagccaccaacttcagcacagtgtacctggaggagaacatcctgatcagtgacctggagaagagtgaccagtag

SEQ ID NO: 172198 - DNA, 4392 bp, Artificial Sequence
  derived and/or modified sequence
atgctgctgagccccagcctgctgctgctgctgctgctgggcgcccccagaggatgcgcagagggagtggcggccgctttaacacctgaaaggctgttagagtggcaggacaaagggatcttcgtgatacagagtgaatcactgaagaagtgcattcaggcggggaaaagcgtattgactttggaaaactgtaagcaagccaataaacacatgctgtggaaatgggtgagtaaccatggattgttcaacattggaggttctggctgcctcggactgaatttttctgcccctgaacagccgctgtcactgtacgagtgtgatagcactctggtgtccctgagatggcggtgtaataggaagatgatcaccggacccctgcagtatagtgttcaggtggcccacgacaataccgtggtcgcaagccgaaagtatattcataagtggatttcatacggctcaggcggaggcgacatttgcgaatacctgcataaggatctgcataccatcaaggggaatacacacggaatgccttgcatgttcccatttcagtataatcatcagtggcaccacgagtgcacaagagagggtcgtgaagacgacctcctttggtgtgcgacgaccagtaggtatgaaagagacgagaagtgggggttctgtcccgatcccacctcagccgaggtaggatgcgacacaatctgggaaaaagacttgaactcccacatctgttaccagtttaacttactctcatcactttcttggtctgaagcccacagtagctgtcagatgcaaggcgggaccctgctcagcatcacagatgaaactgaagagaacttcatccgagagcatatgagcagcaaaaccgttgaagtatggatgggtctaaaccagttggatgaacatgccggctggcagtggtcggacggtacaccgctgaactatctgaactggtcacctgaagtgaactttgagccattcgtcgaggaccactgtgggaccttctccagctttatgccctcagcgtggcgaagccgtgattgcgaatccactctcccatatatatgtaaaaagtatttaaatcatattgaccacgaaatcgtagagaaagatgcctggaagtactacgctacgcattgcgagccaggctggaatccttacaacaggaactgttacaagctgcaaaaggaagaaaaaacctggcacgaagctctgcggtcgtgccaggctgacaactctgcccttattgatatcactagccttgccgaggtcgagttcctggtcacactgcttggagatgagaatgcttcagaaacctggattggactgtcatctaataaaattcctgtaagcttcgagtggtctaacgatagttcagttatcttcaccaactggcataccctggagccacatatattccctaatcgcagccaactgtgcgtcagtgctgagcagagcgagggacattggaaagtgaagaactgtgaagagagattgttttacatttgtaaaaaagcgggtcacgttctctcagacgctgagtcagggtgtcaggaagggtgggaacggcacgggggcttttgttacaagatcgacacagtgctcagatctttcgatcaagcatccagcggatattattgtcctccggctctggtaacgataacgaatagattcgagcaagcgtttattaccagcctgatctcgtccgttgtgaaaatgaaggactcctacttctggatcgcactacaagatcagaacgacaccggggagtatacatggaaaccagtcggacagaagcccgagccagtccagtacacccattggaatactcatcagccgagatatagtggaggctgtgtggcaatgcggggaagacatcctttgggccgatgggaggtcaagcactgccggcactttaaggccatgagcctgtgtaaacagccagtggagaaccaagagaaagccgagtacgaggaaagatggccttttcacccctgttacttggactgggaatctgagcctggcctggcctcctgttttaaggtcttccactccgaaaaggtgctgatgaaacggacttggcgggaagccgaagcgttctgcgaggaattcggtgcccatctcgccagctttgcacatattgaagaggaaaacttcgttaatgagttactccacagtaagttcaattggacagaggaacgacaattctggatcggattcaacaaacgtaacccgctaaatgccggatcctgggagtggagtgaccgaacacccgtcgtcagttccttcctggataacacctatttcggtgaggacgcccgcaattgtgccgtatataaagcaaacaagacactgctgcccctacactgtggctctaagagggagtggatctgcaaaataccccgggacgtgaaaccaaagattccattctggtatcagtatgatgtaccctggctgttttatcaggatgcggaatatttgtttcacaccttcgcctctgagtggctcaactttgaattcgtttgctcttggctccacagtgacctcctaacaatccacagtgcccacgagcaggaatttatccattcaaaaataaaggcccttagtaaatacggggcctcctggtggatcggactacaggaagagagagccaacgacgaattccgctggcgcgatggtacaccagtgatttatcaaaattgggacactggacgggagcgaacagtgaataaccagagtcaaagatgtggcttcataagctcgatcacagggctgtggggctcagaggaatgctccgtgagcatgcctagcatctgcaaacggaagaaagtatggctgatcgagaagaagaaggacaccccaaagcagcacggaacttgccccaagggatggctatacttcaattataaatgccttcttcttaacattccaaaagaccccagttcctggaaaaattggactcatgctcagcacttctgcgctgaggagggcggtacattagttgccatcgagtccgaagtggagcaggccttcattactatgaatctcttcggacagaccacaagcgtttggattgggctgcaaaacgatgactacgaaacttggttgaatggtaagcctgtggtgtattcgaactggtctccattcgatataatcaacatccctagtcacaatacaactgaggtgcagaaacacatcccactgtgcgctcttctgagcagtaatcctaactttcatttcaccggaaaatggtatttcgaggactgcgggaaagaaggctatggattcgtttgcgagaagatgcaggacacgtcaggccacggggttaacacctctgacatgtatcccatgcccaacaccctggagtacgggaatcgcacttataagataatcaacgcgaacatgacttggtatgcggccattaagacttgtcttatgcacaaagcccagttggttagcattacagatcaataccaccaaagcttccttacagtggtgctgaaccggctgggatatgctcactggatcggcctgtttacaaccgacaacggccttaattttgactggtcggacggaaccaagagctcttttaccttctggaaggacgaagagtcctcactgctgggagattgcgtttttgccgattccaacggccgttggcactctacagcctgcgagtctttcctacagggggcaatttgccacgtgcccccagaaacccggcagtcagaacaccctgagctgtgcagtgagacgtccatcccatggattaagttcaaatctaattgctactctttctcaacagtgctggattcaatgtcctttgaagctgcccacgaattctgtaagaaagaggggagcaatctgcttaccattaaggatgaggccgagaatgccttcctcttagaagagttgtttgcctttggtagttccgttcaaatggtttggctgaacgcccaattcgacggcaacaatgaaaccattaagtggtttgatggtaccccaaccgatcaatcaaactggggcatccggaaaccagacaccgattacttcaagccccaccattgcgtggcgctgcgcatacccgagggactctggcagctctctccctgccaagagaagaaaggctttatctgtaaaatggaagccgacattcataccgctgaagcgttacctgagaaaggccctagccattccattatccccctcgccgtagtcctcaccttgatagtcatagtcgctatttgtactttaagcttttgtatttacaaacataacggtgggtttttcagaaggctcgcagggtttaggaacccatactatcccgcaactaacttctcgaccgtgtaccttgaagagaacattctaatcagtgatcttgagaaatccgaccagtag

SEQ ID NO: 172199 - DNA, 8526 bp, Artificial Sequence
  derived and/or modified sequence
cccgagtgtcggttcactgtggagacagcggtggcggagtgggtctccagggctctgggctggcaaggcccccggagggggtggggcgcggaggaggctacggatccgcttccgcgcggcggggccgggtgcttgggacgcggctctgggctcccgggataaggggctcccgggacaaggggctcccggagagcccagtggttagcgatgctgctgtcgccgtcgctgctgctgctgctgctgctgggggcgccgcggggctgcgccgagggtgtggcggcggcgcttacccccgagcggctcctggagtggcaggataaaggaatatttgttatccaaagtgagagtctcaagaaatgcattcaagcaggtaaatcggttctgaccctggagaactgcaagcaagcaaacaagcacatgctgtggaaatgggtttcaaaccatggcctctttaacataggaggcagtggttgcctgggcctgaatttctccgccccagagcagccattaagcttatatgaatgtgactccaccctcgtttccttacggtggcgctgtaacaggaagatgatcacaggcccgctgcagtactctgtccaggtggcgcatgacaacacagtggtggcctcacggaagtatattcataagtggatttcttatgggtcaggtggtggagacatttgtgaatatctacacaaagatttgcatacaatcaaagggaacacccacgggatgccgtgtatgtttcccttccagtataaccatcagtggcatcatgaatgtacccgtgaaggtcgggaagatgacttactgtggtgtgccacgacaagccgttatgaaagagatgaaaagtggggattttgccctgatcccacctctgcagaagtaggttgtgatactatttgggagaaggacctcaattcacacatttgctaccagttcaacctgctttcatctctctcttggagtgaggcacattcttcatgccagatgcaaggaggtacgctgttaagtattacagatgaaactgaagaaaatttcataagggagcacatgagcagtaaaacagtggaggtgtggatgggcctcaatcagctggatgaacacgctggctggcagtggtctgatggaacgccgctcaactatctgaattggagcccagaggtaaattttgagccatttgttgaagatcactgtggaacatttagttcatttatgccaagtgcctggaggagtcgggattgtgagtccaccttgccatatatatgtaaaaaatatctaaaccacattgatcatgaaatagttgaaaaagatgcgtggaaatattatgctacccactgtgagcctggctggaatccctacaatcgtaattgctacaaacttcagaaagaagaaaagacctggcatgaggctctgcgttcttgtcaggctgataacagtgcattaatagacataacctcattagcagaggtggagtttcttgtaaccctccttggagatgaaaatgcatcagaaacatggattggtttgagcagcaataaaattccagtttcctttgaatggtctaatgactcttcagtcatctttactaattggcacacacttgagccccacatttttccaaatagaagccagctgtgtgtctcagcagagcagtctgagggacactggaaagtcaaaaattgtgaagaaagacttttttacatttgtaaaaaagcaggccatgtcctctctgatgctgaatcaggatgtcaagagggatgggagagacatggtggattctgttacaaaattgacacagtccttcgaagctttgaccaagcttccagcggttattactgtcctcctgcacttgtaaccattacaaacaggtttgaacaggcttttattaccagtttgatcagtagtgtggtaaaaatgaaggacagttatttttggatagctcttcaggaccaaaatgatacgggagaatacacttggaagccagtagggcagaaacccgagccggtgcagtacacacactggaacacacaccagccgcgctacagtggtggctgtgttgccatgcgaggaaggcatccacttggtcgctgggaagtgaagcactgtcggcactttaaggcaatgtccttgtgcaagcagccagttgaaaatcaggaaaaagcagagtatgaagagagatggccctttcacccctgctatttggactgggagtcagagcctggtctggccagttgcttcaaggtatttcatagtgaaaaagttctgatgaaaagaacatggagagaagctgaagcattttgcgaagaatttggagctcatcttgcaagctttgcccatattgaggaagagaattttgtgaatgagctcttacattcaaaatttaattggacagaagaaaggcagttctggattggatttaataaaagaaacccactgaatgccggctcatgggagtggtctgatagaactcctgttgtctcttcgtttttagacaacacttattttggagaagatgcaagaaactgtgctgtttataaggcaaacaaaacattgctgcccttacactgtggttccaaacgtgaatggatatgcaaaatcccaagagatgtgaaacccaagattccgttctggtaccagtacgatgtaccctggctcttttatcaggatgcagaatacctttttcatacctttgcctcagaatggttgaactttgagtttgtctgtagctggctgcacagtgatcttctcacaattcattctgcacatgagcaagaattcatccacagcaaaataaaagcgctatcaaagtatggtgcaagttggtggattggacttcaagaagaaagagccaatgatgaatttcgctggagagatggaacaccagtgatataccagaactgggacacaggaagagaaagaactgtgaataatcagagccagagatgtggctttatttcttctataacaggactctggggtagtgaagagtgttcagtttctatgcctagtatctgtaagcgaaaaaaggtttggctcatagagaaaaagaaagatacaccaaaacaacatggaacgtgtcccaaaggatggctatattttaactataagtgccttctgctgaatatccccaaagacccaagcagttggaagaactggacgcatgctcaacatttctgtgctgaagaaggggggaccctggtcgccattgaaagtgaggtggagcaagctttcattactatgaatctttttggccagaccaccagtgtgtggataggtttacaaaatgatgattatgaaacatggctaaatggaaagcctgtggtatattctaactggtctccatttgatataataaatattccaagtcacaataccactgaagttcagaaacacattcctctctgtgccttactctcaagtaatcctaattttcatttcactggaaaatggtattttgaagactgtggaaaggaaggctatgggtttgtttgtgaaaaaatgcaagatacttctggacacggtgtaaatacatctgatatgtatccaatgcccaataccttagaatatggaaacagaacttacaaaataattaatgcaaatatgacttggtatgcagcaataaaaacctgcctgatgcacaaagcacaactggtcagcatcacagaccagtatcaccagtccttcctcactgttgtcctcaaccggctaggatatgcccactggattggactgttcaccacagataatggtcttaattttgactggtctgatggcaccaaatcttctttcactttttggaaagatgaggagtcctccctccttggtgactgcgtttttgccgacagcaacggacgctggcatagcacagcctgcgagtcatttctgcaaggtgccatttgtcatgtgccacctgaaacaagacaatctgaacacccagagttgtgctcagaaacatctattccctggataaaatttaaaagtaattgctacagtttttctacagtcctagacagtatgagttttgaggctgctcatgaattttgcaaaaaggaaggttctaatcttttaacaatcaaggatgaggctgaaaatgcatttctcctagaagagctgtttgcttttggttcttctgtccagatggtttggttgaatgctcaatttgatggtaacaatgaaaccataaagtggtttgatggaactcccacagaccagtcaaactggggcattcggaagccagacacagactacttcaagccccatcattgtgttgccttgaggatccctgaaggattatggcagctatccccgtgtcaagaaaaaaaaggctttatatgtaaaatggaggcagatattcacactgcagaggcgctgccagaaaaaggaccaagtcacagcatcattcctcttgcggttgtactgacactgatagtcattgtggccatttgcacactttccttctgcatatacaagcataacggtggcttcttcaggagacttgcagggtttcggaatccttactatcctgcaaccaactttagtacagtatatttagaagaaaatattctcatttctgatcttgagaagagtgaccaataataatgaggtcagagaatgccacagacaccagggtaagtaaagaagactaaacaggagtctcatctgtctttccctttacagcacagatgccattagaatgtgaattgggtcactattttaattattcttgaagtgattactggttttgaatcttaaccaaatcagatgggttttgatttattcatttccctaaactgtgatccattcttaaaaggggtaaattatgcattggttatttttcagaaagacaagaactattaaaagaaactccctattgaaaactctgaaatcaatgcgaataatagtttttgcattaatgtatctctactaaaatttgggggaattttaaaactaatctggtatctattcagacatttacctgcactcgtaccattaagaaagacagaaagaagcaaaaaaaaattaatcttgtatatgagaggaaaaggaaagggcttctgagaggattcttagttgtttcttttgaattcacttttaatagcaggatttggaaaatactaatttctgtgcttaagggtcacaggttctgggctctcaactgatatttaaggtgacattcatttttattaggtctaacatctcaagctaaaggagaaagaaaaataccttcttttaaatggcaaagaccttcattagcagcacacttttataaacaaccatatagttaaaatgtggccttaaactttcaattactaaatgatgattaagttggatattttaaaatgtcttatacataagcttaaagtaatatattgaaactttaacagttgtactgttaaaactcatggactttctgaaaaactaaatatataaaataatatgtaacactcttaataactggaagatataaaatgtaacttggatttaaaggagaagagctaaagatctgaattatagtctcattagaaccagacagatgttgttgagaagtactaaataaattagtaatctagatatctttattatgtaaatgagtttaggtgttctatttaataaactattttctgggaacgatctccttttatattagtctagttagtgtagatggtaaataatgattatgatactgtctgtaaataaaaaattacagattttattttcctttattagttccttataaagaaaacagcttcataatcaatatctaaaaatttactcattacataactgtttattgaattttatcaagaaaaaagtgtactgagcatggtggcacgcacctgtagtcccagctacttaggaggctgagggaagaggatcaactgagcccagaagttgaaggctgcagtgagctatggttgcaccactgcactcctgcctgggcaactgaatgagaccccacctcaaaaaagtgctgttctagaaacagaggtactaaggtgagcaacttggggtaagggctatcttttcatgccacttattttctaatgagggaaaattgacagtaactcagtaaagaaatgcatatgcataaaatagcaagtggttatgaaaatgaagtaaggttccatgatagagagaaactgggggactctcagggcctccctgagagtgtgcattttaattattacaaccaactgcctcaaaaccagtggccactaatcacaagggggagctctgagagaaagtatgaatgaatttctaagaggcaaaccatcatcattagaaatacaatttgaagagcataccactaagaatggaatccttgtggcctgcaacagttaatccagcttccaaaagcagctctttgctactgttataataatttacacactgggacagtctacctccataatttttttaagtattgggacttcattttttaaaagatattatattatgtggcagttgcatatttatgactcaaaaaataattggcttgaactcaccagatggtataaaagcccaatttaaccatcttttgagtggaattaaagttctgttcttttcaatggacttggtaaaaactgctaatcaaccagccttccagtcaaggtatatagtcacacataataatttgacaaaatacaccattaggaaagtgattttgcagaaagaagctgtattgcttctcagtgctccatactttgatgtttagtattgaacaacatctccagataatctggacccatggacagatcacacacttcttgccattactgaatttgcagaaatagtactgaagtattctgctacatttttatatttgcattttttttgaaactttttttcattttttttttttttttttggagatggagtcttgctctgttgccaggcaggagtacagtggcatgatctcagctcactgcaaccttcaactgcctggttcgagcaagtttcctgcctcagcctcccgagtagctgtgattacaggcacatgccaccatgcccagctaatttttgtatttttagtagagacagggtttcaccatgttgtccaggatggtctcgatctcctgatctcgtgatccacccgccccagcctcccaaagtgctaagattacaggcatgagccaccgcacctggcctcatctgtatttttaatgtgaactagattttatagctataattcgaaaagaaaaaaaagtagcaggtaatgggtatattatacactatttgcgtgatggttacaccagactttaccactacatactgtatttatgtaacaaaattacacttgtactccttacatttatgccaaaaaagcggcaggatcacaaattcacacatagttaatgtgcccctccaacagtcaattatgttctatgactaacctgaggatctttatagaatctgagtaatggaaatgcctgggtttttccatttaacaatatattgggctcttacagttacaacagtcttctttcgggttaaatatttcttctcttgaagggtccactccttattaaagataagattgaactgaatgtttacttaaacgttcagtcttttggagtttctttactcttctcaaaatggtggttggatatataagaacttgctgtgtcctggtagtgttgaggggagaaggtgacaacttactgtggatgtatgttagctggtgtccactgagaatagctgtctggcctcactcctgggaattctgctggcatctgctgtgaagtctgcagttgctttaatctgtagtctgttctctttgatttggcctcattctggctgtccctggtgctgtcttatctcttgagaactggctgtgtctcctgttgaattccctatccgaacactgcagttcttggctacaaggcagtcacttcacccctgcagtggtgagatcccattagctaccattagctactcttttcgtccagaaaggcgaaatgccatagcaaacaatcccacagtcttggtggattaacacagcaaaggtttatttctcacccacacctgcatgggctggcaagaggactttgctctgttcagtcattcatgggtccatgcttctcctatatagccagccctctgtctcctaaggcctggagtcctccatgggcctccaatctgtggctgacagaggatgttgacttgagacccatctttgattcattatggagcttccacaggctgttgaaatcctctaagtcaaaagtcctcaaactggggacacatgcctaaggaatacaggagcatgggtatttaagaaacttaatttccagaatcttcatgtatattttttcttaaaactgatttacctgagagcacccctggttcttctttcccacctctctttacacaaatgcctttctctacctttaaaaagaaaaagaaaaagaaatggctttcatttcagatcttactatgggaaaatcctccatggctccaaagaaaaatattcgaagtattgatgtcagtgaagcttcttttaataaagaaattgtaaactca

SEQ ID NO: 172200 - DNA, 4392 bp, Artificial Sequence
  derived and/or modified sequence
atgctcctgtcgcccagcctgttgctgctgttgttgttaggagcacccaggggctgcgccgagggcgtcgctgcagcgctcactcctgagagacttctggaatggcaggacaaggggatctttgtcatacagagtgagtccctgaaaaagtgtatccaagccggaaagagtgtccttactttagaaaattgcaaacaggctaacaagcacatgttatggaaatgggtctccaatcacgggctgttcaacatcggaggctcaggatgcttaggcctgaacttctccgcaccggagcagccactgtccctgtacgagtgtgactctaccctggtttccctgagatggcgctgcaacaggaagatgatcactggaccgttacagtacagcgtgcaagtcgcgcatgacaatactgtggtggcatcgcgtaagtatatccataaatggatttcttacggcagtggcggaggcgacatttgtgaatatcttcataaggatctgcacactattaaagggaatacccatggaatgccttgcatgttccccttccagtataaccaccagtggcaccacgaatgcacaagggagggcagagaagatgacctgctttggtgcgccaccacctctcggtacgaaagagatgaaaagtggggattttgccccgatcccacaagtgcggaggtggggtgtgacacaatttgggagaaagacctgaactcccatatctgttaccagtttaacctgctatcctcactgtcctggtctgaggctcatagttcttgtcagatgcaaggaggcaccctcctgtcaatcacggacgagacagaggagaacttcatccgggaacacatgtcctccaagaccgtcgaggtctggatgggacttaatcagctggatgagcacgctggctggcagtggtctgatggaacacccttaaattacctgaactggtctcctgaagttaatttcgagccattcgtggaagatcactgtgggacattcagcagcttcatgccatctgcctggcgctcccgcgattgcgagagcacacttccctatatctgtaaaaaatatctcaaccatatcgatcacgagatagtggagaaggatgcctggaaatactacgccactcactgcgagccgggttggaacccttataaccgaaactgttacaagctgcagaaagaggagaaaacatggcacgaggccctgcgatcttgtcaggccgataattcagctctgatagacatcacaagtctggcagaggtcgaatttcttgtgactctcctgggagacgaaaacgcttcagaaacgtggatcggactctcatctaacaagattcccgtaagttttgaatggtctaatgattcttccgtgatattcacaaactggcataccctcgagcctcacattttcccgaaccggtcccagctatgcgtatcggcggaacagagtgaaggacactggaaagttaagaattgtgaggaacgcctgttttatatttgcaaaaaagccggtcacgtcctgtcagacgcagagtccggatgccaggaaggctgggaacggcacggcggattctgctacaagatcgataccgtccttaggtcttttgatcaggccagttctggttattattgtcctcccgcattggtgactatcaccaacagattcgaacaggcttttatcacttcactcatcagtagtgtcgtcaagatgaaggattcctatttttggattgctctgcaggatcagaatgataccggagaatacacatggaaacccgtggggcaaaagcctgagcccgtacaatatacccactggaacactcaccagcccagatactctgggggatgcgtggccatgaggggaagacatcctctgggacggtgggaagtaaagcactgcagacatttcaaagcgatgtcactctgcaagcagcctgttgaaaatcaggaaaaagctgagtacgaggagagatggcctttccacccttgttacttggattgggaaagcgaacccggactggcctcctgcttcaaggtgtttcacagtgagaaggtacttatgaaaagaacctggagggaggcggaagccttctgcgaagaattcggagcccacttggcatcttttgctcacattgaggaagaaaattttgttaacgaacttctgcattctaagttcaactggaccgaggaacgtcagttctggatcggatttaataagcgtaaccccctcaatgctgggtcctgggagtggagtgacaggacccccgtggtatccagctttctcgacaatacctatttcggcgaggacgccaggaattgcgccgtctacaaggcgaacaaaactttactgcctttgcactgcggatctaaaagggagtggatttgtaagataccccgagacgtcaagccgaagatccccttctggtaccagtacgatgtgccctggctgttttaccaggacgccgaatatttgtttcacacatttgcttccgagtggctcaactttgagtttgtttgctcctggctccatagcgacctgctaactatccattccgctcatgaacaagaattcatacatagcaaaatcaaagccctgtccaaatatggagcctcttggtggatagggctgcaggaggagagggccaatgatgaatttagatggcgagatgggacacctgtgatatatcaaaattgggatacggggcgagagcgcacagtgaacaaccaaagccagaggtgcggttttatctcctccatcactggtctgtggggcagcgaggaatgttctgtgagtatgcccagcatttgtaagaggaagaaggtgtggcttatcgaaaagaagaaggatacccctaaacagcatggaacctgccctaaaggttggctctacttcaattacaagtgcttactgctgaatataccaaaggatccctctagctggaaaaattggacccatgcacagcatttctgcgcagaggaggggggaacactggtggctatcgaatcagaggtggagcaggccttcataaccatgaacctgttcggccaaaccactagtgtctggatcggcttacagaatgatgattacgagacttggctgaacgggaagcccgtagtttattctaactggagcccctttgacatcattaacatcccatctcacaataccaccgaggttcagaagcacattcccctgtgcgccctattgtcatcgaaccccaacttccactttaccggcaaatggtactttgaagattgtgggaaggaaggatatgggtttgtgtgcgaaaaaatgcaggacacctcaggccacggagtgaacaccagcgatatgtatccgatgccaaacaccctcgagtatggtaaccgcacttacaagattataaacgctaatatgacttggtacgctgcgattaagacctgtctaatgcataaggcacaactggtctccatcaccgaccagtaccaccagtcttttttgaccgtggtgcttaataggctgggatacgctcactggattggcctgtttacaacagacaatggcctcaattttgactggtccgatggaaccaagtccagctttacgttttggaaagacgaggagagtagccttctaggggactgcgtgtttgcggactcgaacggtagatggcacagcacggcttgtgaatcattcctacagggagcaatttgccatgtcccacccgagaccagacagtcagaacaccccgaactctgctctgaaacttcaatcccctggattaaatttaaatctaactgctattcattcagtaccgtgctggactctatgtcattcgaggctgcacacgagttttgcaaaaaagagggtagtaatctgcttacaataaaagacgaagccgagaacgcgttcctcctcgaggaactgtttgcctttgggagttctgttcagatggtgtggcttaacgcgcagtttgacggaaataatgagacgatcaaatggttcgacggcacccctaccgaccagtcaaattgggggattcgaaagcccgacactgactatttcaagccccatcactgtgtggctctgcgcattccagaagggctttggcagttatccccgtgccaggaaaagaaaggcttcatttgcaagatggaagcggacatccataccgctgaagcgctacccgaaaagggtcccagtcactccataattcccctggctgtggtactcacattaatcgtgatcgtagcgatatgcacgctgagcttttgcatctacaaacataatgggggattcttccggagactggcaggtttccggaatccgtattatcccgcaactaatttctcaaccgtctatctggaagaaaacatcctcattagcgacctggagaagagtgaccagtag

SEQ ID NO: 172201 - DNA, 4392 bp, Artificial Sequence
  derived and/or modified sequence
atgctgctgagccccagcctgctgctgctgctgctgctgggcgcccccagaggctgcgccgagggcgtggccgccgccctgacccccgagagactgctggagtggcaggacaagggcatcttcgtgatccagagcgagagcctgaagaagtgcatccaggccggcaagagcgtgctgaccctggagaactgcaagcaggccaacaagcacatgctgtggaagtgggtgagcaaccacggcctgttcaacatcggcggcagcggctgcctgggcctgaacttcagcgcccccgagcagcccctgagcctgtacgagtgcgacagcaccctggtgagcctgagatggagatgcaacagaaagatgatcaccggccccctgcagtacagcgtgcaggtggcccacgacaacaccgtggtggccagcagaaagtacatccacaagtggatcagctacggcagcggcggcggcgacatctgcgagtacctgcacaaggacctgcacaccatcaagggcaacacccacggcatgccctgcatgttccccttccagtacaaccaccagtggcaccacgagtgcaccagagagggcagagaggacgacctgctgtggtgcgccaccaccagcagatacgagagagacgagaagtggggcttctgccccgaccccaccagcgccgaggtgggctgcgacaccatctgggagaaggacctgaacagccacatctgctaccagttcaacctgctgagcagcctgagctggagcgaggcccacagcagctgccagatgcagggcggcaccctgctgagcatcaccgacgagaccgaggagaacttcatcagagagcacatgagcagcaagaccgtggaggtgtggatgggcctgaaccagctggacgagcacgccggctggcagtggagcgacggcacccccctgaactacctgaactggagccccgaggtgaacttcgagcccttcgtggaggaccactgcggcaccttcagcagcttcatgcccagcgcctggagaagcagagactgcgagagcaccctgccctacatctgcaagaagtacctgaaccacatcgaccacgagatcgtggagaaggacgcctggaagtactacgccacccactgcgagcccggctggaacccctacaacagaaactgctacaagctgcagaaggaggagaagacctggcacgaggccctgagaagctgccaggccgacaacagcgccctgatcgacatcaccagcctggccgaggtggagttcctggtgaccctgctgggcgacgagaacgccagcgagacctggatcggcctgagcagcaacaagatccccgtgagcttcgagtggagcaacgacagcagcgtgatcttcaccaactggcacaccctggagccccacatcttccccaacagaagccagctgtgcgtgagcgccgagcagagcgagggccactggaaggtgaagaactgcgaggagagactgttctacatctgcaagaaggccggccacgtgctgagcgacgccgagagcggctgccaggagggctgggagagacacggcggcttctgctacaagatcgacaccgtgctgagaagcttcgaccaggccagcagcggctactactgcccccccgccctggtgaccatcaccaacagattcgagcaggccttcatcaccagcctgatcagcagcgtggtgaagatgaaggacagctacttctggatcgccctgcaggaccagaacgacaccggcgagtacacctggaagcccgtgggccagaagcccgagcccgtgcagtacacccactggaacacccaccagcccagatacagcggcggctgcgtggccatgagaggcagacaccccctgggcagatgggaggtgaagcactgcagacacttcaaggccatgagcctgtgcaagcagcccgtggagaaccaggagaaggccgagtacgaggagagatggcccttccacccctgctacctggactgggagagcgagcccggcctggccagctgcttcaaggtgttccacagcgagaaggtgctgatgaagagaacctggagagaggccgaggccttctgcgaggagttcggcgcccacctggccagcttcgcccacatcgaggaggagaacttcgtgaacgagctgctgcacagcaagttcaactggaccgaggagagacagttctggatcggcttcaacaagagaaaccccctgaacgccggcagctgggagtggagcgacagaacccccgtggtgagcagcttcctggacaacacctacttcggcgaggacgccagaaactgcgccgtgtacaaggccaacaagaccctgctgcccctgcactgcggcagcaagagagagtggatctgcaagatccccagagacgtgaagcccaagatccccttctggtaccagtacgacgtgccctggctgttctaccaggacgccgagtacctgttccacaccttcgccagcgagtggctgaacttcgagttcgtgtgcagctggctgcacagcgacctgctgaccatccacagcgcccacgagcaggagttcatccacagcaagatcaaggccctgagcaagtacggcgccagctggtggatcggcctgcaggaggagagagccaacgacgagttcagatggagagacggcacccccgtgatctaccagaactgggacaccggcagagagagaaccgtgaacaaccagagccagagatgcggcttcatcagcagcatcaccggcctgtggggcagcgaggagtgcagcgtgagcatgcccagcatctgcaagagaaagaaggtgtggctgatcgagaagaagaaggacacccccaagcagcacggcacctgccccaagggctggctgtacttcaactacaagtgcctgctgctgaacatccccaaggaccccagcagctggaagaactggacccacgcccagcacttctgcgccgaggagggcggcaccctggtggccatcgagagcgaggtggagcaggccttcatcaccatgaacctgttcggccagaccaccagcgtgtggatcggcctgcagaacgacgactacgagacctggctgaacggcaagcccgtggtgtacagcaactggagccccttcgacatcatcaacatccccagccacaacaccaccgaggtgcagaagcacatccccctgtgcgccctgctgagcagcaaccccaacttccacttcaccggcaagtggtacttcgaggactgcggcaaggagggctacggcttcgtgtgcgagaagatgcaggacaccagcggccacggcgtgaacaccagcgacatgtaccccatgcccaacaccctggagtacggcaacagaacctacaagatcatcaacgccaacatgacctggtacgccgccatcaagacctgcctgatgcacaaggcccagctggtgagcatcaccgaccagtaccaccagagcttcctgaccgtggtgctgaacagactgggctacgcccactggatcggcctgttcaccaccgacaacggcctgaacttcgactggagcgacggcaccaagagcagcttcaccttctggaaggacgaggagagcagcctgctgggcgactgcgtgttcgccgacagcaacggcagatggcacagcaccgcctgcgagagcttcctgcagggcgccatctgccacgtgccccccgagaccagacagagcgagcaccccgagctgtgcagcgagaccagcatcccctggatcaagttcaagagcaactgctacagcttcagcaccgtgctggacagcatgagcttcgaggccgcccacgagttctgcaagaaggagggcagcaacctgctgaccatcaaggacgaggccgagaacgccttcctgctggaggagctgttcgccttcggcagcagcgtgcagatggtgtggctgaacgcccagttcgacggcaacaacgagaccatcaagtggttcgacggcacccccaccgaccagagcaactggggcatcagaaagcccgacaccgactacttcaagccccaccactgcgtggccctgagaatccccgagggcctgtggcagctgagcccctgccaggagaagaagggcttcatctgcaagatggaggccgacatccacaccgccgaggccctgcccgagaagggccccagccacagcatcatccccctggccgtggtgctgaccctgatcgtgatcgtggccatctgcaccctgagcttctgcatctacaagcacaacggcggcttcttcagaagactggccggcttcagaaacccctactaccccgccaccaacttcagcaccgtgtacctggaggagaacatcctgatcagcgacctggagaagagcgaccagtag

SEQ ID NO: 172202 - protein, 237 aa, Artificial Sequence
  derived and/or modified sequence
MSLKLQASNVTNKNDPKSINSRVFIGNLNTALVKKSDVETIFSKYGRVAGCSVHKGYAFVQYSNERHARAAVLGENGRVLAGQTLDINMAGEPKPDRPKGLKRAASAIYRLFDYRGRLSPVPVPRAVPVKRPRVTVPLVRRVKTNVPVKLFARSTAVTTSSAKIKLKSSELQAIKTELTQIKSNIDALLSRLEQIAAEQKANPDGKKKGDGGGAGGGGGGGGSGGGGSGGGGGGGSS

SEQ ID NO: 172203 - protein, 89 aa, Artificial Sequence
  derived and/or modified sequence
MSLKLQASNVTNKNDPKSINSRVFIGNLNTALVKKSDVETIFSKYGRVAGCSVHKGYAFVQYSNERHARAAVLGENGRVLAGQTLDINM

SEQ ID NO: 172204 - protein, 290 aa, Artificial Sequence
  derived and/or modified sequence
MSLKLQASNVTNKNDPKSINSRVFIGNLNTALVKKSDVETIFSKYGRVAGCSVHKGYAFVQYSNERHARAAVLGENGRVLAGQTLDINMAGEPKPDRPKGLKRAASAIYRLFDYRGRLSPVPVPRAVPVKRPRVTVPLVRRVKTNVPVKLFARSTAVTTSSAKIKLKSSELQAIKTELTQIKSNIDALLSRLEQIAAEQKANPDGKKKGDGGGAGGGGGGGGSGGGGSGGGGGGGSSRPPAPQENTTSEAGLPQGEARTRDDGDEEGLLTHSEEELEHSQDTDADDGALQ

SEQ ID NO: 172205 - DNA, 871 bp, Artificial Sequence
  derived and/or modified sequence
gcaactttcattccctctgaaataaaacagtgcttaggccagtacctagtctgtttccaactgtgcggtgagccctattcccagaggcaggtggtgctgaccctgtaacccaaaggaggaaacagctggctaagctcatcattgttactggtgggcaccatgtccttgaagcttcaggcaagcaatgtaaccaacaagaatgaccccaagtccatcaactctcgagtcttcattggaaacctcaacacagctctggtgaagaaatcagatgtggagaccatcttctctaagtatggccgtgtggccggctgttctgtgcacaagggctatgcctttgttcagtactccaatgagcgccatgcccgggcagctgtgctgggagagaatgggcgggtgctggccgggcagaccctggacatcaacatggctggagagcctaagcctgacagacccaaggggctaaagagagcagcatctgccatatacaggctcttcgactaccggggccgtctgtcgcccgtgccagtgcccagggcggtccctgtgaagcgaccccgggtcacagtccctttggtccggcgtgtcaaaactaacgtacctgtcaagctctttgcccgctccacagctgtcaccaccagctcagccaagatcaagttaaagagcagtgagctgcaggccatcaagacggagctgacacagatcaagtccaatatcgatgccctgctgagccgcttggagcagatcgctgcggagcaaaaggccaatccagatggcaagaagaagggtgatggaggtggcgccggcggcggcggcggtggtggtggcagcggtggcggtggcagtggtggtggcggtggcggtggcagcagcc

SEQ ID NO: 172206 - DNA, 766 bp, Artificial Sequence
  derived and/or modified sequence
gcggcgggcggagccgagctgcggggagccgctccgggtgcccccacccccgcgcgcctcagtggtgccggccgagggcagggctcgcggttgcggggctcgcgccgctgtcagtgcggcggggcgcgcgagcggcgccagctcggggcagcggaacccagagaagctgagggggcggtagcggcggcgacggcgacgacgacgactcccgcgcgtgtgcccagcctcttcccgccgcagccgcccttttcctccctcccttacgtccccgagtgcggcagtaccgcctccttcccagccgcgcggcttcctccagacctctcggcgcgggtgagccctattcccagaggcaggtggtgctgaccctgtaacccaaaggaggaaacagctggctaagctcatcattgttactgtcttcatttccctatttgtaaagttggagtgcctccctgtcccctcacgtctcatgtgtgtactcctaccatgcaggtgggcaccatgtccttgaagcttcaggcaagcaatgtaaccaacaagaatgaccccaagtccatcaactctcgagtcttcattggaaacctcaacacagctctggtgaagaaatcagatgtggagaccatcttctctaagtatggccgtgtggccggctgttctgtgcacaagggctatgcctttgttcagtactccaatgagcgccatgcccgggcagctgtgctgggagagaatgggcgggtgctggccgggcagaccctggacatcaacatgg

SEQ ID NO: 172207 - DNA, 1817 bp, Artificial Sequence
  derived and/or modified sequence
tctggacctttccaaagccaggctgagagggtggggagagcccatgcgcctgggaagccgggctgtttctgggcggggctgcagactcctcgtgctcgtgtcaccgtgtccttcccaggagacagagaaggaggagagcccggaaccagggccggagcggcgggcggagccgagctgcggggagccgctccgggtgcccccacccccgcgcgcctcagtggtgccggccgagggcagggctcgcggttgcggggctcgcgccgctgtcagtgcggcggggcgcgcgagcggcgccagctcggggcagcggaacccagagaagctgagggggcggtagcggcggcgacggcgacgacgacgactcccgcgcgtgtgcccagcctcttcccgccgcagccgcccttttcctccctcccttacgtccccgagtgcggcagtaccgcctccttcccagccgcgcggcttcctccagacctctcggcgcgggtgagccctattcccagaggcaggtggtgctgaccctgtaacccaaaggaggaaacagctggctaagctcatcattgttactggtgggcaccatgtccttgaagcttcaggcaagcaatgtaaccaacaagaatgaccccaagtccatcaactctcgagtcttcattggaaacctcaacacagctctggtgaagaaatcagatgtggagaccatcttctctaagtatggccgtgtggccggctgttctgtgcacaagggctatgcctttgttcagtactccaatgagcgccatgcccgggcagctgtgctgggagagaatgggcgggtgctggccgggcagaccctggacatcaacatggctggagagcctaagcctgacagacccaaggggctaaagagagcagcatctgccatatacaggctcttcgactaccggggccgtctgtcgcccgtgccagtgcccagggcggtccctgtgaagcgaccccgggtcacagtccctttggtccggcgtgtcaaaactaacgtacctgtcaagctctttgcccgctccacagctgtcaccaccagctcagccaagatcaagttaaagagcagtgagctgcaggccatcaagacggagctgacacagatcaagtccaatatcgatgccctgctgagccgcttggagcagatcgctgcggagcaaaaggccaatccagatggcaagaagaagggtgatggaggtggcgccggcggcggcggcggtggtggtggcagcggtggcggtggcagtggtggtggcggtggcggtggcagcagccggccaccagccccccaagagaacacaacttctgaggcaggcctgccccagggggaagcacggacccgagacgacggcgatgaggaagggctcctgacacacagcgaggaagagctggaacacagccaggacacagacgcggatgatggggccttgcagtaagcagcctgacaggagcaatggccaccagcaggtgaagggcatcgctgccccaggcctcaagccgggcacccaaccctggatgccaccccccagcgggtaccagaggaaagctggcagcaggcgcctcctcccccaacgcatcccagccagtgccatgtcctctgcaggtggagttactggcctactccttccccatgagccctccctgtctgcactgcccaggccagagggtagagcacaggggtttccccatactacctcccctccccaggacactcccaggcttgggttttttctataggtttggcggggggccacagggaggggaccctgacaataaagagattggatcccaacctgttctga

SEQ ID NO: 172208 - DNA, 873 bp, Artificial Sequence
  derived and/or modified sequence
atgagcttgaaactccaagcgtcaaacgtgaccaataagaatgaccccaaatctatcaattcacgcgttttcattgggaatctgaacacagctctggtcaagaaatctgatgtggaaaccatcttctctaaatatgggcgcgtggccggttgctctgtacacaagggctacgcttttgttcagtattcgaacgagcgtcacgcccgtgcggcagtactgggtgagaacggacgagttctagcaggtcaaacactggacatcaatatggcgggagagcctaagcccgatcggcctaaagggttgaagcgggcagctagtgcaatatatcgcctcttcgactaccgtgggcgcctgtccccagtgccagtgccgcgcgccgtgcccgttaagcgaccaagagtgacagtgcctctggttaggagagtcaagaccaatgtcccagtgaagttattcgcccgatcaaccgctgtaactacttctagcgccaaaattaagctcaagtcttctgagttgcaggccattaagacagaattgactcagattaaatcaaatatagacgcattactgtctaggttggagcagatcgcagctgagcagaaagccaatcccgatggcaaaaagaagggcgacgggggcggcgccgggggaggcggaggcggcggcggttctggcggagggggctccggcggcggcggcggcggcggctcctcacgcccccctgcaccccaggaaaataccacatcggaagcaggcctgccacagggagaggcaagaacgcgcgatgacggggatgaggaaggcctcctcacccacagcgaagaagagcttgaacactcccaagataccgatgccgatgacggggcactgcagtag

SEQ ID NO: 172209 - DNA, 270 bp, Artificial Sequence
  derived and/or modified sequence
atgtccctgaagttgcaagcatctaatgtgactaacaagaatgaccccaaaagcattaacagcagggtgttcattggcaacttgaataccgctttggtaaaaaagtctgacgtggagacaatctttagcaagtacggtagggtagcaggctgttctgtgcacaaggggtatgcctttgtccagtacagcaacgaacggcacgcccgggccgccgtgctcggagagaacggaagggtgttagccggacagaccctggatataaatatgtag

SEQ ID NO: 172210 - DNA, 714 bp, Artificial Sequence
  derived and/or modified sequence
atgtctttgaagttgcaagcctcaaacgttacgaataagaatgacccgaaatccatcaacagccgggtctttataggtaacctgaacaccgcactagtgaaaaaaagtgacgtggagaccattttttccaagtacggacgggtcgctggctgctccgtccataagggatacgccttcgtgcagtactctaacgaaagacacgcccgggccgccgttctgggggagaatggtcgtgtcctggccggacagaccttggatattaatatggctggggaaccaaagcctgataggccaaagggcctcaaaagagctgcctcagccatttatcgcctgtttgattacagagggagactgtcccctgtccctgttccaagagccgtgcctgttaagcgacctagagtcaccgtgcccttggtgagacgtgtaaaaactaacgttcctgtaaagttatttgccagatccaccgcagtgaccacttcatccgccaagatcaaattgaagtcctctgagctgcaggccattaagacagagttgacccagattaagagcaacatagatgcattactcagtcggctcgaacagattgccgccgaacaaaaggccaacccagatggcaaaaagaaaggcgacggtggcggcgctgggggtggcggcggcgggggcggatcagggggtggcggaagcggaggtgggggaggtggcgggtctagctag

SEQ ID NO: 172211 - DNA, 873 bp, Artificial Sequence
  derived and/or modified sequence
atgagcctgaagctgcaggccagcaatgtgaccaacaagaatgaccccaagagcatcaacagcagggtcttcatcggcaacctgaacacagccctggtgaagaagagtgatgtggagaccatcttcagcaaatatggccgggtggccggctgcagcgtgcacaagggctacgcctttgtgcagtacagcaatgaaagacatgcccgggctgctgtgctgggagaaaatggccgggtgctggccggccagaccctggacatcaacatggccggggagcccaagccagaccggcccaagggcctgaagagagctgccagcgccatctaccgcctgtttgactaccggggccgcctgagccctgtgcctgtgcccagggctgtgcctgtgaagaggccccgggtgacagtgcccctggtgcggcgggtgaagaccaacgtgcctgtgaagctgtttgcccggagcacagctgtgaccaccagcagcgccaagatcaagctgaagagcagcgagctgcaggccatcaagacagagctgacccagatcaagagcaacattgatgccctgctgagccggctggagcagattgctgctgagcagaaggccaacccagatggcaagaagaagggagatggcggcggggccggcggcggcggcggcggcggcggcagcggcggcggcggcagcggcggcggcggcggcggcggcagcagccggcccccagccccccaggagaacaccaccagcgaggccggcctgccccagggcgaggcccggaccagagatgatggagatgaggagggcctgctgacccacagcgaggaggagctggagcacagccaggacacagatgctgatgatggagccctgcagtag

SEQ ID NO: 172212 - DNA, 270 bp, Artificial Sequence
  derived and/or modified sequence
atgagcctgaagctgcaggccagcaatgtgaccaacaagaatgaccccaagagcatcaacagcagggtcttcatcggcaacctgaacacagccctggtgaagaagagtgatgtggagaccatcttcagcaaatatggccgggtggccggctgcagcgtgcacaagggctacgcctttgtgcagtacagcaatgaaagacatgcccgggctgctgtgctgggagaaaatggccgggtgctggccggccagaccctggacatcaacatgtag

SEQ ID NO: 172213 - DNA, 714 bp, Artificial Sequence
  derived and/or modified sequence
atgagcctgaagctgcaggccagcaatgtgaccaacaagaatgaccccaagagcatcaacagcagggtcttcatcggcaacctgaacacagccctggtgaagaagagtgatgtggagaccatcttcagcaaatatggccgggtggccggctgcagcgtgcacaagggctacgcctttgtgcagtacagcaatgaaagacatgcccgggctgctgtgctgggagaaaatggccgggtgctggccggccagaccctggacatcaacatggccggggagcccaagccagaccggcccaagggcctgaagagagctgccagcgccatctaccgcctgtttgactaccggggccgcctgagccctgtgcctgtgcccagggctgtgcctgtgaagaggccccgggtgacagtgcccctggtgcggcgggtgaagaccaacgtgcctgtgaagctgtttgcccggagcacagctgtgaccaccagcagcgccaagatcaagctgaagagcagcgagctgcaggccatcaagacagagctgacccagatcaagagcaacattgatgccctgctgagccggctggagcagattgctgctgagcagaaggccaacccagatggcaagaagaagggagatggcggcggggccggcggcggcggcggcggcggcggcagcggcggcggcggcagcggcggcggcggcggcggcggcagcagctag

SEQ ID NO: 172214 - DNA, 873 bp, Artificial Sequence
  derived and/or modified sequence
atgagcctgaagctgcaggccagcaacgtgaccaacaagaacgacccgaagtcaatcaattctcgggtgtttataggaaacctcaatacagccctcgttaagaagtcggatgttgagaccatcttttctaagtatggacgcgtagccggttgttctgtccacaaagggtacgcatttgtgcagtatagtaatgagcgccacgcccgcgccgccgtgctgggggagaatggccgggtgctggctggccagacgttggacatcaatatggcaggtgaacctaagccagacaggcccaaaggcctcaagcgagccgccagcgcgatctaccgtttattcgattatcggggacgcctgagccctgtcccagtcccccgagcagtgccggtcaaaaggccacgagtcacagtccccctggtgagaagggtcaagacgaatgtaccagtaaagctgttcgcacggtctacagccgtgacaacatcttcagctaaaattaagctgaagtcctcagagcttcaggcaatcaaaactgaattgacccagattaagtccaacatcgacgctctcttatcgcggctcgagcagatcgccgcagagcaaaaagcaaatcctgacggaaaaaagaaaggtgacggaggcggggccggaggaggcggcggcggcggaggctctggcggcggaggatcaggcggcggcggcggaggtgggagctctcgcccgccggcccctcaggaaaataccacaagcgaagcaggcctgcctcagggcgaagcgcgcacgcgagacgatggcgacgaggaaggacttctgactcatagtgaggaggagctcgagcatagccaggacaccgacgccgacgacggcgcattgcaatag

SEQ ID NO: 172215 - DNA, 270 bp, Artificial Sequence
  derived and/or modified sequence
atgagcctgaagctgcaggccagcaacgtgaccaacaagaacgacccgaaaagcataaattcgcgagtgtttatcgggaacttaaacaccgctctcgtgaagaagagcgacgtggaaactattttttctaaatacggtagggtggcagggtgctctgtgcataaaggctatgctttcgtccagtattccaatgagaggcacgcacgtgctgcggtcctaggagagaacggccgagttttggccggccaaacactcgacatcaacatgtag

SEQ ID NO: 172216 - DNA, 714 bp, Artificial Sequence
  derived and/or modified sequence
atgagcctgaagctgcaggccagcaacgtgaccaacaagaacgacccaaagtccataaattcacgcgtgtttataggtaatctgaatactgcattggtcaagaaatcagatgtggagactatcttctcgaagtacggcagagtggcaggctgctctgtccacaaggggtatgcattcgtgcagtactctaatgagagacatgcacgggccgcagttctgggggaaaacgggcgtgtgttggccgggcagacgctggacattaatatggctggcgagcctaagccagaccggcccaagggattaaagagagccgcttctgcaatttaccgtctttttgattatagaggaaggttaagccctgtgccagtccctcgggcggtgcccgtgaagcgtcctcgggtgacggttcctctggtgagacgagtgaaaacaaatgtccccgttaagctgttcgcgcggtcaaccgccgtgactacatcgtcagctaaaatcaaattaaagagttccgagctgcaagccatcaagacggaactgactcagattaagtcaaacatcgacgcattactgagccgtctggagcagatagcagctgaacagaaagccaatcccgacggcaagaagaagggagacgggggcggagctggcggcggaggcggaggtgggggctctggtggcggaggatctggggggggtggagggggcggatctagctag

SEQ ID NO: 172217 - DNA, 873 bp, Artificial Sequence
  derived and/or modified sequence
atgagcttaaaactgcaggcgtctaacgtgacgaacaaaaatgatcccaagtctattaactcgcgggtgttcatcggcaacttaaatacagctctagttaaaaaatccgatgtcgagaccatcttttccaagtatggcagagttgccggttgctctgtccacaaagggtacgcctttgttcagtattctaatgaacggcatgctagagcagccgtactaggcgaaaacggcagagtgttagcagggcagaccctggatatcaatatggctggggagcctaaacctgaccgcccaaagggcttgaagcgagcagcgagtgcaatctacaggctttttgattatcgcggacggctctcccccgttcccgtgccacgagctgttcctgtgaaacgacctagggtgaccgttccactggtgaggcgagtaaaaactaatgtccccgtaaagctgtttgctcgaagtaccgcggtgactacatccagtgccaaaattaaactgaaatcatccgaacttcaggcaatcaaaacagagttgacccaaatcaagtccaatattgacgcgctattgtctcgtttagagcagattgcggctgaacagaaagcgaacccagatggaaaaaaaaagggggacggtggaggtgccggtggtggcggtggaggaggcggatctggtggcggagggtccggcggaggaggagggggtggaagctctagaccaccagctccacaggaaaacaccacatctgaggccggattgccgcaaggggaggccaggactcgggacgacggtgacgaggaaggtttattgacacactcggaagaggaactggagcatagtcaggataccgacgctgacgatggggctctgcaatag

SEQ ID NO: 172218 - DNA, 270 bp, Artificial Sequence
  derived and/or modified sequence
atgtcactgaaattacaggcgtccaacgtgacaaacaaaaatgaccctaaaagcattaattcccgcgttttcattggtaatctgaacacggcactcgttaagaaaagcgacgtggaaaccatcttctcgaagtacgggagggtggcgggatgctctgtgcataaggggtatgcgttcgtccagtactcaaacgagaggcacgcaagagccgctgtgctgggtgagaatggaagagtgctcgctggccagacccttgacatcaacatgtag

SEQ ID NO: 172219 - DNA, 714 bp, Artificial Sequence
  derived and/or modified sequence
atgagcctcaagctgcaggctagcaatgtcacaaacaagaatgatcccaaatcaatcaattccagagtgtttatcggaaaccttaacacagcactcgtaaaaaagtcagacgttgaaactatcttttccaaatacggtagagtggcaggatgtagcgttcacaaaggttacgccttcgtccagtacagcaacgaacgccatgctcgagccgcagttctaggggaaaacggtagagtcctcgcaggtcagactttggacataaatatggccggtgagccgaaacccgaccgacccaagggtttgaagcgcgcagcttcagcaatttataggctgttcgactatagaggtagattgtcacccgtccccgtccccagagccgtaccggtcaagcggcctagggtcaccgtgcctctcgtgaggagggtcaagacgaatgtacctgtcaagttgtttgctaggtccacagcagttacaacctcttccgccaaaataaagctcaagtcttctgagctgcaggctatcaaaaccgaactgacccagatcaaatctaatatcgatgcgctgctgtctagactggaacagattgccgcagaacaaaaggctaatcctgacgggaagaagaagggtgatggcggaggggcagggggaggcggtggcggtggcggatccggaggagggggatcagggggtgggggaggaggtggatctagctag
